United States Patent Application Publication US 2008/0276334 A1 - sequence listing, part 4

SEQ ID NO: 21082 - DNA, 327 bp, Glycine max
  Clone ID: LIB3049-006-Q1-E1-C3
ggaaaggaagaaacataccgaatgagagcatcaaactctttttcttcgatttccattgccaagcgttactttttcttcgtctttctcttcattttcttcgctcttcgatcgtcgtccggggactgctccgaataccaccaccagcactcgccgatggccaccatctgaggcttacacgactcccaaggctctcaaaacagcgtggaaaccgaagccctcgctcgattcgccgtacacgaacagcacacgaagcagaattcgcttctggagtttgctacggtggttagggcacaggaataggttgttgctggtactctgcatcagctt

SEQ ID NO: 21083 - DNA, 411 bp, Glycine max
  Clone ID: LIB3049-006-Q1-E1-C4
ggggcgaggtagccagagagtgatacaatacagagtgcgttgttgctccttcgccacaactccctgccaacatgggtatctccagagattctatgcacaagaggcgtgccactggtggcaagaagaaggcatggaggaagaagagaaagtatgagcttggtcgccagcctgctaacactaagctgtcaagcaacaagacagtcaggaggatccgggttagaggtggaaatgtgaagtggagggcactgagattggatactggaaattactcctggggaagtgaagctgtaactcgcaagactcgtatactagatgtggtttacaatgcctcaaacaacgagcttgtgcgtactcagactcctgtaaaaagtgctattgttcaggttgatgctgctccattcaaacagtggt

SEQ ID NO: 21084 - DNA, 413 bp, Glycine max
  unsure (1)..(413): unsure at all n locations
  Clone ID: LIB3049-006-Q1-E1-C5
ggagggaaagcgttcttcaatttcagagttcgggcttcatttcagactcagagtaacactacagtacagagtacaaacatcaaacaccttctctgcacgcaaaaaccagaatcgaagatgcagagatttaaagctctgctacctcaacaaactaggtcctcacttcgcactttctgttctcaccgtcgagctttctccgctcaaccaaattactcagagcaccacgacgacgattctcaggaacagattttggtcgaaggaagagcgaaatcgcgagcagccattctcaacaggccgtcttcgctgaactcgctcaatgcttcaatggttgctcggttgaagaggctgtatgattcctgggaagagaactctgatattggctttgttctgatgaagggtantggcagagcttt

SEQ ID NO: 21085 - DNA, 390 bp, Glycine max
  Clone ID: LIB3049-006-Q1-E1-C6
gaagattaaggccattatatataatattttgtttacagcttcctgaatcagtgacaagcatgctagttccctttatgctgtccaaaaacatgtcattttccccccccttggtctgacagaagatttttcggtgaatgagattctagcatggaaagaaggaattagaaaagcctcaagtgaagtgtacttgcatcttgttcttggaaaatttcagttgaatatggggactccaagaggaatagctcttctcagtttcacatccttcttgttttggagctcagcgaatgctttgctttctcctaagggagtgaactttgaagtgcaagctttaatgggcataaaatattctctagaggattcacatggtgttctagataattgggatgggga

SEQ ID NO: 21086 - DNA, 395 bp, Glycine max
  Clone ID: LIB3049-006-Q1-E1-C8
gaaaaaagagtaaggattccagatcgatgaaattgttcaaagtttccattgcgaattttgtaaaggaggttttgaaaccatcatggcggcaaggtaatatgagtaaggtggctttcaaaaccattgtgaaaaagactgtggataaagtgtcaggagccatgaaaggccaccgtgtacccaagtcccaagtgaagataagtcaatatattgattcatcacagcgaaagttgactaaacttgtgatgggttatgttgacaagtatgtcaaggtatgaaagtgaagtatgcaaatgtttctccaacattaaatgtcaatataggtgcatcatttcaacaggaaacgtcaatgcttacttctctggagttgtctcctctcagttgaaggcgtactacgt

SEQ ID NO: 21087 - DNA, 340 bp, Glycine max
  Clone ID: LIB3049-006-Q1-E1-C9
gactcctccctctctctaactttcacacgcagcgaggtagcgtcttcttcttccgtttctctgcatcggtgtgaacaatggctacatacgctgcgatgaagcccacaaagcccgggttggaggagtcccaagaacagatccacaagataaggatcaccctttcctccaagcacgtcaaaaacctcgagaaggtttgtgcggatttggttcgcggtgcaacggataagagactcagggtgaagggacctgttaggatgcccactaaggttcttcacatcactaccaggaaatcaccctgtggtgaaggtaccaacacatgggacagatttgaacttaaggt

SEQ ID NO: 21088 - DNA, 227 bp, Glycine max
  unsure (1)..(227): unsure at all n locations
  Clone ID: LIB3049-006-Q1-E1-D1
gctaaaagtacttggaagatgttctgccacaagangcaattcattcagacgttttgtcangtgttggangacagcccaggctaagaatagacactctaatggccaangacngtggcctgtcaagtcagcaaaattcattcttgattttctcaaaaatgctgagagcaatgctgaagtgaaaggtttggatgttgatgcactgtacatttcgcatatccaagtcaatc

SEQ ID NO: 21089 - DNA, 317 bp, Glycine max
  Clone ID: LIB3049-006-Q1-E1-D10
ggtatgaattgggttgggtactatattactactctagtgcctgcaatttctctctaaaaccctaaacctcattctcctgatttctgttacattgagtttaggaaacaaaaaacaacacagtcaattggcaaatgtctaactctaacccgttacccctcaagagacaaggagaacaatcgtccgatgatggcgcctctgccattaaaccttctcgcctcaaaatcgcaataccctctgaggattccgacaagaagaatgcgaacaggaggctcaaagatgttgaaatctgtgtcccaatagtgtatgggaccattgca

SEQ ID NO: 21090 - DNA, 328 bp, Glycine max
  Clone ID: LIB3049-006-Q1-E1-D11
gatggcttgcttgggttaaaatatttagaaccctaagccactcaccgatagagaagccgccgccaccttcactagtcaccgtcgccgccgccgccgccttcaccagtcaccgtcgcattcctctttcagcaaaaccccttcttctcactcacactctcacacccatattctcaaacacacaaaataacaaacacaacacagcaccaacctcggtgataacaattcaaagaaacacagaaatacgcagacacgaacaatggctggtcgattccgtgagctgatgaagaaatatggaaaagtcgcactcggcgttcacttgagcgtctcc

SEQ ID NO: 21091 - DNA, 330 bp, Glycine max
  Clone ID: LIB3049-006-Q1-E1-D12
gcagacaccaaaactaaaatgaggttcagattcctttaccccatcagatcttcgagactttgccaaatctcaggctgattacgtattgggcaagaatcctatgcatatgagttttctggtgggctatggagataaataccctcaatttgtgcatcataggggtgcttcaattcctgctgatgcaaaaactggctgcaaggatggcttccagtggcttgagtcatctgatcctaatcccaatgtagctactggagcacttgttggtggacccttcttaaatgagactttcattgattccaggaacaattccatgcaaacagaaccaagcac

SEQ ID NO: 21092 - DNA, 415 bp, Glycine max
  unsure (1)..(415): unsure at all n locations
  Clone ID: LIB3049-006-Q1-E1-D2
ggagtgagcaagagtgaagagcgaagagaatggctcccaagggtttaatctttttggctgtgttatgcttctcagcactgtcactgagtcgttgtcttgcggaggataatggacttgttatgaacttctacaaggaatcatgccctcaggctgaagacatcatcaaagaacaagtcaagcttctctacaagcgccacaagaacactgctttctcctggctcagaaacatcttccatgactgtgctgttcagagttgtgatgcttcactgttgctggactccacaagaaggagcttgtctgagaaggaaacagatagaagctttgggttgagaaatttcaggtacattgagaccatcaaagaagctttggaaagggaaatgccangagttgtttcctgtgctgatatcctcgttct

SEQ ID NO: 21093 - DNA, 416 bp, Glycine max
  Clone ID: LIB3049-006-Q1-E1-D3
gacaccacactactatgagttcaccgctactccctgttgccacctcctccgacgcccacgcgccaaacccgcgcgtgctgccactttatgacatctttagttttctcagcaccacaatcagcagcggcatcataacctacctcgcctacaccaaaaacgacaccccaatgctcctcttcgccgccttcatctacgtcgtttacttctccgtcgacttctccccaccaccacaacaacccaaggcgcgtgggctccacgccgtgaaactcgcgtcgtgggcgttgctgagttccacgatgttgggattcgcgtgttcgttctcgacctctttaacgccgccggagtcgctgtgcttcttctgggtggtgctcggtggcagcgcgttgctacacggcgcgtggatgggggacgagaac

SEQ ID NO: 21094 - DNA, 350 bp, Glycine max
  unsure (1)..(350): unsure at all n locations
  Clone ID: LIB3049-006-Q1-E1-D4
caagctccagaagcgtcttctcagaagaaaatgggaagagggaagattgaaatcaaacggatcgagaacaccaccaataggcaagtcaccttctgcaagcgccgcaacggtttgctgaaaaaagcttatgaattatcagttctgtgtgatgctgaagttgcccttgttgtcttctcaacccgtggccgtttgtatgagtatgccaacaacagtgttagggccactattgagaggtacaagaaggcaaatgctgctgcttcaaacgcagaatccgtatctgaagctaacacacagttttaccagcaagagtcatccanattgagaagacaaattcgagatattcagaatct

SEQ ID NO: 21095 - DNA, 406 bp, Glycine max
  Clone ID: LIB3049-006-Q1-E1-D5
gagaagcatggtaacttcaccaccagccatgcccaccaagggtcgtgttctcatcatcggagcaacaggtttcataggcaaatttgtggccgaggaaagcctcatctcagcacaccccacttatttgcttgttcggccaggacctcttaacccttccaaggatgccattgttaaaaacttccaagacaaaggtgccattgtcattcacggtgtgataaataacaaggactttgtggaaaagattttgaaagagtatgaaatagacattgtcatttctgctattggggccaagagcttgctggatcagcttatacttgttgaggccatgaaatcggttaagactattaagaggtttttgccttcagagtttgggcatgatgtgtacaaagcagattctgtggagcca

SEQ ID NO: 21096 - DNA, 409 bp, Glycine max
  unsure (1)..(409): unsure at all n locations
  Clone ID: LIB3049-006-Q1-E1-D7
gggtgacaaagttagaaacaaggagaaagaaagaagatggcaggaaagaaaatcccagatgtgttgctgaattcaggacacaaaatgccagttataggcatgggaacttcagtggaggatcgtccatcaaatgagacccttgcttctatctatgttgaagccattgaggtgggttaccgtcattttgacactgctgcagtgtatggaacagaggaagccataggcctagccgtggccaaagccatagacaaaggccttataaagagtagagatgaagttttcatcacttcaaagccttggaacacagatgcacaccgtgaccttattgtcccagctcttaagnacacattaaagaagctggggacggagtatgtggatctttatctgattcattggccagtgaggctga

SEQ ID NO: 21097 - DNA, 403 bp, Glycine max
  unsure (1)..(403): unsure at all n locations
  Clone ID: LIB3049-006-Q1-E1-D8
gaacaacaaagatcaccaacactttgctggtgccattctttctgacctctcttccaaaaacacttcctccacccaccttaaaaaaacagaggacagccatgagtcgcagaaacgaaagtggtccaaagcttgacttgaagctgaacctgtccccaccgagggctgatcggagactggattcgccgacacgatcggcgacggcgtctccgacgtcaccgccgagctcgtgcgtgtcttcggagctgaaccaagaggacaagagttactctaacagccctgaagccacttccatggttcttgtgggttgccctcgctgcctcatgtatgtgatgctctctgaggatgatccanagtgccccaaatgcaaaagcaccgttttgcttgatttcctcaatgacacaaa

SEQ ID NO: 21098 - DNA, 336 bp, Glycine max
  Clone ID: LIB3049-006-Q1-E1-D9
gatgtgatagaacgctcaaacgggaatgtatattttagtgttgttagtacaaaatttgatcttcaagattggtatttggatgtgttagaggcaagacctcgtggacaagttctcaagtacaatcccacatcaaatgagactgttattgttcttgataatgttgcatttgccaacggcgttgcactctctaaggacgaagattatcttgtggtttgtgaaacttggaaatacaggtgtttgaggcattggttagaaggagcaaacaaaggcacaacagatattttcattgaaaaccttcctggtgcacctgataatatcaatcttgctcccgatgga

SEQ ID NO: 21099 - DNA, 327 bp, Glycine max
  Clone ID: LIB3049-006-Q1-E1-E10
gctagccctcttctttctttctctctctctctctctctctctctgaagatggcttcacgcaggctcgtatcttctctgattcgatcctcccttcgtagatctcaatcgaagccctcaatttccgcatcgacatcgaggctcacgtcatccaaccgtgcctcaccgcacggatacttgctgaaccgcgtcgccgagtacgccaccgccgcggctgctgctaccactcctccctctcctcctcctccggggaagaaggagctcggcggcggcgggaagatcaccgatgaattcaccgggaagggcgcgatcgggcaggtctgccaagtc

SEQ ID NO: 21100 - DNA, 321 bp, Glycine max
  Clone ID: LIB3049-006-Q1-E1-E11
gctagtggaagagtgaataagagatatcaatatattatgataatggagggatacaataagaaggttatgattgtggggatggtgttgggcatggccatgattgggatggccaatggccaatactcgttttgtcgcatgcccagcgatgggttggcggcatgcaagccgagtgtgagtggggactatcctgctgatccctccactgcttgttgctcagccattgccaaggctgatcttaaatgcttctgccgcttcaaggattcgggccttctctctatgtatggtgttgatcccaacaagtgcatggaactccctgttaag

SEQ ID NO: 21101 - DNA, 355 bp, Glycine max
  Clone ID: LIB3049-006-Q1-E1-E12
ggactgttcgaatgttggaatcaaagcaggagagaagatggaaaacagtgaggaacaaaagtacagagtccggagattagagatctcagacaagggaaaaggcttcatcgagttactgcagcaactcagcgtatgcgattccgtctccgacaaggaattcgaggatcgattccgagacctcagtgttctcggcgacgagcacgtgatcggcgtgatcgaagacgaggcttccggaaagatcattgcgacggggagcgtgtttatcgagaagaagtttttgaggaattgcggcaaagttgggcacattgaggatgttgttgtggattctagcatacgcgggaagcatttggggaag

SEQ ID NO: 21102 - DNA, 317 bp, Glycine max
  Clone ID: LIB3049-006-Q1-E1-E2
gacgagtggggagagtttgtaaattgcgacttccaatggcgagttgcgaataaagcgaagatagaaaaagtgcggcaaaggatgcgtgtgcttgcttcattgtttgcgttgtgaagtaggtgatcgaagtcgttgaatgctatattcgtttacgaaatgaaggaggacgcggagaaagataaaggcaaagacaacaataggatttggggagctattctcttcggcttaattggcgccaccgtcactacctttgcggtcggtcagctgcggaggagtgttgaatggttctatactcagtcatcctggaaaggagagag

SEQ ID NO: 21103 - DNA, 395 bp, Glycine max
  Clone ID: LIB3049-006-Q1-E1-E3
gggcaatggcaatggcaatggcacttggcaggctttcatcttccttcaacaagcctttacgtcctctcttcaatgctggctcagtttactacaagtcctctttgcctgctgaagctgcgtacgacaatgagaaaagctgtgatacggaattgaatgctccacttgaggttgttgatcctgagattgctgatataattgagcttgaaaaagctggacaatggaagggactggaactgataccctccgagaatttcacttctgtctctgtaatgcaagctattggctctatcattactaacactcggaatgaaggatatcccggtgcaagatattatgggggaaatgagtatattgacatggcagaaacactatgtcaaaaacgtgccttggaagca

SEQ ID NO: 21104 - DNA, 159 bp, Glycine max
  Clone ID: LIB3049-006-Q1-E1-E4
ggtgctaatcttaccttatccctctaatcagtctagctgttgcaaatttcaacaatttttcaatggcttccgcaaatgttgatttccttggctttgttggtgggcttccttgggccaccggaaacaatccccccaaaaaacccttttaaaccaagggga

SEQ ID NO: 21105 - DNA, 401 bp, Glycine max
  Clone ID: LIB3049-006-Q1-E1-E5
gactaaagagcagctgcagacaaacaagctggtgagatccatggaagatataggtccgaattcatgcacaaggccagtgacagagaagaaagcaagaccccaagaacaattgaattgtccaaggtgcagttcaaccaacacaaagttctgttattacaacaactacagcctcacacagccaagatacttctgcaagacttgtagaaggtattggacagaaggagggtctctgagaaacgttcccgttggaggtggctctaggaaaaacaagagggtcacctcatcaaaggttcctgacttgaatccaccaattagcctctcatcagtctcagccatttcttcccaaaaccctaaaatgcaaggagtccaatgacttaatccggcttttcctgcagctatgg

SEQ ID NO: 21106 - DNA, 363 bp, Glycine max
  Clone ID: LIB3049-006-Q1-E1-E6
gatcatttgtaagagaagggaaaagcgggaaaagagaaaaaacagagggttttgtttctcttttgcagttgcactcttgcgttgcaggcaggggcatctgtttcccgttctgctccgagcgatcaagtgagtgagtgagtgagtgtcatatatatatacatagtgcgttcgagaaatgcagcagcacctgatgcagatgcagcccatgatggctgcctactaccccaacaacgtcaccactgatcacattcaacagtacctggatgagaacaagtccttgattctgaagattgttgaaagccagaattctggcaagctgagcgagtgtgcccgagaacaatcaaggctgcagagaaatctcat

SEQ ID NO: 21107 - DNA, 410 bp, Glycine max
  unsure (1)..(410): unsure at all n locations
  Clone ID: LIB3049-006-Q1-E1-E7
ggggcgaggtagccagagagtgatacaatacagagtgcgttgttgctccttcgccacaactccctgccaacatgggtatctccagagattctatgcacaagaggcgtgccactggtggcaagaagaaggcatggaggaagaagagaaagtatgagcttggtcgccagcctgctaacactaagctgtcaagcaacaagacagtcaggaggatccgggttagaggtggaaatgtgaagtggagggcactgagattggatactggaaattactcctggggaagtgaagctgtaactcgcaagactcgtatactagatgtggtttacaatgcctcaaacaacgagcttgtgcgtactcagactcttgtaaaaagtgctattgttcaggttgatgctgctccattcanacagtgg

SEQ ID NO: 21108 - DNA, 341 bp, Glycine max
  Clone ID: LIB3049-006-Q1-E1-E8
gaaaaagtgttggaagagagaaggaaggccttccaagcactcaagactgaagagagaaaggtggacactaaagagtttgaatccatgcaggccttatcaagcaagaaagacaatcatgacatattcattaaactgggatctgataaagataagcgaaaagaggcttttgagaaggaagaaaaatccaagaagtctgtgagcatcaccgagtttctgaagcctgctgagggggaagcatactataacccaggacgtggtaagggccgtggccgtggttcacgaagcggaggcggttaccatggaagtgccaccaacaatgcacctgctccatccattgaaga

SEQ ID NO: 21109 - DNA, 347 bp, Glycine max
  Clone ID: LIB3049-006-Q1-E1-E9
acatggtggctcaggtgttgggggccataagtggggtggggcttgtgaaggctttgcagaagagctactacaacaggtacaaaggtggcgtgaacatgctcgctgatggttacagcaaaggaaccggtttgggcgctgagattattggcacctttattcttgtctacaccgtcttctctgctaccgatcccaagagagtagcaagagactcccatgttcccgtgttggcaccacttccaattgggtttgcggtgttcatggttcacttggccaccatccctatcaccggcactggcatcaacccagctagaagccttgggcctgctgtcatattcaacaacgaaaaa

SEQ ID NO: 21110 - DNA, 54 bp, Glycine max
  unsure (1)..(54): unsure at all n locations
  Clone ID: LIB3049-006-Q1-E1-F1
aaggacanannnnaaaaannnnnnnnaaaaaaaaaaaagcgggccgctccaaga

SEQ ID NO: 21111 - DNA, 349 bp, Glycine max
  Clone ID: LIB3049-006-Q1-E1-F10
caagagtgttgagaagaaagaccccaccggagccaaggtcaccaaggccgctgccaagaagaagtgattgcatttgggcaattttgctagcacatgtgatcatcatcgtggttactcctttatagtagttttatccttgcagagtcttaggtgttttgtttaagttatatttttaagtttctgccgatttcatgtagccgtaactttcaaaactaggttcttgatcggcggtggtcaattttcattgctgtttgtttttgatgagtactgttttttgttttgatggtaagaagagtctgagatatttcgaatttcacaagcagctatagggttttagtccatttccttt

SEQ ID NO: 21112 - DNA, 325 bp, Glycine max
  Clone ID: LIB3049-006-Q1-E1-F11
ggacacggatttgcatcagattattaagtcttctcaagctttgtctaatgatcactgccagtatttcctccttcagttgctccgtggcttgaaatatcttcactcagctaacatccttcatcgtgacttgaaacctgggaatcttctaattaatgcaaattgtgacctaaaaatatgcgattttgggttagcacgtactaactgcagcaagaaccagttcatgaccgagtatgttgtcactcggtggtatagggcaccagagctcctactctgctgtgacaactatgggacatctattgatgtttggtcagttggatgcatcttt

SEQ ID NO: 21113 - DNA, 154 bp, Glycine max
  Clone ID: LIB3049-006-Q1-E1-F12
ggacagtgtttaggatcacattattacatcctcgcacgcgttgtcgaatgatgattgccagtatatcctcctgcaattgcgcattggggtcaggtatcttcgactcagcgagcaaccgggatcgctccttgtatcctggtaattctccaacata

SEQ ID NO: 21114 - DNA, 390 bp, Glycine max
  unsure (1)..(390): unsure at all n locations
  Clone ID: LIB3049-006-Q1-E1-F2
gatactcaattcattttcttcttctgcttcaccttctcttctcttctctcatanggttagggtttttttctcttcattgctctctctgtcgttttatttccatggctcagcaagatgctcagaatggtgggtcggagaatgccgctgctgcggtgtcgtttgtcgctttgaagccgcagctcctcatcgaagctcccaaagcgaacgacgccgttctgttctacaaggccgcgtttgccgctgaggaggttggccgtacgctcaaccctaagcgtaaagcggagcacgagcttcctctcatactctccgcagagctcaaaatcgctggctcctacattctcgttgctgacctcgttgatgaccctgcttcaacagcgaatgccggaggaa

SEQ ID NO: 21115 - DNA, 372 bp, Glycine max
  unsure (1)..(372): unsure at all n locations
  Clone ID: LIB3049-006-Q1-E1-F3
gacagaacaatactgcaatagagaaagaggcagatagaaaaaaagagcgacttttgagttcaaaagatgactaacttcccattgatcaacttggagaagctcagtggtgaggaaagaaacgataccatggaaaaaattaaagatgcttgtgaaaactggggattctttgagctggtgaatcatggcattcctcatgacatattggacactgtggagaggttgaccaaagagcactacaggaaatgcatggaagagaggttcaaagaattagtggcaagcaaaggtctagatgctgtccaaactgaggtcaaggatatggactgggagagcancttccacttgcgtcnactccctgaatcaaacatctcagag

SEQ ID NO: 21116 - DNA, 410 bp, Glycine max
  unsure (1)..(410): unsure at all n locations
  Clone ID: LIB3049-006-Q1-E1-F4
gacacttgattagctgaggaggaagagagaaaaaccatggcaataacactcaacaatggcttcaagatgcctatcattggattgggcgtgtggcgcatggaaggaaacgaaatcagggacctaattctcaattccatcaaaattggttatcgccattttgattgtgctgctgactacaaaaacgaagcagaagttggagatgcgcttaaggaggcttttgataggggccttgtgaagagagaggatctcttcattaccaccaagctttggaattctgatcaaggccacgttcttgaggcgtgtaaagacagtctcaagaagcttcagttaacgtatctagatttatatcttgttcactttcctgttgccgtaaggcatactngggttggtaatacttctagtcctttggg

SEQ ID NO: 21117 - DNA, 391 bp, Glycine max
  Clone ID: LIB3049-006-Q1-E1-F5
gaccgcacagaattagggttttccaattcacagagcaacacaacgaaccaacaatggcgcagcctcagccgcagtcccaaccgcagcaagggcaagcaacgctggaacaaggggaattcctccggccccagaagaacgccgttggcgttaactaacggaagccccggccccggcccaaccagaataacggctgccccattgagctcgtggagccggagatcctccgcttcaaagccttcgagcctatcctcctgttgggtaagagccgcttcgccggcgtcgacatgcgcatccgcgtcaagggtggcggccacacctcccagatctacgccatccgccagagcatcgccaaggcgctcgtcgcgttctaccagaagtatgtccacgaaca

SEQ ID NO: 21118 - DNA, 351 bp, Glycine max
  Clone ID: LIB3049-006-Q1-E1-F6
tccgtccacttattggtgatattgttgttgcattggaatacctagcttctcatagtaatccctgaagtccatagacatggtggtgcagctcaccacaacaacctccttttgaaatggacataaattaatatttacaggtatctgattctagcttgagctcccatttctgtatgattctgggtaatgatttccttaccggtttggtcagtgtaagctaccaacttggctatttaaagtgtcatatgttattgctttaattaacttattgccacagcagtagtgaagataaacttcttgatatagcactagtaaacatgtggattgatttaattgcaatggatgagtttatgc

SEQ ID NO: 21119 - DNA, 408 bp, Glycine max
  Clone ID: LIB3049-006-Q1-E1-F7
gaagcttgaacatgatagacatgatacctttttcagaagcctaatatttctctttgctgtgtcgctgcattacattacgatatatatttagtgcaaaagacatagctattaacagttcgctttcgctctctgtagatttggtttttgtgtgatagcttcatagttatttcactctccagatcatgccttcaggtgctaggaagagaaaagctgccaaaaaaaataaggcaaagaaaaacagcatcaacccatcaaccaacaagcccaaaggaaatggtgatttgaagtcgcgggatgagaaaggaagtgatggtggtgagggtaattctcctgcatttcgtgaacatggtgaccatcgtaatccattcaatgatgggagtgaagatctggaagagagagggcatcagc

SEQ ID NO: 21120 - DNA, 323 bp, Glycine max
  Clone ID: LIB3049-006-Q1-E1-F9
ggaggagactgagaaaacagaagaaaacaaaatggaagacacagtttctgcgttgaggtctttgatggtttctcactctccgccgctggatgccttagtggtgccctctgaagattatcacctgagcgaatatgtgtctgcacgagacaagcgccgcgaattcgtttccggcttcactggaagtgccggcttggcacttataacaaagaaagaagcactgctgtggacggatggacggtattttttgcaggctgagaaagaacttagtgctgggtggaagctaatgcgaattggtgaagatcctgctgtagatatctggatgg

SEQ ID NO: 21121 - DNA, 403 bp, Glycine max
  Clone ID: LIB3049-006-Q1-E1-G1
gacactgcacacatctcaagcaggcagagagaaaggcaaagtggaccgacttgcgtgtttcagttgataggcacaccacaacacaacacacagatctcttctttaacgtttacttttggtgtctgagaagaaagaaaaaagaaaataaaaatagagtagaggctctctaatcagtgagcgatcggagagtttggtttcatccttgctgtgctgctcagatggattacaacaataatgaccatggtgctagggagccatgggactggcaaggaaagaaatatagtctcagaaggacttttgattttgaaatttcagaagagctgtggaatgatgtccctcaaaatgaagaagatctttcatacatgttagatgatgaaacaactccagttaaggcttgtggtga

SEQ ID NO: 21122 - DNA, 364 bp, Glycine max
  Clone ID: LIB3049-006-Q1-E1-G10
ggtagggtttcgagttacagccgcaccttgattcagagcagagcgaccttgaagagctatggctgtcggaaagaataagaggatttccaagggaaagaagggtggcaagaagaaagccgctgatccctttgccaagaaggactggtacgatatcaaggccccttccgtctttcaggtcaagaatgttggcaaaaccctcgtctctcgtacccagggaaccaagattgcttctgaaggactcaaacatagagtgtttgaggtctcattggctgatctccaaggagatgaagaccatgccttcaagaagattcgtttgagagctgaggatgttcaagggaaaaatgttctgacaaacttttgggga

SEQ ID NO: 21123 - DNA, 380 bp, Glycine max
  Clone ID: LIB3049-006-Q1-E1-G11
ggggaggagagtcacaactaccagtccttgctttgcatcgtgtgagtttgggagaggaaggaagctactcggaaagttattccttcctcagcaaaaaaaaaaccattcctttataaccataaagcgccttctttaattttcttcaccaccactccattactctctccacgcaccccctactacctttgttttgagtttgaggaatataagaaaaatgaaaatgggtaaaggaattgtttttattgttgctctggtggccatttgccttggtgggaaatgggtggaagcgcaggtgcatcatgttgtcggaacagaccgtggttgggattaaacctccgaactccttttctgggccggaaaccaaagtcttcagggttgga

SEQ ID NO: 21124 - DNA, 366 bp, Glycine max
  Clone ID: LIB3049-006-Q1-E1-G12
gaagaaaaggtaagggaaggttccgagaaagaaaaatccaagacttcggttagcggggagcgcccctgtcctcttttctccccccctttcttattagttagaagccgaacctagtctttgtttgtgtgagttgtagcggatcacgtggctcgatggaggttcctcagcgtcttttgtttgaatgactaccgcgtgccattttacctcagtcattttgtcctacttgctttttttcgaatatcctataacgtaccatctaggtctcgtcttgtaagcccggaagggaagatgaaagtgctccttcttcttcttactcccgcccgatcagggagaatgactcttttaaatataagattcgaccaataa

SEQ ID NO: 21125 - DNA, 396 bp, Glycine max
  Clone ID: LIB3049-006-Q1-E1-G2
catctttttcaaggaacattgattaacgatgattactttgtttcatacattatgcatcattcagttcagaaaatgtgaatattttcatgccaaattgagtagaatctgctatggtgtctgccttgggtgctgcggtgaaccttgaccacggagttgaaacaatcttttacaagctgaagaattagttcagataaagttgaggttactttagagatagtcgaagattgcaacagagtgaacggcaccttaatgtcgggattttgcccttaaatgttgtagtgtagttaatccgatactgtaatgttttactgagttacatatacttttttccataaatgatacagaatagatattttatattaatacacagttctctccgcgtttgcccttttcaaa

SEQ ID NO: 21126 - DNA, 413 bp, Glycine max
  Clone ID: LIB3049-006-Q1-E1-G3
ggggtctagcagtagcagcaaggacgcccaagaccttttccgcgctctttggtctgcttatgcttcaaccccaacaaatctcaagatcattgacctctacgtaatctatgccgtcttcaccgctctcatccaggttgtttacatggctttggtgggatcatttccatttaactccttcctatcaggagtactttcttgtgtaggaactgctgttcttgctgtctgtctcaggatccaagtgaataaagataacaaggaattcaaggatcttgcacctgagcgtgcttttgcggattttgttctctgtaatttggtgcttcatttggtgatcatgaacttccttggttaaattggttcgtgtggctgttgttgttttcgattgaacccttgaataataaaaattagtagtatac

SEQ ID NO: 21127 - DNA, 394 bp, Glycine max
  unsure (1)..(394): unsure at all n locations
  Clone ID: LIB3049-006-Q1-E1-G4
gttcgctgtctcgtcaatcgccgcgggaattcaattcgggtgggccctacagctctctcttctgacaccgtacgtccagaccctcggcgtccctcacgcatgggcgtcgttcatttggctctgcggcccaatctctgggctgcttgtgcagcccattgtagggtacagcagcgaccgatgcagatcccgctttggtcgccgccgtcccttcatcttcgtcggagccatcgccgtcgcaattgctgtgttcctcatcggctatgcagccgatataggacacgcggcgggtgatgacctcacgaagaagacccgtccacgcgcggtggtggtttttgtggtcggcttctggattctggacgtggccaacaacttgctccagggtcnatgccgcgcc

SEQ ID NO: 21128 - DNA, 401 bp, Glycine max
  unsure (1)..(401): unsure at all n locations
  Clone ID: LIB3049-006-Q1-E1-G5
ggaagctgttgttgacaaaatctctagccatcagaaggaggatgaggtgataagtggaggcactgttgatatggaggatgaacttgtgggtaaggatcgctatataggatccattgagagcctcataaggaacaatattcaacaatataagatagatatggctgatgaggttattaatgctggacgttttgatcaaaggacaacacatgaagagagacgtttgaccttaaagacattgttacatgatgaagaaaggtatcaagataatgtccatgatgttccttctcttcaggaggtaaatcgcatgattgctangagtgaagaagaatttgaattgttcgatcaaatggatgaagaactggattggcctgaggacgtgatgcaacatgatgatgtgcctg

SEQ ID NO: 21129 - DNA, 352 bp, Glycine max
  Clone ID: LIB3049-006-Q1-E1-G6
ggtggtgatgggtgggtgagtccgaattgtgaaagtaagcaaagatggctttcacggaatcgtctctcctccttccttcggtttcaggaaccaagatgaacaagaacaatgttccagaagacaaatggtatttagcctacattgtgtattttaccctgggtctcggttaccttctcccatggaacgctttcatcaccgccgttgattacttctcctttctctaccctgacgccagcgttgaccgcatcttcgccgtggtttacatgatattcaggctggtggggatctccctcataatcctctacagccacaaatctgacgcctatgtgaggatcaacgttggattgggcct

SEQ ID NO: 21130 - DNA, 409 bp, Glycine max
  Clone ID: LIB3049-006-Q1-E1-G7
gacaatgaagtgacataaccttctatgcttgaagacggtggattagaacctcaacaagagaaagagactcgtcagagaatatgatccttgcggtgctgtttgccaacgctgagggcaatatcctcatcgaacgttttcatggagttcctgcagaggagcgtctgcactggcgttcattcttagtcaaactaggagctgataatcttaagggtgtcaaaaacgaagagctcctagttgcttgccacaaatcggtttatattgtatacacagtgcttggcgatgtcagcatctatgtcgtgggcaaggatgagtatgacgaacttgccttgtccgaagtgatctttgtgataacctcagctgtgaaggatgtatgtgggaagcccccaagtgagcgccttttccttgacaa

SEQ ID NO: 21131 - DNA, 399 bp, Glycine max
  Clone ID: LIB3049-006-Q1-E1-G8
gatcgcatttcatagcactcaccctcattaccaacacgaaagcatagccaaaaccttttttcgaagtctctgattttcctaatggctccggcaaaggcagagaagaagccggcggagaagaagccagcggcggagaaggcaccggcggggaagaagccgaaggcggagaagaagatctcgaaggaaggagggagcgagaagaagaagaagcgcacgaagaagagcgtggagacctacaagatctacatcttcaaggtcctcaagcaggttcaccccgacattggtatttccagcaaggccatgggcatcatgaacagcttcatcaacgacatcttcgagaagctcgcccaggaagcgtcgcgtttggctcgctacaacaagaagccaccatcacctcga

SEQ ID NO: 21132 - DNA, 307 bp, Glycine max
  Clone ID: LIB3049-006-Q1-E1-G9
ggaagatattacggtttttgagtgcggtgcggcgatcctagcactctcttctgcagctttcgccgacagcttcattcaccatggctgagcaaaccgagaaggcttttttgaaacaaccaaaagtgtttctcagctcgaagaaaactgggaagggaaagagacccggaaagggtgggaaccgcttttggaaatccattgggcttggatttaagactcccagggaagccatcgaaggaacctacattgacaagaagtgccccttcactggcaatgtttccatccgtggccgtatcttggctggaacatg

SEQ ID NO: 21133 - DNA, 324 bp, Glycine max
  Clone ID: LIB3049-006-Q1-E1-H11
gggcagcggatgagccagcatttgcttctattacaattacaaaagctaatcatctccgttttcttcatcttccccaaaccctcgccgcaaaggccaaatacccaacctctgatacatacttcccaacttcaacacaccacacaataataacggaacggaaccccttcctccgtctacaccttctttccctttgatcccacactcctatgcccaaaagggttagcgctaacaacagagaaggaaaataaaattcgcgccaacattgagcggaataaatagtggtttttgagggttttccctcgggagtgattggaagtgcaacag

SEQ ID NO: 21134 - DNA, 344 bp, Glycine max
  Clone ID: LIB3049-006-Q1-E1-H12
gacaccaaacgagccatttgggagttaggttctgcacgctctgcttccagcgagtgttctttcttcgtttcaacaccttaatttgcacacgctgcttcttcagcttgagaaatggcacaagaaacctttctattcacatctgaatctgtaaacgagggtcaccccgacaagctgtgcgaccagatctctgatgcagtgctcgatgcgtgccttgaacaggaccctgacagcaaggttgcctgtgagacatgcaccaagaccaacatggtcatggtctttggagagatcacaaccaaggccaacgtagactatgagaagattgtccgtgacacatgccgcgaaat

SEQ ID NO: 21135 - DNA, 330 bp, Glycine max
  Clone ID: LIB3049-006-Q1-E1-H2
ggagctagataaggtcacatatatgaacaacatgttcggtcaatatcctttgttttcactggcttctctagccacattccttgtcttaacccacgccgccaccgcgccggagaatcctcctcctccgctcacagccgcggcgagggagttcttggaggcgcacaaccaggcaagagccgaagtgggcgtggaagcactcagctggagcgagaagctggggaacgtgtcgagtctgatggtccgttaccagcggaacaagaaggggtgcgagttcgcgaacttaacggcgagcaggtacggcgggaaccagctgtgggcacgggtgacgga

SEQ ID NO: 21136 - DNA, 400 bp, Glycine max
  unsure (1)..(400): unsure at all n locations
  Clone ID: LIB3049-006-Q1-E1-H3
gggacagctcacagtgacagcaaattgcttatcttgttttgtttttcttttcctccttgctttccccttcaatagcaatggcctctgcaacagaagccattaataaattgttgttcatattcctctttcttcaacaatattccttattaataatggcggatgattcagtttcagttccagttccagctgattggccgcaacagttccactcggttctgttcataaaccgaagcggcgatctccagaaaacggacttgtggtacgactggcccaacggtcgcaacttcaacatcattcaacaccagttgggtgtgctcaaatacgacctcgaatgggacaatggaacctccttttactacaccctcgaacccttcgacaaaacctgcanaatcgtccattt

SEQ ID NO: 21137 - DNA, 148 bp, Glycine max
  Clone ID: LIB3049-006-Q1-E1-H4
gatcccataaaaaccacaagcaaaccctaaaaagtccactgagatatatagaactacctccaatttcacaaaatgaagaaggtgtttgtcgcatttgtacctctgccagtggtatttgtccgcacattgacaccttcaaattcaaacc

SEQ ID NO: 21138 - DNA, 406 bp, Glycine max
  Clone ID: LIB3049-006-Q1-E1-H5
cttcccaaaaagtccacaaaaatactggtagcaggaagtcatgctaacaatttgggttatcaatgtggaggatggacaattacctggcaggggcttggtggcaatgatctcacttcaggtacaaccatccttgatgctgtgaaacaaaccgttgatcctgccactgaagttgtcttcaatgaaaatcctgataagaactttgtcaagtcatacaaatttgactatgccattgttgttgtgggagaacacacttatgccgaaacatttggtgacagtttgaatctgactatggctgatcctggtccaagtaccatcaccaatgtgtgtggggctattcgatgcctagttgttcttgtcactggccgcccagttgtgattaagccatatctacccaaaatcgatgcac

SEQ ID NO: 21139 - DNA, 388 bp, Glycine max
  Clone ID: LIB3049-006-Q1-E1-H6
gacgggcagaagcagaagtgggtctgtcttattcttaccccttggggccttgctgttgttgtgaagccctcttgtggggttcccttctgcttcataagatagactccttcaaacacttagagggaagaagaaaaaaaaaacgtctagaatcaacataaagtcaggcatctggagattctgattccaagggaaggaagtgattgatggagaacaagtatagtctaaacaggcagaggagtggaatatggaattgcttgagagatggagactttgaagaagaagaagtttgggctgttttcaaggaaaaacctgattacaacatttctggagttcacaagacaagggaaaaagggtctttttctcctcaagctgtccctaagactctccc

SEQ ID NO: 21140 - DNA, 407 bp, Glycine max
  Clone ID: LIB3049-006-Q1-E1-H7
ggcacttcaattgcaatcaaattagttcattctctttgcgcagttccctacctctcctttcaagatgcagatcttcgtcaagaccctcaccggaaagaccatcacccttgaggtggaaagctctgacaccatcgacaacgtcaaggccaagatccaggacaaggaaggaattcccccggatcagcaacgtctcatcttcgccggaaagcagctcgaggacggccgtaccctcgccgactacaacatccagaaggagtcaacccttcaccttgtccttcgtctccgtggtggcatgcagatcttcgtcaagactctcactggcaaaaccataaccctagacgtcgacagctctgacaccattgacaacgtcaagggcaagattcaggacaacgagggaatccccccag

SEQ ID NO: 21141 - DNA, 326 bp, Glycine max
  Clone ID: LIB3049-006-Q1-E1-H9
ggagagaaagagtgaggagagaattacagagcattttccaacacgattacacgaccgaatcaaaccctctctttctctccgaagctgcgtttaatatcttactcgccttagattgttcttctctttcattatactgttctcttttcgatttgagggaacagtacaagagtgtgaggatcggttaacccaactgcacaggtagtcactaaaataatggagtctcacgatgagactggatgccaggctcctgaacgccccattctttgcattaataattgtggcttctttggaagagcagctaccatgaacatgtgttccaagtgtta

SEQ ID NO: 21142 - DNA, 183 bp, Glycine max
  Clone ID: LIB3049-007-Q1-E1-A1
gctgagcaaaaccctaatccctatttttcttcctcagtagtgtcatttacgcttctcttctctgcagcaactatgcctaaccctaaggtcttcttcgacatgacgatcggcggtcaatctgctggccgcatcgtgatggaggctctacgccgacttcactccccgcaccgccgagaacttccg

SEQ ID NO: 21143 - DNA, 318 bp, Glycine max
  Clone ID: LIB3049-007-Q1-E1-A12
ggaagcgcgagcaagcatcccaaaaccctagctcgcgttctgctttcgtcttttacatcaggatggagtctcaggtgaagcacgcacttgttgtcaaagttatgggtcgtactggatccagaggacaagtaacccaggttagagtgaaatttttggatgatcagaaccgtcacatcatgaggaatgtgaaaggacctgtgcgagaaggagacattctcaccctactcgagtctgaaagggaagcaagaagattgcgctagatggtttcttttggcttgcctccaaattcgaacaaaacagtgtgattttgttgaattt

SEQ ID NO: 21144 - DNA, 89 bp, Glycine max
  unsure (1)..(89): unsure at all n locations
  Clone ID: LIB3049-007-Q1-E1-A2
ggcaactaagtagacgatagaatcagatcaggagagcatgcatatgaacatgatgatgaanaaggtgtgtgggtttgcaatagtgatgg

SEQ ID NO: 21145 - DNA, 156 bp, Glycine max
  Clone ID: LIB3049-007-Q1-E1-A4
gaccactagtcatgcgggagagcggaagtagcagatgaatggcatggctgcgctccaggtctcgttgtgttttcgagagtctagatagatcggctcagggtgacgttgttgtgttaacaggttcccgtcgtttcgcaagtcgagggagaatggaag

SEQ ID NO: 21146 - DNA, 124 bp, Glycine max
  Clone ID: LIB3049-007-Q1-E1-A5
cgggaaactagtgaattgttatggacactagtgtctcgccctctctcctagtttctctccgcgtctttggaagagtcttagggcttgcagtggcagtgcgtgtccgcatatgggcccttgcgtt

SEQ ID NO: 21147 - DNA, 78 bp, Glycine max
  Clone ID: LIB3049-007-Q1-E1-A6
gaatctgcattttggcattgaggtcgtgtttagtttgtgccaatccaacgttggttgtgtgtatttgtgttgggagga

SEQ ID NO: 21148 - DNA, 92 bp, Glycine max
  Clone ID: LIB3049-007-Q1-E1-A7
gacaccaaattttgcaacttggtttccaattgcgtgcacccatgtcctcttttcgctccttatcactctctgcgccctgcctccacgattcg

SEQ ID NO: 21149 - DNA, 177 bp, Glycine max
  Clone ID: LIB3049-007-Q1-E1-A8
ggagtgacagacgacgctaacagaagccgatcaagtcaacgtaagagagttccactgtctttccacgtccacaattttcatctcccgtggtgtttggttcctcttaaagtctaaacgaatcgagttagcttcgtgttttctttcgcgccgcaaattgtgtgtgcaacaaaaattttg

SEQ ID NO: 21150 - DNA, 318 bp, Glycine max
  Clone ID: LIB3049-007-Q1-E1-A9
aacagtcaacagagaaaggatcattattttgatgatttttcggtagttttctgccaatattcttttcattatttatcttccatttccttcgacagcatttgaggggggggggggggggcgcgtaatatatatttcttatctggaggaaaaggggtaccgggctttttttttttgttgctggaggtcattttccttctctgtatatttggtagatttggagtttttgtagatccaagtctctagattaatattatatagtctgttctgaaatctgccgtttttcatttgcatcattcttaggttatagtttccaattta

SEQ ID NO: 21151 - DNA, 163 bp, Glycine max
  Clone ID: LIB3049-007-Q1-E1-B1
gggtgagggttttagggcacacaccgcagggagacggtttctttcactctctgcaattcgcgatggctgacgaggactatgaagatattgacatggggtacgaagatcaaccgccagagcccgagattgaggaaggtgcagaggaagatgtggagaacaaaaa

SEQ ID NO: 21152 - DNA, 300 bp, Glycine max
  Clone ID: LIB3049-007-Q1-E1-B10
gggggtaggtggtggtggcgccgaaccgcaatggagaagccatcgtcgtcgtcgtcgtcgcgaagaagatcgagcacgaaggtgaaagcttcaaccgatgcgaacacgaacctgagcatgctcaacgaggaccttctccagaacattctagcgaggcttcctgctctgcatttcgcttccgcagcttgcgtcagcaaatcatggaactctctctgcaatcgcatcctcactcgccccaaactctcttccgcgatttctctcaacccttcgctccccgatgctgtcaacgaggttgttcac

SEQ ID NO: 21153 - DNA, 344 bp, Glycine max
  Clone ID: LIB3049-007-Q1-E1-B11
gagaacagaacagaacagaactggtggttgcattgaatcggaggggtaagtgggaagacgtgtcttgttttgtagctttcccttccctctctcttttccccgccgcatgtgccggattagacgcgaactgcttccataattcacctcctccaatcaaccatcacaagatttcccactgattggatggaagaagcatgtgaatttcgaagttgggctgaattgattcctgatgccctgggggtaatcttcaccaatctttctcttcaggagagggtaacagtgatccccagggtgtgcaaatcatgggctaatgcagtaactggaccttactgctggcaagagat

SEQ ID NO: 21154 - DNA, 393 bp, Glycine max
  Clone ID: LIB3049-007-Q1-E1-B12
ggcgtacacagcctcaacaaccctaacgcgtgcagagcagagagagacgcagccatggggcgaagacccgcgaggtgttataggcaaattaagaacaaaccataccccaagtcacggttttgccgtggtgttcctgatcccaagatcaggatttacgatgttggtatgaagaagaagggtgttgatgagtttcctttctgtgtccatctggttagttgggagaaggaaaacgtttctagtgaggccctggaagctgctcgtattgcttgcaacaagtacatggccaaatttgctggaaaggatgccttccacttgaaagtcaaggttgaaccaattcacagtcctaaggatcaacaagatgctttcgtgtgctggagctgataggctccaaac

SEQ ID NO: 21155 - DNA, 209 bp, Glycine max
  Clone ID: LIB3049-007-Q1-E1-B2
gatccagcatttgtttgacaatgagacatcagtgcctccttctggtctccctggtgttggtctcctacgctgcccggtcggaatcagcgctgggcggctggagccccatcaaggacgtaaacgacagccacgtggcggagatcgcgaactacgcgctgagcgagtacgacaagcgttctggggcgaagctcacccttgtcaaggtcgtc

SEQ ID NO: 21156 - DNA, 183 bp, Glycine max
  Clone ID: LIB3049-007-Q1-E1-B3
cgggattggtaccgcgaaacgcacatttcacgagtcattctcgtgtccctttcgactgtgattgtttgttaactgaacttttcgagcaaaatgtctggacgtggaaaggggggcaagggtttggaaaagggaggagcgaaacaacacgcgtaagggttccccaataaaattcagggaatcacc

SEQ ID NO: 21157 - DNA, 55 bp, Glycine max
  Clone ID: LIB3049-007-Q1-E1-B4
ggccgaggaaaaaaaaagagatagaagaggacgaaaaaaccacacgttcgaaaat

SEQ ID NO: 21158 - DNA, 95 bp, Glycine max
  Clone ID: LIB3049-007-Q1-E1-B5
gaagatggcaacagaaagatccttcatttgttttgccatggaagcaagattcgcttccaatttttgcagaatctagccctttgtatcacacgcag

SEQ ID NO: 21159 - DNA, 89 bp, Glycine max
  Clone ID: LIB3049-007-Q1-E1-B6
ggagtgtgggaggagagtcacaactaccagtccttgctgtgcatcgtgtgagtttgggagaggaatgaagctactcggaaagttattcc

SEQ ID NO: 21160 - DNA, 104 bp, Glycine max
  unsure (1)..(104): unsure at all n locations
  Clone ID: LIB3049-007-Q1-E1-B7
aaggangagcttacaaaattgcgctttctaatccaaaccttagttctctcacagtcacaggtcataataatcacacaatctccgccgcatgcaatctttctttc

SEQ ID NO: 21161 - DNA, 286 bp, Glycine max
  Clone ID: LIB3049-007-Q1-E1-B9
ggcacacagtttactcactaactcactgtgagagcaaagaagaagaagaatgaaggacgccggaaagagccacaaggcgaacggaaagctgtcgccggagactcggaaggatcggaagtcggcgacggggctgagcggatcgccgaagaagggaggccacggcgggaagttcacgtggatcggccacggctacgagcaagttgagatgccgcacggtgctatggacgccaaggacccgaacttcgaggatcctgtggagatcgccaccgtgtgatcgcggtggttt

SEQ ID NO: 21162 - DNA, 244 bp, Glycine max
  Clone ID: LIB3049-007-Q1-E1-C1
ggttctactgtatatgattgttattactcgatcatcatcctcagtagcttcatcatctcctgctagcgagtatgtatattctctcagctcgaaaatttcgtacagtgtgctgtcactgtcgctgagacagagtcagcaagtgttgaacattttgccagcagcacatcagctaccaagatctgatctataccttttcaaacaccactgacaccatagtcatgtgagtggtactaatgaaggctca

SEQ ID NO: 21163 - DNA, 398 bp, Glycine max
  unsure (1)..(398): unsure at all n locations
  Clone ID: LIB3049-007-Q1-E1-C10
gaatgaatgagttgtgtaagaaagagatccatccaatgttgcaagtcaactgagtagtcctgctatgctctgctctgctctcccaaacatctctgacacaacacacaccaaaatgcataattgaaatgacccttttgcccttccttccttccctacttctcctttgactctccgcaacgccaccgcccacaatggacggcaccaccaactccggcgaaccccgctccagttcggtgctccaaaatactggggcatccgaggatccgaatcgaagcgggtcgggtcagaattcgatggcgatgtacaagctgatgttancggccaagctttcgaattccaaggcccccttgaataagaattcttccggggctcagtccgacgtcgtttctggaatcccc

SEQ ID NO: 21164 - DNA, 313 bp, Glycine max
  Clone ID: LIB3049-007-Q1-E1-C11
ggttcacaagtttcgtttccaggtttcggcgcaatcggcttctgcttcaaggaaggagagcttgttattctctatcaacaagtaaaatgtcaggtgaagagggtgtcattgcagttgagccagctgctgctgctgctgccatcccaggcgagccaatggatatcatgactgccttacaacttgtgctcagaaaatctctggcttatggtggtttgtcgcgtggccttcatgaaggtgcaaaagtgattgagaagcatgctgcacaactctgtgttcttgcagaagactgtgaccagcctgactatgttaaact

SEQ ID NO: 21165 - DNA, 304 bp, Glycine max
  Clone ID: LIB3049-007-Q1-E1-C2
ggccaacgccaacgccaattccattcagatcacagtcccttcaattcctgctgcagcatactgtgtgcaacaaagccctaaaatggaggggactgtcttcactcctgcactgcaagaaattgagcatgtaaagtctgatcaaggagaaattctgagcaagcctttcttggatgcgtgcaagcacatattgcctgtaatagataagtttggagctgctatggcccttgttaaatctgacataggtggtaacatatcgagattgggaactatgtattcttccaatccatccagatttaactacctg

SEQ ID NO: 21166 - DNA, 285 bp, Glycine max
  unsure (1)..(285): unsure at all n locations
  Clone ID: LIB3049-007-Q1-E1-C3
ggcacaagtttgttgagatagctagaagcaataagatgaaaatgaaagtgcttgttttgtttgttgctacagttttggtagcatatgaatgccatggctcagactaccagaagttccctctccaaatgaaaactgggtttggtgggcaatacagcaatgacgtggcatgtgccagttggaggcttggcgtggaagcagacaacgtaatcaagtggcaaactgttcctgcagcttgcggagagtacatagctgactacgttctangagaacaatatagatcagatt

SEQ ID NO: 21167 - DNA, 155 bp, Glycine max
  Clone ID: LIB3049-005-Q1-E1-D2
gatagcaggctctgtcaacgaatggcgtgatcagtggaaaataggatcatagattttcacattacccttcaagctccaggattcatagtcctcgcagctgatgtatctaatcttgggatctatgtcttgactatgctgctaaccagtagacttct

SEQ ID NO: 21168 - DNA, 400 bp, Glycine max
  Clone ID: LIB3049-003-Q1-E1-E11
ggccattgttgttgctattatcatccgcagctgcttttattcgcaccgcaaacagtgagccatggccgtcggaaagaacaagcgcatctccaaggggaagaagggtggcaagaagaagacagctgatccctttgccaagaaggattggtatgacattaaggctccttctgtttttcaagtgaaaaatgttggcaaaaccctcgtctctcgtactcagggtaccaagattgcttctgaaggactcaagcatagagtgtttgaggtctccttggctgatcttcaaggggatgaggatcatgcattcaagaagattaggttgagagctgaagatgtgcaagggaagaatgtcctgacaaatttctggggaatggatttcacaacagacaagctgaggtcattg

SEQ ID NO: 21169 - DNA, 400 bp, Glycine max
  Clone ID: LIB3049-003-Q1-E1-E12
gacacatcacaacaacaacaacaacaaaaaaagacaaaaactacttccttctctcctttgctgtgttttctttctcaaaaatgggtcgtacctatgttcttatgatggttgctgcattgttgttgagctccaccatggctcaatctccagcttcgtcgccggctttgtcccccacccacacgccggtggccactccacctaggagggcgttgtcgccgtctccgtcgtctgtgtcaccagcggcttcacccgccaccggaaattctcctccggcaccacctacttcttctccttcggaatcgccacttccatcagctgctactcccaacaatctctccttcaacaatctcaattccgccatctgaaggaccagctgcaaacggtgccgttttcaacagag

SEQ ID NO: 21170 - DNA, 323 bp, Glycine max
  Clone ID: LIB3049-003-Q1-E1-E2
ggaatcagcaccacattcacctgagctttttgtgaggattccaaagcatggcttcccttgcagcatccactgctgctgcttcccttggcatgtcagaaatgcttggaaaccccatcaacctcagtggtgccacaaggccagctccatctgcctctagccctgcctccttcaagactgtggctcttttctccaaaaagaaggctgcacctccaaaaaaagctgcagctgctgctcctgccaatgatgagcttgccaagtggtatggtcctgacagaaggatcttcttgcctgaaggtctcttggaccgatctgagatcccagag

SEQ ID NO: 21171 - DNA, 359 bp, Glycine max
  unsure (1)..(359): unsure at all n locations
  Clone ID: LIB3049-003-Q1-E1-E3
gacttcattttggactaaactagaaagtgatcgaacagcatgttcaagcttttggttagtagagcagctagggtttcaactccacacaaccacaatgcctttgcttctttcgctttctctaggtatgctcattcattaccatttgcaactgtagaagcagaagagatatcaggctttanggctgctgaagttttgaacctggtgcaaggtaaatgggtaggatcttcaaattggaatacagttgtagatcctttaaatggagactcatttattaaagttgctgaagttgatgaaacaggcattcagccctttgtagaaagcttgtccagctgtcncaaacatggtgcacacaatccttt

SEQ ID NO: 21172 - DNA, 321 bp, Glycine max
  Clone ID: LIB3049-003-Q1-E1-E5
gacacatcacagcaacaacatcaacataacacgacaccaactatttccttcatctcctttgctgagttttctttcggaaaagtgggtcatacctatgttcttatgatggctgctgcattgttgttgagctccaccatggctcaatctccagcttcgtcgacggttttgtctcctacccattactcaggtggccactccagctaagatggcgttctcgccctctccgtcgtctgtgtcatgcagcggcttcaccctccaccgggaaattctcctccgtgcaggatcctacgtcttctccttatggaatcgctcacttccatc

SEQ ID NO: 21173 - DNA, 350 bp, Glycine max
  Clone ID: LIB3049-003-Q1-E1-E6
ggactctttcttttctttctaacaagcaccgcctccactaatggctatgagatcgtgggtgagtcgaggatccgtgactcgtttgatggactcagcaaatcgaggggctttcagtcgcttcttcagcgacaagggtcgcgttctcagcgaggaggaacaggccaaagaaaacgtctacatccagaaatgggagagggagaggttggagaaacagaagcaacaggctgagaagaccaaggcagacaagggcaaagatgctgctgctgataagaaacctgaaggttctcaaaagggctgagtttatccttcacacaacccgggaaggtcactttgtgggaaataagcatgat

SEQ ID NO: 21174 - DNA, 344 bp, Glycine max
  Clone ID: LIB3049-003-Q1-E1-E7
gagttcaattccaatatattccattctctctgtgtatttccctacctctcccttcaagatgcagatcttcgtcaagcccctcaccggcaagaccatcacccttgaggtggaaagctctgacaccatcgacaacgtcaaggccaagatccaggacaaggaaggaatccccccggaccagcaacgtctcattttcgccggaaagcaacttgaggacggccgtacccttgctgactacaacattcagaaggagagtactcttcacctcgtcctccgtctccgtggtggcatgcagatcttcgttaagacactcaccggcaagaccataaccctagaggttgaaagct

SEQ ID NO: 21175 - DNA, 368 bp, Glycine max
  Clone ID: LIB3049-003-Q1-E1-E8
gaatgccaaagttggtcacgctctctgaaaatgcagcaacagcaacagcagcagcaggcatgaagagcaacatacacaacaccactccttcaaatatcatcatcatttctcacttctcatccttcactctcttcttctctttcttcccttcactctctctttcgcttcatggctggtctcatcgatctcaacaacgccaccgaggacgatgaaacgccgtcgtctggctcctcctcctcctcctcctcctccaccgtctgccttgaactctggcacgcttgcgcgggtccaatgatttcattgcccaagaaagggagcgttgtcgtgtacttccctcagggacacttggagcaacacctccacgattt

SEQ ID NO: 21176 - DNA, 353 bp, Glycine max
  Clone ID: LIB3049-003-Q1-E1-E9
ggagtgtgagggttatttataaggcacacatctcatcgttttctctgtgcctggccatccggtttcccagatctgctccttcctcaccccacaggctgatactagactgtaactttcagaagtcagttgaagagcatgggtcgtggagttagcagtggtggtggtcaaagttccttgggttatctttttggcagtggagaggcccctgccgcaaaaccggcaacaaacaatgccccagcccaacctgaagtgcacgctgtaaataatgcgcctccttcaaaagcatctcctcctactaaaacaatagaccctaacaaggctgctggtataaacagtcaatctactgattggca

SEQ ID NO: 21177 - DNA, 352 bp, Glycine max
  Clone ID: LIB3049-003-Q1-E1-F1
gtgaagtaaaagctgctaacccaaattcttgtcagtggtaaccatgacagttggttccttcttcatcaggacctccagggttctcaactcctccaactttctgcttctctgcactctcagtggtggtggtgtagtggcatactcagaatcacaatcaggagctgaacgtcctagtattgaagctaatgagcctgccaaaaagaaagtggtggttcttggaacaggatgggctgctaccagtttccttaaggatctggatgcttcattatatgatgttcaagttgtttcacctcgtaactactttgcatttactcccttattacccagtgtcacttgtgggacagttgaagca

SEQ ID NO: 21178 - DNA, 385 bp, Glycine max
  Clone ID: LIB3049-003-Q1-E1-F10
gggagatccgaattttgattatcgaatcgcaaaattctgaatcaatcaatcaatcaatcagtaatcagagccatcaacgactgcaatggtctgcgagaagtgtgagaagaaattatcgaaggtgatagtaccagacaagtggaaagaaggggccagcaatactaccgagggtggtggccgcaagatcaacgagaacaagcttctctccaagaaaaacagatggaccccttacggaaacactaagtgcaccatttgcaagcagcaagtgcaccagaatgctaagtactgccacacctgtgcctaacccaaaaggatttggtgcaatgtgtggcaagcaagttcttgataccaagttttacaagcaaagcaatgtgtaatggatact

SEQ ID NO: 21179 - DNA, 400 bp, Glycine max
  unsure (1)..(400): unsure at all n locations
  Clone ID: LIB3049-003-Q1-E1-F11
gatagcgcgaatttacaaaactagccaggaacaggccctgtctttccgatattcaccatctctttctctctaatccaaaaaaaatctgttgtgaacaaacacacattattgtttgttttcatcccacggaaaaatcgatcaggcaaaacaaacaaaggtgaaactgaataggtgcgtgtttgtgttgatgggctaagaggacagagaaaaagaaagaaagagtataaaatcaaatctggcaaatctcgtggggttgagggctcggtcttcgtcgaagcaagcttcccctgatttgcangacgacgatgaggagtgcaagccttggcgtcgaaggttaataatgttctttctccgggtcctcaacccttaagatcaccatcctcctcctcctcctcgccgc

SEQ ID NO: 21180 - DNA, 315 bp, Glycine max
  Clone ID: LIB3049-003-Q1-E1-F12
gaccacttcacaacactcataacacaaagcacaaagcaaagctcatccttgagttaaaaaatggcagcagcttcttccatggctctctcatccccatccttggctggcaaggccgtgaagctgggcccatcagccccagaagtgggaagggtgagcatgaggaataccgtcaccaagcaggtctcctcaggaagcccatggtacggcccagaccgagtcaagtacttgggcccattctctggcgagcgcccgtcctacctaaccggtgagttcccaggctactactgctgggacactgctgggctttccgcagac

SEQ ID NO: 21181 - DNA, 345 bp, Glycine max
  Clone ID: LIB3049-003-Q1-E1-F3
ggcccatgtttcttgtttctgtctgcaattttcaattccaactctctctcacatgcaattctccatccaacaaaagtttctcatcatttctgtttcccataagcaattaattaaaatactgaatttggtataatttctttctcaaatataattagttttacaattattttatttctttttccttggattgtagccggggtttcttgttgtgagagaaaaacctttattctctgttttgggaacatctggggtctcaatttagtggaagttaaattttgaaactttggacgaagatggcgaattgggtccaaaagaagatcactgatcccctctttccattatccg

SEQ ID NO: 21182 - DNA, 370 bp, Glycine max
  Clone ID: LIB3049-003-Q1-E1-F4
gaacacgcaactgggtgttttgtccttccttgaattaaataaatactatgaaattgtagtttaaggaaggagatactctcactcgttcattccaacctacccttattcttcttcttcaattccacacccatcatggaccgttttccgatcctctttctcctcgccaccctcatcaccctcgcctccggtgcccgccacgatattctccggttaccctccgaagcatccacttttttcaaagcacccggtggcgattaaaacgatgagggcacgaggtgggccgttttaattgccggttccaatggctactggaattacaggcaccagtctgatgtttgccatgcgtatcaactactgaagaaaagtggtc

SEQ ID NO: 21183 - DNA, 365 bp, Glycine max
  Clone ID: LIB3049-003-Q1-E1-F6
ggtaggcaaagagagagagagaaaagcgtgaatcatgtcggacgaagagcatcacttcgattctcaggcggatgcgggagcgtccaagacgtatcctcagcaggctggtaccattcgcaagaatggctacatcgtcatcaaatccaggccttgcaaggttgtagaggtctctacgtcaaagacaggcaagcatggacatgcaaagtgtcactttgttgcaattgatatttttaatgggaaaaagcttgaagatattgttccatcatcccacaactgtgatgttccacatgtgaatcgcactgactatcagcttattgatgtctctgaagacggctttgtgagtctgttgactgataatggaaata

SEQ ID NO: 21184 - DNA, 351 bp, Glycine max
  Clone ID: LIB3049-003-Q1-E1-F8
cgataagcaaagtccagcaccagcaccagcaccagcaccagcacctgcatcatcaccaattgataagcaaattccagctggaattcctggaagtctcaaaaacaattaccatcgtgctgatgggcaaaactgtggcaactttcttactgatcggccatctaccaaggttcatgctgccccaggtggcggatcttccttgaattacctctttggtggtcctccagggaactaattcatcattgtgattcaaacctaccatgtgatgtatcatgtgtaaaatagatagctgcattgttttagtccagtggactttgtttcttgtgcaattgaacctcctgacaatgttggtgt

SEQ ID NO: 21185 - DNA, 378 bp, Glycine max
  Clone ID: LIB3049-003-Q1-E1-F9
caattgagttcacagtcaaggtgtgggactatcttgaggaagtggtggttgctgttctgaagcgtcactcagaacactaccaccaacttcagacaagtacaaaacgagcagggaagaacctcattgctaagatgaaggagaattctatgaaatatgtgatggaggttgtggaaatggaaaagctaactgattacactagtaatcctgaatacatgagtgagtataacgagctaatggccaaccaggatgaattcgtggagaaagttaatacaggcaactatcatgaagttgcccttgatggttttgaacaggcgattaaggttggtcatccgagtcagtactcaactttacttccgcaggcatttgacttgaaaatga

SEQ ID NO: 21186 - DNA, 353 bp, Glycine max
  unsure (1)..(353): unsure at all n locations
  Clone ID: LIB3049-003-Q1-E1-G1
gggggtctgaatcacagtccacacgaaggaacaaaaccaagaacaccactttactttctctttccttctccgccactgttaaggcttgagaagaagacaatggtggcttgtgaaacatgaagaggagcactgtgttatgcatgttcaatggcatgtcattgtgcttcttacaatgcctttacattttcaccaaccagagagttcatcaccaccaccaccaccaaccacatcatgtcaaaaacatcatccactactactagatgcagaccctttctcttgtccatcaccaatgccacaccatcctacaacacccttgtttctgaggctgttangcttttggttccttcagcaag

SEQ ID NO: 21187 - DNA, 400 bp, Glycine max
  Clone ID: LIB3049-003-Q1-E1-G10
gggtcgagccagggtagcccagatggtgtttgcaagttgtcctctgcgaagaccacttgggatctgctgcatgcggctgcaggggaagttgagaggatgaggttgaagcaagaaggttatgctctcaaccatcacaatggaaactttgttccccaaagaaaaccctctccagtcaccactttaccctccaaaaacaccaccgcaaatccaaaccctgatgtgggtggtttctacacccaacaacaatcactctctcaccagcaattgcagatagcacaatttcagttgttgaggcagcaacagctggcaaagcagcagaactccgtctggaaatgtgaagaagcaatgtgatggggtttactctcagaggcagcaacaaagcaaccaaatggttcccaat

SEQ ID NO: 21188 - DNA, 310 bp, Glycine max
  Clone ID: LIB3049-003-Q1-E1-G11
gaaattatggtccaatagatccgtgttgctaacccacagtccctccctcacccacgtctctccccgcttcagatcttaaacgtctttcgctgttccaagatgggtgtggctgagaacattcccgatatggaggagggtaccttggagattggaatggaatacagaactgtatctggagttgctggaccattggtcattcttgacaaagttaagggacccaaatttcaagagattgttaatattcgtttaagagatggaactactcggcgtggacaagttctagaggttgatggtgaaaaagctgttgttc

SEQ ID NO: 21189 - DNA, 408 bp, Glycine max
  Clone ID: LIB3049-003-Q1-E1-G12
gatcgtcgccttgaaaagaaaaaccctaattacaagaagttgcaaaactaagtggaataagagctgaaaaaccctaataacaatgggaggaaaatgtccgcacaggaacgtgaagaagagaagatattctcacaagaccgcgcggcgaaccaaatttgagctgaaaggggacgacatggtttatgcgcagctcaacaaacccgatcaagagagaccccctttacccgtcgacgaagatttgcctgggatgggccagtactattgccttcactgcgatcggtactttgccaatataactgcgacggatgagcactttaagaacaaaccacacaagaaccgtataaaacaaatgatgggtcctgcaccacatactcaacttgatgccgatttagcttctgggatgggtat

SEQ ID NO: 21190 - DNA, 352 bp, Glycine max
  Clone ID: LIB3049-003-Q1-E1-G2
ggtgagtctgcagtgggtgtagtgtagtagttggcattactgtgagctcccgcaggcagcagcagcactcatagagcttgcgagcgagtggtcacttggccacagttatcgccgtttccccgccgagatctctcaatctccgacgactcagatacctctattaatttttgttcctccggttaggttaggctataatacgtagtttttccttatttatggcttcggagaatgtgaagaccggggattcggccgtgacgacgatcgtcaatctcgccgaggaggccaagctcgccagggaaggcgtcgtcaaggctcccagctacgccctcgccagcatctgcaagtcgctcgt

SEQ ID NO: 21191 - DNA, 347 bp, Glycine max
  Clone ID: LIB3049-003-Q1-E1-G3
ggtgtgggaggagagtcacaactaccagtccttgctttgcatcgtgtgagtttgggagaggaaggaagctactcggaaagttattccttcctcagcaaaaaaaaaccattcctttataaccataaagcgccttctttaattttcttcaccaccactccattactctctccacgcaccccctactacctttgttttgagtttgaggaatataagaaaaatgaaaatgggtaaaggaattgtttttattgttgctctggtggccatttgccttggtgggaaatgggtggaagcgcacgtgcatcatgttgtcggagcagaccgtggttgggatcaaacctccgacctcg

SEQ ID NO: 21192 - DNA, 365 bp, Glycine max
  Clone ID: LIB3049-003-Q1-E1-G4
ggctcaaaataattttgggagaacaaaacacagaaaaataagaacttctcttcttgtaattacgtttggctccaactaatcggatccatcatttaattcaccaccttcccctgtaacccaacacagattacatacatcggattcatcgattctttccttctccagattccgattattattaattatcatattattgttattcaatattcatggcgtcgagttttgatcgatgggaaaaagatcctttctttaacgccgcggaagaagttcaggaatctgcagacaggatggaatctacgtatagaacatggattcatgcaatgagagatgcgtccagcccatggaactgtgatgaactccgccga

SEQ ID NO: 21193 - DNA, 346 bp, Glycine max
  Clone ID: LIB3049-003-Q1-E1-G5
ggccacatgaatcattagttagggtttattctccaagaaaagcaatgagtgcgtccaggttcatcaagtgtgtcactgtgggtgacggtgccgttggcaagacttgcatgctcatctcctacaccagcaacacttttcctacggactacgtgccaactgtctttgacaatttcagtgcaaatgtagttgtggatggaagcactgtgaatcttgggttgtgggatactgctggccaagaagattacaatagattaagacccttaagctatcgtggagcagatgtattcctgcttgctttctctctcataagcagggctagctatgaaaatgttgccaagaaatggat

SEQ ID NO: 21194 - DNA, 371 bp, Glycine max
  Clone ID: LIB3049-003-Q1-E1-G6
gggtggtaggggaagggcaaaaggttatggtataatccgcggaagcgcaagtgaaggtgctggtcttgtcgtcgtacgcgtagctataagcgcgtgggcaagcgctcttgaatatcgctgagtaagccgatggcttgcacgtgtcgggcgtgccgtacgcgccgctgcagcaatactgcggcgagttgaacgcctcgcaggcgctcttgcacgccaccacgccctctctcccatccgcgcccatcactttaagctccgaaggacacgcgccgttcagatctcccacgcaccccgtcgcggtgcacttctcgccggagccaccctgcggcaccaccagcatcggcacgttgtacccgtcgactaaactcacg

SEQ ID NO: 21195 - DNA, 349 bp, Glycine max
  Clone ID: LIB3049-003-Q1-E1-G8
ggggtctagttagagtgaatccatgaccgtgaccatggcggctgcgtttacaagtacaagtgcaacactgagactgtcaaatgttggagagagcagaggtttgcagctgcgtaagtgtaaccctaatcctaataagctgaaggttatgggggggtttggaggttgttctggagtggcagtgggtgtgagagaaagaaaaggaattggaagggttagggttcgggttcgggcgagttcttcgtcggacgaggcagtgagtgcgcagtcaaaagtgactcagaaagtattctttgacgtcagtattggaaatccagttgggaagcttgtgggacgtattgtgattggactg

SEQ ID NO: 21196 - DNA, 344 bp, Glycine max
  Clone ID: LIB3049-003-Q1-E1-G9
ggagaggatgaagggaagcagcaagaggaagacggagaaggagaagatagaggatgaagtggaagaaatgttgcgagcggcgcaagaccaaatcctcttaaatctcacccaagcccacatagcagcccgtccttctccggatcatgatcatgatctggatctggatctggatctggagcgtcgattccaggccctcaaaatgaaaaccaaatctcaacctcaagatgatctctctgccagattcgatgccctaaaagccaaatcatcatcttctgttgtcacagcatccaattccaacgcccaatttgattatgctgaagaagacccagaggctcaagttcaga

SEQ ID NO: 21197 - DNA, 362 bp, Glycine max
  Clone ID: LIB3049-003-Q1-E1-H1
acacttgattagctgaggaggaagagagaaaaaccatggcaataacactcaacaatggcttcaagatgcctatcattggattgggcgtgtggcgcatggaaggaaacgaaatcagggacctaattctcaattccatcaaaattggttatcgccattttgattgtgctgctgactacaaaaacgaagcagaagttggagatgcgcttaaggaggcttttgatagtagccttgtgaagagagaggatctcttcattaccaccaagctttggaattctgatcaaggccacgttcttgaggcgtgtaaagacagtctcaagaagcttcagttaacgtatctagatttatatcttgttcactttcct

SEQ ID NO: 21198 - DNA, 404 bp, Glycine max
  Clone ID: LIB3049-003-Q1-E1-H10
ggttgtgtggcggtgacaaccatggccgactcatctcaagaccttgaccaacttctcgatagtgctttggatgattttcagtccttcaacctcaatcctccccctccaagtggggaagcaactgcgaatagcaagaaggagagtccttctttgccgtcgggggttcaaggattgggcatgggtttacccgatttgagaacgaagaaaaaggggaaacagaatgcttccaaagacagccacgtgtcggaggcgctcaacaagctcatggagcagaccaaagaggctgtgaaagggctggagtctatatccccacccactgccgatgatttaaggtaaggatgcctcgatggaagattgggtcaaacaattttagcagcttgctggctctcaagacatggaatcta

SEQ ID NO: 21199 - DNA, 393 bp, Glycine max
  Clone ID: LIB3049-003-Q1-E1-H11
gggcactcagtagagaattaaataaaatcaagaaagcatgcatatgatgaagaaggtgtgtgggtttgcaatagtggtgatggcagcactttttctggtggagatgagtcccatggcagaggctgtgacttgtagccctgtggagttgagtccctgtttgggggcaatcacgtcctcttcaccaccatcgacaacttgttgccagaaggtgagggaacaaaggccatgcctctgtggttacctcaaaaaccctagtctgaggccatatgtcaactctcctggttccagaagggttgctagctcttgtggggttcccttcccaacctgttagtcaactttttacttcatatatatgtaataaactccccctactgttggctggaaattatatat

SEQ ID NO: 21200 - DNA, 324 bp, Glycine max
  Clone ID: LIB3049-003-Q1-E1-H12
catgggactcacagactgaaaccagacactgacgggacaagcaaccgataccatatcatgggttcgtccagcagtcacacttcgaccttcattcaacatcagtcacctgtcatcttcgcttcagatgctcatcagcaacatcgcctgtatgcaagtccgactctgcgactcatcgcgccacgttgaacgatgttttggccgacttcatctcaaccttcatcttcgtgttcgccggctcaggctccggcatcgcctatagcaagctcaacgacaacggagctgccactcctgccggcctcatctgcgcgtccatcggtcatgcat

SEQ ID NO: 21201 - DNA, 289 bp, Glycine max
  Clone ID: LIB3049-003-Q1-E1-H2
agacgtcagtagagctgcgaaagggggacacaaagggttcgatgcttgagatcacagcttcgtttcgatattcagtgtcgtcggtccggatgagtctcatgtcagctctgtggctcaggttaggctgaccgcggttattgcacacgtatccgtataggcatgtgacactgtggaaaggcctgcaaataaacctaacggcacttcgtactcatattccacgggttgccgtaccataattgatcccatttatgatcacgatcagtcagtagttccacgttgatagactgac

SEQ ID NO: 21202 - DNA, 373 bp, Glycine max
  unsure (1)..(373): unsure at all n locations
  Clone ID: LIB3049-003-Q1-E1-H3
gatgttattagactgctccactccttgtcatgtgccaagtacaagattcttaacaaggaaccaaacacaaaaacaatatcttctaccgactattttgaatttaattcaaaatttacggacaaaatgaggagaatcaagattcctcttcctcctgttgatgagaagaaaaaagtaattgaggatgttgacaaagacagaagatatgctattgatgcctcaattgtgcgtattatgaagagtcggaaggtgttaagttaccaacagttggtaatggagtgtgttgagcagctaggtcgcatgtttaagccggatgtcaaggcaattaagaagcggattgaagatttgatctctcgagactacctanagagagaca

SEQ ID NO: 21203 - DNA, 347 bp, Glycine max
  Clone ID: LIB3049-003-Q1-E1-H4
ggcacaagtttgttgagatagctagaagcaataagatgaaaatgaaagtgcttgttttgtttgttgctacagttttggtagcatatgaatgccatggctcagactaccagaagttccctctccaaatgaaaactgggtttggtgggcaatacagcaatgaggtggcatgtgccagttggaggcttggcgtggaagcaaacaacgtagtcaagtggcaaactgttcctgcagcttgcggagagtacatagctgactacgttctaggagaccaatatagatcagattccaaaacagttaaccaacaagcttatttctatgctaaatccctcaaactcaccaacaaagat

SEQ ID NO: 21204 - DNA, 369 bp, Glycine max
  unsure (1)..(369): unsure at all n locations
  Clone ID: LIB3049-003-Q1-E1-H5
gaccttctcttctctaagcactttactttttttttcagccatggagtttcattgccttccaatatttctttatctcaatttgatgttgatgacagccaatgctgcgttaactcctagacattactgggaaacgatgcttccaagaactcccttgccgaaagcaatcacagagctactaagccttgaaagtaggtccatatttgaatatgccgggaatgatgaccagtcagaaagtaggtccatattangatacgctggctataatcaagacgaggatgatgtgagcaaacacaatatacaaatcttcaacaggttgtttttcttggggagaggactgcgtgctggcaaaatattcaacatgaagttcgt

SEQ ID NO: 21205 - DNA, 345 bp, Glycine max
  Clone ID: LIB3049-003-Q1-E1-H6
gacacaccctcaacttcttattcaatattccttcacactatcttcttctcttcatgagggtttagcaaagggttgctgacagagtttattggcattctgtccacctccacttcctactctctctctgagccacatgttcgtgaagttggaggtgggcatactgtcaactgagttctgttgtctgctctttgtaaagccttcatgatatttattcatctctcaacaattaaaaggagtggtataaggtgtaaacacgggatagcagggtgggtggccctccaaacttgcgctggagtgtactatgactatgcatctcacagctagctaacggcaaatgcattttga

SEQ ID NO: 21206 - DNA, 381 bp, Glycine max
  unsure (1)..(381): unsure at all n locations
  Clone ID: LIB3049-003-Q1-E1-H7
ggggggaaagagagtggattcttggtgactttcttgaccagaaaagtagcaaccgcagcaccaaagactttgctttgcatctatcgaattctaatccaattctctctgcatctacatatacaatatcataatcgttcataagattgcatttgcattgatttcaaaaatgcagatcaggggatcgagtcacagactctccagtatgggcaataatcgatcccgcattcccgcgctcctcatctccatgttcgccactttcgcttctatctacgtcgctggaaggctgtggcangacgcagagaatcgcgtttatctcatcaaagagctcgataggatcactggccaaggacaatctgctatatctgtggatgatacattgaa

SEQ ID NO: 21207 - DNA, 363 bp, Glycine max
  Clone ID: LIB3049-003-Q1-E1-H8
gaggttgaaacttctgagaggcaccatggcgacactggattccgacgtgaccatggttccggccggcgaaccctccaccagcgccggtccttcttcgtccaccaagaagccgaagcgattcgagatcaagaagtggaatgccgtttctctctgggcttgggatattgttgtggataattgcgctatttgccgcaaccatatcatggatctctgtattgagtgccaggccaaccaggctagcgccactagcgaggaatgcactgtagcttggggagtttgtaaccatgcttttcacttccattgcataagccgatggctcaagacccgtcaagtatgtcctctagattatagccagtgggaatt

SEQ ID NO: 21208 - DNA, 401 bp, Glycine max
  Clone ID: LIB3049-003-Q1-E1-H9
ggagaaagatttatagcagtggatgttacattcagaaacacagctggacccgaaaagcaccaagcagtggcagtgaggaacaatgctgatctctccacattctaccgttgcagttttgaaggatatcaagacacactctatgttcactccttgaggcaattctatagggaatgtgaaatctatggaactgtggacttcattttcggcaatgcagctgtggtcttccagggttgcaaaatctatgccagaaaaccattgccaaaccagaagaatgctgtcacagcacaaggaagaactgatccaaatcaaaacactggcatttcgatccaaaactgcagcattgatgctgcaccggacttggtcgcggacttgaaatccacgatgagtttcttaggccgtcc

SEQ ID NO: 21209 - DNA, 374 bp, Glycine max
  Clone ID: LIB3049-004-Q1-E1-A10
atctagtgaaagtgaactattacaatatttgaggattgcttttgaatgtctggatgagagaccataccggcggccaactatgatacaagtgatggctatgtttaaagagcttcaggttgacacagataatgatatgcttgatagcttctctctcagagacaatgttattgatgaagcttgagaagaggatcttttctacaagactcaaagccctttgacagttgagaaggaaataaagaggttctcaaaatttggagtgttgctgactaaattgacaattctggtgacactgatctatatctatcctatctgaaattggaggaaggttctttcaactttttttgatgtatataagacacttaatgagaccaaga

SEQ ID NO: 21210 - DNA, 395 bp, Glycine max
  Clone ID: LIB3049-004-Q1-E1-A11
ggagtcaacaacaacctaggtcacaaccgaggcagtcttttattttatagtataattcattctgtcatatatctgtgtagcaatggtggtctttatttgcaaggaagaatatggtgtgctcttgggcaatgactgggctgcaactcatgaatttggccacaacttttgtatctcaaatgaaggtgacgatgacgatgatgataatggcgtcattgatgtggccccagcggcatagaagaatttcgcaaaacatgcataaatgaggaggatgaggagggatatagtagtagtcagtgtaagcttcattctgtagtcttgcttagtaattacattacatttgtgtttactcttgggataggttccagtgttatgcttaattacggtcactataaatt

SEQ ID NO: 21211 - DNA, 340 bp, Glycine max
  Clone ID: LIB3049-004-Q1-E1-A2
gagagaaagagagagaaagatgtcgaagcgtggtcgtggtggttcggcggggaacaagttccgcatgtcgctgggtcttccagtggcggcgacggtgaactgcgccgacaacacgggggcgaagaacctctacatcatttcggtgaaagggatcaaaggccgtttgaaccgtcttccctcggcctgcgttggggacatggtgatggccaccgtgaagaagggaaaacccgatctgaggaagaaggtcttgccagctgtcatcgttcgccagcgcaagccatggcgccgaaaggacggcgtctacatgtacttcgaagataatgctggggttattgtcaat

SEQ ID NO: 21212 - DNA, 397 bp, Glycine max
  Clone ID: LIB3049-004-Q1-E1-A3
gagagaagtgaattattagaaaattcgcataaattagcttgaaaatatcttttgaaataaatgagtgtttagcatttgcggattattagggtcaagtcaccaaggtggccgtggcagcagcatatgcatgtggctcattctcaagaagaaaggctttggtggatccagtttccattgacaactcttgtagtctatcattttggtggatgcagcatatgccactgcctcaaattcctcatttttgtccccatcaacaacaaaaaattcctcagaggacgtaatggaagaaacatattctggtatcactaccaacatcaacagcgagcttcatagtaaaggccaatgaattcctttaaattgccaattgtcataatgacacaatgttgccaagcatata

SEQ ID NO: 21213 - DNA, 332 bp, Glycine max
  unsure (1)..(332): unsure at all n locations
  Clone ID: LIB3049-004-Q1-E1-A4
gacaccccattctcccaaactaacanacaaatcccagggagccaccaaccatggcttccaagctctgcgactcatgcaaatcagccactgctaccttgtactgccgccccgacgcggccttcctctgcggcgcctgtgactctaaggttcatgccgccaacaagctcgcatcgcgccacccgcgcgtcgtgctctgcgaggtgtgcgagcaagcgcccgcgcatgtgacctgtaaagccgacgccgccgcgctctgccttgcctgcgatcgcgatatccactccgccaaccccctcgccagccgccacgagcgcatccccgtcacgccgttc

SEQ ID NO: 21214 - DNA, 395 bp, Glycine max
  Clone ID: LIB3049-004-Q1-E1-A5
gacagccgcagcttgaaacagagcagagcgaccttgaagagctatggctgtcggaaagaataagaggatttccaagggaaagaagggtggcaagaagaaagccgctgatccctttgccaagaaagactggtacgatatcaaggccccttccctcttccaggtcaagaatattggcaaaaccctcgtctctcgtacccagggaaccaagattgcatccgaaggactcaaacatcgggtttttgaggtctcattggctgatctccaaggggatgaagaccactccttcaagaagattcgtttgagagctgaggacgttcaaaggaagaatgttctgacaaaccttcggggaaagggatttcacaactgacaagttgaggtctttggtgcgaaaatgg

SEQ ID NO: 21215 - DNA, 338 bp, Glycine max
  Clone ID: LIB3049-004-Q1-E1-A6
ggaggaagccacatagagacacaatacagagtgagttgttgctccttcgccacaactctctgccaacatgggtatctccagagattctatgcacaagaggcgtgccactggtggcaagaagaaggcctggaggaaaaagagaaagtatgagcttggtcgccagcctgctaacactaagctgtcaagcaacaagacagtcaggaggatccgtgttagaggtggaaatgtgaaatggaaggcattgagaatgggtaacgggaaattactcctggggaagtgaagctgtaactcgcaagactcgtgtactagatgtggtttacaatgcctcaaacaatgag

SEQ ID NO: 21216 - DNA, 315 bp, Glycine max
  Clone ID: LIB3049-004-Q1-E1-A7
tacggctccggggcgacgacagaatgggacatcacaggacaaaaacattgtcccaaagctgcctttagacaacacacacatcatggcgagctctgctattcaacagtcaacattcactggtcaaactgctctgaagcaactcaatcagttcgtccgcatcaccggtagcaccggtaaacgtcgcactaacatgcaccacatcgtcatgattgctcctcagaacatttggcacctcaacatcacccttcctactcgactatatcaacatactagttactgcatttaatataacactcgcatgtcaacataagcctg

SEQ ID NO: 21217 - DNA, 327 bp, Glycine max
  Clone ID: LIB3049-004-Q1-E1-A8
gggcgaaggcaagatgaagggtacagtttttggttggtttaaccggttaagcaacctaagcctgtactttcacgggccaggctcccttttctttcacctcggaggcacacacacacacacacacacttaatctggaaccatatataaaatagaggttaagcaacaagcacagtaactggaacgggttaagtaagtttgtgctgcgagagagaggggttccgttctgggatatggtgtaaactaaaattctgaatgtgtacacttgtaaggtgtgccagcttgcaaaacttggcatctgcctttttgagtgtagctagccccatcttc

SEQ ID NO: 21218 - DNA, 341 bp, Glycine max
  Clone ID: LIB3049-004-Q1-E1-A9
gacaacacagaacaaaaacaaagaaaaaaaaaaacccttagccaacacaaccatcatggccacctctgctattcagcaatcagcattcactggtcaaactgctctgaagcagctcaatgagttcgtccgcaagaccggtggcgccggcaaaggtcgcactaacatgcgccgcaccgtcaagagtgctcctcagagcatttggtaactcaacattacccttcccactccactagttcaacttagtagttactgcttttaatataatactcgcttgacaacataaaataatactagtaattccacaaaacttagatgcaaaaccttttgtttttggtattgtg

SEQ ID NO: 21219 - DNA, 340 bp, Glycine max
  Clone ID: LIB3049-004-Q1-E1-B1
ggcagaaatggggaataacagacaaaggagattcagaactcatcgcgcacaatcaagtcgacaccaccaccaacaactcttactagaggacgattctcaaagctctcttccagcagaaaatggtgagggcgaggaagaggaggaggaactcacggaacctaaaataaagcttgctatgtgggattttgggcaatgcgatgccaaaaagtgcactggacgcaagctttcaagattgggcatgctaaaagagttacgtgtgagtaatggtcttgggggcattgttttaagtccggctggaaatcaatgtgtctcaagagaagattactctttaatccagaag

SEQ ID NO: 21220 - DNA, 399 bp, Glycine max
  Clone ID: LIB3049-004-Q1-E1-B10
ggagctttagattcttttcccctagattcagccacagttggaaaaaaaaaaaaagttgttcgagatggcacgtacgaagcaaactgctcgtaagtccacaggaggaaaggcacctaggaagcagctcgcaaccaaggctgcacgtaagtccgcaccaactactggtggtgtgaagaagccacatcgttatcgtcctggtaccgttgctcttcgtgagattaggaaataccagaagagtaccgagcttttgatcaggaagctccccttccagaggctggttcgtgaaattgctcaggacttcaagactgatctgcgtttccagagccatgctgtgcttgcaatgcaaagaagctgctgaggcataccttgttggactctttgaggatactaatctgtgtg

SEQ ID NO: 21221 - DNA, 371 bp, Glycine max
  Clone ID: LIB3049-004-Q1-E1-B11
gagaagaagaaaagaccgtcaaaagtcgaacggagacactactctttctttcaccctaacacaacaccggcaatgcagacgctacttctgccggcaacacgcgccggcagcttcacggcagttcctctgtcagcctccgccgtcgcctcccctccactccctcaaccatttctcagcccgaattccttcccctcactccttctcaatcgggctcgttcatcttcctcttttagttcctccatcgctcgtcaaccatggaagaagcttcccttcaccgcaagcgcttcttcgcaagtgtctccggcattcactccctccaacgacgaatcagataaggccaaactcgagcaagtggcgaagagattggagaa

SEQ ID NO: 21222 - DNA, 395 bp, Glycine max
  unsure (1)..(395): unsure at all n locations
  Clone ID: LIB3049-004-Q1-E1-B12
gaaaggggaatggcatggttgcagttgcagagaatcgtgaccaagggaggtgctaatttgatctcaccactcccactttcacgattcttctcgaaatcttcttccccctatgttgtgaaagttggaattccagagtttctaaacgggattgggaagggggttgagtcccacgttcctaagcttgaatccgaaatcggtgatttccagaagcttctcctcactcgcaccctcaaactcaagaagcttggcattccttgcaaacacaggaagttaatattgaaatacacacacaagtacaggctgggattatggaggccacgtgttgagtccatcaantgcctgtttggtttctaattagtaagtantcgctgtttgttagaccatattgcaaatgt

SEQ ID NO: 21223 - DNA, 280 bp, Glycine max
  Clone ID: LIB3049-004-Q1-E1-B2
ggggtgagttgttgtctatctcttcttctctttgtgttttggctgtggacgtaaaataatggctctgtcttttggttttgggctcttgtcttcttcttcttcttcttcttctttatgtgttctccctccatcagaaacccacactttcatgatgaggccttctgcttcttctggtttgcgcatgatgcgtaccagtcgcattacctgttgcaagctttctcagtcttcgaagccagcccgcaaaattcgtggtatcattaaaccccgcaaaattttcccc

SEQ ID NO: 21224 - DNA, 398 bp, Glycine max
  Clone ID: LIB3049-004-Q1-E1-B3
ggtggataaaaagggtgggaatcggattaggttctgcgtgcacaggcgaaaaccctaatcctgaggcactgaaagtgtgatatggcaagagtcatttcctcttcctgcgcacgcctcgcaatgcgcctcttctccaccaccaccacagccaccgcgttcgccgtcactttacccaaaccctcatcactctccctctcatcgcgtcgattcctcttccctctctcccatgccatcgtccctccctccacccgcgtcgccggaatccggtgccgcgttaaccgcgccggagactcggcgtactcaccgctgaactcggggtcgtcctcttcgtcgttcaacgaacggccccccaacggaaatggcgccgctcttccccggctgcgactacaaccactggg

SEQ ID NO: 21225 - DNA, 393 bp, Glycine max
  Clone ID: LIB3049-004-Q1-E1-B5
gactgcagaggtgtattttctcacttctcagcactcagcagcgatatcagttgaagaaacagaaacaaacaaaagaggcagaagatgttgtgggtggacaaatatcgtcccaaaaccctcgaccaggttatggtccacaccgacatcgctcgcaatctcaagaaattggtaacggaacaggattgcccccatttactcttctatggcccatctggctccggcaagaaaaccctaatcatggctcttctccgccaaatgttcggacctggtgccgaaaaggtgaaggtggataataggacctggaaagtggatgctgggagtagatctcttgatttagagctgacaacaataaccaattgcaaatcacattgaaatgagtccgagtgatgcagg

SEQ ID NO: 21226 - DNA, 381 bp, Glycine max
  Clone ID: LIB3049-004-Q1-E1-B6
ggtctgcaacggcgtcgttatgatcagttgagaatccaaaggaatcgagtcgaatcatctgaccggcgacagttatgtacagagagcgaggaggcgtcggatccaaatcggaggtaacttccgttgatcggaagcgaatcaacgacgtcctcgataaacagcttgaacgttcctcgccttccacatccagagccgccgccatcaacggcaaggaccgctcctcctcttccctcttagccgccgccaaggactcccgctccgcctccgtcaccgcccctatctccaagaattccaacgcttccgacgaggaatctgaaacagacagcgaggagtctgatgttaattgggtccaacggagatgacacatcgtggatctcgtgg

SEQ ID NO: 21227 - DNA, 337 bp, Glycine max
  Clone ID: LIB3049-004-Q1-E1-B8
ggtgttaaatctcttaacaggatttgggttttgaagcttactgggatgtaacaaacagaaacagctttctttttgggatgcccctttgatttctggttctggacacaagctgtaggtgttacttcaactggattctggatagatattagatacagcttgaagttatgtctgcttatggccatcaaatggagcagatgtattctgcacggagtctctcaagtggtggttctgagttgaggaagagcagttttgtttttggaatcgggattctatatcacatcctttgtcgccaccatctttgttgctgcattagccgctgcaggacttctattgatta

SEQ ID NO: 21228 - DNA, 393 bp, Glycine max
  Clone ID: LIB3049-004-Q1-E1-B9
ggcagagtgagtgagtaggttactggaaagaggaatggagaaggaagccgaattgggtgaaaaggagtttgaacaaatggtgcgggctttgccttccgatgctgtcaaggagttattgtcgcacggggtatgcactcgctgcatctttcgcctcttcggcctccaaggccccgtctatgcttctcctccctccctctcttccctcttcgatgcaacacaacaagattgcctttgcacactttgcttaaggattctgcagttcacatattctaatgttcaaaacgacaatctccctcttctcattgctgacatggttaaacgacaagcctatcagttcgataccttttcccttgaaagttccaattccacctatcattatcgatgatgttaact

SEQ ID NO: 21229 - DNA, 326 bp, Glycine max
  Clone ID: LIB3049-004-Q1-E1-C1
ggtcttccgcagcggtgttagggcttgtaaagttacactttgctttcagtttcggtgaaatagaattacatcgtaagcatcgtgcttctgcttttcgttacggatctctatattctcaattggagctcatggatcagaaagcaggagatgatagcagcagcgtgaagaaaataatttcagcatgtgatgtggacgctttaaaaaagtgtttggaagagaataagggagactatgtcaaatgtcattcacagattgaggctttcaaatcatcatgctcactcaagacaccaaactcctctcttgattccgcttcacgttagattaaa

SEQ ID NO: 21230 - DNA, 396 bp, Glycine max
  Clone ID: LIB3049-004-Q1-E1-C10
ggaataaaaaatggctctgaatccaagatcacttcggttcttaaacgctgtccacagtttaaattgttgaaacatgctggatctttaaactacaagagattgcttccatttatattggataccatgaaagatgattcttgcaattcttgtcctcagcaacaatcagggttgcaggcttgtgatttaaacaatggtagttcaagcccaaaatctcaaattcctgaatttcagtcatctcatgattcatgcaaagtgattcaactgcaagatgaacaggttgtattaaatggactctgcaagccagaaagctccactgatccatcaatttctgttcatggaatagacttaccaatcacaaccttggcacctatgattaatgaagttaccaccagagag

SEQ ID NO: 21231 - DNA, 360 bp, Glycine max
  unsure (1)..(360): unsure at all n locations
  Clone ID: LIB3049-004-Q1-E1-C11
ggaagaagaagaatccaaaagcaatcccatctgtgtgtttgcacatcggaagggagggctatcaaactctaaggattgctctgaatcggtttcgtcttcttcgtttttcttcaaaatcctcgtgacagatctaatctaatcagccttttgggggtgtttcagacattgcatgcatatgggagcagtggttgtgttggatgctataaaaggccttcactgagtcccacagtggatgtgccatcaaaagggttggcaacacaaagtaacgtantgaggaaaccgagttcatcagangatttttggaccaccagcacgcatgatatggacaacagcgctgttcagtcacaaaggagcatctct

SEQ ID NO: 21232 - DNA, 398 bp, Glycine max
  unsure (1)..(398): unsure at all n locations
  Clone ID: LIB3049-004-Q1-E1-C12
ggttcaatgctggtgttagagttggtgttggaattggccttgggatgtgtgtagggcttgggattggtgttggactgctcatgcgctcataccaaacaacaaccaggaacttcaggaggagatttttctaaactgctataaggaatttgctactctagtttaatgacaagcaagatatgttggagtttaatctaaggtgggacacctctggaggaagaacccaaattctacaagtctaatgcatgaagtgtaagttttgtagatgagtggaggttgtgcttcctctctgttttgtggcttacttgcagatacgttcaagtagatttgcagatttgcatttcctggtaaattttatctgatcctcggacaacaatagatatcaatanaagagaaataca

SEQ ID NO: 21233 - DNA, 273 bp, Glycine max
  Clone ID: LIB3049-004-Q1-E1-C2
ggacgatcgctttctgagtcaaccctagaaccttacacgcgtctgggtaaagacttttccttatctctgcgtacacttcacccacccacttcctccgtgccaactgctcccccaggcgcattgcagcctccaccgtgctctccgcgctatcgtgcgccgaatccacgattcccatcctcaccgcctccgccgccgttagcttcgcgccgcccagcaccaagtcgcgcatcaccgccggggacctgatcttggaccttatgacggcggcgaagt

SEQ ID NO: 21234 - DNA, 288 bp, Glycine max
  Clone ID: LIB3049-004-Q1-E1-C3
gggggcaaggaggatcagaggagttagcgtgatccattgttgttctctctctctctagagttcttatttcctctctctagaattttctatccgttcatccccctcacaaattatggtttttgcgaatcttttagtgtctgaaatctaatccaacgtttcatccatggtttccgattcaatggccgtcgtgtcgagtccctgggcggcagagatcaacggtccggggaacaggtcaaggaccagtaggtccgcgaaattgtagcagtataaaaacgatgcggctttgcg

SEQ ID NO: 21235 - DNA, 391 bp, Glycine max
  Clone ID: LIB3049-004-Q1-E1-C5
ccagaaggtggtggttaattactaccccaaatgccctcaacctgacctcactcttggcctgaagcgccacacggatccgggcactatcaccttgctgcttcaggaccaagtgggtggacttcaagccaccagggacaatggcaaaacatggatcaccgttcagcctgtggaggctgccttcgtcgtcaatcttggagatcatgctcattatctgagcaatggaaggttcaagaatgctgatcaccaagcggtggtgaactcaaaccatagccgtttgtccatagccacttttcaaaacccagcaccaaatgcaactgtttaccctctgaagataagagaaggagagaagcctgttaatggaggaaccaatcacttttgctgaaatgtacag

SEQ ID NO: 21236 - DNA, 341 bp, Glycine max
  unsure (1)..(341): unsure at all n locations
  Clone ID: LIB3049-004-Q1-E1-C6
ggagccacaagcttcgtacacaagaatgactcgcacacttgtctcaatgattttgctgaaattttttatctttgcagccatggtgattgttctattctcacttggtgtgagtagcaatcaggtttgtcctggacaatgcgatgatttttctgattgtaatgcctactgcgtggcccacaaccataagacagggaaatgcgtcgtcgcacctgaagtanggtttatttgttgttgcttctaagatggtgaacanactttttagtaagagttctcttcatatggttgtaagcaagcaatgtaatttttgaataatcattagcttcattggcgggaataaaaag

SEQ ID NO: 21237 - DNA, 390 bp, Glycine max
  Clone ID: LIB3049-004-Q1-E1-C7
gggagcgaagtgaattgaaattgaagtgactcggggtgagttgactcagcaatggcggaagaggtgactcgggtgatggtggcggtgaacgagtcgagcattaagggataccctcatccttcgatcagcagcaaaggggctttcgactggaccatcaacaagatcgttcgcgacaacgtctctgccttcaaccttctttttcttcacgttcaagtccccgatgaagatggttttgatgacatggatagtatctttgcttctcctgacgattttaagaacatgaatcagagagataggattagaggagttcatctgctggaatacttcatcaataggtgtcatgaaattggggtgggttggccaaccatggataatgcatggtgatcccaa

SEQ ID NO: 21238 - DNA, 385 bp, Glycine max
  unsure (1)..(385): unsure at all n locations
  Clone ID: LIB3049-004-Q1-E1-C8
ggtgttagtttcgtgtgttgagaagcagagagaggcagagatgcaaggaagcgcagctgacggtgaagccttggatttcgagcctgaggacgatgacttgatggacgaggacggcgcccccgacgccgacgcttctccgcctcaacctaagctcaaatccgccatcaccgccgccgccgcccccaaaaagaccaagggtcgccgattccggcaggacaccgaacccaaccgtgacactcgcctctccggctccgacttcgactctctcaccaccgagggcggccctggccctcaaagattcattgaaggatggatcattctggtcancggcgtgcacgaggaancgccaagagacaatttgcaaaacacctttggtgaatatgga

SEQ ID NO: 21239 - DNA, 398 bp, Glycine max
  Clone ID: LIB3049-004-Q1-E1-C9
ggagtgagtgagagaaagaagagaaggagttgaagtggttgttgtattgtagtagtgtgtaaagtcttggtgatggatagacacaaatgcaagctttgttcaaggtctttcagcaatggcagagcccttggtgggcacatgaaggctcaccttgcttctctccctctccctctccctccaaagcttcactcttgtttctcttcctctgactcagaacaagaacaatctttaagggagaatcctaagaaaaccttgaggattctggatcctgaagacagagagagcgagacagagtctaataagaaaccgactcgtcaacgattcaagcgcaactggaattctacatgccaaagctcagcctcggacaccccgaagccgaacctctcagctccgtctcc

SEQ ID NO: 21240 - DNA, 393 bp, Glycine max
  Clone ID: LIB3049-004-Q1-E1-D1
gagacacaactgcgacttagttcatcccttctcaagccaccgaagcctcactttttgaaattacttgcatagatagataatcatggctatgatgaaacgtgctgcttcctctgcgcttcgctctcttattgcctcatcctccaccttcaccagaaaccttcatgcctcaggtgaaaagaagaagattgtgggggtgttctacaaagggaatgaatatgctaaattgaatccaaattttgttggatgtgttgaaggtgcattgggaatacgtgagtggctggaatcacagggtcatcagtacattgtcactgatgacaaagaaggacctgattctgaacttgagaaacacattccaaaatgcaaatgtcatcatatctactccattccaccccg

SEQ ID NO: 21241 - DNA, 399 bp, Glycine max
  unsure (1)..(399): unsure at all n locations
  Clone ID: LIB3049-004-Q1-E1-D10
gaagaaaaacaacatttgttttctttctgtccaagcaaattttccctcatttattctcctctcctcacaaatcacttcccttattcaataccaaatcaaattattccttctcaatcgattctcttcggccatgtttgcttacagggttttgtcccgttcctctgccaccctttctcgaagcttcacccttttctctgtttcacgaaattcccaacctttctccaccaacctctccaataacttcaattcnctccttcacccatctcccaacaagctgattccagttcaaaccaattttctgaattcaatgaatccatcattgacttcgagatttggattttcntcaaagggcctcacatgaacatgcaagtgaaggagcanaggtatctgattagtctg

SEQ ID NO: 21242 - DNA, 382 bp, Glycine max
  unsure (1)..(382): unsure at all n locations
  Clone ID: LIB3049-004-Q1-E1-D11
aagcccatggtggttgaaactttctctgagtatcctccccttggtcgttttgctgtgagggacatgcgtcaaactgtggctgtcggagtcatcaagagtgttgagaagaaagaccccaccggagccaaggtcaccaaggccgctgccaagaagaagtgattgcatttgggcaattttgctagcacatgtgatcatcatcgtggttactcctttatagtagttttatccttgcagagtcttaagtgttttgtttaagttatatttttaagtttctgccggtttcatgtagccgtaactttcaaaactaggttcttgatcggcggtggtcaattttcattgcnggtttgtttttgatgagtactgtttttggttttgatggtaa

SEQ ID NO: 21243 - DNA, 393 bp, Glycine max
  Clone ID: LIB3049-004-Q1-E1-D12
gttctagaaggaacggggaggttttgcgctgcgtgatttcggttgttgtgagtcgctgtgcagggaaaagtggaaggtttttgaggttgttagcttcggtggtgaggtatgttactaaagttagggtttctccgaggaagctgtcggggttctgtatgtcggaggcgattcatggggcttttgcgtcgcaagggatgcagtttgtaaagggtcctacggttgttaacactggaatatgccagttctttggggtcacagggactgtgcccgcattttctgtggacttttctgctgtttctccttgttttgagtatctgcagtatgcgatgttcttaagatctatgtttaagtcattttttcttgtacataatccaataaatgtgcctagtgatg

SEQ ID NO: 21244 - DNA, 323 bp, Glycine max
  Clone ID: LIB3049-004-Q1-E1-D2
gggattcaatgttaagaatgttgctgttaaggatttgaagcgtggttatgttgcctcaaacccaaaggatgaccctgcaaaggaggctgctaacttcacagcccaagtcatcatcatgaaccaccctggtcagattggaaatggctatgcccctgtcctcgactgccacacttctcacattgctgtcaagtttgctgaactcatgaccaagattgacaggcgatccggcaaagagcttgagaaggagcccaaatttttgaaaaaacgtaatgcgggttttgttaagatgagtccaaccaaacccatggttgttgaaactttct

SEQ ID NO: 21245 - DNA, 393 bp, Glycine max
  Clone ID: LIB3049-004-Q1-E1-D3
gggaaacaagagtgatctgacagcaaatagagttgtctcatatgacacagctaaggaattcgcagatcaaattggcatacctttcatggaaacaagtgcaaaagatgctacaaatgtggaagatgctttcatggccatgtctgctgccatcaagaatagaatggctagtcagccttcagcaaacaatgcaaggcctccaacagtgcagatcagagggcaacctgttggacaaaaaagtggttgctgctcttcctaaccaggtggtgctgcttggtctacacttaccttttgcatgtaaggggcatatgctatttcactaaatagtggaccagtgtcacgtaatccaaactggttggttgggaaattggcctagatgattccattctttaccat

SEQ ID NO: 21246 - DNA, 347 bp, Glycine max
  unsure (1)..(347): unsure at all n locations
  Clone ID: LIB3049-004-Q1-E1-D4
ggttttganatanaaaagaatactaattattaaatcctggtagacatgcactaaaaataaatctaaaatttcacttgcacccacccacacaccctcgcatccatcgtaatcaaaacttaattcacatttttgtttgggttttttcatcacagtgcttttctttccttccttctgagattgctgaagagagaaaagcagaatcgaaagaactgaattggatttcattggcggagtgaaagtgaagtgttgcgcaaatctgattggcaagaatggcgccagtgtcagctctcgcaaagtacaagctggtgttcttgggcgatcaatccgttgggaaaaacagcatcatc

SEQ ID NO: 21247 - DNA, 390 bp, Glycine max
  Clone ID: LIB3049-004-Q1-E1-D5
gatcttcaagcgttctactatttcgtcaattccaacaacaccacaatgggaagaagaccggcgaggtgttaccggcagataaagaacaaaccgtacccgaaatcccgtttctgccgcggcgtgccggagccgaagatccgaatctacgacgtgggaatgaagaagaaaggcgtggacgagttcccgttctgcgtgcacctggtctcgtgggagaaggagaacgtctccagcgaggctttggaggcggcgcgcatcgcatgcaacaagtacatggccaagttcgccggaaaagatgccttccacctgcgcgtgagggtgcatcccttccacgtgctccgcatcaacaagatgctaaccttccgccggggccgacaggctccagaccggcat

SEQ ID NO: 21248 - DNA, 317 bp, Glycine max
  Clone ID: LIB3049-004-Q1-E1-D6
ggagagaaagagtgaggagagaattacagagcattttccaacacgattacacgaccgaatcaaaccctctctttctctccgaagctgcgtttaatatcttactcgccttagattgttcttctctttcattatactgttctcttttcgatttgagggaacagtacaagagtgtgaggatcggttaacccaactgcacaggtagtcactaaaataatggagtctcacgatgaagactggatgccaggctcctgaacgccccaattcttgcataataattgtggcttctttggaagagcagcttacatgaacatgtgttc

SEQ ID NO: 21249 - DNA, 355 bp, Glycine max
  Clone ID: LIB3049-004-Q1-E1-D7
gaattggatagagtcttgactaaaggagcatatatacttttctatgcaaggtgctcgccaagggccccaagattaattaggaacagaatactgtccccagattcaaaaagtaaagtcagtggaaagactcttacaacaaaagcaagatatatatctacaaattctggtgtttctgaacatgccaatagttccatttcttcagatgactcacctgccttagcctctttctattcaaagtttcaccacctgaaaaggattttggaagaagactcgtcaagtgataattcatcccttattagcagcaactctgatgaaggttcttgtagtacagatagcacccgtgattcaaccaaca

SEQ ID NO: 21250 - DNA, 385 bp, Glycine max
  Clone ID: LIB3049-004-Q1-E1-D8
ggggggaaagcctgagaagaagaaagaaagatggtgaaagtggcgacgtacttcgcgatgacgcttggagccttcgtgttctggcagtccatggacaaactccatgtctggatcgctcttcgtcaagacgaaaagaaagagaggttggagaaggaagcggagatcagaagggttagagaagaattattgcagcagcaggccagtcagaaggattctctttcttgaattcgaattatgttgtaattttgctttgtaatttccccttgcttctgtttttccaatgcaatgtcttgtgctcaaataaaatctgctactcccgagcacttcaaatttaattgcgtggatttccatggtgtccctctacacatgcacttgtttcattaac

SEQ ID NO: 21251 - DNA, 333 bp, Glycine max
  Clone ID: LIB3049-004-Q1-E1-D9
gcagatcaagtggaagagtggctagtggtagagttgcattaaaaaatggatcccattaacaacggtggccgattccaaagccaatttaacatgggaataaggttaaacaacttccaggaaaacaatacgggaaaatggtccttccgccaacaatccctcaaccccgtaataacttgatgccggggatgaacttgcggtcaaaacttccttcaaatgaggtccctactattcacatctatgggggcaagagctgggacatggtgtattatggacaaagcaaacagaaggcttttggtgtcacaggctggaaaaaatttgttattgataattgtt

SEQ ID NO: 21252 - DNA, 391 bp, Glycine max
  Clone ID: LIB3049-004-Q1-E1-E1
gacaacaaaatttgccaattgccatttcaatcctcagtttctttcttcaacgtttccatcatacacagatcccaatcctctctcaagccctaatttcccctcatttccatggccacagaagagcccactgtcgcggtggaacccgctcccgaacctgcctccgccgatcctcccccggaggagaaggaggagaccaaacctgaagccaaggctaagaaaaccaaggagcccaaacctaaaaaggtttccagacctcgcaaccctcccactcatccttcctacgaagagacggttaaagatgcaattacctcgctgaaggagaaaaccggttcgagccaatacgcgattggcaagttcaaccgaggagaagcacaggcagcttccaccgaac

SEQ ID NO: 21253 - DNA, 325 bp, Glycine max
  Clone ID: LIB3049-004-Q1-E1-E10
caggataattcatgtgtatactccagaaatcatcaaaactgatgctgcaaatttcagagagttggttcaaaggctcacaggaaagccaaaagaagaaggaacaggtggaagcaagtccgaaactgcactaaccaaagaaccaatggattcacaccccaagaaggccatgatcatgcaagatgaagaggagtttctgagtctacaaaatgggacaaggctaaagaatgaacataaagaggaggaagttcaagatgatgtgtggaggtcaaagtcaaacgagaagttcagtggtttccttgatgggttctcagaattggatggtttt

SEQ ID NO: 21254 - DNA, 349 bp, Glycine max
  unsure (1)..(349): unsure at all n locations
  Clone ID: LIB3049-004-Q1-E1-E11
gaagcagaagcaggtgagtgagtgagtgagcaagagtgaagagcgaagagaatggctcccaagggtttaatctttttggctgtgttatgcttctcggcactgtcactgagtcgttgtcttgcggaggataatggacttgttatgaacttctacaaggaatcatgccctcaggctgaagacatcatcaaagaacaagtcaagcttctctacaagcgccacaagaacactgctttctcctggctcagaaacatcttccatgactgtgctgttcagagttgtgatgcttcactgttgctggactccacaagaatgagcttgtctgagaanggaacagatagaagctttgggt

SEQ ID NO: 21255 - DNA, 392 bp, Glycine max
  Clone ID: LIB3049-004-Q1-E1-E12
ggcagctagctgagaagcgaaaacccattattcttgttattaacagagtcacaaagaatcaaacttttctgttctctatagtaacgttctgggctaagaatatctggctttggttgaagtagtaatggttggcaaggagagtttgagaactcatgaggtcttgaactttagctttgagaagcttatgatggttgactgtggtggaaatagtgggaaaggagtgaactttaaagcgggggtgatcacagaatggaaggatattccagttgagcttttgatgcagattttgtcacttgtggatgatcaaacggttatgatagcttctgaagtttggccttggttggaaagaggcaatttgctttggcctgactcggttatcactctcatggtgt

SEQ ID NO: 21256 - DNA, 301 bp, Glycine max
  Clone ID: LIB3049-004-Q1-E1-E2
ggttctagtgtatgtgattgttgtgactcgttcttcttcgtcgttatcttcttcttttgttgtttgtgtgtttgttttttctctcacctgaaaatgtcttgctgcggtggtaactgtggttgcggaagcgcctgcaagtgcggcaacggctgcggaggctgcaagatgtacccagacttgagctacaccgagtcaagcaccaccgagaccttggtcatgggagtggcaccagttaaggctcaattcgagagtgctgaaatgggtgttcccgctgagaacgatggctgcaaatgtggagcta

SEQ ID NO: 21257 - DNA, 393 bp, Glycine max
  Clone ID: LIB3049-004-Q1-E1-E3
gaaaaaaatgattgtgagaatgtcatgattgatgcattcaggtggtctcgttgtaagaagcctctgccacagaaactgatgcgtacaattggcatccctttgcctattgaacatatagagttactggaggaaaatttggactgggaagatgtgcaatggtcgcaaacaggtgtttggattgctggaaaggaatataccttggcacgagtgcatttcttgtcaatgaattaacttttttgttattttgggggatggaggagttagtttataaaacacttgtgtttttttaggcaagatggtgaaatgatatacttggaaagatgttgtctcatgtaacaaaaagataatttatgggggccttggaaaattggtctccaataaacaataaaatat

SEQ ID NO: 21258 - DNA, 259 bp, Glycine max
  Clone ID: LIB3049-004-Q1-E1-E4
aatgcccagatcgttacgagcgtttcgtcgtccctgaaggcaccaaaaaggtttcttatgagaaggacacgaagatcatcaatgcggcgtccttcaccatcgagagagaggagcacactatcggcaacatcctccgcatgcagctgcacagagaccccaatgtcttgtttgccggatacaagcttcctcatcctcttcaatacaaaattaatggcaggatacacaccactagtcagtcctcgccaatgcaggcatataa

SEQ ID NO: 21259 - DNA, 384 bp, Glycine max
  unsure (1)..(384): unsure at all n locations
  Clone ID: LIB3049-004-Q1-E1-E5
ggcagcgcttgatttgaggccaggcaagccccactcaaccaccacacctctcctcgttcacgctacccctttctgctcttcttctacctttcaagttttaaaagtataaagatggcagagacattcctatttacctcagagtcggtgaacgagggacaccctgacaagctctgcgaccaaatctccgatgctgtcctcgacgcttgcctcgagcaggacccagacagcaaagttgcctgcgaaacatgcaccaaaaccaacttggtcatggtcttcggagaaatcacgaccaaggccaacgttgactacgagaagatagtgcgtgacnactgcaggaacatcgggttcctccaaaatgaattgggactggatgccgacaactgc

SEQ ID NO: 21260 - DNA, 383 bp, Glycine max
  Clone ID: LIB3049-004-Q1-E1-E6
acaggaaaactatcaagtctgatggtattgctggcctttatcgtggtttcaacatctcatgtgttggaatcatagtgtaccgtggtctttactttggaatgtatgattctctgaaaccagtggtcttggttggtggattgcaggatagtttctttgctagttttcttttgggatgggggatcacaataggtgccggcttggcctcttaccccattgatactgtgcgtagaagaatgatgatgacatctggagaagctgtaaaatacaagagctctttggaagcattcaagataatcgtcgcaaaagagggtactaagtcactctttaaaggtgctggtgcaaacattataccttccggttgcaggtgctggagtgcttgctgg

SEQ ID NO: 21261 - DNA, 365 bp, Glycine max
  Clone ID: LIB3049-004-Q1-E1-E7
gctgaaatagttgagttgacggaagttgaaaattttggttgagcaagagccttctctttgttccgttccgcgaccatgtctcatgagacatgcccttccgtaaagaacttccttcttttggattctgatgggaaacgtgtcgcagtcaaatacttctctgaagactgggcaacgaatagtgccaaggaaaattttgagaaagttgtcttcaacaagactcagaagaccaatgcccgcacagaagcggaaatagcaatgtttgagaataacattgttgtttacaagtttgtccaagatcttcacttctttgttaccggtggtgattaagaaaattaacctaaccttagccacagttctgcaggcat

SEQ ID NO: 21262 - DNA, 200 bp, Glycine max
  Clone ID: LIB3049-004-Q1-E1-E9
acaagacgacagaatggccaagttatctatgggatatacttcccacacattttcctctccggcgacgatcagtcctcctacatcagctgggaagtcattgcctggaatttgccgtgaccgggactttctatggctcttacatcctcaacccccgttcagtcaccaacgcccatgtccctaatcaccttgatgctattttc

SEQ ID NO: 21263 - DNA, 316 bp, Glycine max
  Clone ID: LIB3049-004-Q1-E1-F1
gtatacaagggatggttctgtttggaagagtgatgagacttctgcccagtcatccagccatgtggtagatttgcttttcttatcacagaggtgtctagtatccaaagcagccaaacaattgatggagctagttcatcagacgctacaggatgtttgcctgtcatctacaagagttgcttttgaattttatcacacagctagagatgctgtactactttatgaagtagttgtccctgtcaagctagagaggcagctcaatggcatcaatcaagcagccattctgttgcataatgactgtctttatctctcccaggag

SEQ ID NO: 21264 - DNA, 359 bp, Glycine max
  unsure (1)..(359): unsure at all n locations
  Clone ID: LIB3049-004-Q1-E1-F10
ggacatgagagagagagagagatgagggaggtgtaagaaactggaaggagtaggtgttgttggcattctgacctaaagcttgtgtctttctgcttcgtttgtatcttctgctgcgtaaagaggatccctttctgattcttccgtaaatttcgtctctgaaactanggctaatacttcatctaccgatctctatattctggatgaaggtttgcttttgatccggcttgggagttttgatcgacttgattttaactccaacttttaagaaatgtcattccgcagcatagttcgtgatgtaagggaaaatttccggaaccttacctaggcgtagtcttgatgtcagacttactgggcatcat

SEQ ID NO: 21265 - DNA, 366 bp, Glycine max
  Clone ID: LIB3049-004-Q1-E1-F11
ggcagttcaattccaatatattccattctctctgtgtatttccctacctctcccttcaagatgcagatcttcgtcaagaccctcaccggcaagaccatcacccttgaggtggaaagctctgacaccatcgacaacgtcaaggccaagatccatgacaatgaaggaatccccccggaccagcaacgtctcattttcgccggaaagcaacttgaggacggccgtacccttgctgactaacacaatcagaaggagagtactcttcatctcgtcctcagtctccgtggtggcatgcagatcttcgttaagacactcaaccggcaagacataaccctagaggttgacagctccgacgacatcgataacgtc

SEQ ID NO: 21266 - DNA, 331 bp, Glycine max
  unsure (1)..(331): unsure at all n locations
  Clone ID: LIB3049-004-Q1-E1-F12
gacacgcacacagttacgctcttcaaatctatctcttctcagcgattcttgcttcaagttccagaaatgggtgtggctcaaaacattcccgatgcggaggagggaaccttggagattggaatggaatacagaactgtttctggagttgctgggccattggtcattcttgataaagttaagggacccaagtttcaagagattgttaacattcgcttaggagatggtactactcggcgtggacaagtgctagaagttgatggtgaaaaggctgttgttcaggtctttganggtacatctgggattgacaattaattttacaactgtgcaattt

SEQ ID NO: 21267 - DNA, 334 bp, Glycine max
  Clone ID: LIB3049-004-Q1-E1-F2
ggctccaaaaagtcctagctcaacaacaagcatatccttcatcattgtcaccacccctttgcacaatggagagggagagagcattgtttgagagggtgagaaagaatagcacagtggaagaggaagtggaaaatgaagtagaggaggaggatgaaagtggcgttagtattactgaagaagagaagaagaaaggggttggtagtagtggtgggagaagagggtcaagtggaggtagtggaggggtttctccaccttcatgtcaagcacaaaaggtttgtggcgaattaactgatgcaaaagggtaacatccgccgccacaaggtgtgtgagtttc

SEQ ID NO: 21268 - DNA, 392 bp, Glycine max
  Clone ID: LIB3049-004-Q1-E1-F4
ggaaaggggggccctcactctgaaccaaataccatagttttctctttgtccgtgacaaaacagttcccacaaaaaaaagaaaaaagaaaaaagaaaagcactaaaaaaaaatgaagaagggtttctcccttgtgctgctgatccttctgatccagtacaacaacgttgtcaacgcctacaacaacaaaaactgtgtcacagaggattgcctcatcggcaacaaggatttggaatcagagttctactttggatcccatgtggccagaatgctctacgatgtgagccaatctgtgagtggcaaaacaggcaataaaaataacaaagctgttaattgtccaaataagcaagggtaccgaaacctgcttgccttccaaaaacggtggtggccctaa

SEQ ID NO: 21269 - DNA, 324 bp, Glycine max
  unsure (1)..(324): unsure at all n locations
  Clone ID: LIB3049-004-Q1-E1-F5
ggaacggaaaagcactggcgcagctaccctgaggcttctcttctcttctcttctctgtcgtgagtcaccatggtgagggttagtgtgctgaacgatgctctgaagagcatgtacaatgctgagaaaaggggaaagcgccaagtcatgattgggccatcctccaaagtcattatcaaattccttttggtgatgcaaaagcacggatacatcggagagtttgagtatgttgatgaccacagggctggtaaaatcgtggttgaattgaacggtagactgaacaagtgtggggttattagtcnccgttttgatgtgggcgtcaaagag

SEQ ID NO: 21270 - DNA, 86 bp, Glycine max
  Clone ID: LIB3049-004-Q1-E1-F6
ttcgggggaacagaaatgcactggcgtacctaccctgaggcttctcttctcttctcttctctgtggtgagtgaccatggtcagggt

SEQ ID NO: 21271 - DNA, 384 bp, Glycine max
  unsure (1)..(384): unsure at all n locations
  Clone ID: LIB3049-004-Q1-E1-F7
ggcaccatcgaggtcatgggcctcatgcagggcaagaccgacgccgacgccatcatcgtcatggacgccttcgccctcccagtcgaaggcaccgagactcgcgtcaatgcccaggccgatgcctacgagtacatggtcgattattcccagaccaacaaacaggctgggcggttggagaatgttgtgggatggtatcactctcatcctggttacggttgctggctgtcggggatcgatgtttcgacgcagatgctgaatcagcagtttcaagagccgtttctagcggttgtgattgacccgacgaggactgtttcggcggggaaggttganattggggctttcaagaattaacctggaaggggtataaccctccggatgagccta

SEQ ID NO: 21272 - DNA, 355 bp, Glycine max
  Clone ID: LIB3049-004-Q1-E1-F9
ggctcacttggatctgatctgctgaaacacgccacactcttcttaccatgggcctcctcgatcacttgtgggatgacaccgtcgccggtcctcgcccggagaatggccttggcaagctccgaaagcaccacaccttcgctttccgatctgcctccggcacggaatcagacagcggaagcgtgaaatcgtacggtgaagatttgccggaggatgcggtgagagtgacgcgaagtatcatgatcgtgaaaccacctggtggtaatcagagtccgagcggatccgctccggcttcccacgccggttctactcctccggtgtctccttattcgggagctagatagtcctttcgttctcg

SEQ ID NO: 21273 - DNA, 324 bp, Glycine max
  Clone ID: LIB3049-004-Q1-E1-G1
ggtgggtttcaactttcaattcagaacgaacgattccttcatttcccgagtgattcaccgatctgataatcgattgaatttacggtttgggagatggcgtcgagtgtgttgaagagcctcatcctgagattttcctcatcgaggaacacgacgaccaccagaagtttcagcctcgttactcctcaaatcagcagccacaccgccaagtggatgcaggatacaggcaagaaatctccgatatagctgattaatgaagttcctccaattaacgttgaaagcaggatagttgcctgtgaatgagataccgatcctgcccttggacac

SEQ ID NO: 21274 - DNA, 405 bp, Glycine max
  Clone ID: LIB3049-004-Q1-E1-G10
gagcctcatcagaagcagaacgatgagaagcagaaagatcaaaagcaatggcgccgaagaagccgagaaccactacaaggaaccctgatttggttacggggattggcaagtattcgaggtcgcagatgtaccacaagaggggcatctgggccatcaaggccaacaacggtggcgttttgccccgccacgatcacaagcccatgctcgaggtcccggaccagatgccgcacaagttctacccctcggacgatgttaagaagcccctcgtcaacaatcacaagcccaaacccgcgaaactcagggctatcattactccagtgactgtgttgatcctgccttcctgggacgttcatgggaaacagggttgttttcctgaagcagctccgatctggattgcttcttgta

SEQ ID NO: 21275 - DNA, 324 bp, Glycine max
  Clone ID: LIB3049-004-Q1-E1-G11
ggggcaacacacccacaagtcatcaaacttcaattgagtttcaaagagatcagtggtagctagtgtggtgcaattgtgttgatcaaggatggaacaaaagaagtttgtggcactattaatggtggttgtggtaatggcttcttctatgtggaaagggtccaaaggtcttagtctctgtaacatggatgaaggtggattggaggcttgcaagccctcagtgactcagccaaacccagttgatccatcccctgattgctgcaaggctttggctggtgctgacttgaaatgcctttgctcttacaagaactcatcagagttgccttt

SEQ ID NO: 21276 - DNA, 389 bp, Glycine max
  Clone ID: LIB3049-004-Q1-E1-G12
gagacagtgagaaatgatgatgaagcgtcggttccttttggttctcttggttctctatgtcacagtggagcagagtaagctactccaccacgtagaagccgatggtgggtttgtaaaaacaagaggagtgcagcttatgctgaatgggagtccctactatgctaatggctttaatgcctattggcttatgtaccttgcctctgatccttcccagagaaacaaaatctcatcggtatttcaacaggcttcaaatcatggactcaacattgccagaacttgggccttcagtgatggtggatatcaacccctacaatactctcctggattcaacaatgaccaaatgtttcagggcttggatttcgcaatagccgaagcaagaaaatatggga

SEQ ID NO: 21277 - DNA, 389 bp, Glycine max
  Clone ID: LIB3049-004-Q1-E1-G2
ggttctagtgtgtgattgtttgttgttgtaactcgttcttcttcttttgttgttctgtgtttgtgtttgttttttctctcacctgaaaatgtcttgctgcggtggtaactgtggttgcggaagctcctgcaagtgcggcaacggctgcggaggctgcaagatgtacccagacttgagctacactgagtcaaccaccaccgagaccttggtcatgggagtggcacctgttaaggctcaatttgagggtgctgaaatgggtgtgcccgctgagaacgatggctgcaaatgttggacaaactgctcctgcaacccctgcacttgcaagtgaggtgttgggagagcaagctttaagcaaagaatagcccttaattaggaataatgataaacta

SEQ ID NO: 21278 - DNA, 308 bp, Glycine max
  Clone ID: LIB3049-004-Q1-E1-G3
gaatctagtggaagagtgaataagagatatcaatatattatgataatggagggatacaataagaaggttatgattgtggggatggtgttgggcatggccatgattgggatggccaatggccaatactcgttttgtcgcatgcccagcgatgggttggcggcatgcaagccgagtgtgagtggggactatcctgctgatccctccactgcttgttgctcagccattgccaaggctgatcttaaatgcttctgccgcttcaaggattcgggccttctctctatgtatggtgttgatcccaacaagtgcat

SEQ ID NO: 21279 - DNA, 312 bp, Glycine max
  unsure (1)..(312): unsure at all n locations
  Clone ID: LIB3049-004-Q1-E1-G4
ggtgtaaggacttgtttgtttgattagtaaaaagatgaaggttgctgcagaaggctgcaacttactgttattgttcattacctcttacctttcactgatctcaaggcttggcgtccattctttgtcttatgatcattctgctaccacaaagtgtttggcagaacctcggagagcacagtatggaggaggcattatagtaaatccaggatttgatcacaacatagagggttggacagtatttggaaaacgagcaatcaaggagcgaatatcgaatggangcaatagattcattgttgctcacaacagaacaca

SEQ ID NO: 21280 - DNA, 257 bp, Glycine max
  unsure (1)..(257): unsure at all n locations
  Clone ID: LIB3049-004-Q1-E1-G5
gacgcacacgccaacgcacacgccacgcacaacacaatctcagctccagccttcttcttcttttcttttttttctctcccttccgcacccaagagagagaaagacgctgctagagaagaagaatatggcgggtgctgctcccaaacaattgttcggattcggagttgtggcgatgctcgccactctcattcttgctctctttatgcccgcggctgttcaggctcaatccgcatcccctgcanctgcacctactagcg

SEQ ID NO: 21281 - DNA, 346 bp, Glycine max
  unsure (1)..(346): unsure at all n locations
  Clone ID: LIB3049-004-Q1-E1-G6
catctgagaaacctgaatctggacctgcaagccctcagcttcgagtagtgccaagaaatgaaatgagcaattacccagagtcaggcatttctactcctagggacactgtgcctaacactgaggaggtgacagaggagaagtctgattcattgtcagcagttgattccaaaaggattgaagagcaagcttatcgtttgaagaatgatgatgactttcctccactttcccattgaatgccagtgaaggatggtgaatatgtaatagcattaacagtaatggtcatacatggaaactattatgactttgcctgcttttcatcaggtgctaccanaggatggcgattttg

SEQ ID NO: 21282 - DNA, 359 bp, Glycine max
  Clone ID: LIB3049-004-Q1-E1-G7
ggtggataaaaagggtgggaatcggattaggttctgcacaggcaaaaaccctagccttcgaaaaccctaatcctgaggcactgtgatatggcaagagccgtttcctcttcctgcgcgcgcctcacaatgcgcctcttctccaccaccaccaccaccaccgctgcgttcgccgttacattacccaaaccctcgtcactctcagtctcaacgcgtcgattcctcttccctctctcccatgccatcgtccctccctccacccgcgtcgccggaatccggtgccgtgtcaaccgcgccggcgactcagcgtactcgccgctgaactcagcttcgtcatcgtcgtcgtcgttcagcgaacgggc

SEQ ID NO: 21283 - DNA, 338 bp, Glycine max
  Clone ID: LIB3049-004-Q1-E1-G8
gagtgcagtatcgttgagaaataaggggaaaaaatggtgtcgctgaaactgcagaagcggctggccgcaagcgtgctcaagtgtggcagaggaaaggtgtggcttgaccccaatgaagtcaacgaaatctccatggccaattctcggcaaaacatcaggaagttggttaaggatgggtttatcatcaggaagccaaccaagattcactcacgctcgcgtgctcgtaggatgaaggaggcaaagaaaaagggccggcactctggttatggtaagagaaagggtacaagggaggcgaggcttcccaccaagatactttggatgagaaggatgcgtgtgct

SEQ ID NO: 21284 - DNA, 309 bp, Glycine max
  Clone ID: LIB3049-004-Q1-E1-G9
gggatttagacgccattgtcaaacccttttcacttctctctagggttttagcactctctctctctctcgttttcgttcttcctttctgcctctctcagtcacacaccttctcgatgaccaacgacaacatcgccgtgacagatctcacttctgccctcaatgaagataatcgcgccgacctagtcaatgctctcaagagcaagattcagagtctggctggggcgcattctgatgttctagagactctatccccgaatgtcaggaagcgtgttgaatctcttagagaaattcagggtaaacatgatgaac

SEQ ID NO: 21285 - DNA, 322 bp, Glycine max
  Clone ID: LIB3049-004-Q1-E1-H1
gagggaagcacaaccaagcttctctgttaaaaaaaaattaggcgtctaaagggccaaagcttagaaagttgaagctttttttgttgaggtgaaagtgaaatggttggcaaggataatctgagggctgaggacttgaacttgtgctttaagaagcttatgatggtggccgggagtgggaacagtgagaaaggggtgaacttgaaggttggggtgatcaccgagtggaaggatattcctgtggagcttctgatgcaaattctgtcccttgtggatgatcagacggtgatcatagcttctggagtttgtcgtggatggagagatg

SEQ ID NO: 21286 - DNA, 274 bp, Glycine max
  Clone ID: LIB3049-004-Q1-E1-H10
gaggttgtgtggcggtgacaaccatggtcgactcatcgcaagaccttggccaacttctcgatactcgcttggatgattttcagtccttcaacctcaatcctccccctccaagtggggaagcaactgcgaatatcaagaaggagagtcattctttgccgtcgggggttcaaggattgggcatgggtttagccgatttgataacgaagaaaaaggggaaacagaaggcttccaaagacagccacgtgtcggaagcgcgcaacaagctcagggaaca

SEQ ID NO: 21287 - DNA, 400 bp, Glycine max
  Clone ID: LIB3049-004-Q1-E1-H11
ggcagcaacagcagcattcactgaaagcactcagtagggtttgcggtttcagagtttgtgacgcacgcatccatggccaccaccaccaacgccgccgcagccccgccgcgccagctctcccagaaggaagccgacatccagatgatgttagccgccgacgtccacctcggcaccaaaaactgcgacttccaaatggaacgttacatcttcaagcgccgcaacgacgggatttacattattaaccttgggaagacatgggagaagcttcagttagcagctagggttattgttgcaattgagaaccctcaggatatcattgttcaatccgcaaggccttatgggtcaaaaaccggtcctgaattttgctcagtacactggtgctcatgctattgctggaagg

SEQ ID NO: 21288 - DNA, 283 bp, Glycine max
  Clone ID: LIB3049-004-Q1-E1-H12
tgggggagcgacacagagagtgatttcagtgagtgatcagtgttcacttgatctcatcataatcgtcagcgtcaactgacgaagatgccgatcagaaacatcgccgtcggaaagcctgaagacgcgactcactccgacacgttgaacgaggttttggctgagttcatctcaagcttcatcttcgtgttcgccggatcaggctccggcatcgcctagaacaagctcagcgacaacggcgctgcaacccctgcagggctcatctccgcctccatcgcctcatgca

SEQ ID NO: 21289 - DNA, 320 bp, Glycine max
  Clone ID: LIB3049-004-Q1-E1-H2
caaagcttgaaggagcatacacagcacttcaggcatggaaatctgcagtcactgaggaccctcttaagattttatcaagttggattggtcccaatgtgtgtgcttacaaaggagtcttctgtgctgcaaaccctcaagatgaaacggttggtgcatcagcagcattcccagttgtagtagcaggcatagatctcaaccatgcaaatctgaaaggaactcttgtgaaggagctctctctactcagtgatttgtcccttctccacctcaacagtaacagattcactggcactgttcctgaaacattcagagaccttgtgttt

SEQ ID NO: 21290 - DNA, 337 bp, Glycine max
  Clone ID: LIB3049-004-Q1-E1-H3
gaatattttattttaataaatatataatataataacttttcccaggctttttctccgctttattcagattttggttcttcgggtcctaatccgtaacagaaacaggggattcgcagttgtggagtagatctgagttgtgagcaatagattctccaaatttggcggcaatgggtgggctcaccgctgaagatctgtcgaccatcggcggaatcgccaccgtgtcgcttctccattccttcattcccactcactggcttcctttctccattgtcggtcgcgctcagaaatggactctctccaccactctcatcgtcactgcacttggagcaattttgca

SEQ ID NO: 21291 - DNA, 380 bp, Glycine max
  unsure (1)..(380): unsure at all n locations
  Clone ID: LIB3049-004-Q1-E1-H4
aacgaattagaagggcccctccatggtatccatttggaaatttggaaacctaataaccttcctccaccgaaccttcaaatgtgtgcatggaaccagaagcacttggaaagggctgcgacttcgacttcgagtgtcgatatggatgtcaaaatgttcaaaatgtggctgcanagtgaaatgtattaaccacatatgtcggtgtccaaagtcaacaacctccaacaataattttcttaatcgaggcccccctaaattgagtgccgagatcttgtgatgcaattatcatgtgcntgatattcattgttttttataatgaatagtgaatgattgcatgcatgttgatttgtacccaaacgttcaaccatgaatgccaaataaaa

SEQ ID NO: 21292 - DNA, 331 bp, Glycine max
  Clone ID: LIB3049-004-Q1-E1-H5
gatacacgcgtttcgcatgctctagtcacagacaccgacacagatctgtcttccgaagcaggaactaaatatggctgacttgttggaatggtcaaagcaagataagaaacgaatgcttcatgtcgtctaccgtgttggtgaccttgatcgcaccatcaaattttacacagaatgtttaggaatgaagcttttgaggcaaagagatatcccagaggagaaatatgctaatgcttttcttggatttggccctgaagaacccattttgttgttgaattaacatataattatggggttacctcgtatgacattggcgatggctttggacattttg

SEQ ID NO: 21293 - DNA, 315 bp, Glycine max
  Clone ID: LIB3049-004-Q1-E1-H7
gacgcccaacacaacacaccatcttctagctcctttctaacgagtttctattactattggagtcattgttttcttctctctctctctctctctcttacacaccaaactcctgttgttgttttctccttcccaaatcgcatacacacaccaacaaggttgttgttagccatcacgaacatcaccacgagcatgcctgaggcaccgagggagtacaacctttttgagcaaaacaagaaaactctcgagttcattgaggatgtcactgccaacgcagaccaagttcagaagaaggtcctctccgaaatcctctccaac

SEQ ID NO: 21294 - DNA, 318 bp, Glycine max
  Clone ID: LIB3049-004-Q1-E1-H8
gacgaataagatggactcttcaatgtattcagttggcaagttggcaatcttattagctttcttcatcgtagcttcagatgtgtgcatggaatcagaagcacttggaaagggctgcgacttcgacttcgagtgtcgatatggatgtcaaaatgttccaaattgtggctgcaaagtgaaatgtattaaccacagatgtcggtgtccaaggtcaagaagctccaacaataattttcttaatcgagggccccctaaattgagtgccgagatcttgtgatgcaattatcatgtgcttgatattcattgttttttataatgaat

SEQ ID NO: 21295 - DNA, 397 bp, Glycine max
  unsure (1)..(397): unsure at all n locations
  Clone ID: LIB3049-004-Q1-E1-H9
gatgtcttgtttttgtgtctatccattccatttctttccaacacacactttctctctctatctctctctctctctctctggttgtctttcattttgttcattgttgttgatgatgtcacgcgccgccgtgttattacacgcgcaggaggaggaggaggaggagtgtagtacttcgacgtcgtcgtcgatcgggaggaacagcgacgtgtcgtcggagagatcaatggaggaaggaggaaacgaggtggaaagtgcctaccatggacctttgcatgccatggaaactttggaagaggttcttcccatcaggagaggcatctcgaacttttaaaaatggaagttctaggtaattcacaaccctgnctgatgcagtgtcttccccatcagtgaaagacat

SEQ ID NO: 21296 - DNA, 346 bp, Glycine max
  Clone ID: LIB3049-005-Q1-E1-A1
gaacgcagccaaagaaaagaaaatcctcaattttctgagcagccaaacactctctctctgtctctcgaaaattctcagtttgcagagaaaatctgaatcatgtcgtggcaagcgtatgtcgacgatcaccttctgtgtgacatcgaaggtaaccacctcactcacgctgctatcatcggccaagacggcagcgtttgggctcagagtaccgacttccctcagttcaaacctgaggagataactgccatcatgaatgactttaatgagcctggatcacttgctccaactggattgtatctcggtgggcacaaatatatggtcatccagggtgaacccggtgctgtca

SEQ ID NO: 21297 - DNA, 401 bp, Glycine max
  Clone ID: LIB3049-005-Q1-E1-A10
gacattcagtcgttgcacaagtgagagaggttgaaggcggcgtgagaatgttggacatcaacctattcagagaggagaagggccgcaaccctgaactcatacgcgaatcccaacgccgtcgtttcgccagcgtcgaaatcgtcgacgaggtcatcaatctcgacaaagaatggcgaaaacgtcaattcgagttggaaaatctccgcaaggaattcatcaagatcaacaaggaagtctccaaactcaagcgtgctggggaggatgcttctaagttcattactgaatcagaggagaccaaaaaatcgatagccgcgaaagaggttgaagttccggaaaactccgaatcccttgaattccaagttggaaactattggaaacctcgtccacgattccgttccaat

SEQ ID NO: 21298 - DNA, 313 bp, Glycine max
  Clone ID: LIB3049-005-Q1-E1-A11
gacgctcaattcattttcttctcctccctctctctcctagggttagggttttctctcttcatcactctctgtgtcgctccgtttcaatggctcagcaagacgctcaaaacggcgggtcggagaatgccgctgctgctgctacggtgtcgtttgtcgctgtgaagccgcagctcctcgtcgaagctcccaaagccaacgacgccattctgttcttcaaggctgcgtttggcgctgaggaagttggccgtacgctcaaccctaagcgcaaagctgagcacgagctccctctcatactctccgcagaactcaaaat

SEQ ID NO: 21299 - DNA, 314 bp, Glycine max
  Clone ID: LIB3049-005-Q1-E1-A12
ggaaaggagcaagagttggcgtgggcgaggaccacgacatgggtgacggaatgcaatgcagtgaccacccttacagaaacaaccctggcggtatctgcgccttctgccttcaagacaaactcggcaagcttgtttcctcttctttccctctccctctccttcctccttcttccccttcttcctcctccactctcccttccatctcctcccttcctccctcctcagcccccgctccttcctcctccaccgccgtttctcacttcaatcatccatactaccctcgtagaacgcgcctcccttttctcttgcccaag

SEQ ID NO: 21300 - DNA, 347 bp, Glycine max
  Clone ID: LIB3049-005-Q1-E1-A2
caccaaaagggaacagacaccacacacataataaccatcaaattcccgagcatacatgcagcatctgccagactctccaaaaatctcacgattgcacgttaagcactgtcatcaagcaatgtgaatactccgtcaacgattaccatcagtctcatctcgaacggttgtaccacacacatgcagccatcaactggtccttgtgcagagtctgcacacctaatttcaaagtcacacactttattctttacgacatcattttgatcattaatggctttaataaacctagttaaactgctctaaccggtttgaaccactgtgacagcattgacattttgagcaacgcttaa

SEQ ID NO: 21301 - DNA, 334 bp, Glycine max
  Clone ID: LIB3049-005-Q1-E1-A4
ggggagaagcagaagtgaagatgatgtccggaaaatatacgtcgattgacgcgcagcagcttcagggatctgttcctgccgttccagattcacgacccgccaccgtcaatttcgcagattcaaatcttcagacatttcctccatctggtcctctgggcaagattactgctgcttccgggcctcctcgtgacgctgatgattcattttcaaaacctgtatctggttctgatgaaccccagcagggtggttggtttcagacttttacaattgctgcttacaaaccatactttgatgttgacacttcagatgttctggagaggattatcgactcact

SEQ ID NO: 21302 - DNA, 383 bp, Glycine max
  Clone ID: LIB3049-005-Q1-E1-A5
gacggaccagtttttatgggacttgagcagctttgagagtgaccctgaagagtttgccacagtcttcagcacggacaccggcactgcagatcctgaagttggtccagctattgcctttgctatcaggtagcatctttatgagattgcaattcaaagtgtggtttcagcagtacaaagcataacgagcaagcatggtcatcgaggggctgaatatactccagtcagtataggaggtgcagcaacaatggacttggccaagttgtttggtccgacatctaatgtagttcggaaaacatccgagtgggacgtacatgaacctaatgtggacctactatccaacgaggaagttgaggcccttgaaccgaatgaagagacaaatttca

SEQ ID NO: 21303 - DNA, 180 bp, Glycine max
  Clone ID: LIB3049-005-Q1-E1-A6
aggcgtcagaacacgactcagtggggttgcaaaactgcgacaccatgcgaccggacacaattaaggttttccatatcacagcgtatcacaatgaaccaccactggtgcagcctcagtggcaatcgcatcagtctcaagggtcaacagttcatggagcatgtgcagtgcttcaggcacaat

SEQ ID NO: 21304 - DNA, 323 bp, Glycine max
  Clone ID: LIB3049-005-Q1-E1-A7
gacagaacaatagtagcaagcagagccccaagatctgtgcttgaaccttcacgtgtgtttccttccttctgcagacgagcttcaccttgcgccgaagggccacagatggttgaaaccgatatggatgccgaaactgttgcaaatgtggttccaccaaaggagactccaaacagtgttcccatctcttatcattcctcacactcacaccctcctcttaatgagaggattatttcatccatgaccagaagatctgttgctgcacacccgtggcacgaccttgagataaggcctgatgctccaacgatcttcaattgtgtgattga

SEQ ID NO: 21305 - DNA, 381 bp, Glycine max
  Clone ID: LIB3049-005-Q1-E1-A8
ggcacaagtttgttgagatagctagaagcaataagatgaaaatgaaagtgcttgttttgtttgttgctacagttttggtagcatatgaatgccatggctcagactaccagaagttccctctccaaatgaaaactgggtttggtgggcaatacagcaatgaggtggcatgtgccagttggaggcttggcgtggaagcaaacaacgtagtcaagtggcaaactgttcctgcagcttgcggagagtacatagctgactacgttctacgagaccaatatagatcagattccaaaacagttaaccaacaagcttatttccatgccaaacccctcaaactcaccaacacagatgtctttgtcctggacgttgacgacactactctct

SEQ ID NO: 21306 - DNA, 281 bp, Glycine max
  Clone ID: LIB3049-005-Q1-E1-A9
cctattggtcttcatattgccataacagctgcagctgtcatgacagcagctctaggtggtgctcagtttggcatccagtcaaatcaaaacagtttgcagagtcagtcagcattggcacatgatcctttaactctgcatctggccaaaatgtccaggagtcagctgacagagattatctctgagctgaagggaatggctacacaaaacaaagaactggctcgccagctgttgctttcaaggccgcagttgcccaaggctctttttcaggctcagataatgct

SEQ ID NO: 21307 - DNA, 390 bp, Glycine max
  Clone ID: LIB3049-005-Q1-E1-B1
gctttcaattttcgtgaatcccttcgaaccgcttttacgttggtttattcggtttgtgttgctctgttatgctgctcctccctgtttgatttcaagggtaaaggataaagggatgatctacacagcaattgacacgttctacctcacagatgagcagctagcaaactcaccttctagaaaagatggcatagatgaagccactgagaccacccttagaatctatggttgtgatctcatccaagaaagtggcattttgctcagattgccacaagcagtcatggctactgggcaggttctatttcatcgtttctattgtaagaagtcatttgcacggttcaatgtcaagaaagttgctgccagctgtgtatggttggcttcaaaactggagga

SEQ ID NO: 21308 - DNA, 290 bp, Glycine max
  Clone ID: LIB3049-005-Q1-E1-B10
ggggttgggttatctgaagcttctcctgcggaggaaacataacagcgcttgtttgggaaccctagtttggcaaacatttcaagaatcagagtcttttaccactctcaggtttagcattattatctgaaatggcatcggtgtctagtcagcaacagttccgttacacgcagccaccgtcaaaggttcttcatttgagaaatttgccgtgggagtgtacagaggaggaactaattgagcttgggaagccatttgggaaagttgtgaacacaaagtgcaacgttggagcaaat

SEQ ID NO: 21309 - DNA, 318 bp, Glycine max
  Clone ID: LIB3049-005-Q1-E1-B11
ggagcgaagaagatattaaggtttttgagtgcggtgcggcgatcctagcactctcttctgcagctttcgccgacagcttcattcaccatggctgagcaaaccgagaaggcttttttgaaacaaccaaaagtgtttctcagctcgaagaaaactgggaagggaaagagacccggaaagggtgggaaccgcttttggaaatccattgggcttggatttaagactcccagggaagccatcgaaggaacctacattgacaagaagtgccccttcactggcaatgtttccatccgtggccgtatcttggctggaacatgtcac

SEQ ID NO: 21310 - DNA, 293 bp, Glycine max
  Clone ID: LIB3049-005-Q1-E1-B12
gaatacagtccagaaacacatgagaaccgaaagcaggagttagataaattggtacaagatcaggaaagattgagggcttctctgttgcaatggtgctataccagctatggagaggttttcagttcctggatgcacttttgtgctgtgcgtttatttgctgagagcattctgagatatggtctgccaccatctttcttggcatgtgttttagctccttctgtaaaatccgagaagaaagtacgttctatccttgaagggttgactgatagcacaaacagtgcatactggaagac

SEQ ID NO: 21311 - DNA, 362 bp, Glycine max
  unsure (1)..(362): unsure at all n locations
  Clone ID: LIB3049-005-Q1-E1-B2
cgaccatcatgagatgatgggatcagggaaattgaaatatgtgaggcctttggctttggatggggacagggttttgttcgaacacaaccgtagcaagctctgttggtataacctcaaaactggtgacgtgagttgcgttaaaataactgctgcaattggaaacacgattgaaggcacggtttgtgtagaaagccttgttccgccaactttactgaatctgcgtgatgagagccagagccaggagaaaaatgggaagaaaagggatgacttcctctctcaagggttcaaattgaccttgtaaagcgagcaaaacaagaggaaatggattgaatttgaaagggaaacanagtgctacagttcac

SEQ ID NO: 21312 - DNA, 400 bp, Glycine max
  Clone ID: LIB3049-005-Q1-E1-B3
ggaggagactgagaaaacagaagaaaacaaaatggaagacacagtttctgcgttgaggtctttgatggtttctcactctccgccgctggatgccttagtggtgccctctgaagattatcacctgagcgaatatgtgtctgcacgagacaagcgccgcgaattcgtttccggcttcactggaagtgccggcttggcacttataacaaagaaagaagcactgctgtggacggatggacggtattttttgcaggctgagaaagaacttagtgctgggtggaagctaatgcgaattggtgaagatcctgctgtagatatctggatggccgataatttgccaaaagaagcatccgttggggttgatccctggtgcatttcaattgatactgctcaaagatgggag

SEQ ID NO: 21313 - DNA, 387 bp, Glycine max
  unsure (1)..(387): unsure at all n locations
  Clone ID: LIB3049-005-Q1-E1-B4
ggttgaaagaaatcgaaagaagggaggaaaagggtgtcaatggcagagtgtttgggtgtttcagtttcaactcttggctcattctctcttagtaggcccacaatcttttatcgatctcccattaatatctctctctttgcctctcaatctcatttccctgctgctgcatttggttatttgacaccttccaacccacacctgtacgccgctgtctcctccgactccaaggccgctacttcgctagacctaactcaacccgatctcgataatagcggcggcggtgctaacggaaacgctaacggcggcggcggtggtggaggaagcggangaagtgatgatagcaagggcgaggaaggatccgacggtgacaagaggaaaatggctctg

SEQ ID NO: 21314 - DNA, 317 bp, Glycine max
  Clone ID: LIB3049-005-Q1-E1-B5
attcaagagctattttgggaaaatgtcagaaaaattggggatattattttgagtgttgagccatggacaacaagcaaagatgctacccttgttgctgatgtgcctcttcagttctgacttgataaagcgatcagggcctctgatgcagttgttttgtatgaatctgctcccagattgtcgcttgcagataaatgtttttcctgtgtggatatctaactgaaaacagcaggtgtgataatgccgcctagaatcagagaaattggcatcaagtgtttgactgtgactgttctgcaacagcaccgacccaaatccgctct

SEQ ID NO: 21315 - DNA, 395 bp, Glycine max
  Clone ID: LIB3049-005-Q1-E1-B6
gatgtacgaggcatcataatagcattgaagcaacggcggcggaaaccaccgttcgacgccggagacacgatctgtttctacctctgatttcttctcttcaggtatgggaatcagtaaaacagaagtaaacttgaggaggttgcttgcagctgctcctcaacagcaaaatcaagcaaaacttgtgcattatgttgctactttgcgtgaacaattagaacaattggctgaagaaaggacactggaaggcttacccaggatttcaaaggctatgttgaatgattattcagagaagattgaagccattgcttccaaattggttaatcatgtgattgacacacaagtacccgggaaggacttcgaaaggaattttgttaaagaaaaacattctgaaattg

SEQ ID NO: 21316 - DNA, 301 bp, Glycine max
  Clone ID: LIB3049-005-Q1-E1-B9
ggtggaagtgaaggaggagagggagaagaagaagaagtaggaggaagaaaaggggaaaacgcaaagaaaaaaagaggaagatagatcaagatctcccttgcgtttgtctcagttgaagaaattcaagagcagaacgagactaactcaacggtatcagacgtttcagggtttcagcacttccatttttttttccggatttgagttggaagaagatcaaagaggttcctagttgcttggattgttcctctgggtggtggaggctttgtgtatttttaaaatattgacaattcaaaatgccaaa

SEQ ID NO: 21317 - DNA, 386 bp, Glycine max
  Clone ID: LIB3049-005-Q1-E1-C1
gatataacaatcattctttctcaaaacacttgctccattattattttctcattcattcgttcatcatggttcggttcagcaacaacgtggtcggactcctgaacttcctgaccttcctcctctccatcccgatcctggtggccggagtgtggctgagcaagcagggcgccaccgagtgcgagcggtggctggagaagccggtgatcgcactcggcgtcttcctcatgctcgtctcactcgccggcctcgtcggcgcgtgctgtcgcgtgtcgtggctcctctggctctacctcctcgtcatgttcgtcctcatcgttcttctcttcgccttcaccatcttcgccttcgttgtcaccaacaagggcgctggcgaagttgtgtctaat

SEQ ID NO: 21318 - DNA, 392 bp, Glycine max
  Clone ID: LIB3049-005-Q1-E1-C10
gaaattcaagttcgcaccaaattttcctcccaaaatgtcaggccgtggaaaaggtgggaagggtttgggaaagggaggagctaagaggcacagaaaggttcttcgtgacaacattcaaggaatcacgaaacctgcgattcgtaggttagcgagaagaggtggcgtgaagaggatcagtggtttgatttacgaggaaaccagaggagttctgaagatattcttggagaacgtgattcgcgatgctgtaacctacactgagcacgctaggaggaaaactgttactgctatggatgtcgtttatgctctcaagagacaaggaaagaacctccaatgcctttggaggctaaagaatagaaccttaaggtttaatgacggtgttgcaggataaaaca

SEQ ID NO: 21319 - DNA, 279 bp, Glycine max
  Clone ID: LIB3049-005-Q1-E1-C11
aggggatccttctacactaactaaagccgaacagcgagagagatataccctaccacaaatgccagctggtcacggtttgagattccgcaccagagattccttctctcgtcccttcatgaagaatggtaccatcgccctcaccacatacctcataacctaccacgtcggcgattatgtccacgtcaacgttaactgcgccgtccacaccggaatgcctcacaagttctaccatggccgcaccggtcgcgtctggaatgtcaccaaacgtgctgttggggt

SEQ ID NO: 21320 - DNA, 315 bp, Glycine max
  Clone ID: LIB3049-005-Q1-E1-C12
ggcctaagttgaacactcttcaagatctgattcacatttgctgcattattatatggactgcttcagcactccatgcagctgtgaatttcggacaatacccttatggcggtttcatcctaaatcgtccaactctaaccagaagattgctcccagagccaggaaccaaagaatatggtgaacttaccagtaatcatcaaagggcttatttgagaacaattacaggaaagactgaggcccttgtggacctaacagtgatagagatattgtcaaggcatgcttctgatgaggtctaccttggacagaaggacaatccaa

SEQ ID NO: 21321 - DNA, 402 bp, Glycine max
  Clone ID: LIB3049-005-Q1-E1-C3
gatggaaagctctgtcaacgaacgtcttgattttgggaagatgggatatgggtgcaatcattaccggagaagatgcaggattcgtgctccctgctgcaacgagatctactcatgccgtcactgtcataacgacgctgcgagcttgttgaagaatccctttgatcgccacgagctcgttcgccaagatgttaaacaagttgtttgttcagtttgtgacactgagcaacctgttgctcaagtttgcacaaactgtggcgtcaaaatgggagaatacttctgcaacatctgcaaattcttcgatgatgatgttgagaaagaacaatttcactgtgatgattgtgggatctgcacggtttgtggtcgagataattttttccactgcaagaagtgtggatcttgtta

SEQ ID NO: 21322 - DNA, 394 bp, Glycine max
  Clone ID: LIB3049-005-Q1-E1-C4
gactgcgactggagtggttccctcagacatatctgtaacgctgcttcttctgtgaggcatcaatggagacaaaagctttgtccttcgctctgtctctcaatgacctcaccaacaaccgcttcacttccaatacgccacatgctgccgccaaagtttccgtctttaccgtcagatgctcttcttcgggtagtggagagaggccttggaagaattcagatgctagacttgtgcttgaagatggttcaatttggagagcaaaatcgtttggtgcttcagggacccaagttggcgaggttgttttcaatacatcattgacagggtatcaagaaattttgactgatcctagttatgctggccagtttgtgctcatgacaaacccacatattgggaatac

SEQ ID NO: 21323 - DNA, 394 bp, Glycine max
  unsure (1)..(394): unsure at all n locations
  Clone ID: LIB3049-005-Q1-E1-C5
ggagttgaaggggttagggtttaggaagggatggaagcggcagtggtggacgtcggctctaagctcctcaaagcgggctttgcaattcctgaccagactcctgccatgataattcccactcagatgaagcaattactcgatgatggatccgtcgcagataattcactggctgacaatgtcaccgttgatcccgttgtgcgaggatttattagagattgggatgcaattgaggatttgttgcaccatgttttgtataccggcctcggatgggaaattggcaatgaaggacaaatactatttacagatccactttgtaccccaaaggcgaacanagaacagttggtgcaactaatgtttgaaacattcaatatatcaggattttatgcctcagaac

SEQ ID NO: 21324 - DNA, 388 bp, Glycine max
  Clone ID: LIB3049-005-Q1-E1-C6
gaaagtcgaagaagcaaaaagggggtgggtcaaaattccgccggagaaaatctttgttcggtgtttgcaatcgggagagagagcaaggtcccttctcaaggatggcgatgactgtacacgtccttgctgggttggcttttatgttttcagctagcattttgcttcagattctggcatgtgcaatatataacaattggtggccaatgttatcagctctgatgtatgtgctggttcctatgccttgcttattctttggaggtggatccactcaatttctaatgagccgtgatggtggtggttggatagatgctgcaaaatttttgactggagcatcaactgttgggagcatagccattcctataatcctcaagcacgctcatatgattga

SEQ ID NO: 21325 - DNA, 308 bp, Glycine max
  Clone ID: LIB3049-005-Q1-E1-C7
tgggatgtgattgttgtgacgcgtgcatcgtcgtcgttatcttcatcttttgttgtatgtgtgtaggttttttctcttaccagaatatgtcttgctgtggtggtaactgtggttgcggaagcgcccgtacgtgaggtagcggctgcggtggctggaacatatacccatgacgtgagctacacttagtcaaccagaatcgagaccttgatcatcgcagtggcatcagtttaggctcaattcgagtgtactgtactcggtgttttagctcagaacgatagatgcgcatgtggagctaactgtcagatgca

SEQ ID NO: 21326 - DNA, 386 bp, Glycine max
  unsure (1)..(386): unsure at all n locations
  Clone ID: LIB3049-005-Q1-E1-C8
gacttgtaataattcttataacacaacacaacccatggccaccacctccgcattcctcctccttcccctcctcctgctgctccacctcgccatcgccgctcacggcatcggcatcaactacggcacgctcggcgacaaccttccaccgcccgcggcggtggcgaacttcctgaagacgaagacgaccatcgaccgcgtgaagatctacgacgtgaacccggacatcctgcgggccttcgccggcagcggcatctccgtgacggtgaccgcccccaacggcgacatcgccgccttaaccaaaatcgactcggcgaggcagtgggtggcgacgcacatcanaccctttcaccctcagaccaaaattaattacatcctcgtcggcagcg

SEQ ID NO: 21327 - DNA, 297 bp, Glycine max
  Clone ID: LIB3049-005-Q1-E1-C9
ggggcaccaccttgatgagatgctcccacgcaaacgctctcttcagagctctcaaacccaaaccccgcaattcttcactgccactttcttcaatggccatcaacaaaggtaatagtaataaggcatatgatgcattgctgttggatgctgggggcaccctattgcaattggcaaagccagttgaggagatttatgccactattggatccaaatatggtgtgactgtggatccagctatgataaagcacggatttaagagagcatttgctgctccgtggcctgaaaagctgcgctacc

SEQ ID NO: 21328 - DNA, 340 bp, Glycine max
  Clone ID: LIB3049-005-Q1-E1-D1
gaagttagtccttgctccttaatgtcacaagagtaagcaacattatccctcttgaagccacagctcttaagtggatcatgttccagattatcgataaccttatcctcccaataccaggtaaagaaaatcccacgtaggataacctacaggtgccacgtcaacataaaatctccagttaacaccttgcatcttatcgtgtccatttcgtgatccactctctgagccccaatctcttgagcagcagaatcttcaggccaagccaggtaagcaagcacaacacaaccccgaagtggcttctgcttctgttcccatggctttctcgctgagctctgttatcaac

SEQ ID NO: 21329 - DNA, 176 bp, Glycine max
  Clone ID: LIB3049-005-Q1-E1-D10
ggagtagaggaatggtgtagtagtcgatagaaatcgcgatctggactagggttaaactgaaagatcgagttcaaatgggtttccttggtaacactttggtgtgattgagatttggcgttgggatttcaattggtctcgtgatcaggtacattctcttcaactacttccatagcacc

SEQ ID NO: 21330 - DNA, 292 bp, Glycine max
  Clone ID: LIB3049-005-Q1-E1-D11
ggcagtgatagagatcagaaaatgtggcttgtgcaactctcaatcccatttctgaacggacatgggcattccaccagccttctctccaagcacagttcggtggtgactcagacccactgggccccaccgagtttcctgcctcaaatcaatgcgatgaagacaatgcacgggagagtggtgtgctccaacagcgataagacggtggcagtggaagtggtgcggctggcccctcacccaaagtacaagatgcgcgtgaggaagaagaagaagtaccaggcccacgaccccgata

SEQ ID NO: 21331 - DNA, 398 bp, Glycine max
  Clone ID: LIB3049-005-Q1-E1-D12
agatattattccacttaaactcaccaacggaactttaacacattccatgctcgccttcgggtgtggatatgatcaaactcatgttggtcataatccaccaccttccgcagcaggggttcttggccttggaaatggcagagcaagcattttgtctcagcttatttctaaaggcctaattcgtaatgtcgttggccactgcttaagtgggacaggagggggctttttattctttggagatcaactcattccacagtctggagttgtttggacacccatattgcagagttcctcttccttgcgaaaacactacaaaacaagtccagcagacaagttttttaaatgggaaaggctacttcggtgaagggtcttgaacttacctttgatagtgggagctccta

SEQ ID NO: 21332 - DNA, 300 bp, Glycine max
  Clone ID: LIB3049-003-Q1-E1-E10
ggttctagtgtatgtgattgttgtgactcgttcttcttcgtcgttatcttcttcttttgttgtttgtgtgtttgttttttctctcacctgaaaatgtcttgctgcggtggtaactgtggttgcggaagcgcctgcaagtgcggcaacggctgcggaggctgcaagatgtacccagacttgagttacaccgagtcaaccaccaccgagaccttggtcatgggagtggcaccagttaaggctcaattcgagagtgctgaaatgggtgttcccgctgagaacgatggctgcaaatgtggagct

SEQ ID NO: 21333 - DNA, 357 bp, Glycine max
  Clone ID: LIB3049-001-Q1-E1-F2
ggggacatggaattggaagacaagttggagtgtggtggtctgttttaaaatccaacacttaatctctctcttcgcagcctaaaatcccaatggcttcactctctgttttgcgccacaaccacctcttctcgggccccctcccggcccgccccaagcccacctcctcctcctcctccaggatccgaatgtccctccgcgagaacggcccctccatcgccgtcgtgggcgtcaccggcgccgtcggccaggagttcctctccgtcctctccgaccgcgacttcccctaccgctccattcatatgctggcttccaagcgctccgctggccgccgcatcaccttcgaggacaaggactacg

SEQ ID NO: 21334 - DNA, 344 bp, Glycine max
  Clone ID: LIB3049-001-Q1-E1-F3
ggcacagaattagggttttctaattcacagagcaacacagcgaaccaacaatggcgcagcctcagccgcagtcgcagccgcagcacgggcaagcagcgctggagcaggtgcagtgcttcggtcgcaagaagaccgccgtggccgtgacctactgcaagcgcgggcgcggtctcagcaagatcaaaggctgccccattgagctcgtggagccggagatcctccgcttcaatgccttcgagccgatcctcctgttgggtcagagccgcatcgccggcgtcgacatgcgcatccgcgtcaaaggtggcggccacacctctcagatctatgccatccgcctcaacatc

SEQ ID NO: 21335 - DNA, 374 bp, Glycine max
  Clone ID: LIB3049-001-Q1-E1-F4
ggagtgagtgaaagaaagaagagaaggagttgaagtggttgttgtattgtagtagtgtgtaaagtcttggtgatggatagacacaaatgcaagctttgttcaaggtctttcagcaatggcagagcccttggtgggcacatgaaggctcaccttgcttctctccctctccctctccctccaaagcttcactcttgtttctcttcctctgactcagaacaagaacaatctttaagggagaatcctaagaaaaccttgaggattctggatcctgaagacagagagagcgagacagagtctaataagaacccgactcgtcaacgatccaagcgcaactggaaatctaacatgcccaagctcagcctcggacaccccga

SEQ ID NO: 21336 - DNA, 318 bp, Glycine max
  Clone ID: LIB3049-001-Q1-E1-F5
ggtaaacaaaaaccatcagcaacataaaaaaaaaaaaatagaaagaaaaatgatgctcggagaacaccatcgcgggaatccgacggtcctcgtgccaccgtggccagcccacgacgatccgacggctgagatgtactccgcgttcttaacaaacgacgtcaatgctggtgagtactctccgtaccatcttcaagaagcactaacggcgctgcagcgttttctgccgtcaaacgaaacggacgcagactcggactcctcggaggcggctcagcccgacgcggcggtggacgcgtacacgtgcgaacatttcggcatgta

SEQ ID NO: 21337 - DNA, 345 bp, Glycine max
  Clone ID: LIB3049-001-Q1-E1-F6
ggtaaacaaaaaccatcagcaacataaaaaaaaaaaaatagaaagaaaaatgatgctcggagaacaccatcgcgggaatccgacggtcctcgtgccaccgtggccagcccacgacgatccgacggctgagatgtactccgcgttcttaacaaacgacgtcaatgctggtgagtactctccgtaccatcttcaagaagcactaacggcgctgcagcgttttctgccgtcaaacgaaacggacgcagactcggactcctcggaggcggctcagcccgacgcggcggtggacgcgtacacgtgcgaccatttccgcatgtacgagttcaaggtccgtccattgccacg

SEQ ID NO: 21338 - DNA, 381 bp, Glycine max
  Clone ID: LIB3049-001-Q1-E1-F7
gaacctgcacaagtggtggcccatagaaacatgttaccaactagagggtgtaccaggtcaacctggtctaatccgctactgtgcttccaccgttgaagaagctgttgttggtgctcagaagacaacaacaaccatcaagtggaccaaagagaagctactcgcgatcgatcccgtccaacgttgtttgtcctatgaaattgtggaaaacaacatgggatttaagtcctatgtggcaacactcaaagtgctgccaatgaatggagatgggtgcaagatagattgggggtttgtctgtgatcctgttgaagggtggagtttccaagacttgaagttataccttgagtcttctcttcagtccatggccaagaagattcagcttgc

SEQ ID NO: 21339 - DNA, 339 bp, Glycine max
  Clone ID: LIB3049-001-Q1-E1-F8
ggagtgaggagactgatagaacagaagaacacattatggaagacacagtttctgcgttgaggtcgttgatggtttctcactctccgccgctggatgccttactggtgccctctgacaattatcacctgagcgaatatgtgtctgcacgagacaagcgcccccaattcatttcctgcttcactggaagtcccagcttggcacttataacaacaaaagaagcactgctgtggacggatggaccgtattttttgcaggctgagaaataacttactgctgggtggaagctaatgctaattgttgaatatcctgctgtagatatctggatggccgataatttgc

SEQ ID NO: 21340 - DNA, 314 bp, Glycine max
  unsure (1)..(314): unsure at all n locations
  Clone ID: LIB3049-001-Q1-E1-F9
tctgattatgcataataggagttgtgatggggatggtcaacttggctaatttggactcaattttccaagttttgacatgaggtctatagcagcttcaacaaagcttttcttgttccagtgtatcttgtggtttgtgacatataacccgtgtttgggtgtcatcttagccctattcctactagttaaatttgtaactgttcctttgtgtgatttggacgaaaattttggaatcaggtantgaagttaaaatgccaagttgccaatccgcaaaaaaaaaaaaaaaaaaaaacaaaaaaaagcgggcgctccaaaag

SEQ ID NO: 21341 - DNA, 354 bp, Glycine max
  Clone ID: LIB3049-001-Q1-E1-G1
gtctttcaagtatgcctgggtgcttgataagcttaaggctgagcgtgaaagaggaatcacaattgatattgccttgtggaagtttgaaaccaccaagtactattgcacagtcattgatgcccctggacacagggatttcatcaagaacatgatcactgggacatcccaagctgactgtgctgttcttatcattgattccactactggtggttttgaagctggaatttcaaaggatggacagactcgtgaacatgctctgctttcattcacccttggtgtgaaacagatgatttgttgctgtaacaagatggatgctactacaccaaagtactccaaggccaagtatgatgaaat

SEQ ID NO: 21342 - DNA, 346 bp, Glycine max
  Clone ID: LIB3049-001-Q1-E1-G10
ggagaaacgcaatgagttcgtcgaacctcatagatcttcaacgcgaattggagaacaaagccaatgatctcagcaagcttcaaaaggaaattgcgaagaatcaccaaatgagaaagaaatacacggtccagcttggcgagaacgagctcgtccttaaggaactggatttattgaaagacgacgcaaatgttgataagttgattgggccagtacttgtgaagcaagatttggccgaggccaatgcaaatgtccgcaagagaatcgaatacatctcaactgaattgaagcgtctggatgccactgttcaagatttggaagagaagcaaaatagcaagaaagatacgat

SEQ ID NO: 21343 - DNA, 345 bp, Glycine max
  unsure (1)..(345): unsure at all n locations
  Clone ID: LIB3049-001-Q1-E1-G11
nagggagagcaaagtaatcgcanaatctagggtttgttcgttcgctcgttcgcaacaatggcgctgaggagattctacaacgagatcaaggggaaganggtgagcgaagtccctgagcacgtgaagccgatgctgtccctgagctacatcaagaaagcgattcagagaagcttcgacaattaccatgccaagtacattgaaaccagttcccctgatcccatcttccatgtctgctacggcggcatgatcttctcctacctcctcgctctcccccaagaaccccgccacctcctccaagcccaagaacaagctcaacaacatcactgattccatccaacttcaaga

SEQ ID NO: 21344 - DNA, 295 bp, Glycine max
  Clone ID: LIB3049-001-Q1-E1-G12
cagagaaagctcggaaatttgcctccgaaggcaccagctttcaagcccccacctttcacccctgatgcctctgatgatcaatccagggacaaaacatggattgattccaaaacctcggaggaactcgaagacctcgaagatgacctcgacgacgatcgcttcctccaagaatataggaagaagaggctggctgagatgcaagaggcagcaatagtattgacgtttgggtcaatgattctcatttcatgatctgactttgttcgggaagtgtcacaagctccatccgatgtttggg

SEQ ID NO: 21345 - DNA, 351 bp, Glycine max
  Clone ID: LIB3049-001-Q1-E1-G2
gggagaccgatagaccggaacataaggcgggcaagagagtttgtttcttctctcttcaatggaaggcggcgaacaggttctcccttcggccaccaccgtcgccgccgccggctatcccaacgtctctcctcctccgctcgctgatcctgtcggtgcttccgatctcgctgctgctgcctcggacgacgttgttgcggaacctgaaattcacgcgctgatttcagacgaagagcacgatcacgatcacgatcacgagcatgagcatgagcatgaccatgacctcgagcacgatcacgagcatgagcatgaccaccacgaggaccgcgatgatcacgccgccgtggcagctgt

SEQ ID NO: 21346 - DNA, 302 bp, Glycine max
  Clone ID: LIB3049-001-Q1-E1-G3
gtcgatcaacgagatggtggcttctctgcggaatctgcagcttgggaaaatgaaatcgatgcctcaaagtagaaacgtttcggtcggatcaccgggttacggttcgccgagaggatcggtgctccgacccgggttttgcagtcttccaacaacgcccactcagcaaccggttcggtcaggggtgaactgtttcgatttttgggatcagagttgtgaagaggaaccagttatggagagggtggagtcagggaagggtataagggctaagatgtttgagaagctgagcaaggagaattctttgg

SEQ ID NO: 21347 - DNA, 308 bp, Glycine max
  Clone ID: LIB3049-001-Q1-E1-G4
ggttcaattgtgtcagtgaatgttgttgtaagtcgttcgtcgtcttttgttgttctgtgtctgtgtctggatcttcacggttctgaaattctcttgctgtagtggtcactgtggtctcgtaatcatctgtatattcggcaacggctgccgatgctgcagagatgtaccctcacattagcgatactgattcgactgccatcgagacagtggtcatactagtggcatgagttactgctcaatttgacggtgctgatatggatgtaccctcatagatctatgacttctatatggacgaaactgctcctgca

SEQ ID NO: 21348 - DNA, 382 bp, Glycine max; identical to SEQ ID NO: 10057
  Clone ID: LIB3049-001-Q1-E1-G5

SEQ ID NO: 21349 - DNA, 338 bp, Glycine max
  Clone ID: LIB3049-001-Q1-E1-G6
gcgaggaatctacatatatacacaatacagactgagttcttgctccgtcgccacagcgctcggccaacatgggtatctccagagattctatgcatgaatgaggcgtgccactggtggcacgaaaactgcctggaggacaacgagagagtatgagcttggtcgccagcctgctaacactaagctgtcaagctacacgacagtcaggaggatccgtgttagaggtggacatgtgaaagggagggcattgagattggatatgggaatttactcctggggaagtgaatccgtatgtcgcacgaatcgtgtacgagatctggttaactacgcctcaagtattg

SEQ ID NO: 21350 - DNA, 362 bp, Glycine max
  Clone ID: LIB3049-001-Q1-E1-G7
tatgatcctcatcaatcaaaacctaaagtcccaggctatcaaatggactggaatgcaggatttgcttatgcaaagaatggagtgcctattggtcctagagctaattcttattggctttacaatgtaccatggggcatgtacaaatcattgatatacataaaggaacgttatggaaacccaactgttatcttatctgaaaatggcatggatgatccgggtaatgtgactcttcccaagggtttgcatgacaccacaaggataaactattacaaaggctatttgactcaactaaagaaagcagttgatgatggagcaaatgtggttgggtactttgcatggtcattgctggataactttgaatg

SEQ ID NO: 21351 - DNA, 353 bp, Glycine max
  Clone ID: LIB3049-001-Q1-E1-G8
gaagtaaagttacattggaagtgagagcgaagaagaagaagaaaccacgacacaagtccaaagtttgattccaaaatgcgatcctcaagcattcgcagcttcaccatcttcaccctctttctcattgcgatcctcccccacggacacgcaacaactccaacctccaaacttcgcctcaaacctcgctcttctcccttttcaaccgccctcgaaatcctccagaaacaactcgggtacaccttcaagagcatcgatcttcgtcgtcgcgccatgacacacgcttccttctccgaagaaaacaacatagctttcgccattctcggcgccagcgtcatcgatacctccgtctcttt

SEQ ID NO: 21352 - DNA, 347 bp, Glycine max
  Clone ID: LIB3049-001-Q1-E1-G9
aggggagaagtggcggtgaagttgagactcagagcgcgcgatcgaaaactcgagaaatcgaaacactctatgatgatcatctcgtagtatatatatatacttccacagtcgagagaaagaaacagaagaagaagaagcagcaataagcactactcatatgtagtattagtcgtatcattgccgttttagtatcatgagcaacgaaaaggagaaaacatccttagcttctccttccggcgaactctgcaagggcttcaatggcctcgaaaaaggtctcctccgcgaatcgcctgggtcctccgccgaagtgtatccgtacggtggccacgttacttcttgggaaaacg

SEQ ID NO: 21353 - DNA, 419 bp, Glycine max
  Clone ID: LIB3049-001-Q1-E1-H1
acgcgtcagggggagatggaccttgaacaatgttcccatctatccccgttagagatgtaaacacaagacccaaagcttaagcttttggaatatagttagttaggtttttattattatgcttattttgaaagctggaatattatgttcaaaattacatttcttttattattttggtgtcttgatcttattgatgtattttgcagacattgatatacttttattgccctatagagctggaacaagatcaactaattgaaggttcagggacattgttacaaagcaaagaaaatgctggatttatgaatattcaccttgaatatacgtgagtcagaagaatttctttcaccaaaatatgccattgcagttgaggtggtcgatcgtatgtgaaagagtctgttatgagatgatgatcctttcat

SEQ ID NO: 21354 - DNA, 283 bp, Glycine max; identical to SEQ ID NO: 17815
  Clone ID: LIB3049-001-Q1-E1-H10

SEQ ID NO: 21355 - DNA, 268 bp, Glycine max
  Clone ID: LIB3049-001-Q1-E1-H11
gaccgcacagaattagggtttccaattcacagagcaacacaacgaaccaacaatggcgcagcctcagccgcagtcgcagccgcagcacgggcaagcagcgctggagcaggtgcagtgcttcggtcgcaagaagaccgccgtggccgtgacctactgcaagcgcgggcgcggtctcatcaagatcaacggctgccccattgagctcgtggagccggagatcctccgcttcaaggccttcgagccctacctcctgttgggtaagagccgc

SEQ ID NO: 21356 - DNA, 302 bp, Glycine max
  Clone ID: LIB3049-001-Q1-E1-H12
gactgccaaatgggtaggcaaggtaatgatcctagtcctaccactgtgaactcctccattgctcttcttcaagaaaggtttagacagttggagaaggtgaaagaaagaagagaggggaaacaacttaaactcttgtcatttgagaccacctcctcatcatcacaaaactctcaacaacaaccaaggttggtggctccacataggccaactctccatgactctctttctcttggcctcaacttcacaaacaagcaaggtgatcatcacaacaccatgaacatgaaaccacctccatcctccaa

SEQ ID NO: 21357 - DNA, 363 bp, Glycine max
  Clone ID: LIB3049-001-Q1-E1-H2
ggggaaagaggaaaagaggattaaagggtcgccacgtttagcattaaccaaaccctctctactcttttttcttctccttctcttcgctagggttttagcttcttcctcttcacttcgttctttttcgcctctacaatgagcaacgacaaggacacattcaacgtcgccgatctcacttctgctctcaacgaggacaatagagcagaccttgtcaatgctcttaagagcaagatacagagtttggctggacaacactcggatattctagagtctctgtcgcccaatgtccgaaagcgtgttgaggttcttagagagatccagggccaacatgatgaattagaggctaaattttttgaagagaga

SEQ ID NO: 21358 - DNA, 354 bp, Glycine max
  Clone ID: LIB3049-001-Q1-E1-H3
gacagtctttaagatctggaagcgcttctcacttgcccacaataagaattcctctcaaatttcaatttttcatttgaaaataataaaaccctaaaagaggggttgcaagcaaaatgagaagctcgaagatgtggatggttttcatgtgtctgacggtgagcttcttcgctcgcattgaatcgctatccgtgacggtgaacgacgtcgagtgcgtctacgagtacgtactttacgagggcgacaccgtttcggggaactttgttgtcgtcgaccatgacattttctggagctctgatcaccccggcattgatttcacggtgacaactgctgcagggaatactgtccacagtatca

SEQ ID NO: 21359 - DNA, 300 bp, Glycine max
  Clone ID: LIB3049-001-Q1-E1-H4
cgagaacacaccaataggcaagtcaccttctgcaagcgccgcaacggtttgctgaaaaaagcttatgaattatcagttctgtgtgatgctgaagttgcccttgttgtcttctcaacccgtggccgtttgtatgagtatgccaacaacagtgttagggccactattgagaggtacaagaaagcaaatgctgctgcttcaaacgcagaatccgtatctgaagctaacacacagttttaccagcaagagtcatccaaattgaaaagacaaattcgagatattcagaatctaaacaggcacatc

SEQ ID NO: 21360 - DNA, 340 bp, Glycine max
  Clone ID: LIB3049-001-Q1-E1-H5
gactgccgcgaaaacagaacagggactcactctggcagcggcactctcggtggctataatctttctgtggtgagttgtcaagatgtacacatcaaggaagaaaatccacaaggataaggatgctgagccaactgaatttgaggaatcagtcggacaggcattgtttgatctggaaaataccaacaatgagctgaaaagtgatctgaaaggtttatacataaactcagctgtccaaattgatgtttctgggaaccgcaaggctgtggttatccatgtcccctacagattaaggaaaggattccggaagattcatgtcaggcttgtgagagaacttgagaaa

SEQ ID NO: 21361 - DNA, 374 bp, Glycine max
  Clone ID: LIB3049-001-Q1-E1-H6
gattatcatagtagatattcattccccttatctttctctcttctctctccccgcccaaaccctaactccctaccctattccgctttctctcatccatcatgaaaggaggaaagtccaagaccgaatctaagagagccgatgccaaacttgctgtgaataagaagggcgccgccaccaagactaggaaacccgccggaaaggggaaggcagcgaaagatcctaacaagccaaagaggcctccaagtgctttcttcgttttcatggaggaattcaggaaggtgttcaacaaggaacatcccgacaacaaagcagtgtctgctgtgggcaaagctgctggagcagaatggaagacgatgtctgatgctgaaaaagca

SEQ ID NO: 21362 - DNA, 350 bp, Glycine max
  Clone ID: LIB3049-001-Q1-E1-H7
gacacacattcatccattctataatttcccaatgtctgatatcaaccccaaccagccactaccaatggatgaagtggtgacctataaggagtgttggcacaaccatgctgcagcacgtggtcgtgtcatctatgatggttgtcttgagtatcttgttgatcaggacaatctcatatgtgcttgttgtggttgccaccgcaactttcatcggaagcacaccattttcaacggcatacctgaaactcaaacactagatcgagtgcaggggatgaggcctaagagaaagaagaggactactttctcgtcagagcaaaggaacaagctgatctgttttgctgagagtgtggggt

SEQ ID NO: 21363 - DNA, 372 bp, Glycine max
  Clone ID: LIB3049-001-Q1-E1-H8
ggagcatgtattgtagattgtagatccatccgcatccgctagctcgcgcaggcaccagcaggtgaggttattgtgatttgaatggagggaagtggaggtggcggtgcttcaccgtctgcaccgttgaagcaatacttacaggaattctcgaagctgtttcagtactatctggataaatccactccccatcccccctacaggtggattgggactttcgtcattgcatccatctacgttttgcgtgttgtttatgtgcaggggttttacattgtctcttatggcctcggaatctacctcctcaatctcttgattggctttctctcccctttggttgatccagaactcgatccctccaacgcccctatgcttcct

SEQ ID NO: 21364 - DNA, 350 bp, Glycine max
  unsure (1)..(350): unsure at all n locations
  Clone ID: LIB3049-001-Q1-E1-H9
gacccacaaactccacaagtgtcacaagtcataactcgttagagagagtttgtgtgtgtttttgtgtgtcaccttggtgcatacaacacaagatggaggaccaaaatggtagtggtaagttgagccaagggcttcgcaaggtgaagccttaccttgctatattgtcccttcagtttggctactcanggatgtatatcatcactatggtttctttcaagcatggcatgagtcattggatactctcagtgtaccgtcatgtaattgctgctattaaaataatcccttttgcacctgtccttggaagaaaaattagaccaaagatgactcctcccaacttcctgaagataatg

SEQ ID NO: 21365 - DNA, 400 bp, Glycine max
  unsure (1)..(400): unsure at all n locations
  Clone ID: LIB3049-002-Q1-E1-A1
gaaggcgtacaggtgcagtccagcagtcccagcagcccgttccaatgatgccacagcagatgctacctagggggcgtgtctatcgttatcctcctggtangggtatgccagatgtttctatgcccggggttgctggaggtatgttttctgttccatatgatgtgggtgggatgccactgcgtgatgcatcaatctcccagcaaattcctgttggggctttagcaacagctctggctaatgcttctccagagcagcagaggacgatgctgggtgagaatctctacccccttgtggaacagttagagcctgacaatgctgccaaagtgacaggcatgcttcttgagatgggacagactgaagttctgcatttgctcgagtcgccagaagccctgaaagcaaa

SEQ ID NO: 21366 - DNA, 309 bp, Glycine max
  Clone ID: LIB3049-002-Q1-E1-A10
ggtatgcagttgttgtggttctcttcatttgcatttacgtatcagcatttgcctggtcatggggtcccctaggttggttggtgcctagtgagatctttcccttggagatccgttcggctgctcaaagtataaatgtgtcggtgaacatgtttttcactttcttgattgcacaagtcttcttgacaatgctttgccacatgaagttcggcttgttcatcttctttgcctttttcgtgttgatcatgacattcttcatctacttcgtcttgcctgaaaccaagggcattcccattgaagaaatgaaccaag

SEQ ID NO: 21367 - DNA, 162 bp, Glycine max
  Clone ID: LIB3049-002-Q1-E1-A11
ggtatgcagttgttgtggttctcatcatttgcatttacatatcaccatttgcctagtcatggggtcgccaaggttggttggtgcctcatgagatcgttcacttggcaatccgtacggctgctcaaagtatagatgtctcggtgaacatggttttcactttct

SEQ ID NO: 21368 - DNA, 395 bp, Glycine max
  Clone ID: LIB3049-002-Q1-E1-A12
ggttttgaaaaatgtcatttcaccaccgttcggtaaaaatggttggtatttcaaaatgatttcccgaaaactgtcttaaaacttaaaaggttattctaaatgatggaggttgggattacgagaggttagggcattttgatttttcattgtctactcttctttgattctatcacaataacccatacatttcaaatttaaaaccctctaaatcaatttatactatccggaaacctccttggcgcactatcgtggcaatttcaggccgccacatacgggggcaccttatagttcctcaaccttggccggcctttgcagtttaacttcctccgacacgatggttgacgtcgatttcagtatagccttcgagaataatgacgaaactagatttgcgacta

SEQ ID NO: 21369 - DNA, 394 bp, Glycine max
  Clone ID: LIB3049-002-Q1-E1-A2
tctatagctttggagttgtagctttagagattgttagtggaaagagcaacacaaattacaggccaaaggaggagtttgtatatcttttagattgggcctatgttctccaagagcaaggaaaccttctagagctggtggatccaagtcttggttcaaagtactcctcggaagaggccatgagaatgctgcagttagcactcttgtgcaccaatccttctcccactcttagaccatctatgtcatcagtggtgagcatgcttgagggaaaaactccaattcaagcaccaataattaaacgcagtgacagtgtagaagatgtaagatttaaagcctttgagatgttatcacaagacagtcaaactcatgtctcttctgcattctcacaagatagtat

SEQ ID NO: 21370 - DNA, 384 bp, Glycine max
  Clone ID: LIB3049-002-Q1-E1-A3
caggccacacgtcagtacaggtgtgagtagaggagagaaagggaaaagtgaagagggaacagaatggttcccagaggtttaatcattatggctgtgttctgcatctcatcactgtcaatgagtctctgtcgtgtcgcggataagggacgtgttatgaacttctaggcggtatcatgccctcaggttgcaggcatcattccgtatcaagtcccacttctccaggagtgcaattcgaagacagccttctcctgacgtacatacatcttcgatgacagtcgcgttcacagttatcaggcctcacagttactggactccacattcacgatcttgtctgacaaggatatagatacaagctttgagttgagaacgttcacgtacatttga

SEQ ID NO: 21371 - DNA, 377 bp, Glycine max
  Clone ID: LIB3049-002-Q1-E1-A4
ggctacaaaaacattgaaagaaatagaaaaagcaaaactggtttctcgcatttcctccgaaacaaaccgtttcgctcgtttctcggatctgcaatggaagccccacccaaaggcgctgctggaagaagaggtgacaggaagaagtccgtttccaaatccatcaaagctggcctccaattccccgtcagccgcgtcgccaggtacttgaagaaaggccgttactctcgccgccttggcaccggcgctcccatttatctcgccgccgttctcgaatatctcgccgcagaagtgttggagctggccgggaacgctgcacgtgacaacaagaagaataggattaaccctaagcacgtgttgctggcggtgaggaatgatga

SEQ ID NO: 21372 - DNA, 358 bp, Glycine max
  Clone ID: LIB3049-002-Q1-E1-A5
ggagcaagagtgaagagcgaagagaatggctcccaagggtttaatctttttggctgtgttatgcttctcagcactgtcactgagtcgttgtcttgcggaggataatggacttgttatgaacttctacaaggaatcatgccctcaggctgaagacatcatcaaagaacaagtcaagcttctctacaagcgccacaagaacactgctttctcctggctcagaaacatcttccatgactgtgctgttcagagttgtgatgcttcactgttgctggactccacaagaaggagcttgcctgagaaggaaacagatagaagctttgggttgagaaatttcaggtacattgagaacatcaaagaa

SEQ ID NO: 21373 - DNA, 393 bp, Glycine max
  Clone ID: LIB3049-002-Q1-E1-A6
gagatacattgcacttgggaacgttcccattcagtgcactcgaatctgtttgcaataaaacgacctctctttcactaccccaagaccttcatttctctttccaccactttctcactctctctctgtattttttttgccctatctcatagggtttcctccttctctccctctcttccatgcatttttgctctcacgagttcttcatcttcgttgccctcttcttcgctgtctttgaagccttcttttgtgtggaacagagcagatttcacctcccggggttttttgaactgtgcccatgtctaaagtcttcagctttaccggaaatgatgatttttatcatgggggtcctatttatcctaacccgaaggaaccgtgtctcatcatgtctcttgg

SEQ ID NO: 21374 - DNA, 308 bp, Glycine max
  Clone ID: LIB3049-002-Q1-E1-A7
attgtaactgtgaggtagagttgattgaacactgacgaatttggagagaaactgaatcatccattaccctctttttttttttgtccttcgtgcttcaattttatgttggtactttatatctccgttctagctacgttggttcagttcttgtgactttggccactgctgttgtttgcaattttgaagtgtcctcatggattgtgatgtctgcaagtcatcagattcaaatgtgttgggagtttatcaatatttgataatttttatgactaatcacggtgttttttgaactgtgaccaaatcggccgctc

SEQ ID NO: 21375 - DNA, 363 bp, Glycine max
  Clone ID: LIB3049-002-Q1-E1-A8
ggcacgtaagctatgcgaaaagcacttgcttaaatgaaactccgccgccgtgagcatgagcggtcaccgcctccaccgtgccctcagcaaactgaaactcatcgaagaagaaaatgaccaacgctcacaagatgcgcgtggcattcaccgtcgtcacattcaccgccgcagccgccgtcatctccgtcttcttcgccgcgcgaaggcgcaagcagtaaaagtccttgccgtgctatttacactccgaacagaaaccaaagtgcgcgttcaagcgcgtcttagcggacaactcctactctccgttcaatcatctcagcaacgacgagaatgctttgagttcgcatccatatgaggcagagatta

SEQ ID NO: 21376 - DNA, 395 bp, Glycine max
  unsure (1)..(395): unsure at all n locations
  Clone ID: LIB3049-002-Q1-E1-A9
gcctccgaaaaccctaacaacacaggcgcagacgcaaacgcaaacgcaaacgcaaacgcaaacgcagagcgtgatccattgacgaagatggtgcagcgtctcacctaccgcaagcggcacagctatgccaccaagtccaaccaacacagggtcgtcaaaacccctggtgggaagctcgtttatcagactaccacgaagagggcagcggaccaaagtgccccgtcactggcaagatgaatcagggaatctcacacttaaggctgcanaattcaaaaggtccacggtacccagaaaccgtaagactgtcaaccgtgcataaggtggagttttaactggaagtgccgtcagggagaggattatccgagccttcttagttgaagagcacaagattgtga

SEQ ID NO: 21377 - DNA, 392 bp, Glycine max
  Clone ID: LIB3049-002-Q1-E1-B1
ggagagaaagtgagagagaattacagagcattttccaacacgattacacgaccgaatcaaacccctctttctctccgaagctgcttttaatatcgtactggccttcgattgttctcctctttaatacatactgttctctcttcgatttgagggaacagtacaagagtctgagcatcggttaacccaactgcacaggtagtctccaaataatggagcctcatgatgagactggatgccaggctcctgaacgccccattctttgcattaataattgtggcttctttggaagagcagctaccatgaacatgtgttccaagtgttacaaggacatgctgttgaagcaagagcaggacaaatttgcagcatcatccgttgaaaacattgtgaatggc

SEQ ID NO: 21378 - DNA, 397 bp, Glycine max
  Clone ID: LIB3049-002-Q1-E1-B10
ggttctagtgtatgtgattgttgtgactcgttcttcttcgtcgttatcttcttcttttgttgtttgtgtgtttgttttttctctcacctgaaaatgtcttgctgcggtggtaactgtggttgcggaagcgcctgcaagtgcggcaacggctgcggaggctgcaagatgtacccagacttgagctacaccgagtcaaccaccaccgagaccttggtcatgggagtggcaccagttaaggctcaattcgagagtgctgaaatgggtgttcccgctgagaacgatggctgcaaatgtggagctaactgcacctgcaacccctgcacttgcaagtgaggtgttggagagctaaagcttcaagcagaaatggcccttagaaataatgataaaaactatatgt

SEQ ID NO: 21379 - DNA, 370 bp, Glycine max
  Clone ID: LIB3049-002-Q1-E1-B11
ggaaacaaagcatgaacggtgctgcatttgttgtggcagagtgctgtgagtatgtggaagtcgatcccacgggaagatatggaagatatagtgaaattcttggcaaaggagcttccaagacagtctatagagcatttgatgagtatgaagggatagaagtagcatggaatcaagtaaagttttatgactttttgcagaatcctgaaaatcttgaaaggttaaacattaaaatcaacctccccagaacattgaacaccagaacatcaagaagttccaaaactcctggggtgatactaacaacagacacattaactttgtcactgaaatgtttaactctgggaacccaagacagtacagacttaaacacaaa

SEQ ID NO: 21380 - DNA, 366 bp, Glycine max
  Clone ID: LIB3049-002-Q1-E1-B12
aactcaatttttttgttgataatttatgtaattctattcagtataatatcagtataatagaataaaaaaattatgaaaagatctttggttctgtatagtctttttatactatatttaaagagttacttgtaacgtaatacaaataaactcgagtatggatattgtcaggaagactatttgactttgttttttcaaccccccaataaattcgaatattatggttatgacactgtttttttcagatttcaattttctataatagagagttctattatagaaatttcgattgtaaaatacaataaaattggattcgatactaaacattaaatagatatctatacagatagataatttgaaacaaaatca

SEQ ID NO: 21381 - DNA, 400 bp, Glycine max
  Clone ID: LIB3049-002-Q1-E1-B2
cacgcgctttgaagcgtgctgtttggtgatccattcaaggggggaatatagcaaggtcctcacattgattcagaacaatttcagaaaatactgaagtatattagatccggtgttgaaagtggagctactcttgaaaccggaggagatagatttggcaactcgggcttctatattcagcctactgtcttctcaaatgttaatgatgacatgctgattgcgaatgaagagatctttggcccagtgcaaagcatattaaaattcaaggaccttgatgatgtgattcaaagagcaaataacacacactatggccttgcaacatgggtgttcacaaaaaacattaacacagctaatactttgactagagcattgagagctggaacagtgtgggtgaactgctttt

SEQ ID NO: 21382 - DNA, 229 bp, Glycine max
  Clone ID: LIB3049-002-Q1-E1-B3
cagggaacgtcctatcttcgtttggttggagataccatcaatgtgggaatcggagcaaggtccacaattctgctcagagaacctcgctgctcgtgacgtacatcagttatatcgggtgttggaattttcactaattctttcactacaatacacgcatctatgtcttgggtgttcatatgaatgctgactctcttcttcctgatttgggattacttcactcaatcctttc

SEQ ID NO: 21383 - DNA, 312 bp, Glycine max
  Clone ID: LIB3049-002-Q1-E1-B5
ggatacactacagacaacaaggctaaattttattgttattgacatatatcgttttggatcatgactaagatttcttttacaacaattctcgctcttgcccttttcctcacacttatttcacagacgagtgaaacactgatagagaaccaatgttcgacagtgttggatccaaatgattgcaacctcagctggtgtcaatgcaattgtcgtcaacaatatcaacgatttggatcttgcgttgacgtaaatcttcacaaatgtgttcgcatctacgactgtacccccaaattgatctactgaatgttcctattt

SEQ ID NO: 21384 - DNA, 379 bp, Glycine max
  Clone ID: LIB3049-002-Q1-E1-B6
ggctagtggtactgtcttagctttgattctctgttctctgttttgttctgtttcgcgtattgtcttcatacaggaacttgaacaatgaagaatgcaaagggcaagggagcagcaagggcctcaaaagaatcactgaagcccgttgatgaccgaaaggttggaaagctgaaggcttccggtaagcctgggagaagtagtgcaccaaagaaggagaagaaggccaagaaagaccccaacatgcctaaaagaccacccagtgctttctttgtgttccttgaggagttcaggaagatctttaaggctgagaatcctaatgtgaaggctgtatcagttgttgggaaagctggacgagagaaatggaaatccttgtccagtgctg

SEQ ID NO: 21385 - DNA, 393 bp, Glycine max
  unsure (1)..(393): unsure at all n locations
  Clone ID: LIB3049-002-Q1-E1-B7
gatatctaactttggcggtggcattcaccactcactgactcgggcatggcaaacgacgctgctctgagaacctctctgctctggcttgcagcagttatattggtggttggaatatacacccactctttcaagaagatgatggccacctatgtcttgggtgttcttgggattgctgctctgcttcttcctgattgggattacttcaaccgagatttctctcgttggccttaccctgtcactgctgaggaaagggccaattcttctattcatgcccaaggatctggttttttaaggtttgcgaattctcctctganggtgattgcttatagcgtggtttatggatatgctatgtacanatggtgngagtatgtatcaacctaatgaatgattaac

SEQ ID NO: 21386 - DNA, 392 bp, Glycine max
  Clone ID: LIB3049-002-Q1-E1-B8
gttggaattatagtgtatcgtggtctttactttggaatgtatgattccctgaaaccagtagttttggttggtgggttgcaggatagtttctttgctagtttccttttgggatggggaatcacaattggtgctggtttggcttcttatcccattgacactgttcgaagaagaatgatgatgacttctggagaagctgtgaagtacaagagctctttgcatgcattccaaacaatcgtcgcaaatgagggtgccaagtcactcttcaaaggtgctggtgcgaacatattgcgtgctgttgcaggtgctggtgtgcttgctggttatgacaagctgcagctcattttgtttggaaagaaatatggatctggcggcggctaaaaatgatgacgaca

SEQ ID NO: 21387 - DNA, 395 bp, Glycine max
  Clone ID: LIB3049-002-Q1-E1-C1
gacagtaacaaagactccttttccattttccttcctttgggttgtgttctgtgttattgggttggattgtgttgtgtgttccatacaactccaactagtcagagattcttgtctgggctacattgcactttgcaccccaaaaagtgaaaggaagagaggcataaacaccccaaaaaatggagagagctctcactaaagtcagcagcttgaaggtggggttggggagttcatggatctccaagaaggccaaagatgagttctctaacatctctgaagacatctctagtttctcaaataccgttgaagaaaaggcgaaatggatcttcaacaaattaaaacgtaagccacagaaaagcctaccggatctcctccgagattacaatttgcccacaggt

SEQ ID NO: 21388 - DNA, 332 bp, Glycine max
  Clone ID: LIB3049-002-Q1-E1-C10
ggtccctgtctatgttgagcgcgtttgttcacgcgccttcattttgttcttccaccaccctcagtcaatgtgtgagtctgaagctcatcctcacacgcacttcaatggtcgtatccactaatcgattcacgatcgccggtgatgtgcaggattgctggaaccttgaactagattcgaaagcacttgagctcttgcatccagaattggtgctgtttacacgtgattttggtgaagaaaatcttgaagtcagcacaaatgttgtgaatcctgaatttgccatcgcagttatactgggaaaccacgatgcctggtttacttaacaattttctgga

SEQ ID NO: 21389 - DNA, 312 bp, Glycine max
  Clone ID: LIB3049-002-Q1-E1-C11
ggtagcttggaatctgcagttgtagatcggagactgggcaagagggtcgcattagcttcttcatcgcgcaatggcccatccctctgctgtcgtctccgtcagaaggccaatcacccacgtcgtttttgacatggacggtctcttgctcgacactgatatgttctatactcaagtccaggaaatcatacccgctacggtacacaaaacctttgattgtccccaaaaggcaaggataatggaaaaaaaagccattgaaactgccaagattcttgtttaacagaacggaattagttaatcccctaatgcccaacc

SEQ ID NO: 21390 - DNA, 329 bp, Glycine max
  unsure (1)..(329): unsure at all n locations
  Clone ID: LIB3049-002-Q1-E1-C12
ggcacctttcgggtctggaagaagagtgtgccctgggaaggcccttggtttggcctcggttcatctttggctcgctcagttgcttcaaaattttcattgggtttcatctgatggtgtttctgtggagttggatgagtttcttaagctttctatggagatgaagaagccactgtcttgcaaggctgtgcctanggtttctgtttaggtttatgtgtgttgttgggttgagttggtttggtttgtctgcttaggtttgtggatgttgttcccaaggctgtgcctaaggtttctgtttaagtttaagtgtgttggttggtttgtccggttaa

SEQ ID NO: 21391 - DNA, 391 bp, Glycine max
  unsure (1)..(391): unsure at all n locations
  Clone ID: LIB3049-002-Q1-E1-C2
ggctgtagtgctgtactagtgttacgcccgagtagattaggagagccaaaaaacttttgaaacagctcactcggaagcagagcagaatagatgaatttgttatcgcaatccactgccccttctacttctctatcaccttcctgttttcttccacgccaccctcatggttccacctggttctcttctggtaccttcaaattcttgaagaaagagagtagatgtctaaggaaagctggacgtactaaaatcactgcaaagtttgagctgaagccaccaccatatcctttgagtgctttggagccaattatgagtcaggagacactcgaataccattgggggaagcatcatangacttatgtagataatctgaacaggcaaattgatggaacag

SEQ ID NO: 21392 - DNA, 395 bp, Glycine max
  Clone ID: LIB3049-002-Q1-E1-C3
ggagtgggttggttttttctttggttctcctgagctgtgtttattctctttctctgcgctctcatcttcgagctccgatggcgagcctgtggcgctcggtaaccggcatgactgacaattccaccgattacgacggcgtctagttccggtcgaaccccgatcggaccggcatggctcatcacgcatggcgagtacatcatcatctggcgccgccgctggtttgtcctcaagcaaggcaagctcttctggttcaaggactctgccgtcacgcgtgcgtcacgtccactcggcttggtccccgtcgccacgtgcctcagcgtcaaacgcgccgaagacatcctcaacaagctcaacgtcttcgagctctccacgcgctgcgactacatgtacttcat

SEQ ID NO: 21393 - DNA, 395 bp, Glycine max
  Clone ID: LIB3049-002-Q1-E1-C4
agggggacctacagacacaggcccaacttgaacaccctcaagcacttcggtcaaaaattgattcctgcccgcctgcttgattgggagaattttcaacaatcgtcagagatcatagatgttttgagtactattcattcagaaatccccagaggggtggttctaggagattatgtgattgaatatggggatgatgatgctagagacgagtttgaagacttccctggagatgagggcaactggtggacctcatgtattctatatttcgacaactttagaagatccagaaatagaagaaggacgagagtcagtcatacaagaagggataatcgccgtttaagttatgatacttcaaattctgatgaacgttctgtagtatctatggagtatgcagatta

SEQ ID NO: 21394 - DNA, 383 bp, Glycine max
  Clone ID: LIB3049-002-Q1-E1-C5
ggcagttgttgttattgttgttgaatctgccgcaccagacaccgattcattcgaccaaaacataagcatgtcgggatctgacatggcaagcacggagcaattcacggttgggatgcacaaaccccaaccccaaccccaacaacaacaacctcagcttcatcaacacaacatgcgtatggactatgctgctgctgacggcaccgctgttttcgcccctcctaccgttaccgttaacattaacggcggagaatcctctccggcggtgcctccgggcctgggcctggcccagccccagccccagccccagcccatgatggttaactcctccgaaccaatcaagagacagaggggaatgcccaggaaatatgggcctcacggtggca

SEQ ID NO: 21395 - DNA, 382 bp, Glycine max
  Clone ID: LIB3049-002-Q1-E1-C6
ggttctagtgtgtgattgtttgttgttgtaactcgttcttcttcttttgttgttctgtgtttgtgtttgttttttctctcacctgaaaatgtcttgctgcggtggtaactgtggttgcggaagctcctgcaagtgcggcaacggctgcggaggctgcaagatgtacccagacttgagctacactgagtcaaccaccaccgagaccttggtcatgggagtggcacctgttaaggctcaatttgagggtgctgaaatgggtgtgcccgctgagaacgatggctgcaaatgtggaccaaactgctcctgcaacccctgcacttgcaagtgaggtgttgggagagcaagcttcaagcagagatagcccttaattaagaataatgat

SEQ ID NO: 21396 - DNA, 320 bp, Glycine max
  Clone ID: LIB3049-002-Q1-E1-C7
tggggttctaatatgtgattgtatgttgttgtcactcgttcttcttcttttgatgttcagtgtatgtatttgtttttactctcatctgaaaatatcttgccacagtggtaactgtggttgcggaagctcctgcaagtgccgcaacggctgctgatgctgcaagatgtagccagacttgagctacactgaatcaacaaacagtgagaccttggtcatgggagtagtacctgttaaggctcaatttgagggtgctgaaataggtgtgcccgctgagaacgatagatgcaaatgtggagcagactgcacgtgacaatccctgc

SEQ ID NO: 21397 - DNA, 163 bp, Glycine max
  Clone ID: LIB3049-002-Q1-E1-C8
tggtattgctgcgagtagatgactgatgggagaactcgttcttcttcttttgttgttctgtgtttgtgttggtcttttcgctcatctcttaatttcttgctgttctagttcctgtggctgctgtagctcctgctagtgcggctatccgttgctgttgttgcaa

SEQ ID NO: 21398 - DNA, 395 bp, Glycine max
  unsure (1)..(395): unsure at all n locations
  Clone ID: LIB3049-002-Q1-E1-C9
ggaggttggcaatggaagtcctttagactacactactacagtaccaccaacgatcaatgcaatattcatcaaaatgggtacaagagatgttcatgatgatcttcatactgatgatgatgatcaagaagactcagagttagaggatcaagaatcagcanaggcagagaaatggaaaaaccattactcatcaaatcacaggatcctccttgttggaaacggtgaactttccatccccccttggtttggcaaaacccttggttccggccaaaaactccttgccaattcccctgaatcctaagatagcattggaaagaagtacagtaatggattgagcaacgtgatggaacttcaagaaagaggttgccttgtttttcatggtgttgatgccaaggaaa

SEQ ID NO: 21399 - DNA, 376 bp, Glycine max
  Clone ID: LIB3049-002-Q1-E1-D1
ggaagagaagttgatgtcaacagcagaagctcctcctccgttccaagaagcagcgcgatgcgttgtgtgcaattgcagtttcaacaccttcagaagaaggcatcactgtcgatcctgtgggagaacattgtgcaatgaacattcatcagatcaaatggctttaccacaatttggcatttactcaaatgtccgagtatgtgctgattgtttcaacaactcacggtctgggaaggatgaaccacagacttcttcagatggagtaaacagtgtgacagatacaatttctaaattagatatcaacacaaatgttgattcaaaatccataccaactgcagagaataagcttgtgttgggcattaaagagtgtaaatgtgga

SEQ ID NO: 21400 - DNA, 142 bp, Glycine max
  Clone ID: LIB3049-002-Q1-E1-D10
gactcaagcgtaagtacaggcgtcagtatagcagcgaatgggtttgatcgaggtgtgatactttcattattatgagctgattttaattcgattttttgaccttgatgacgatggagggtcgggatcgatgccggtttgccta

SEQ ID NO: 21401 - DNA, 378 bp, Glycine max
  Clone ID: LIB3049-002-Q1-E1-D11
ggacattaggatgaagagaggactcgcaagcttaatcaagacgccaatagagagagggtggggtaatgggttgcgctgtttcaactcttcttcttcggtgttgaagggcgtcaccacccccactctgcttcagcccagagtgcttctctacgacgccgtttctcacctctgccaacgaagaattaaaatgggtatcaaaacaaacagggacgaaagattaaattttggtgcgttcaattcgaaaatgctgaactctaactgaaaacttgtggtcctgaacgaaaagatgtcctgcaccgcaatctgtttgttgaaagcctgaatgtttactctcaaggattcactgctgcattgcgaatactgtcgcacttgccacta

SEQ ID NO: 21402 - DNA, 375 bp, Glycine max
  Clone ID: LIB3049-002-Q1-E1-D12
gataatggagggatacaataagaaggttatgattgtggggatggtgttgggcatggccatgattgggatggccaatggccaatactcgttttgtcgcatgcccagcgatgggttggcggcatgcaagccgagtgtgagtggggactatcctgctgatccctccactgcttgttgctcagccattgccaaggctgatcttaaatgcttctgccgcttcaaggattcgggccttctctctatgtatggtgttgatcccaacaagtgcatggaactccctgttaagtgcaaggttgtcgactctttccactgctagattcattagagggggcactaatcaatataaactacacaagggcacttaattaactatgtact

SEQ ID NO: 21403 - DNA, 180 bp, Glycine max
  Clone ID: LIB3049-002-Q1-E1-D2
ggaagagaagttgatgtcaacagcagaagctcctcctccgttccaagaagcagcgcgatgcgttgtgtgcaattgcagtttcaacacgttcagaagaaggcatcactgtcgatccggtgggagaacattgtgcagggcacatccaccagttcaaagggtttaaccacaagtgggaattaa

SEQ ID NO: 21404 - DNA, 390 bp, Glycine max
  Clone ID: LIB3049-002-Q1-E1-D3
gggtgtgcgtgagagtgaagcgagaagcgagaagcgacatggatccagacgcgttggcaaaggcattcgtggagcactactactccaccttcgacaccaaccgcaacaatctcgccaatctctaccaggaaggttccatgctctctttcgagggtcagaagatccagggctcccacaacatcgtcgccaacctcacctcccttcccttccaacagtgccagcactccatcaccaccgtcgattctcagccctcaggcgtcaacgccgccatgctcgtcttcgtcagcggcaacctccagctcgccggcgagcaacaccccctcaagttcagccaaatgttccatttgataccaacaccacagggaagctattatgtgttgaatgacatat

SEQ ID NO: 21405 - DNA, 390 bp, Glycine max
  Clone ID: LIB3049-002-Q1-E1-D4
gaaagaagagaaaataataatatgaataacaacccacaaaacttgggtcttgcaaattaagttcattttcctccctttcactctcgtagacatcacaaaccttccctccattcatcccacgcatggctgccatgaactctagcgtattggcctgtagctatgccatatcaggtgcagcgtgttcggagctcaatgggaaggtcacttccgtggcctatgttgcatgctctggctacaagttgccattgatcaaagctgacgccagagttcctaaagccaaagaatctgaaggaagaaggagaggtgcccttgttctcttggcagctacccttttcacctctgcagcttccaattcttctgccaatgctgggattattgaagattaccttg

SEQ ID NO: 21406 - DNA, 382 bp, Glycine max
  Clone ID: LIB3049-002-Q1-E1-D5
ggcagttcaattccaatatattcgattctctctgtgtatttccctacctctcccttcaagatgcagatcttcgtcaagaccctcaccggcaagaccatcacccttgaggtggaaagctctgacaccatcgacaacgtcaaggccaagatccaggacaaggaaggaatccccccggaccagcaacgtctcattttcgccggaaagcaacttgaggacggccgtacccttgctgactacaacattcagaaggagagtactcttcacctcgtcctccgtctccgtggtggcatgcagatcttcgttaagacactcaccggcaagaccataaccctagacgttgaaagcttccgacacatcgataacgtcaatgccaagattcagg

SEQ ID NO: 21407 - DNA, 381 bp, Glycine max
  Clone ID: LIB3049-002-Q1-E1-D7
ggtgacagtttcattattatgattttaatttaatttgattttatagcgacgagaccagcgagcaccaccaccgcgaccggcgagcccagccaccgtgttcgacttcgaattgagtccgagaaggctgttagataggcttttatattgaaaactgagacttgaagggaagcggttataattggtctggctttggacgcttaaacaattccgatcaagatccaattttgccttcccattttctcgtcgtttttttgcaacggtctttccatggcatatcccttctctgatttcaagtactcagatggcctcagtgtagtgggtatctccttctgcacagctattgtctgtgaggctatctcatgggttcttatctatcggacc

SEQ ID NO: 21408 - DNA, 377 bp, Glycine max
  Clone ID: LIB3049-002-Q1-E1-D8
ggtgacagtttcattattatgattttaatttaatttgattttatagcgacgagaccagcgagcaccaccaccgcgaccggcgagcccagccaccgtgttcgacttcgaattgagtccgagaaggctgttagataggcttttatattgaaaactgagacttgaagggaagcggttataattggtctggctttggacgcttaaacaattccgatcaagatccaattttgccttcccattttctcgtcgtttttttgcaacggtctttccatggcatatcccttctctgatttcaagtactcagatggcctcagtgtagtgggtatctccttctgcacagctattgtctgtgaggctatctcatgggttcctatctatcg

SEQ ID NO: 21409 - DNA, 397 bp, Glycine max
  Clone ID: LIB3049-002-Q1-E1-D9
gtttgatggaagtcggacgcctccgccagtttgagatcattccaatagaacaagtttaacttcattcgatggagattatgcaacacagccaattcccgtaacttcacgtacagtcaggagcctaagagataacacacgaatgatcacatctttaccagtacccccctgtacaagtcctttgccacagttaggggcaccagcacagacctgtttcccttctccgcctcaacctacctaaaccttgaagggggcaaatacccttccctcaaatccagtgacactaaatgccacattcactcctgacccttttcaagaaagtgccttccaacaagcccacacacccggtggattcccaagaagacccagtttgagttgccgattgtaaacaccccaaaaa

SEQ ID NO: 21410 - DNA, 372 bp, Glycine max
  Clone ID: LIB3049-002-Q1-E1-E1
ggggatcacaggattcagatggtggactaaaatcagcaacatacatattcgagactcctcctcctaagtcctaaccctaatcatcctcttccgcaccttcgccttcttacccctccttcctctctcagcttccttctttctacgagggagagtgtcgctagcattcctccttaagcgtttatgtttaatgtttctttgtgacttggtgtttggtttctgtgatggcagatactcggagagtttgcatgcatttctgtgttttggaggaatgtatcacttcgtgtctggtggaaatgtgcgagttctaatggcgtgctgaatgctggctacttctgttttcagactatggcatcgggcttatcatgctgtgtt

SEQ ID NO: 21411 - DNA, 328 bp, Glycine max
  Clone ID: LIB3049-002-Q1-E1-E10
gacggctttcaccattattttcctttctctctcactcgaaacaaaacaaaacaacacaaccggaaaaccaaaccacctctccctgctcccgccgctgttttccgccgctgtcgccgtcgttcccacctcaccgtggcggcgcgcgcgtctccgatgggaaagtacatgaagaaagcgaagccgaaaggagaactcgcgctcgtcgaatccaccaccagcaacaccaccacctcctacatgggggtccgaacccgcgccaaaaccctaacgcttcagaaatcccacgcgcaacaacacgaacttcccgccaacttcgactcctaactcc

SEQ ID NO: 21412 - DNA, 348 bp, Glycine max
  Clone ID: LIB3049-002-Q1-E1-E11
ggatgcacaagtttgttgagatagctagaagcaataagatgaaaatgaaagtgcttgttttgtttgttgctacagttttggtagcatatgaatgccatggctcagactaccagaagttccctctccaaatgaaaactgggtttggtgggcaatacagcaatgaggtggcatgtgccagttggaggctttgcgtggaaacaaacaacgttattcaattgcaaactggtcctgcaacctgcggaaaattcatagctgaacaagttccaagaaaacaatatagattagattccaaaacagttaaccaacaagcttaattccaagctaaatccctcaaactcaccaacaaag

SEQ ID NO: 21413 - DNA, 299 bp, Glycine max
  Clone ID: LIB3049-002-Q1-E1-E12
ggaataagatagctgttggaattgctcatggattggcttatctccattatgactgtgatcctcccatagtgcaccgagacatcaagccaagcaatatacttctagactctgatatggagcctcacattgctgactttggtattgccaaacttctggatcagtcttctgcttcaaatccttccatttctgttccgggtacaattggttatattgcaccagagaatgcttatacaacaacaaatagtatggagtctgatgtatagagttaccgggtagttttgcctgagctgatgaccaga

SEQ ID NO: 21414 - DNA, 399 bp, Glycine max
  unsure (1)..(399): unsure at all n locations
  Clone ID: LIB3049-002-Q1-E1-E3
gcttcatcgtagcgccagactgagaggaagagagagggagattctttgtttgctaccttctctcggaaaaatggttacgttcaggtttcaccagtaccaggtggttgggagggctcttcccacggaagcagatcagcaccccaagatctaccgaatgaagctctgggccaccaacgaggttcgcgccaagtccaagttctggtattttctgaggaaactgaaaaaggtgaagaagagcaatggccaagtgcttgccatcgacgagatttttgagaagaacccaaccaaaattaagaactatggtatatggttgcggtatcagagtaggactggttaccacaacatgtacaaggagtaccgtgacaccactctaaacggtgcagttgangcaatgtacaa

SEQ ID NO: 21415 - DNA, 349 bp, Glycine max
  Clone ID: LIB3049-002-Q1-E1-E4
ggaaaacagttaattgtgcctaattaccaaaaacaaaacattgataaaatgggaattttgggaagcaaaattaaggcttcaattccgaattcaccattttatctgcctagttttagggtactgtttatcatcgttagaatctgagggtgtgaagagtgaagatggcagaagaaaaagaatcaacgtcaattcctcttagtcaaggggacaatgcatctcgcgacgatcccgaagacccagccaagtctccactaagctcgcccaactcttccactcgcagggcttgctgctttgttctccagagttgggtctctaagaaatttatgactggatgttctttttccagttg

SEQ ID NO: 21416 - DNA, 396 bp, Glycine max
  Clone ID: LIB3049-002-Q1-E1-E5
gggtcactactttgcagcacactcttgagttttgagtctccctccctggcagtttcatggcttcttcagtgaccagatgaacctcaggcttcagcttctcagagatctggctcttggtggcagccagagcactcatctgtggctttctggggtacatagtttatgatgcaatcatggccactgcttctgagttgctgcaacgtttgctggtaatttctccactgttcttgatcatcattgttcactggctctccactgcaagccaaataagcttccccatgccaggatctgagcccagtgccatccacagagctggtggttccccttggggtgttgcagttgttcttcttctgcttttccttctcatttcttaacaaccttccctgcatgacctta

SEQ ID NO: 21417 - DNA, 381 bp, Glycine max
  Clone ID: LIB3049-002-Q1-E1-E6
gacacttacgagtactaagcatggagtcctcaaagatctatgcttacctcttcctctgcatgatctttctctcatccgccactcccattctcggttgtggctactgtggcagaacccccatgaagcacaagcctggtaaaacaccaaagacatccaaaacacccgttgttaagccaccagtcaccatctctcccattaatgttcctcacgttgttcttccaccactagtgaagcccccaggtattctccctccaattccaattattaacccatgaacgacaccagggaacggagggaacactccatgcccaccaccaaagtcacctgcgcaagctacgtgccccattgacacgctcatacttggtgcctgtgtggatcttc

SEQ ID NO: 21418 - DNA, 385 bp, Glycine max
  Clone ID: LIB3049-002-Q1-E1-E7
gagagcttccaagattgcagccgatttcactccctctctcctctctttcactctctcgaatgcgggtggagagtgcggaccggaagttctgccgtgtgcgcgacgtgcggcgtacagcggcagcgcgagccagcatcaacaggagaactgcactccagaaggttgtgcggtggcggcgtacggcgtacacgagcaagagaatcgcgcgtgcgaagctggcggagtgcgggttgacgcagtgggaacacgggttgacgaggtgggagcgcggtggagaaccacgaggcactagccaggtggctacattatttgatatatactaatgccactatgccagggacagaagtcaatcatatctgtcattatccgatcattaaggatgtcg

SEQ ID NO: 21419 - DNA, 365 bp, Glycine max
  Clone ID: LIB3049-002-Q1-E1-E8
ggagcaagagtgaagagcgaacacaatggctcccaagggtctaatctttttggctgtgttatgcttctcagcactgtcactgagtcgttgtcttgcggaggataatggacttgttatgaacttctacaaggaatcatgccctcaggctgaatacatcatcaaagaacaagtcaagcttctctacaagcgccacatgaacactgctttctcctggctcagacacatcttccatgactgtgctgttcatagttgtgatgcttcactgttgctggactccacaagatggagcttgtctgagaaggaaacagatagaagctttgggttgagaaatttcaggtacattgagaccatcaaagtagctttgg

SEQ ID NO: 21420 - DNA, 396 bp, Glycine max
  Clone ID: LIB3049-002-Q1-E1-F1
gtttgaattggggtcagtgtcactgggagatgcataggggaagaactggaccctagggtgcttatacctcattggacactgcttgtcgtggtctggttggcttgtgttgcaagcaccggttctcaagaagtacccggctcgcctctctgtcacttcctacacctgtttctttggactcttgcagtttctcgtcattgctttgctccttgaaagagacgcgcaggcatggcttttccactctggtggagaagctttcactattttatacgcgggagtggtggcatctggaattgccttcgctgtacaaatatggtgcattgacagacgtggtcctgtgtttgttgccgtctatcaacctgttcagacttttgttgtcgccatcatggcttccattgc

SEQ ID NO: 21421 - DNA, 332 bp, Glycine max
  Clone ID: LIB3049-002-Q1-E1-F10
ggttggaaaaagaaggaacatcagcagcagcaacaacaacaacaacagttctagtagtagcgttcttgggttggatgtgaaggtgcaacagagccctgaagcattattccataataggatgatgatgatggcgcatcataatcatcaccaccgtccattgtcatcaccctttgataataatggtgatggcgatggtcccacgacttacatgtcttttactaatcatataaaccttgttagtggtgcttcttctgttcttggtcctgctattgatgctggctgtggtgctgctcctcctgcacctgttagaactttgcaaccttttgacattt

SEQ ID NO: 21422 - DNA, 395 bp, Glycine max
  Clone ID: LIB3049-002-Q1-E1-F11
gcgatcctgagaaggagaatttgtgtctatatgggtttccaaatgaaacatgggaagtgaatttgcctgttgaggaagtgcctcctgaacttcctgagccagcattacgtataaactttgccaaggacggcatgcaagagaaggactggctatcactggttgcagttcacagtgactcatggctgcttgctgttgctttctattttggtgcccgctttggatttggtaagaattaaaagaaaaggctttttcagatgaataatgatctgccaacaatcctcgaacttgtgactggaagtgctaggcaatcaaaggattaaccagctgcccataacaatggtagccaatgccaatcaagtggaaagtctcgtcagtctgagtctcacgccaagggg

SEQ ID NO: 21423 - DNA, 339 bp, Glycine max
  Clone ID: LIB3049-002-Q1-E1-F12
cgaggaagatagatccaaggtcgatgatctcagaggttcccctatgagcgttggtaacctcgaggaactcatcgacgagaatcatgccatcgtttcgtcctcggtggggcccgagtactatgttggtattttgtctttcgttgataaggatcagctcgaacctggatgcgctattttgatgcataacaaggttctctctgttgttgggcttcttcaagatgcagttgatccaatggtctctgttatgaaggtcgaaaaggcccctttggaatcatatgctgatattggtggtttagatgctcagataccggaaagttaagaaacagttgagcctcccct

SEQ ID NO: 21424 - DNA, 92 bp, Glycine max
  Clone ID: LIB3049-002-Q1-E1-F2
gagagaatgagatagatatagagagaaaaagagagtgtgcttctctcgacacttggactacttacaggccacagccatgtgcaggtctggat

SEQ ID NO: 21425 - DNA, 348 bp, Glycine max; identical to SEQ ID NO: 9032
  Clone ID: LIB3049-002-Q1-E1-F3

SEQ ID NO: 21426 - DNA, 363 bp, Glycine max
  unsure (1)..(363): unsure at all n locations
  Clone ID: LIB3049-002-Q1-E1-F4
ggagagagagagagagagaatggtttccagggttcacaagagaacagcactgtataggagcatacaacagcttcgttcaatcactaactcccatgcgcgccgtaaaacgtctgtgatactggatgcatcgaagtacatacgtggtttaaagcagaagttgcaagaattgaaccaattagcagttgctgcagcccaaaaggacattgagtatggtccagtaatgcccatgctaaaagtggaaccacaagaagaggggtttatgatcaaggtgctgagtcaaaggagttgtcaggggttgttggcgtttatattggaagcctttgaaaggcttggtcttgaggtgctccaggctanggcttcttg

SEQ ID NO: 21427 - DNA, 382 bp, Glycine max
  Clone ID: LIB3049-002-Q1-E1-F5
ggagtgaggagactgatagaacagaagaacacattatggaagacacagtttctgcgttgaggtcgttgatggcttctcacgcgccgccgctggatgccttactggtgcccgctgacaattatcacctgagcgaatatgtgtctgcacgagacaagcgctgccaattcatttcctgcttcactggaagtgccggcttggcacttataacaacgacagatgcactgctgtggacggatggacagtattttttgcaggctgagaaaaaacttactgctgggtggaagctaatgcgaattgttgaatatcctgctgtagatatctggatggccgataatttgccaaatcatcccattcattggggttcatccctgatgcacttcaa

SEQ ID NO: 21428 - DNA, 386 bp, Glycine max
  Clone ID: LIB3049-002-Q1-E1-F6
gaaaacaaatcgtgtaaaggcaaagtacagacaaagttagttagaaattgaaagggaaagggaaacgaaaatgagtagtagggtttggtgtgtggtgatggtatcagcgttggcgttgatgttacaatggcacgaagcattcagctcctacgctggctccgcaagtgcgatcatcgacccttccaaggtcaaacaagtttcgtggaaaccgagagctttcgtttacgagggttttctgacggaattggaatgcgatcacttgatttccatcgccaaatcggagctcaagagatccgcggtggccgataatttgtccggcgagagcaagttgagcgaagtcagaacgagctccggcaatgtcattcccaagaacaaggatctgattg

SEQ ID NO: 21429 - DNA, 340 bp, Glycine max
  Clone ID: LIB3049-002-Q1-E1-F7
gatactgggatggacgtagtattttttttgtcccttttgtgttgattctgttctttgtaattctaatcctaggataaaagttcctgaactcttagaagatgaatggttcaaaaaaggatataaacaagcaacttttaaaatggaagaggatatcaatgtacatgatgttgctgctgctttcaatgattctaaggaaaatcttgtgacagagagaaaagagaaacccgtgtcaatgaatgcttttgagctcatatctaggtcacaaagcttcaaccttgaaaatttgtttgataagcagcaacggtctgttaagagagaaacacattttacctcacagcgc

SEQ ID NO: 21430 - DNA, 376 bp, Glycine max
  Clone ID: LIB3049-002-Q1-E1-F9
gaccgcgaaacgcacatttcactattcattctcgtttccctttcgactgtgattgcttgttaactgaacttttcgagcaaaatgtctggacgtggaaaggggggcaagggtttgggaaagggaagagcgaaacgacaccgtaaggtgttgcgcgataacattcaaggaatcaccaagcctgcgattcggcgtttggctcccaagggtggtttgaaacgtatcagttgtctcatctaagaagaaaaacgttgcgtgctcaagattcttctggaaaacgttattcctgacgccgttacctacactgaacacgctaagagaaagaccgttacgggaatggatgtggtttaagctctcaagagacaaagaagaaccctct

SEQ ID NO: 21431 - DNA, 391 bp, Glycine max
  Clone ID: LIB3049-002-Q1-E1-G1
gcagccgtcgaacgcctaatcggttgcctcctgctcctccgggttcttcaggttacaaatattaacaggtggctgactagtgattgcttgacagttactgtttgatacatttttggagggtgaggctgctcccaccccatttcatacggtcatccccaattctttgtttctgccggtatatttaggtgaggaaatgtttgtgtaaatagaagacgactatagtttattagtataagttttctgggcattcgtctaattatccggaagtttggtatcgaggtggacttgattacattaatcaggttttgcttttttggtttacaaaccattaaccaggtttggcaatccaaaatcctttcaactttacaacctttaatggttcccttttccc

SEQ ID NO: 21432 - DNA, 310 bp, Glycine max
  Clone ID: LIB3049-002-Q1-E1-G10
gaggccttgcaggggttttcctctcctcattcaccaccatgtcaattttcactggaggagttattttcatagtgggacaactctgcattaagccactgcacttgctctatctctggctaacctacttcctttttcctcttgtttctttgtcactgctacaacccttgttgcacgtgatcaagatgaattctgtgaagatgcaaattgtggggtttcttttgtcactcttgtcatcagggtttggattctactacggtcacagtcactggaaatggggccacttggtgctaattggtgcaattcaaagcac

SEQ ID NO: 21433 - DNA, 316 bp, Glycine max
  Clone ID: LIB3049-002-Q1-E1-G11
gaatcagaacacgaaagagggttttagcgaacgatcatggcatctgctagggttttcggagcgatcgccgggagagcgttcatggccgcggcgtcgaagagttcggccaagacgaaacccgttccgtccggcggacccgctgcaaaagccgccgtgaaaaagccggccgcgcctatgatcgccaactccggcatacagaaggtggttccggtgtcttccgagctcggagacgtcctccgggctcctcaagtgtcgcgaaccgacgccgtcaagaaagtccgggcctacatcaagctgcagaatcttcagaatccag

SEQ ID NO: 21434 - DNA, 346 bp, Glycine max
  Clone ID: LIB3049-002-Q1-E1-G12
gtgtgtggtagtgagaaggattgagaaaaagaaagtggtgtccaagcaatggcaattatctctggtatcccttaatttatatgaatgttgtcacagaggcctttcttttccttatgatgttgctcttgttcctaccaaagcagcaacattaaaattaaaacatggcatcttcaccggacaccagcaaaaccataaagctggtgcgtaacaacagctacctccgcagactcaacatatccttcaaaatcctcttcctcctcctcgccctcctcctcctttacactctttccaaccaccagcaccaactccccctctcctccgcctgggagaatcaagtccggcaatc

SEQ ID NO: 21435 - DNA, 245 bp, Glycine max
  Clone ID: LIB3049-002-Q1-E1-G2
gcgtcagtccagacgtcagaagacgactgagcggacacctgtgtacaagccgtacgcgtagccgtctgttcagccgggagactccagttgaagtgagatacatgtcgctgactggtaagagtgtttgcattattgtgcgatgaattgatttacagttactgctgatcccagcccatttcatagagtcagctccagctccttgattatgcaggtataatcatagtcaggatcagtcatgtatgata

SEQ ID NO: 21436 - DNA, 386 bp, Glycine max
  Clone ID: LIB3049-002-Q1-E1-G3
gagtacaagaggatgatgcctgggagaatcattggggtcagtgtcgattcttccggaaagactgctttgaggatggcgatgcaaactagggagcagcatatcaggagggacaaggccaccagcaacatttgcactgctcaggcactgcttgcaaacatggctgccatgtatgctgtgtatcatggacctgaaggcctcaagaacattgcacaccgtgttcatggtcttgctggggcatttgctcttggaataaagaaacttggaactgtggaaattcaggaccttcccttctttgacactgtgaaggttaagacttccaatgcacacgcaattgctgatgctgctctcaaaagtggaataaatttgcgagttgttgatggaaacac

SEQ ID NO: 21437 - DNA, 320 bp, Glycine max
  Clone ID: LIB3049-002-Q1-E1-G4
gatcatcctatggatttgagtcccttttgtctcacacgctctctctgatggggtcacggtcaccaccctatgcagcttgccaaactcattctgtgtaatgaaaaaccagaactactgcccctcacactgaacttgacagttttcaaggtgtttgataacattatggtttggtatttttgaatttttttcccctttgatctctctcgtgaaacatgttttgcttctaggtaccccctttgatgcacatatagttgagttaataaatggactttgaggaaagaaaaagggaaagttcaaacttgttgtcattcttgagtttt

SEQ ID NO: 21438 - DNA, 377 bp, Glycine max
  Clone ID: LIB3049-002-Q1-E1-G5
gatggttgactggttgttttttaaattgcatgaaacatttatttgttcttatagaaaaagttacaagtaagtcttcactgcaagtagaagatattggatccagttccagggttgaactccatacgattattttttaatagaaaaattgactgtgacgtagctgtggaggacacgattggtaaagtattgaatccttcctgcgactcttttctcattggttcactgtgttctccaaacacatctcagaatctcttgtattattattcaatcaatcaatggcttcttcaatccctaatggacctccctctgcgttgaattcccagttctacgatgatctcagaccgccacagaggaccttcaacttttcctttcttcaa

SEQ ID NO: 21439 - DNA, 271 bp, Glycine max
  Clone ID: LIB3049-002-Q1-E1-G6
ggttctagtgtgtgattgtttgttgttgtaactcgttcttcttcttttgttgttctgtgtttgtgtttgttttttctctcacctgaaaatgtcttgctgcggtggtaactgtggttgcggaagctcctgcaagtgcggcaacggctgcggaggctgcaagatgtacccagacttgagctacactgagtcaaccaccaccgagaccttggtcatgggagtggcacctgttaaggctcaatttgagggtgctgaaatgggtgttgccgctgaa

SEQ ID NO: 21440 - DNA, 390 bp, Glycine max
  Clone ID: LIB3049-002-Q1-E1-G7
gactagataatgtgtatgaagttgtagctagctagctagctttctattgtctaatacacctttgtctgtgttgtaaattaaggttcaagaagcaacaagtaatcactcataatacatatatataatggcggattggggtccagtggtgatagcagtggtgctgtttgtgttgcttagccctggtcttctgtttcaattgcctgagaggagcagagtggtagagtttgggaacatgcaaaccagtgcaatttctatcttggtccacacaatcatcttcttggtctcattaccatctttcttattgctattggtgtgcatatctacactggctatgctttattctattctctttttggttaaaggtttagtaaatttttatcttgttattct

SEQ ID NO: 21441 - DNA, 281 bp, Glycine max
  Clone ID: LIB3049-002-Q1-E1-G8
aatgctattgccagacgagttggttcagccacgaagacatatgatgccctccatcataaattcgtcagaaaggcatttgaggattataggaacgatgctttcatggacgcagatctgcagtgctctaatgcgatacagtctatggaaaataggctgagggcagcttgtaatgcttctgacgcaaacattgataatgtcgctaaggtacttgatgcccttttatctgaatatgaatacactattcaaggtccagggaagtggcacacacttgctgtcttctt

SEQ ID NO: 21442 - DNA, 351 bp, Glycine max
  Clone ID: LIB3049-002-Q1-E1-G9
gagagcccagagtgctcaaatttacgcgtgccacataacttggatcactatttcttcttcttagttctcactctcactgtctccgtcgtctttttctccaaagtttcggtgctgacggatagaacactacctattcagccgccatgcacactctcctccgattcactctcaggatcaagactgcttcatctttagcatatgctgtggtttccagaagtgctcacgaaaatccccttcaagctcccttattgtctagattaaataacactgaaggttcattggcaaaggataattcctccaatgatgttaaaaatggtcaagggtacaaaggtcatagtatgcttgctcctt

SEQ ID NO: 21443 - DNA, 380 bp, Glycine max
  Clone ID: LIB3049-002-Q1-E1-H1
gactctgctcttgctttagccatcactaacactcagtctctgaattggggctgagggtttcgagtaacgtttatttttcacgagtttaagatatcatgggtaaagagaaggttcacattaacattgtggtcattggccatgttgactctgggaagtcaaccaccactggccacttgatttacaagcttggaggtattgacaagcgtgttattgagaggtttgagaaagaagctgctgagatgaacaagaggtcattcaaatacgcctgggtgcttgacaagcttaaggctgagcgtgagagaggaattaccattgatattgcattatggaagtctgagaccaccaaatactactgcactgttattgatgccccaggacat

SEQ ID NO: 21444 - DNA, 308 bp, Glycine max
  Clone ID: LIB3049-002-Q1-E1-H10
ggaggcaagaagttgtattttggcatccccgtggcttcaagaagagaatctcaatggaggcccaggagctgaagcgcgtgttccagatgttcgaccgcaacggcgacgggagaataacgaagaaggagctgagcgactcgctggagaacctgggcatcttcatctctgacaaggacctgagccaaatgatccagaggatcgacgtcaacggcgacggttgcgtggacatggacgagtttggggagctgtatcagaccataatggacgatcgcgacaatgaggatgacatgacggatgccttcaacgtc

SEQ ID NO: 21445 - DNA, 369 bp, Glycine max
  Clone ID: LIB3049-002-Q1-E1-H11
ggcccactcccagaatctactcttctgttctttggatgggtttccttcttcaccctcttccctgaaaccacataaccccatggccatggcactcgacgcggcactctggatcgtgaagatgacgtggattgctctcagtggctggatttcttcttgtttaattgttgctgacgaatttgcctcttctctacgctctggcgatattggcccctttcatgtacgttgattcaattacgctctctttcctccaagatgggtactttacttattgggtaagctgcaagttttgtaattttataatgcccttcaaaataagcttgaattgatgtaatgggtatgaaccaaaatctctcccctttttcctttttt

SEQ ID NO: 21446 - DNA, 320 bp, Glycine max
  Clone ID: LIB3049-002-Q1-E1-H12
gggcgaagaatggcggcgccgggctcatccgccggcggcggcggagggacggcgaaggctacggtggcggagcagatctcgcaggcggtgcagtccacctccaacctcctccaccttatgcggcactcttctcctgcccaggctcaactggttaagcttcctaagaatcttttggcaaaggtttccaccatcaagaatacagagcaggttttggagcagttgcctggggtgatatcatctcttgacgcacacatggaaaatgggttgcaaaatgttccacatctaaagaccgtggttcaagtactttcaaatatggaaag

SEQ ID NO: 21447 - DNA, 263 bp, Glycine max
  Clone ID: LIB3049-002-Q1-E1-H2
ggcagaaagagaagcattagcaaaagcaagaagaactagtctaagcagaaatggcctcttcagtgatggcatctgtggccctcaaacctgcccctttcactgttgagaagtcctcagttagaggccttccctccctctcaaggaactcctcttcattcagagttgtggccagtggtggcaagaagatcaagactgacaagccttatggaattaatggtggcatggctttgagggaaggagttgatgcatctggcaggaaagga

SEQ ID NO: 21448 - DNA, 398 bp, Glycine max; identical to SEQ ID NO: 9701
  Clone ID: LIB3049-002-Q1-E1-H3

SEQ ID NO: 21449 - DNA, 320 bp, Glycine max
  Clone ID: LIB3049-002-Q1-E1-H4
acgcgtgagtacagatgtcagtagaggagagaaaggggaaggcagaggcttggcgtaaaaccaagacacgacgtcgtgtggtttctaggaccgtgtacgttttgaaactctggagattgagattgcgagtgagaatcaacacgcaaaactgctgttgccataccatgatcgcgacgatcaattgcagaaacatgaaccactcgtcgcttagtatcgtcaattatatgcactggaacggtggttgaagattccgccaagtgaacgtaccattacgacaaatgttcttctggtttcgctcatgaagcatcttgaaaaggata

SEQ ID NO: 21450 - DNA, 344 bp, Glycine max
  Clone ID: LIB3049-002-Q1-E1-H6
gaaggaaggtgcgtataagcatagaaggaaagtaaactagggttttagcagtggtggaagggttgttgagaaggggttttagaagtccacatttttcagatttgattcgcgttcctcttctctcttctcatcatcaatggcgacccccattcctccccctcctgccgccgccgccgccgccgccgccgacaccaaggtcgattacttgaaccttccatgtccgattcccttcgaagagctccatcgcgaagctatgatgtctttgaagccagattcttttgaaggcaatcgttttgatttcaccaagatgctcaatcagaagttctccctcaatcacaaccttt

SEQ ID NO: 21451 - DNA, 369 bp, Glycine max
  Clone ID: LIB3049-002-Q1-E1-H7
gggctttctcttcaatattgttacctgtgcaaattatacaactgagatctatcagtggttgggattcaacattgcaacacaaactgttgcaggctatattttccttgtggttgctacttttatcatgaccaattgggctttagccaagcacaggcgtttaaagaaggtatgcctccttaccttttatatttcagctcactaatacggtttacagtcttagaaaaaatatctaagagcaaaacatatactccacctgaactttcttgtaaaggaataacttgatcgtgctttttcctaaactgtctggttttagattttgaggatttcaaagttttgtggctaacttgattttcagactccatcatgttg

SEQ ID NO: 21452 - DNA, 392 bp, Glycine max
  Clone ID: LIB3049-002-Q1-E1-H8
gagggtttggttattagggttttcgctgaccggtgcgcagtcgagcctccagaagacgaatcgaaaatgccgtcgcacaagacattcagaatcaagaagaagttggcgaagaagatgaggcagaacaggcccattccctactggatccgcatgaggaccgataacaccatcaggtacaacgcgaagcgccgtcactggcgtcgcaccaagcttggattctgaggtgtatgctctgcctaggttcaatttatccaattaattagtgttttattttcttgaggcaaaaacaatgttttgagtttttaatattttccatttgttcgaagactatattgtgtaaggaacttactgtagttcatactcagggcgttggtcaactccttttaaagtat

SEQ ID NO: 21453 - DNA, 260 bp, Glycine max
  Clone ID: LIB3049-002-Q1-E1-H9
ggaacctttgcattctattcattcaagattcagcaagtgcgttttggaagcagagaccgaaatacttcgagatggcccgtacaaagcaaactgctcgtaagtcaactggaggaaaagctcccaggaagcagcttgcaaccaaggctgcacgtaagtctgcaccaacaactggtggtgtgaagaagcctcatcgttatcgccctggaactgttgctcttcgtgagattaggaaataccaaaagagcactgagctcctaatc

SEQ ID NO: 21454 - DNA, 326 bp, Glycine max
  Clone ID: LIB3049-003-Q1-E1-A1
gggggcaagcacaaggatgctgagaaggcagcatttgaggaggccgagaagaagagggaagaggaggaatcaaaggatgacccagttgactctgatgctgatgaggaagaggaagatgctgatggagctggcaatgactccgatgctgaatcaaagacggaagctggagaagacaccaaggaagagggtgtacatgatgaactctaggaagtttgcaaaacggataaagagtgagcggaagttatattccggaaagttatatctttttcagttgtagtgttttttgtttttatttttccctagataagcagaccgttggaaactgc

SEQ ID NO: 21455 - DNA, 402 bp, Glycine max
  Clone ID: LIB3049-003-Q1-E1-A10
ggtagtatattttttttaactaaaaaaaaggcactgcgtatggatttggtttaaggtttaaggtaaatccgtggctggtttctggaacttttgcatccgaatctccgtttgttttggcagaagcacaggttctccgcgtcagccatggccgatgacttcgacttcgcggataaagttcctccttcattcgatcgcgtgggaaatgtgatcaaggattctggatccaaagggttcaatccaggattaattgtcctcctggttgttggtgggttgttgttgacattcctcattggaaattatgtgctctacagttatgcacagaagaacctccctccctagaaaaaaagaagcctgtttcaaagaagaagatgaaaaaggagagactgaagcaaggtgtctctg

SEQ ID NO: 21456 - DNA, 252 bp, Glycine max
  Clone ID: LIB3049-003-Q1-E1-A12
ggttctaatgtgagattgttcgctgctgtcactcgctcatcgtcatgggttgctctgtgcattgtgctcggtttttctctcacctgaaagtgtcttgctgcggtgataactgtggttgcggaaactcctgcaattgcggtaacgggtgctgtggctatatgatgtagccacacttcatctacactgactcaaccaacaacgacattctgttcatcagagttgcatctgttaatgctcaatttgacggtgctc

SEQ ID NO: 21457 - DNA, 342 bp, Glycine max
  unsure (1)..(342): unsure at all n locations
  Clone ID: LIB3049-003-Q1-E1-A2
ggaaaggagaaaacaaaaaaagaaaaaattgacttgtgtagcttctaatgtgtggacattaaactcactttctctgtagccatagaaattcacattttatcttttgcattgtgcaacttcctcgcgccatggctgctaccatcatcacatgcaagctctcactgcttttaagccttctctcagtttcactattgctgggtgtgagttcatcagatacccttcagaatgtangggcaattcccccaacatgcaagcgcatagagtgtnccagctatgatgtcattcactttggcaacggctacgaaatccgtcgctataattcacccgtttggatttcgaaca

SEQ ID NO: 21458 - DNA, 357 bp, Glycine max
  Clone ID: LIB3049-003-Q1-E1-A3
ggagaagagatggtttggccaattaggtccagaataagttctcttctctgttctaaggcacctttagttggttcatacatctatgactcatgtgggtgcttacgcttttctgctccaaccagctcctccataacaaggcattggccaaaaattatggattgggtacaaatggaccgttgccgtgcagcagcatcgttaccttcgatcaaagagaaacaaccagaaagtcatagtaatcgtgtcagactcggtcaagaaatcaaaggtcttgatgaagggaatatggctgaaattgatagctatcaaaacttgtttggtttgatgaaacagaggtttctgagtttcaagagccaaaaa

SEQ ID NO: 21459 - DNA, 358 bp, Glycine max
  Clone ID: LIB3049-003-Q1-E1-A4
gacacaagaagtcatcttttattgtacgccaaagaaaagaaaagaaagaaatcatagtttttttgggttgtgtgtgtcttttggtggaggaatgcttgtcacctactccttttaagttcccccaaaaacacttttgtgagtgagagaaagaagaagaagaagaagaagaagaagtagcataagtgatggatagacacaaatgcaagctttgttcaaggtctttctccaatggcagagcccttggtggccacatgaaggctcaccttgctactctccctctccctccaaagcctcactcttattcctcttcctctgactcagaacaagaacaagaacaagaatctcttaattatgcttt

SEQ ID NO: 21460 - DNA, 303 bp, Glycine max
  unsure (1)..(303): unsure at all n locations
  Clone ID: LIB3049-003-Q1-E1-A5
gagcggttctgggttggagacagagagagagaagttttcagtttcagaaagaaagcaaaagcaatagcaatgggttggatcggtgagactgttgattccatcaaatctcttcagatccgccangtcctcacccaggctgtgagcccaagcatgattgttacgtctgcactgataatatggaaggcattgatgtgcgttactggcagtgaatcccccgttgttgttgttctttctggaagcatggaacccggattcaagcgggggagacatctttgttcttgcacatgattaaagatccaattc

SEQ ID NO: 21461 - DNA, 372 bp, Glycine max
  unsure (1)..(372): unsure at all n locations
  Clone ID: LIB3049-003-Q1-E1-A6
gttggatggggggttgtttgaacactacaccaaatttagagaatgcttggagagtgcactgaaggaattgctgggagatgaggctgctgagaccattgtcattgagcatgctaatgatggctctggcattggtgcagccctcctggcagcttctcactcccaatatttgggagtggaggagtcttaaattttattgccaaacaagggaaagacgtgtaatactagtttcattttttgcataggtggtagatcaacacattgaagcaatggtgccttgcagctggtgactgggggggcattcattattttggtttcagtgtntgtttctccctcgtttaagggaatatatcaaagatataaacttcaccttga

SEQ ID NO: 21462 - DNA, 347 bp, Glycine max
  Clone ID: LIB3049-003-Q1-E1-A7
ggaacacggaaacagataagatttaagacaatggaggattaatctgaatttaagtcccgctggtctttgtaattactacgccatatcaagcaaaatcgaagaaacgcgacgatccacttgcacaaaatccgcggtggaggcagatcacatagatggaggcacagtctcagagcaacaatcctaaccctaaccctaaccctaaccctaaccctaaccctaaccctaaccctaaccctcatcggaataattcggtagcgtcatcgatgccgctgtggccaacgatcgacggcccattgggcctgtcggaggaagagtcagtgggctacgctcgcaggttctacactttc

SEQ ID NO: 21463 - DNA, 377 bp, Glycine max
  Clone ID: LIB3049-003-Q1-E1-A8
gagagaagattttcatcagttgagttgagagaaggaaagggaaaatgggtaaggatctgagcgaggaacaagtgtcttccatgaaggaagccttctctctgttcgacactgacggagacggtcggatcgctccgtcggagctggggatcctgatgaggtctctgggaggtaacccgacgcaggcccaactcaaagccatcgtggctgaagagaacctcacggcccccttcgacttcccccgattcctcgatctaatggccaaacacattaaacccgaacccttcgatcgccaactccgcgacgccttcaaggtcctcgacaaggactccaccggcttcgtcgccgtctccgagctccgccacatcctcaccaacatc

SEQ ID NO: 21464 - DNA, 371 bp, Glycine max
  unsure (1)..(371): unsure at all n locations
  Clone ID: LIB3049-003-Q1-E1-A9
ggcagagagagacggtagcagataaacctaaagacgaacctcgcaaattccctcaacactggagtcactaagtgggactcggtggaaattcattctgggactcaggttagttttctcaatttaaaaaaacaactctcacaatgcgatccggatccttaaattgttgcttgctttgaacctaacgataagctgtgatgtgattatgatgttgtgtatttttttatttttaattatttagttatcatatgttttcgtcataattttcaactgttaatcgttaatttactgttatttactgtgctgttgaatcagctaagctgaccaaacatgattcanaatggttgcattgtatccaagggtgtgcccctctg

SEQ ID NO: 21465 - DNA, 393 bp, Glycine max
  Clone ID: LIB3049-003-Q1-E1-B10
gacagcatatagtcacataggctattaagggtgagatatatagaaaaacaaaggagaaaagatagaaatggagaagtttccagttgttgacatggggaaccttaataatgaagagagatcagcaaccatggagataatcaaagatgcctgtgagaactggggtttctttgagttggtgaaccatgggatatccatagagttgatggacaccgtggagaggatgacaaaagagcactacaaaaagtgtatggagcaaaggttcaaagaaatggtagcaagcaaaggtttggagtctgctcaatctgaaatcaatgatttggattgggaaaacactttctttttgcgccaccttcctgcctctaacatctcagagatccctgatcttgatgaaga

SEQ ID NO: 21466 - DNA, 399 bp, Glycine max
  Clone ID: LIB3049-003-Q1-E1-B11
gcagacagtatttgtatgcagtgtgtttgctgcggctttttcgggctctacaaagaatatgtcagatttgaatgtggctgatgtatattcttgggctccaacctttaaaagtttgcaagatcttgtaaatgaggaaattagagtaagattttcaagtgggagatttactatattgaatgagttggaagtagttgattcctctgtgaaggaattatatcctattatccagggcattgcagataccattgagacagaatcacttgcgaagattgttggggaattaagcagagcaacagagaagctttcacaaggactagatcttcttacaaaggaagtcgatagcttttccaagtggtccttgacggtcgtgataccttgctatctagtctgaggtcaggt

SEQ ID NO: 21467 - DNA, 401 bp, Glycine max
  Clone ID: LIB3049-003-Q1-E1-B12
ggaagagtgaagagaatggctcccaagggtttaacctttctggctgtgttaatatgcgtttcagcactgtcactgagtccttctgttgcgggggaagggcaaaataatggccttgttatgaacttctacaaggagtcatgccctcaggctgaagacatcatcacagaacaagtcaagcttctctacaagcgccacaagaacactgctttctcctggctcaggaacatcttccatgactgtgctgttcagagttgtgatgcttcactgttgctggactccacaagaaggagcttgtctgagaaggaaacagatagaagctttgggttgagaaatttcaggtacattgagaccatcaaagaagctttggaaagagaatgccctggagttgtttcatgtgctga

SEQ ID NO: 21468 - DNA, 348 bp, Glycine max
  Clone ID: LIB3049-003-Q1-E1-B2
gacggtggttgtgattttttttttttttttgtcgcagttggatgattgggtgctttgccgtatttacaacaagaagggcacgatcgagaaactgcaaccaagcagcgatgttgctcatagccgaaatatcgaatcctcggagatcgaagacaggaagccggagattctgaaaagcggaggaggttgtcttccgccgcctgtgccggtgcctgcgccgccgcaagcgacggcgaagacggattacatgtacttcgacccgtcggattcaatcccgaagctgcacacggactcgagctgttcggagcaagtggtatcgccggaattcgcgagcgaggtgcaaagcgagcc

SEQ ID NO: 21469 - DNA, 307 bp, Glycine max
  unsure (1)..(307): unsure at all n locations
  Clone ID: LIB3049-003-Q1-E1-B4
ggagcagagagggggacagcacacacgaacacatcatatagatagttacatcgtttgcaacagaacactcatatattataagctgagccaggattagaaatggatcattcattccaacatgggtttttcctcgttcgaagaaaagtccacaagaatattgaggggcgtgaangatcacttcttcttgatcaatagggatagaacgcatcatcatttcaccgccacggttctccttgttactgccaatacaattgatccttcagctcatgacgacctcgctttgacaatcttcattccactatggaac

SEQ ID NO: 21470 - DNA, 365 bp, Glycine max
  Clone ID: LIB3049-003-Q1-E1-B5
aggattattataacagaggtattgggtggggaaatccagtttgacttttatcaccggtggtttgatgcaatttttgtggctagtgcattcctttcacggcttttactttcggcacattatacatctcgccaaattgacaaacatccaattgattaacaggaaacacacgccgtaaagtttttaatgccgcggaaagtttgatatcaggccagtgaacttaaatgtttaaatcttccaaatggatgcatttgaatttatttgatagttgataaaggtcgtccattttttttaggtgccattgaataccttgttagaacatccgatgctggagcaaatcaccattgaaagggttaaaattgttaaag

SEQ ID NO: 21471 - DNA, 346 bp, Glycine max
  Clone ID: LIB3049-003-Q1-E1-B6
ggaagcaaggcgaggcaagggttttcactttttcagaaaagtcgaacggcgagcgtagtcgcaagagacgcaacagaatagaacgacgaataggcgtgcagggaaaccatttcattttcgagcgcgtcgctttcgaatccaatggccttcaacaacgcactgagatctgccgcgaagctcgtcgcttcttccgaatcttccttctctaactcagtgagcagaggttttcattcaactggcatgaagaggatgggaggtggacatggtcatgatgagccctactatcttcatgcaaagcacatgtacaacttggacaagatgaagcaccaggggttgaaaatgtccc

SEQ ID NO: 21472 - DNA, 230 bp, Glycine max
  Clone ID: LIB3049-003-Q1-E1-B7
catatcctaaagcaaatttccagacctggtctggcccattggtggaacctagtgtggatgcaccaaggagaaagaagaacatggcagggaatgggcacagacaatcaaagaaggattcttatagatagaatgtgtcaaagagtattagaaaataactaaagaattgcaatataacaccaattatttatcacaagcattggtgaagctacaaaaatgctgctgatttcctt

SEQ ID NO: 21473 - DNA, 367 bp, Glycine max
  Clone ID: LIB3049-003-Q1-E1-B8
gaaaccagtgaagtgatgagccaagacctcaagcgagactacgtcgtttcggaggagatcggccggggaagattcggcaccgttttccgctgctcctccgcagactccggtcactcctacgccgtcaaatccatcgacaaggtggcaataaccgccgccggagactccctcgacgcgcaatgcctattgacggagcccaagatcgttcagcttctctcccctcaccctcacatcgtaaacctccacgatctctacgaagacgaaaccaaccttcacatggttctcgacctctgttacgaatcgcagtttcaccaccgcgtcatgtccgaaccagaagccgcttcggtgatgtggcaactcatgcaag

SEQ ID NO: 21474 - DNA, 398 bp, Glycine max
  Clone ID: LIB3049-003-Q1-E1-B9
gatgttgatgccattcagatcaaacctaattccaagcacatatggatcgatcgttgcacgctcagtgattttgatgatgggctcatagatatcacccgagaaagcacagacattactatttcaaggtgccacttctctcagcatgacaaagccatgctcattggggctgatcccacgcatgttggggataggtgcatgagggtgaccatacaccattgttttttcaatgggactcgacagaggcaacctcgtgttaggtttgcaaaagtgcatctgtacaataactatatcagaaactggggcatatatgctgtttgtgccagtgtggaatcccagatattctcgcaacataatacctatgaagcaggacagaagaaagtggcatttaagtaccttac

SEQ ID NO: 21475 - DNA, 339 bp, Glycine max
  Clone ID: LIB3049-003-Q1-E1-C1
ggaagccataacctaaccttaaaaggctaaaaccttttgtgtttgcgccgctctaaagccaagcctgagactcgcgactcaccaccactgctcgccggcctctaattttgaaagcttctgcgcctcccacgccatttttgatactctctttgtgttcgcatagtgagatatggggaagaaggcgaagaaagctatgaagaagaatttgaaaagggcttcctttaataagaatccatctgaggatgctgatttcttgcccttggaaggtggccctgctcgtaagctcgccggccagcagaagccgccgccgccgccggagaacaccgccaccgttttgta

SEQ ID NO: 21476 - DNA, 372 bp, Glycine max
  unsure (1)..(372): unsure at all n locations
  Clone ID: LIB3049-003-Q1-E1-C10
ggtgttggtccacacatatatatagagcagaaagttaaggtgttgttggcgtcgcttcagttttcaaagtgtgacacttccaagaaccaaaaaagacgccaagtcgtccgttccagtggtagtaatggatgcactgaatccttcttcttccggcgcttctctgttcctcgccaatcttccctctcgcggcctcttctcttccaccgtcgttccgtccaatccgggtgggatgcgggtctacgtatgcgatcatgatacctcaccaccagaaggtcaacatattaagacaaaccaacaaaacatactgattagatcactcaccctcaagaaacaaaggggtgattccagctcanaggatggatctgatggttc

SEQ ID NO: 21477 - DNA, 402 bp, Glycine max
  unsure (1)..(402): unsure at all n locations
  Clone ID: LIB3049-003-Q1-E1-C11
ggcagttcaattccaatatattccattctctctgtgtatttccctacctctcccttcaagatgcagatcttcgtcaagaccctcaccggcaagaccatcacccttgaggtggaaagctctgacaccatcgacaacgtcaaggccaagatccaggacaaggaaggaatccccccggaccagcaacgtctcattttcgccggaaagcaacttgaggacggccgtacccttgctgactacaacattcagaaggagagtactcttcacctcgtcctccgtctccgtggtggcatgcagatcttcgttaagacactcaccggcaagaccataaccctagaggttganagctcccgacacatcgataacgtcaaggccaagatccaggacanagagggtatccccccg

SEQ ID NO: 21478 - DNA, 399 bp, Glycine max
  unsure (1)..(399): unsure at all n locations
  Clone ID: LIB3049-003-Q1-E1-C12
gaaagacaaagccattcgtgcctcatacctcatttcatcacacccattcatctccatcacaacacaacatacatacgaaccagatccaaccgcaccgatggaaacacaatgatccaaccctaatccaagcgcctcttacctccaagttttgtgattgaagctgcgatggaggaggagacctccgatgcaatgaaccttgatttgaatctgggcccaggcccagagcccgaaactgggcccatgagcaatgaagctgtgaacttggacgattggatangggagcctcttcagagaattagcgaagctgtgaggagggcacggcanaggtggagatggcgccaccttcccgctacgcatcctgaatttcatgctcactttccaactgaagctacccggcat

SEQ ID NO: 21479 - DNA, 366 bp, Glycine max
  Clone ID: LIB3049-003-Q1-E1-C2
ggcatcgaacagagagagagagaatggcagcacttggtgggaatcgtgatgtgacaggaagccagaacagcgttgagatcgatgctctagctcgctttgctgttgaagaacacaacaaaaaacagaatgcccttttggagtttgaaaaggtggtaactgcgaaacagcaagtggtttctggtaccttgtacaccatcactttggaggcaaaagatggtgggcaaaagaaggtttatgaagccaaagtttgggagaagtcatggttgaacttcaaggaggtgcaagagttcaagcttgttggagatgcacctgcatagtctagtgcttaattaggttgctgaagagtgaagaatgagacagcctggt

SEQ ID NO: 21480 - DNA, 310 bp, Glycine max
  Clone ID: LIB3049-003-Q1-E1-C3
gaagaaggaagattacgacaagtgcaacaagaccaacccaatcaaaaagtttgaaaacggtgacactgaattcaagtttgatcgatcaggaccattctacttcattagtggaaaagatgggaactgtgaaaagggtcaaaaattaatcgttgttgttttgaccccaagaacaccaccaacaccaaaaacaccaccgtttccaaaaacttcaccttcaccttcaccttcacaatctccaaaggcaaacccaccaaccgtatcgccgccgttaccgtcaccgtcaccatcggttcattcaaaatccctatct

SEQ ID NO: 21481 - DNA, 342 bp, Glycine max
  Clone ID: LIB3049-003-Q1-E1-C4
ggaaaaccgggtgcagcagcactctttgtgaaggtcagcatggatggtgctccctatctgaggaaggtagatctaagaaattatacaatgtaccaggaactgtcttctgcccttgagaaaatgttcagctgtttcactctaggtcaatgtggttcccatggagctccaggaagagaaatgttgagtgagagcaagctgaaggacctcctgcatggttcagaatatgtactcacttatgaagataaagatggtgactgggtgcttgtcggagatgtaccatgggatatgttcattgacacatgcaaaagactgaaaatcatgaagggttctgatgccattggc

SEQ ID NO: 21482 - DNA, 335 bp, Glycine max
  Clone ID: LIB3049-003-Q1-E1-C5
gacataatagtgcattgcactcacatcgcatccccttgcttgcttatttcattactcatccccagttcccgattttgcttaaccttcaattccaatcgaattgaacgtcagaggtccttgcaatggcagggaattcttctgatgtactgtcgccgaagcaacctcccttgccatctcccttgcgtttctccaaattctttcagtctaacatgagaattttgattacgggaggagctggattcattggttctcacctagtcgatagattgatggaaaatgaaaaaaatgaggtcattgttgctgataactacttcactggattaaaggacaacctc

SEQ ID NO: 21483 - DNA, 203 bp, Glycine max
  Clone ID: LIB3049-003-Q1-E1-C6
gacataatagtgcattgcactcagatcgcatccccttgcttgcttatttcactactcatccccacttcccgatttggcggaaccttcacttccaatcgaattgaacgtcagacgtccttgcaatggcagggaattgctctgatgtagtgtcgctgaagcaacctcccttgccatctctcttgcgtttctccaaattctttcag

SEQ ID NO: 21484 - DNA, 330 bp, Glycine max
  Clone ID: LIB3049-003-Q1-E1-C7
gatcccgacattaatttttgtacacacacacagattcccctctttcgaatttcgatactttgatcagatccacaacacttcttcatccatgacgcttggttcttcaggatccagtgtcgtggttccaaggaacttcagattgctggaggagcttgagaagggagaaaaaggaataggagatggcacagttagttatggaatggatgatggtgatgacatttacatgcgctcttggactggaaccattattggtccctataatactgtacatgaaggaagaatttatcaattgaagctgttttgtgataaagactaccctgaaaagccccg

SEQ ID NO: 21485 - DNA, 354 bp, Glycine max
  Clone ID: LIB3049-003-Q1-E1-C8
gacagaaatatcattttgcgaggcaatcccattctcatcttccatttccaccatcaatactattttcttgtcgttgagaagcttcgcgaacgaaagcaaagaaccctagaccgtcacagaaccattccatagccatgtctggtgcttggccctctttctcaggattgggaacctgtcgtcctccgcaagaaggctcccaccgccgccgccaagaaggacgagaaagccgtcaacgccgcccgccgctctggcgccgaaatcgaaaccctaaaaaagtataatgctgggacaaacaaagcagcatctagcggcacttcattgaacactaagaggctggatgatgatacggagagt

SEQ ID NO: 21486 - DNA, 331 bp, Glycine max
  Clone ID: LIB3049-003-Q1-E1-C9
gacatcgcacatcaattattctttcgcaccttcgaaaatcaattttctgtcttctctgcgtcttcttcctctatcaatcgttttccatggctcgtaccatgcatatcgctcgcaaatccaccggtggaaaggctcctatgaagcaactcgccaccaaggctgcaaggaaatctgcaccgataaccggtggagtcaagaatcctcatcgctatcgccctggaactgttgctcttcatgagattcgaatatatccgcagagcatagagcttctgatccgcaagctccccttccagcgtcttgttcgtgaaattgcgcaagacttcataaccga

SEQ ID NO: 21487 - DNA, 308 bp, Glycine max
  Clone ID: LIB3049-003-Q1-E1-D1
ggcggcacttgggaggaggcactgtggcagaagtcctaggagtgtaaaacagagacgcaaaatgaagacgatcttgtcgtctgagaccatgaatattcccgacggcgtgagcatcaaggttcacgctaaggttatcgaggttgagggccctcgtggaaaactcgtgcgagacttccaccatctgaacttggacttccaacttattaccgacgatggcggtaaaaggaagctcaagattgattcttggtttggttctcgtaaaacctccgccgccatccgcaccgccctcagccacgttgagaatttga

SEQ ID NO: 21488 - DNA, 388 bp, Glycine max
  Clone ID: LIB3049-003-Q1-E1-D10
gtaggcaactattgatcaaatcaagtcctggggaagtcatcaagccaggtcaatataaagcattaaatgatgagggaatgccacaacacaataggccattcatgaagggtcgcctttacatccaatttaatgttgatttccccgactcagggtttctttcccctgaccaatgccagttattggaaaaggtgttgcctcagaagagcagcaagcacgtctcagatatggagctggatgattgtgaggagaccactttgcatgatgtcaactttaaggaggagatgagacgaaagcagcaacagcaacaccgcgaggcatacgacgaagatgatgattaaccatcctggtcaccgagtgcaatgtgctcaacagtagtgcaatttatggt

SEQ ID NO: 21489 - DNA, 294 bp, Glycine max
  Clone ID: LIB3049-003-Q1-E1-D11
tggggttccccaaccgagtaaaagaaaaagctgtgtccgttactcgggagttggaaaatggcaacggtcccggaaaacaaattgttgaaggccgaagaagaaccccgcaaccttccggtaaaaacaataaccgaatatgcttcccggattaactcctgctcaataacttccctccggatttcaacttgggcctccattacctcgcaatctcccctttctacaaatggacctgcaataactagcagctccgcatgcgctccgttcaacccctcgacatctctcaactctcgaaaa

SEQ ID NO: 21490 - DNA, 405 bp, Glycine max
  unsure (1)..(405): unsure at all n locations
  Clone ID: LIB3049-003-Q1-E1-D12
gatctctctgaactgaattaaactacatagaaaaataaaaccaaacctttcttcctactactcccattcccacatttcgacaacatggacgaggacttcgacatgccgacggcggaggcaatgggcgaggacttcgacttcgccggcgccaccggcggcgacctcgacggcagcagcagcaaccccatcttgaaggtcggcgaggagaaggagattggaaaagagggtttgaagaagaaactacttaaagaaggtgaaggatgggacactcctgaagttggtgacgaagttcaagttcactatactgggacgttgcttgatggcactaagtttgattccaacanagataggggaactcctttcagtttcacgcttggacaagggcaagttattaaaggatgggat

SEQ ID NO: 21491 - DNA, 367 bp, Glycine max
  unsure (1)..(367): unsure at all n locations
  Clone ID: LIB3049-003-Q1-E1-D2
ggaaaaaatggcgatgctcaagagatgctgtagtagatcagaagtattgcgaacggcacatgaaccgaggacgccatcgttcaagaaagcctgtggaaggccaatcaggccatgccctcaccaccactaacacacctaatgcttcctcaaactcaaccgtggtgcccggcaaccacaacaacaacacctttgcacacatcaatgtgcaccaccctcttcctcctcattcctctccagccaataccatcaataggatgtttatgagtaataataaagagaacaacaacacgagtgagaggacgaaggatggccttgcccttcccatgctacctcctactcttgagcccgaaacanaagacaacaacaa

SEQ ID NO: 21492 - DNA, 235 bp, Glycine max
  Clone ID: LIB3049-003-Q1-E1-D3
gaagttaaggagagtgctttggtgtggcatcatcaagatgcagaccctgattttggttcttgccaagccaaagaattgttggattacttggaaagtgtgcctggcaaagaaacaacagctgtttacaaaagccagcataatgtttaagttaagccacaaggaattaaccaaggtttgggtagccgaaaaagttcttatgaccatggttaaaggtgccaatccaccaaaatttgtg

SEQ ID NO: 21493 - DNA, 202 bp, Glycine max
  Clone ID: LIB3049-003-Q1-E1-D4
gattctacaatcaatcaatggcaatggcttcatcaatccctaatgcgccttctgcgttcaattctcaaagctacgttggtctcaggtcgccactgaggaccttcaacttttcttctcctcaaggtggcaaaaatcctcgctcccaacgccttttcgacgtcagagcctccgaatccgagttccaagccgccgttgtccccgg

SEQ ID NO: 21494 - DNA, 156 bp, Glycine max
  Clone ID: LIB3049-003-Q1-E1-D5
gaatccaatatccatcacatgggaatgtggttctctcacatctcctatatgcgcgcctctctgctttacatctcacagctacgttggtctcacagcgccactgaggagcttcaacttttcttctcctcaaactgccaaaattcctcgctcccaaag

SEQ ID NO: 21495 - DNA, 322 bp, Glycine max
  Clone ID: LIB3049-003-Q1-E1-D6
ggaaaccaaattttcttccttcgttggcatctgtgatctcttctcctcacaatgagcagatcagggcaaccaccggatttgaagaagtacatggacaagaagcttcagatcaagctgaatgcaaatcgcatggttgttggtactctccgtggcttcgaccagtttatgaatttagttgttgacaacactgtggaagtgaatggcaatgagaaaaatgacatagggatggtggtaatcagaggaaatagtgtggtcactgttgaggcgcttgaacctgtgaacaggacttgatttctgtggcttgtaaacattctatataagt

SEQ ID NO: 21496 - DNA, 367 bp, Glycine max
  Clone ID: LIB3049-003-Q1-E1-D7
gaggtacgttaaacataaaaacaaaagcactctcctcttcctcctttcccccgaaaaacccttaaaccccgaccttcatatttgcagtgctagtctgtttatttcttcagctatgtttttgtcaagaacacttggacgaacactatttgctgcagctgccagatcaaaacaatatgccactacagcagctgctgctgctggcagagaaggacacaacccccttcaggagttctttgaggcagacaggagccctgatgatgacaaacctgttgtttatggtcggagttggaaggcgtctgaactgcgtctgaagtcttgggacgaccttcataagttgtggtatgtgttgttaaaggaaaagaacatg

SEQ ID NO: 21497 - DNA, 374 bp, Glycine max
  Clone ID: LIB3049-003-Q1-E1-D8
aattcaaagtttgccttgtctatagaacctgaaaacaaggaacttcaatcctatgctacccatgtatctaaccttagaaataaaggcttgcccacgattccaactacgctgaaagtggaaaaggcttgcaatccattccttcgcacatggagcatagaaatccggcaaaaactaaatattgcagccacggcagatgatgcagaagccctgggtgttatccggcaagcaaaggataatttttagaattttttaattaaaatttaaaattctaaagatacttattctgtatagattaggttaatgaatccatcaaatggaataatatttacttggtgatatcgtaatataatttttcaattttccttgggttcaat

SEQ ID NO: 21498 - DNA, 388 bp, Glycine max
  Clone ID: LIB3049-003-Q1-E1-D9
gatcctaaataagcatcttaattcatagtctcttggtccttccttccttcttctgctcaataagtgtgtgccactctaattaattaccacccccttctagacatagttcttctccctctgttctctattctctacactgtgaaaccaagatgaaggtagcatttgcagctgttctacttatatgccttgtcctcagctcctccttgttcgaggtgtcaatggctggttctgctttctgttcctccaagtgctcgaagaggtgttctagagctgggatgaaggacaggtgcatgaagttctgcgggatttgctgcagcaagtgcaactgttgtgcatctgggacttatgggaacaagcatgagtgcccttgctacagagacatgaagaa

SEQ ID NO: 21499 - DNA, 389 bp, Glycine max
  Clone ID: LIB3049-003-Q1-E1-E1
cctcagaagccatggtcgtaaatctctctccctctccctctccacctttacattccagttccataatcagattggcaaattcaaagtcacccatttcagaaccatggttgagactcaaaacccacttcccaaaaccactcctttccccaacaagtgtgaacttcacttgcaacaagaatcaatttttgcacggtaaaaacaggaacaggttggatttcaggacttggtctattgctggttttgattatggaaactttgaagggcctcagtctgtgcttgaggctgctgcagtgttgacagcaatcattgttgtgcatgagagtggccacttccttgctgcttctctccaaggaatccatgtgagtaagtttgctgttgggtttgggcca

SEQ ID NO: 21500 - DNA, 280 bp, Glycine max
  Clone ID: LIB3049-001-Q1-E1-F12
gatgaaacccctgagtacatgcccctcagccatgtccttgcaaccaaactcggtgctcgcctcaccgaggttaggaaaaatggtacctgtgcttggctgaggccagatggcaagacacaagtaactgttgagtactacaatgacaatggtgccatggttccagttcgtgtccacactgtcctaatttccacccaacatgttgagactgtgagcaatgaccaaattgctgctgaccttaaagagcatgttatcaagcctgtcattcctgaaaagtacctgg

SEQ ID NO: 21501 - DNA, 354 bp, Glycine max
  Clone ID: LIB3049-001-Q1-E1-A1
gaaacttaaaattggagaagacgaaacaatttagaaaagaaaaatgaaaatagtagaaaagagggcattaggttaagagtgaaggcagtgagcgaaagagagcatagtaatacttactgagtgcttacagttgctgcgtcgcaaggtaccggcggcgacggagaactatcttctcaattttcgatcactgcattggttctgttgacaagggttttgttcttcctgacttgcatacttgatggcttcaaagttgcagaagttgcaggccacagcatctcaagcgtctcaatttgtatccagtcgtggaactaactactacaagcaattgctggaacagaacaagcaacacattca

SEQ ID NO: 21502 - DNA, 109 bp, Glycine max
  Clone ID: LIB3049-001-Q1-E1-A10
gacgtagcgcattagcagcatctatactacatagcatgatcaaactgataaaaagcgctgtcgttgtgtcattcagtctgcgttggatgaacttcacaatcacatcatc

SEQ ID NO: 21503 - DNA, 419 bp, Glycine max
  Clone ID: LIB3049-001-Q1-E1-A11
gcgagaagacaacacaagggggcgtacgcagcttcatccctaacgcgtgcatagcagagtcagagacagagacgcagccatggggcggagacctgcgaggtgttatatgcacattaagaacaagccataccccaagtcacgtttctgccgtggtgttcctgatcccaagatcaggatttatgatgttggtatgaagaagaagggtgttgatgagtttcctttcggtgtccacctggttatttgggaaaaggaaatgtttccagttaaggcctggaaaccgctcccaatgcctggaacaagtacatgggcaaatttgctggaaaggatgctttccacttgagaatcacggtgcacccattccatgttcttatgatcaacaagatgctttcgtgtgctggtgctgataggctccaaactgg

SEQ ID NO: 21504 - DNA, 330 bp, Glycine max
  Clone ID: LIB3049-001-Q1-E1-A12
agggatggctaaagatgttgaggttcaagagcaaggaggagagtactctgccaaagactaccatgaccctcctccagcacctttgttcgacccagacgagctcacacagtggtccttctatagagccctcatcgctgagttcatagcaacccttctcttcctttatgtcactgtgctcaccattattggctacaaaaggcatactgatacaacggtacgtggcaccgactgtgatggggttggcattttgggcatcccttgggcctttggtggcactatcttcaaccttgtttaatgcaacgccggtatttcaagaagacacattaaccc

SEQ ID NO: 21505 - DNA, 318 bp, Glycine max
  Clone ID: LIB3049-001-Q1-E1-A2
ggttctagtgtgtgattgtttgttgttgtaactcgttcttcttcttttgttgttctgtgtttgtgtttgttttttctctcacctgaaaatgtcttgctgcggtggtaactgtggttgcggaagctcctgcaagtgcggcaacggctgcggaggctgcaagatgtacccagacttgagctacactgagtcaaccaccaccgagaccttggtcatgggagtggcacctgttaaggctcaatttgagggtgctgaaatgggtgtgcccgctgagaacgatggctgcaaatgtggaccaaactgctccttgcaaccctgcac

SEQ ID NO: 21506 - DNA, 362 bp, Glycine max
  Clone ID: LIB3049-001-Q1-E1-A3
ttccgctgtcacatcaggacacacgtcgatagtgctgcgagaaacgacaaaagggggttctactgtgtgactgtttgttgttgtaactcgttcatcatcttttgttgttctgtgtttgtgtatgttttttctctcaactgaaaatgtcttgctgcggtggtaactgtggttgctgaagctcttgcaattgcggcaacggatgcggaagcatgcaagatgtacccagacttgagctatactgagtcaactagcaacgagaccttgtgtcaaggtagtggcacactgttaaggttcaatttgagggtgctgaaataggtggcccgctgagaacgatagttgcaaatgtagaccaaactgctcct

SEQ ID NO: 21507 - DNA, 378 bp, Glycine max
  Clone ID: LIB3049-001-Q1-E1-A4
ggatgatgtcccaataaggagctatcctaggaagagtgatgccacgttcccctcaagagaaatgtatgtgtacggatcaatatgggatgcatcttcatgggctacagagggaggaaaatacaaagctgattataattaccaacccttctttggtagatacaaaaacttcaaaatacaaggttgtaccactgaagcttcaacctcatgccagccaccatctccctcaccaccaggctatggcagcctaagccctcagcaactttctgcaatgcaatgggtccaaaacaactacttggtctatgactattgccatgatcctggaagagaccatacacttactccagaatgctaaggttttaagctatatttggattgaaa

SEQ ID NO: 21508 - DNA, 149 bp, Glycine max
  Clone ID: LIB3049-001-Q1-E1-A5
tgggactgccgattcactacagctagagatggcccaagtgttcgtggttcatacacaagtctggaagtcagttgacagttgggtgatggctctcctctagcacctgtgatagcctatagtcgtgtatgcagtggtggatctgtggaccc

SEQ ID NO: 21509 - DNA, 363 bp, Glycine max
  Clone ID: LIB3049-001-Q1-E1-A6
ggaacctttgcattctattcattcaagattcagcaagtgcgttttggaagcagagaccgaaatacttcgagatggcccgtacaaagcaaactgctcgtaagtcaactggaggaaaagctcccaggaagcagcttgcaaccaaggctgcacgtaagtctgcaccaacaactggtggtgtgaagaagcctcatcgttatcgccctggaactgttgctcttcgtgagattaggaaataccagaagagcactgagctcctaatcaggaagcttccttttcagaggttggttcgtgaaattgcccaggatttcaagactgatctgcgtttccagagccatgctgtgcttgcattgcaagaggctgctg

SEQ ID NO: 21510 - DNA, 357 bp, Glycine max
  Clone ID: LIB3049-001-Q1-E1-A7
gaaggtagagtgtacatatataaatatatattctttctgaaggtcattgtcaaatctcaatcagcttatgatcctacgaggatggcaagtgatggtagatgaagagtggacagatgatttgttttttctttgctgttaaatcatcacagttaatacgtttccttgtcgttttctattgtttttacattaacatgcagctacattaccgacgtgcgacggttgctggacactagcccaagtagtcattgaagtgtcatgttaattttcattttgtagcaagtgcatacttgctttcttgaaggggtacgagtgtaactgcgacccttggattgagaaggaatccaagtttcgcaatta

SEQ ID NO: 21511 - DNA, 382 bp, Glycine max
  Clone ID: LIB3049-001-Q1-E1-A8
ggatgcacaagtttgttgagatagctagaagcaataagatgaaaatgaaagtgcttgttttgtttgttgctacagttttggtagcatatgaatgccatggctcagactaccagaagttccctctccaaatgaaaactgggtttggtgggcaatacagcaatgaggtggcatgtgccagttggaggcttggcgtggaagcaaacaacgtagtcaagtggcaaactgttcctgcagcttgcggagagtacatagctgactacgttctaggagaccaatatagatcagattccaaaacagttaaccaacaagcttatttctatgctaaatccctcaaactcaccaacaaagatgtctttgtcttggacgttgacgacactactct

SEQ ID NO: 21512 - DNA, 212 bp, Glycine max
  Clone ID: LIB3049-001-Q1-E1-A9
tggggatgcacaagtttgttgagatagcgagaagcaataagatgaagatgaaagtgcttgttatgtgtgtcgcgacagtcttggtagcatatgaatgtcatgcctcacacgactagacgttccctctccaaatgaaaactgggtttggtaggcaatgtagcactgaggtggcatgtgccagttggaggcttggcgtggaagcatccacgtag

SEQ ID NO: 21513 - DNA, 370 bp, Glycine max
  Clone ID: LIB3049-001-Q1-E1-B1
atgagtcctcataaacattcacaagacaataacacttttcgtccgttcaagcttgcgctttttagcttttatccattgaatagcaatagacccttttgttgcccttttgtttctgaggccttcaaacattcttggcttctttgcaaagttggaattttcactcttcaacttattgttttgatcccaaatcagaaaaaaataatattgggttttattttgatccataagctgaaaggctgaggcaagtatcattggagatacccttttcatctcatgatctgaggttgataaacaagatccttttgttcagagttcagagtgatcatggcatgttccatgaacagtgttttctgtgttcctgaattaaatg

SEQ ID NO: 21514 - DNA, 342 bp, Glycine max
  Clone ID: LIB3049-001-Q1-E1-B10
ggcagccaagaaaagaaaatcctcagccattttcttcgtagccaaacactctgaaattctcagttatgtcgtggcaagcgtatgtggatgatcacctactgtgtgaaatcgaaggtaaccacctcactcacgccgctatcatcggccaagacggaagcgtttgggctcagagcaccaacttccctcagttcaaacctgaggaaataactgccatcaataatgactttaatgagcctggatcacttgctccaactggattgtaaatcggtggcaccaaatacatggtcatccagggtgaacctggtgctgtcaatcgagggaagaagggtcctggtggtgtta

SEQ ID NO: 21515 - DNA, 195 bp, Glycine max
  Clone ID: LIB3049-001-Q1-E1-B11
gatgcatagcaattcccaattcctaattgtttaaacctaattctcatttcttcatcgttcgattcttctcctcctaaagatgcagatcttcgtgaaaactttgaccggtaagaccatcacccttgaggtggagtcctccgacaccatcgataacgtgaaagctaagattcacgacaaggaacggatcccacctga

SEQ ID NO: 21516 - DNA, 378 bp, Glycine max
  Clone ID: LIB3049-001-Q1-E1-B12
gctaataatagatgttgaatatgtgtgtatttggtagaagtagtgttttgattgtgttggtacttgtgggtgttttgtggtggccaaacgatgctgggacaccaacgaaatggaaagcgaatataagcgttaaaaatagtttgggtggaaatatgggattaaacgtttattgtccccatattgatccaaagcagcactttctgggaactggggcttactatgaatgggtttattctggtggcattccatcgccaggagagacaccatttccttgttactttacatggcaaggtgcctctcactccactgaattgtgcgtcccagataaagataccggttgccaatttgccgattgggaaatccaactaaatggattgt

SEQ ID NO: 21517 - DNA, 385 bp, Glycine max
  unsure (1)..(385): unsure at all n locations
  Clone ID: LIB3049-001-Q1-E1-B2
gaacccgcctcaaccaacggctgaaaaaaataacctcgtccttcacaattccagcgatttccgctctccaacgggactgcgcagggtgaagaatcgagaggccagccgccggtgaagaatcgcgcgattcgtctggaaatcgcgattccagcacgattcatgcccgatacagagatttaaccacgattcaggaacaaaaacgagacaacctccgattcgtattggtagcatctggaatcgtatcgaatcgtgcgatacgtatcctgaatcggttttggtttttctgtgagtatccctgttgatcaagaatgcaattctttggggtgtctgagattagtccttcacctcctgctccgacagcatcangaaacaatggccatatgat

SEQ ID NO: 21518 - DNA, 385 bp, Glycine max
  Clone ID: LIB3049-001-Q1-E1-B3
ggcgcacccagagaggaagcttagagagagagagagagagagagagagagaggagagagtattggcgcttcatcaagatgggtatttctagggattccatgcacaagaggcgtgccactggtggcaagaaaaaggcttggagaaagaagagaaagtatgagcttgggcgtcaggcagcaaacaccaagttatcaagcaacaagacaatcaggaggattcgtgttagaggtggcaatgttaaatggagggcattgaggctggatactggcaattactcatggggtagtgaagcagttactcgcaagactcgtattctagatgttgtttacaatgcctcaaacaacgagcttgtgcgaactcagaccctggtcaagagtgctattgt

SEQ ID NO: 21519 - DNA, 209 bp, Glycine max
  Clone ID: LIB3049-001-Q1-E1-B4
gggtgtttgaatcatgaagctgttcaaaaaccagtccgacacggacgtaacgacatgcatcccggccgtcatgctgttccatgtgtagtaggataccaaggccgtgaagcatgccactggtggcataaggctcgcatgcagaaagaagatggtcttcgcacttgtccatcaggcaacctccaccctcttatcacgccacaagacgatca

SEQ ID NO: 21520 - DNA, 383 bp, Glycine max
  Clone ID: LIB3049-001-Q1-E1-B5
ggagctaaaacaaaacaaaaagaagaggggggcgaagagaagaagatggaggttagtttatcctcaacatcatgtatacccttaagctcgaagttgaagcataagcatggccttttccactctcaaattcccattcccacagcttcaaccaaaaccagaagaacaaaacctttgtccatagttaacgcctccagacaaaccttgtcctccaactggctcgtttctccacacgatttttctgcatccaccgcttccccatggcttcccagattcgaagagctcgacgccaccaacatgcttctccgtcaaagaattatttttttgggttctcaggtggatgatatgactgcagattttatcattagtcagcttttgtttttggg

SEQ ID NO: 21521 - DNA, 367 bp, Glycine max
  Clone ID: LIB3049-001-Q1-E1-B6
ggtaaacagaacagagcaacactgaacaatggcgcaaccttcctcctcctcgaagcctgttgtccctctcctgaatgacgagctggacatcgtgatcccgacaatccgaaacctcgacttcctcgagatgtggcggcccttcttcgaaccttaccacctcatcatcgtgcaggacggagaccccaacaggaccatcaatgtccccgaaggcttcgattatgaactctacaaccgcaacgacatcaatcgcatcctcggacccaaagcctcctgcatctcgtttaaggattctgcgtgtcgctgctttggttacatggtctccaagaagaagtacatctacaccatcgatgacgactgcttcgttgct

SEQ ID NO: 21522 - DNA, 368 bp, Glycine max
  Clone ID: LIB3049-001-Q1-E1-B7
ggactctttgaggatactaatctgtgtgccattcacgcgaagcgtgtaactattatgcccaaagatatccagctggcaagaatgattcgtggtgagcgtgcttgatgtggtggtggtggtggtggttgtgaagatgatgatgggtggctgcggatggtgttttgttattcagatttcttttttattcaaagatagggttgttagggagtaggtattaattgtgatacgggcaaatactgctaagtgtccatgactgtgtcttcttcctttcagaaaattggcatgtaattgatttttggacatatgtgtctgtctgtcataatgtttatgtttttacgggatgtgtgcagccactttgggcaaaagcc

SEQ ID NO: 21523 - DNA, 384 bp, Glycine max
  Clone ID: LIB3049-001-Q1-E1-B9
gagagtgaagaaggcaaatcgcgaagactagatctgatctgagagaatggctcctcggtctagcagcaaggacgcccaagaccttttccgcgctctttggtctgcttatgctgcaacccccactaatctcaagatcattgatctctatgtcatctatgccgtattcaccgctttcatccaggttgtttaaatggctttggttggatcatttcaatttaacccctcctaacaagaattatttcctgtgtaagaactgctgttcctgccgtttgtctcaagattcaagtgaataaagagaataaggaattcaaggatcttgcacctgagcgcgcttttgcggattttgttccctgtaatttggtgcttcaattggtgatcatgaac

SEQ ID NO: 21524 - DNA, 355 bp, Glycine max
  Clone ID: LIB3049-001-Q1-E1-C1
gaagggccgtagacgataatcccaacagcgtcttctgttcatttcattcttcttggttcgcattacaagctttagcgccaaaattcaactttggttcctatctgaaattccacgcattcctcgttctgcattccaatttcttttaaaatttacattttcaaattcttttccagcttaaagtgtaaagaatttaaaactatcactcagttctcgctcgcgattctctcactctccgttcgacgctcgctatcctcgctacgactctctctctctctctctctctctctctcgcaggcgcggtggttcagagagtctctcatctctgcaatttagctgaaatgagatgcaatgcatg

SEQ ID NO: 21525 - DNA, 335 bp, Glycine max
  Clone ID: LIB3049-001-Q1-E1-C10
tggggttgcaaatcaattgtatgagctttgcgaagctgtaggccctgaacctaccataacggaattggtacctgcttatgtgcagttgcttcgtgataatgaggctgaagtacgcataccggctgctggaaaagtgaccatgttttgccgggttttaaatccagatcttgcaattcatcatattcttccttgtgtgaaggaattgtcatcagattcttcacagcatgtccggtctgctttggcttcagtaataatgggaatggctccaatgttgggaaaggaatcaacaattgagcagcttcatcctactttcctttcccttttgaatgaagaat

SEQ ID NO: 21526 - DNA, 344 bp, Glycine max
  Clone ID: LIB3049-001-Q1-E1-C12
ggaatatgaacttctcagaaggaacttcagtgatactggttgcttcggctttggtattcaggagcatattgatttgggaatcaagtatgatccttcaactggtatttatggaatggatttctttgttgttctggagcgacctggctatcgtgttggacgtcgccgaagatgcaagtcccgtgttggaattcagcaccgagtcacaaaggaggatgctatgaagtggttccaggtgaagtacgagggagtgatccttaacaagtcccaggctattccttagttagattgagttcactttaagaatgtgttaacaattttgtccactataactccatttttccgtg

SEQ ID NO: 21527 - DNA, 338 bp, Glycine max
  Clone ID: LIB3049-001-Q1-E1-C2
ggaacaacgcaaatacaaaatactaccagtctcccactcttcagatccgtgcttgtggctgaatcgccatggccatggcgattacggtttttctcatccttctactctctctctcatctactcatctcagttactcgctttacgaagatcaagttggcctcatggattggcatcaacagtacattgggaaagttaaacacgctttgttccatactcaaaagtctgggcgaaagcgtgttttagtgtccaccgaagagaatgttgtagcttcactcgaccttcgtcatggagagattttttggaggcatgtttttgggagcaacgataatgttgatgga

SEQ ID NO: 21528 - DNA, 354 bp, Glycine max
  Clone ID: LIB3049-001-Q1-E1-C3
ggctccacagcggagtacaccaccactgtccattggtacactcttggcattttccctttcttttttcatttttatttttaaatcccactctcattttcccttccacttttccaattccttcacttcacactctcacactcacagacacagtctctctaatctaatggatgcaaagtctgctgaagctgttgttcccttagaaccattgaagtatcagacatggttcttgaaagtttcgatccactgtgaaggttgcaggaggaaagttaagaaggttctacagagcattgatggtgtttttaccacaacggttgacccgcaacagcataaagtaaccgtcactggaagcgttgg

SEQ ID NO: 21529 - DNA, 263 bp, Glycine max
  Clone ID: LIB3049-001-Q1-E1-C4
gcaaaaaaacaacagaaggggaaggagctgttgccgttgttggacattctggcgaacaaggtgaaggcggtacggcggctccgggagcttctcacgacgaagttcccgccggggagttttccagtgaaggtggcgatcccggtggtccccacggtaagggtggtggtcacttttacaaatttcgtggaactgcaacctgtgaaaaattctctaaaccctttatcaatctcaacccattggcccaatgcaaataagaatattcc

SEQ ID NO: 21530 - DNA, 375 bp, Glycine max
  Clone ID: LIB3049-001-Q1-E1-C5
ggaatatgaacttctcagaaggaacttcaatgatactggttgcttcggctttggtattcaggagcatattgatttgggaatcaagtatgatccttcaactggtatttatggaatggatttctttgttgttctggaacgacctggctatcgtgttggacgtcgcctaagatgcaactcccgtgttggaattcagcaccgagtcacaaaggaggatgctatgaagtggttccaggtgaagtacgagggagtgatccttaacaagtcccaggctattctttagttagattgagttcactttaggagtgtgttatcagttttgtccactatagctcgatctttctgtgatattatgttaattttaaggcaggtttttga

SEQ ID NO: 21531 - DNA, 323 bp, Glycine max
  Clone ID: LIB3049-001-Q1-E1-C6
gatcgcacaacattattctttcgcaccttgcagaatcaatttcccccccaaaccgccttccagggtccttacaagccaaacggtcgcaaatccaacggtgggaaagcgcccaaggagcaactcgccaacaaggctgcaagaaaatctgcacctatcaccggtggagtcaagaaacctcaacgctatcgtcctggaactgttgctcttcgtgagatctgaaaataccaaaagagcacacagcttctgatactcaaactcccctttcagcgtcttgttcttcaaatcgcgcaagacttcatcactgatttgaggttccacaatca

SEQ ID NO: 21532 - DNA, 337 bp, Glycine max
  Clone ID: LIB3049-001-Q1-E1-C7
gatatgtttaacagaaacgaagcgaagccccaaaagaggatagaaagaagaataaacactcgagaaatttctcacttagggtttggatttttcgagtaatcttctctctccgtcacttcatctcacgcgatctcgttccgatcgcacgcgttttaatgatcgtcgtcttccgcggcctctgattcggctctgatcttcctcgccgcacctctccgtacctctccgccggaaccatgatctccgtgcagggcgacctccaccgccaccaccaccactaccaccaccagccgcagcttcacggctccgccgacagctctcggcagcagttcaccgcgga

SEQ ID NO: 21533 - DNA, 182 bp, Glycine max
  Clone ID: LIB3049-001-Q1-E1-C9
ttgtgtttggcaccgccgatgggcaagctatggagttagatatggatttggtccagtggatctccactgtgaaggatggccatcaccttctcgaagaagtgcttcaacttctttgcgaatatcttacagagatccttattgaggagtcaaatgtgcagcctgtcaatagtcaagtgacggtt

SEQ ID NO: 21534 - DNA, 360 bp, Glycine max
  Clone ID: LIB3049-001-Q1-E1-D1
ggcagtttcaaattttcttttccttcactttcccgagaaaaaaataacacttttcactttcttcactacgttctcacctcgatatggctcgtacgaagcaaaccgctcgcaagtccaccggtggcaaggcgccacgtaagcagctcgccaccaaggccgctcggaagtccgctccggcgaccggaggagtgaagaagccccaccgcttcaggccgggaaccgtggcgctgagggaaatcagaaagtaccagaagagcaccgagcttctcatcaggaagcttccatttcagaggctcgtgagagaaatcgcgcaggatttcaagaccgatttgcgtttccagagcagcgctgtttccgcgc

SEQ ID NO: 21535 - DNA, 314 bp, Glycine max
  Clone ID: LIB3049-001-Q1-E1-D10
taaaggggactacatggatgttgacgccttgaagaagcttaacatggacaaaaagttggtgaaaaaactagccaaagaatatcatgcctttttagcctctgaagcagtcatcaagcagattcctcgtctcttgggacctggtctcaacaaggcagggaagttccctacacttgtgactcaccaagaatctctcgactcaaaggttaatgagaccaacgccatgggcaagttccagcttaagaaagttctctgcaatggagtagctgtggggaatgttaacaaggaagaaaatccaatcctccaaaatgttaaac

SEQ ID NO: 21536 - DNA, 131 bp, Glycine max
  Clone ID: LIB3049-001-Q1-E1-D11
cgggctagcgcagagaaagaactagaactagaactacggtttcatctttgccatcagaaacaacagtgatttacgacgttaactctccccttttccgattcttcctcagccagaatggaagctcctccgat

SEQ ID NO: 21537 - DNA, 313 bp, Glycine max
  Clone ID: LIB3049-001-Q1-E1-D12
ggccattgttgttgctattatcatccgcagctgcttttattcgcaccgcaaacagtgagccatggccgtcggaaagaacaagcgcatctccaaggggaagaagggtggcaagaagaaggcagctgatccctttgccaagaaggattggtatgacattaaggctccttctgtttttcaagtgaaaaatgttggcaaaaccctcgtctctcgtactcagggtaccaagattgcttctgaaggactcaagcatagagtgtttgaagtctccttggctgatcttcaaggggatgaagattatgcattcaagaagatt

SEQ ID NO: 21538 - DNA, 351 bp, Glycine max
  Clone ID: LIB3049-001-Q1-E1-D2
ggcagtttcaaattttcttttccttcactttcccgagaaaaaaataacacttttcactttcttcactacgttctcacctcgagatggctcgtacgaagcaaaccgctcgcaagtccaccggtggcaaggcgccacgtaagcagctcgccaccaaggccgctcggaagtccgctccggcgaccggaggagtgaagaagccccaccgcttcaggccgggaaccgtggcgctgagggaaatcagaaagtaccagaagagcaccgagcttctcatcaggaagcttccatttcagaggctcgtgagagaaatcgcgcaggatttcaagaccgatttgcgtttccagagcagcgctg

SEQ ID NO: 21539 - DNA, 314 bp, Glycine max
  Clone ID: LIB3049-001-Q1-E1-D3
gggctcgtgactacgaacattgcaggaagaaagaaagaaaggcgatggacctcggaacctatgacgtgccagaaggagtggacattctgggaagatacgatgcagagtttgcaaaaatcctcgcaaaagatgctttgaaattcgttgctgaactgcaacgtgagttccggaacgatatcaagcatgcattagagcgcagaagagaggcaaagaagaagtacaatgaatggtctcttccggggtttgatcctgccaccagtgacatcagagagcaggagtgggtgtgtgcacctgttccaccagctgctgctgat

SEQ ID NO: 21540 - DNA, 369 bp, Glycine max
  Clone ID: LIB3049-001-Q1-E1-D5
gagacacctttttcctcttacttcagttaacctcacaacaatcaagttttgaacggcaactgtgagaagtctgaagatcaacacaagtacctgcaaacgtacagtgaaggagctgcattcttatgagaaggaagttgatagagaagctgccaaaacagctgatatgacggaagaaggagctgacccccatgatctcaagcaacaggaaaatgtgttggcacagtctaggatgatgattcctgactgccgcaagcgccttgaggccgcgttggcagacttgataggaatactggctgagtaggaggagtcagatgagaaggccagtcttgagattgatgaagcctagaacagcatcgtagaactgaaaaa

SEQ ID NO: 21541 - DNA, 286 bp, Glycine max
  Clone ID: LIB3049-001-Q1-E1-D6
gagtagcaaagatgacaaaatttaattgaagaagcagttcagttggttttgacccaaagcacataaaccaaggtgttgttgtgaatgtcggtgagctccatgagtcgtgcatctccaatgaatttcttggccgcgcaacaaccgtcatcaaagttgagtgcataactcgaaggatcgtattggaacttgagtctctgcttgcccccattcttgaaagccttcttcaacgcagcaggcaccctcaaaaacaagctcctgcaacgcttcttgccataagcattcaccc

SEQ ID NO: 21542 - DNA, 354 bp, Glycine max
  Clone ID: LIB3049-001-Q1-E1-D7
gataaacatttgggtctgtctccgccttggccaaatccctagcctcttgttgtttgattgagatgacgatggcgttgttagcgggtcagagctccatttccgcgcttccctttgttaacccaacttccttgagcttcaaacctctcgcctttaccaaatccctagctctcccttcagcacagaggccaacttcgctgaggctgaaatgcaagatggagagcgacggcgacattctgcgggggagcactcgcacggtgacgacgctgatgggactcgccgtgttgctgatgaagaaggcggccattccagtgttgaacatcaacatcaacagcagcagcaacagcgtgtccacga

SEQ ID NO: 21543 - DNA, 281 bp, Glycine max
  Clone ID: LIB3049-001-Q1-E1-D9
ggttgagaagcagagatgcaaggaagcgcggccgacggagaagccttggatttcgagcctgaggacgatgacttgatggacgaggacggcgcccccgacgccgacgccgacgcttctccacctcaacctaagctcaaatccgccatcacccccgccgccacttcctctctctccgccccgaaaaagaccaagggccgcggattccgcaagaacactgacgcaaacgccaaaattcgcttttccggaaccaactctcaatcccccaacggccaaggccggcc

SEQ ID NO: 21544 - DNA, 246 bp, Glycine max
  Clone ID: LIB3049-001-Q1-E1-E1
gagaccacgctcacgcgcctcgtcccgcccaccgaactgaaaggctgcgccgacgcggcatcgctgctcgccgatgcgatcgccgacaagcggcacctgctcgtcgtcgccgactacgactgcgaccgcgcgaccgcctgcgcggtcgcggtgcgcggcctgcggatgttcggcgcgcagatcgactatctggtatcgaaccgcttcgaatacggctacggcctcacgcccgagatcgtcgagctc

SEQ ID NO: 21545 - DNA, 326 bp, Glycine max
  Clone ID: LIB3049-001-Q1-E1-E10
gagatggcaaagagtcacaaagcctgaaacatttgtcccgagaaacactaactagtttgctttacgcatgccttagtttcgtcttgtggattttccttgaagcatagattgaataatacaaaatatgatttttaaattgttgcaatgggatgatggtgttatgtggatgtcctctgcatgctaggcaattggctagctcttcccaagcagaaattggaagcggtctgtgttaaagcttgagttcgacattattgtatgctaagttctagcaaggactcctctgccctttgttcgattcatatttggctgtaaaattgaccgaattt

SEQ ID NO: 21546 - DNA, 340 bp, Glycine max
  unsure (1)..(340): unsure at all n locations
  Clone ID: LIB3049-001-Q1-E1-E11
gggggatccgtgtcncgaaaacgcaggtttaatgggcaactaaacagacaaacccttgatccttttttgcgactactccagtccggttctggtattctctcactcgcgatttcgtctattcttgtttggtgaaggggaagnactcgctcactttgatcttcaaagttcagaacgcgttttgaagctattgatanatgaagcaatattgtaaaattttgacattgtgtatgggcaataatgccttaagggtttggcttccaacaacttccaagaatccaagcaaccaaacctgggtggtacccataaaatttggtgtgtccttaagaagttaaggtccttt

SEQ ID NO: 21547 - DNA, 338 bp, Glycine max
  Clone ID: LIB3049-001-Q1-E1-E12
gacccacaagtcatcaaacttcaattgagtttcaaagagatcagtggtagctagtgtggtgcaattgtgttgatcaaggatggaacaaaagaagtttgtggcactattaatggtggttgtggtaatggcttcttctatgtggaaagggtccgaaggtcttagtctctgtaacatggatgaaggtggattggaggcttgcaagccctcagtgactcagccaaacccagttgatccatcccctgattgctgcaaggctttggctggtgctgacttgaaatgcctttgctcttacaagaactcatcaaagttgccctttcctggaattgattgaactcctg

SEQ ID NO: 21548 - DNA, 287 bp, Glycine max
  Clone ID: LIB3049-001-Q1-E1-E2
gacatcgcacaacattattctttcgcaccttgcagaatcaattttctctctcaatcgtctttcatggctcgtaccaagcaaaccgctcgcaaatccaccggtgggaaggctcctaggaagcaactcgccaccaaggctgcaagaaaatctgcacctaccaccggtggagtcaagaagcctcatcgctatcgtcctggaactgttgctcttcgtgagattcgaaaataccaaaagagcacagagcttctgattcgcaagctcccctttcaacgtcttgttcgttaaat

SEQ ID NO: 21549 - DNA, 188 bp, Glycine max
  Clone ID: LIB3049-001-Q1-E1-E3
atttcattagcactcgtctttggttctggtttataaatctcttcgaagttgctttataactctcattctaacatgtataactattaatgatagatcacctaccctcacatcctcacgaagtttactgctttcacacgtctgattattgctaatgaacacgtctccgttcaagtttccattttacatct

SEQ ID NO: 21550 - DNA, 328 bp, Glycine max
  Clone ID: LIB3049-001-Q1-E1-E4
ggttctattgtatgtgattgttgtgactcgttcttcttcgtcgttatcttcttcttttgttgtttgtgtgtttgttttttctctcacctgaaaatgtcttgctgcggtggtaactgtggttgcggaagcgcctgcaagtgcggcaacggctgcggaggctgcaagatgtacccagacttgagctacaccgagtcaaccaccaccgagaccttggtcatgggagtggcaccagttaaggctcaattcgagagtgctgaaatgggtgttcctgctgagaacgatggctgcaaatgtggagctaactgcacctgcaacccctgcacttgca

SEQ ID NO: 21551 - DNA, 369 bp, Glycine max
  Clone ID: LIB3049-001-Q1-E1-E5
gactgcttttggaggaacaaaaccctctctccccaaaaacccaaacccttggcggctgcgagacccgttgtgttctctcttctctctctcttctttttttttctctttccctctcttcttcgctccttttagggttttctcaactcttcgatttggggcttaaaccctctccgattcagattcggatttagggcttccctttctctattccgcctccaaagaaaaacagatctcgtggttggttcgtcatggccaccgttgctaatcccgcggatcgtatccttctctgctatgcaatttctctctttttgtttgtattttcttgatctgttgtattgaatcgtttattggattcggtggatttttgtt

SEQ ID NO: 21552 - DNA, 373 bp, Glycine max
  Clone ID: LIB3049-001-Q1-E1-E6
gactgcttttggaggaacaattccctctctccccaataacccaaacccttggcggctgagatacccgttgtgttctctcttctctctctcttctttttttttctctttctctctcttcttcgcgccttttagggttttctcaactcttcaatttggggcttaaaccctctccgattcagattcggatttacggcttccctttctctattccgcctccaaagattaatatatctcgtggttggttcatcatggccaccgttgctaatctcacggatcgtacccttcactgctatgcaatttctctctttttgtatgtagtttcttgatctgttgtattgaaacgtttattgtattcggtggatttttggttctg

SEQ ID NO: 21553 - DNA, 352 bp, Glycine max
  Clone ID: LIB3049-001-Q1-E1-E8
gaagggagtttcagttaacgtacctagttgttggtctttatatttagttattgacatcaacaaagtcatggaggaagttaatgtggttcaaaccaagaatggaactgtttcagtagcttctgcgtttgctggccataaggaagctatacagcaaagggaccacaaatttttaagaattgctgttgaagaagcgtataaaggggtagactgtgaagatgggggtccctttggtgctattatagtttgtaatgatgaaattgttgctagatgtcacaacatggttctgaagaacacagacccaactgctcatgcagaaatcactgtaaaaaaaaagcttgtgaaaagctaaacc

SEQ ID NO: 21554 - DNA, 389 bp, Glycine max
  Clone ID: LIB3049-001-Q1-E1-E9
ggagagaaagtgagagagaattacagagcattttccaacacgattacacgaccgaatcaaacccctctttctctccgaagctgcttttaatatcgtactggccttcgattgttctcctctttaatacatactgttctctcttcgatttgagggaacagtacaagagtctgagcatcggtttaacccaactgcacaggtagtcctccaaataatggacctcaatgatgaaaatggatgccaagctcctgaacgccccaatccttgcaataataaatggggcttccttggaaaaacaactaccatgaacaagtgttccaagtgttacaaagacatgctgttgaagcacgagcacgacaaatttgcagcatcatccgttgaaaacattgtga

SEQ ID NO: 21555 - DNA, 385 bp, Glycine max
  Clone ID: LIB3049-001-Q1-E1-F1
tggggttctagtgtgtgattgtttgttgttgtaactcgttcttcttcttttgttgttctgtgtttgtgtttgttttttctctcacctgaaaatgtcttgctgcggtggtaactgtggttgcggaagctcctgcaagtgcggcaacggctgcggaggctgcaagatgtacccagacttgagctacactgagtcaaccatcaccgagaccttggtcatgggagtggcacctgttaaggctcaatttgagggtgctgaaatgggtgtgcccgctgagaacgatggctgcaaatgtggaccaaactgctcctgcaacccctgcacttgcaacttatgtgtttggagagcaagcttcaagcagagatagcccttaaataagaataatgat

SEQ ID NO: 21556 - DNA, 311 bp, Glycine max
  Clone ID: LIB3049-001-Q1-E1-F10
ggactaagaactctgaacattagccaatgcagagcactcaccccttctgctgtgcaggctgtgtgtgactcatgcccttccctccacacctgttctggaagacactcactcatcatgagtggttgtctgaacctgacttctgtgcattgtgtttgtgctggccaagcacaccgtgctatcactctccctcatgcagctcattgagccagaggggttgatgatgtataaaaggacactttgatgaggaagtgcccttgaagggttttaaagttttaagggtcgtctggataagtttatgttcaatgctgcat

SEQ ID NO: 21557 - DNA, 418 bp, Glycine max
  Clone ID: LIB3049-001-Q1-E1-C8
aattcccggctcgacccacgcgtacgggaagggatggctggtctcattgctgtgtcaaatgctggggaagtggcttatgggttcaattgcaatggcatgtttaggggctgtgccactgaaaatggcttcatggaggttggaatctgggaatacgttcatttatttggttcctggttgtttcgattcaactattgaatttgtgtatcatgttggagtttagtagggtcttgctgggtgctggattgagttcattattattagtctaatagtcttgtttctaagaattagaaaacaaaaaaaattgtgaaaatatagttgtaactttgggttgtcttttccttgattaagactttttgtagaacctccaacaaaccgtttaacctttttcctcctaacaactatgacttaatttaattcc

SEQ ID NO: 21558 - DNA, 391 bp, Glycine max
  Clone ID: LIB3049-001-Q1-E1-D8
aattcccggccgacccacgcgtcagggggtgaatgtttgagtgcataaggtaagcaagaaaatggtggtgaagaatcgattggcaaagctccggttgccggaaccacccatcctaccttgtggttgttacggttaccaaaccaacacgaaatggcaggcaccttgaacttttaggttccaacaatcccgtcgcaggcaaggatgatgacaaaagaatgaccctcaaactgagaagaatcaattattggctttccgttgggccaaacccttcaaagccggttgaccatcttcaatttaaagcaggtttaggacactcgcgtcaattccctgttgctgctctaaatggacataccctcatccaggaccacccagccattgctgctgatcacaa

SEQ ID NO: 21559 - DNA, 452 bp, Glycine max
  Clone ID: LIB3049-002-Q1-E1-B9
actcccggctcgacccacgcgtacggggagcgacacagagagtgatttcagtgagtgatcggtgttcacttgatctcatcatagtcgtcagcgtcaattgaagaagatgccgatcagaaacatcgccgtcggaaggcctgaagaggcgactcaccccgacacgttgaaggcggctttggctgagttcatctcaaccttcatcttcgtgttcgccggctcaagctccggcatcgcctacaacaagctcaccgacaacggcgctgccacccctgccggcctcaatctcggcttcaaccgccatgcgatccgcctcctcctccccgtctccgtccgcgccaacatctccggcgggcacgttaaccccgccgtcaacttcggcgccttcgtccgcggcaacatcaccttcctccgcggcatcgtctacgtcatcgcccagctcctcggctccatcg

SEQ ID NO: 21560 - DNA, 159 bp, Glycine max
  Clone ID: LIB3049-004-Q1-E1-A12
ttacaactcccagtagtgagtcgtattaacgacagaagggggagtcagcaataacctcagtcacaaccgacggagtcatttattttacagcacaagtcattctgtcacagtgcggtgttgcacaggtggtcatcaggtgaaaggtactatttcgtgtgc

SEQ ID NO: 21561 - DNA, 325 bp, Glycine max
  Clone ID: LIB3049-005-Q1-E1-F8
gacaacaacaatggctccgaagaaaggtgtgaaaggttccgttgtagcagcgaagaagaaggttcaggagaaggtgacgaatcctttgttcgagaagcgtccgaagcagttcgggatcggaggcgcgctgccgccgaagcgggacctgacgcggttcgtgaagtggccgaagaacgtccaaatccaacgcaagaagcgcatcctcaagcagaggctcaaggtccctcctgcactcaaccagttcaccaaaaccctagacaagaatctcgccacgaatctatttaagatgctgctcaagtacaggccggaggacaaggcggagaag

SEQ ID NO: 21562 - DNA, 549 bp, Glycine max
  unsure (1)..(549): unsure at all n locations
  Clone ID: LIB3049-006-Q1-E1-E1
acgcggcaggtaccggtgaggaattcccgggaatcgacccacgcgctcaagttacgggggctgcgaaaagaaaagacgnaaacaganaggggggnggttgaaatcaagcaancaacaatttcaaccctggaagcctttttttggtgaagggaattccaanaagcaattggctttcccctttgcaagcaatccaactggctggcggccttcccttgggcaatgttcagaaaatgccttggaaacccaatcaacctcagtggtgccacaaagccagctccatctgcctctagccctgcctccttcaagactgtggctcttttctccaaaaagaaggctgcacctccaaaaaaagctgcagctgctgctcctgccaatgatgagcttgccaagtggtatggtcctgacagaaggatcttcttgcctgaaggtctcttggaccgatctgagattccagagtacttgaccggagaagtccccggagactatggttatgacccatttggtcttagcaagaagccagaagatttttcaaatatcaggcatttgaat

SEQ ID NO: 21563 - DNA, 164 bp, Glycine max
  Clone ID: LIB3049-007-Q1-E1-B8
agtacggtcaggaattaccggctcgagcgacgcgtcagcccacgcgtccgacgacagaaggggggacaggtgtacaagcaaagtgtatgacatgtttcggcgttagaaggaacatgggagttcacttcagaagatgataatcaacaaggcagatgctgtagcca

SEQ ID NO: 21564 - DNA, 360 bp, Glycine max
  Clone ID: LIB3049-009-Q1-E1-C3
cgacccacgcgtacgcccacgcgtccgccaacgccttcgttacggcccaagaaaacgacagaagggggtaaaacccttgcgcgtcaactctcctatgctaccgcagttacggcttccaccatggccaccatcactgcgatatccactttctccagtgcttcgtcctccgccatcatcgctgcgtcagcttccctggactctaccgtcttcggggtgaccgatctcaacaaccctagcgcgtccatctcaacggtctcttggtcaacaagactattgaagagatcctcaccctaccactcatcctatgcctcttttatttcacaaaccctattttcactcttcacggcgcaaggaagggtg

SEQ ID NO: 21565 - DNA, 332 bp, Glycine max
  unsure (1)..(332): unsure at all n locations
  Clone ID: LIB3049-010-Q1-E1-H10
gtgtctaaggtccagcaggtgttaacgtcatcaaatcaaacacaagggaacacggaagaaactcgtgtagtaatggttgataaggttattcatgtatcagaagtgacttccgagaaacttgatgctctccctatcctcagtcaagaaccaagagataatatgcagagtcctacattcggagcagatcaatgtattcttcatggagaaacaattgatcgatcaaattctaaaaccaggcaggaagatattttaccttgtgcttccagtgtattgggaagcacagaagaaatatcanaaggaaacaatgatcaagtttctgagcactgttagtg

SEQ ID NO: 21566 - DNA, 446 bp, Glycine max
  Clone ID: LIB3049-010-Q1-E1-H5
ggtaccggttaggaattcccggctcgacccacgcgtacggggagccactaaacgatgatcccaagcgttcaaatccctacctgggacgcggacggaggaggagcactctccccgtcgatctcttccaatgctgacacgtgctcattattctcctccgaccatttccgaatgttccagttcaaggtgcggaactgtccacgtggcaggtcccacgactggaccgagtgtccctacgcccaccccgccgagaaggctcgccgccgtgacccccgcaagtaccactactcaggcacctcctgccccgattaccggaaggggaactgcaagaggggcgacacgtgtcagttcgcgcacggcgtcttcgaatgctggctccacccttctcgctaccggacccagctctgcaaagacggaacacatttgcgccgcagagtgtgcttcttcgc

SEQ ID NO: 21567 - DNA, 273 bp, Glycine max
  Clone ID: LIB3049-011-Q1-E1-A4
gtacggtcaggaattacggctcgaccacgcgtcaagccaaacgtccgttacggtgccaaaagaacacaaaaagggaacggccaagggttccgttccgggttggacgtggttaaaaatcaactttcggcccttcactcatccccttcgcgccggttttctttctttgccgaactcgtgcgaaaaatgcgtgaggattcttcacatacagggagggcaatgcggaaaccagatcggagcgaaatttctggaaggtggtgtgcccggagcacggga

SEQ ID NO: 21568 - DNA, 401 bp, Glycine max
  Clone ID: LIB3049-011-Q1-E1-B2
gtacggtcaggaattacggctcgaccacgcgtcagcccacaccttcgcccaagccttcgttacggtgccaaaaaaacaaaaaaaggggaaacaaatttggtcctcccctccccccatcgtcctcttccccctgttccattagggtttcccttttcccctcggagcctcaattgaaatccaattcctcaatacctccacactttctcgttcggaaagctcgccaattccaaagacatcgacagctccacgtgatacgttttcttcctctctggttatcaatgttggctactagtgcacttgcatccttgcccgtattaccaccagtgagaataagtggccaccacatttaaacaaatgttgtttccacattgagcttttcaagacgattactgacaactaat

SEQ ID NO: 21569 - DNA, 385 bp, Glycine max
  Clone ID: LIB3049-011-Q1-E1-B5
cggttaggaattcccggctcgacacacgcgtacgcccacgcgtccgcccacgcgtccgggagagaaagagtgaggagagaattacagagcattttccaacacgattacacgaccgaatcaaaccctctctttctctccgaagctgcgtttaatatcttactcgccttagattgttcttctctttcattatactgttctcttttcgatttgagggaacagtacaagagtgtgaggatcggttaacccaactgcacacgtagtcactaaaataatggagtctcacgatgagactggatgccaggctcctgaacgcccattctttgcattaataattgtgggttctttggaagagcagctaccatggaacatgtgtttcaagtgttac

SEQ ID NO: 21570 - DNA, 436 bp, Glycine max
  unsure (1)..(436): unsure at all n locations
  Clone ID: LIB3049-011-Q1-E1-F10
aattcncgagctcgacccaggcgtcagcccacgcaaccgcccacgcgtccgaagggggccgctctctgagaaaaacagatagtgtgggagagagaagagcggaagagaaaatgacgaccaggttcaagaagaacaggaagaagagaggtcacgtcagcgccggacacggccgtatcggaaagcaccgcaagcatcccggaggtcgcggtaacgccggtggcatgcatcaccaccgtatcctcttcgacaagtaccatcctggtttcttcgggaaggtaggcatgcgctacttccacaaacttcgcaacaaattctacaatccgatcatcaacatcgacaagctgtggtccctcctcccccaggaggccaaagacaaagccaacgccgacaaggaaccctgctcgatgtcacccagttcggttactttaaggttttg

SEQ ID NO: 21571 - DNA, 396 bp, Glycine max
  Clone ID: LIB3049-012-Q1-E1-D1
attcccaggtcgaaccaagccttagtaccgctaccaaaagacgacaaaaaggggtgttaagacctgtttgtttgattaataaaaagattaaaggttccgcaaaaagctgcaacttaacgttaatgttcaatacctcttacctttcactgatctcagggctttgcgtccattctttgtcctatgatcattctgctaccacaaactgtttggcagaacctcggagagcacagttatgaggaggcattatagtaaatccaggatttgatcacaacatacagggttggacagtatttggaaaaggagcaatcaaggagccaatatccaatggaggcaatagattcattgttgctcacaacagaacacatccattggatactttctctcacaaagtccaac

SEQ ID NO: 21572 - DNA, 450 bp, Glycine max
  unsure (1)..(450): unsure at all n locations
  Clone ID: LIB3049-012-Q1-E1-G4
taccggttaggaattcccggctctacgcaggcgtattggccggctgcaaaagaacaacgaaagggcacaagtttggtgagaaaactaaaacaataagatgaaaatgaaagtgcctgttttgtatgttgctacagttttggtagcatatgaatgccatggctcagactaccagaagttccctctccaaatgaaaactgggtttggtgggcaatacagcaatgaggtggcatgtgccagttggaggcttggcgtggaagcaaacaacgtagtcaagtggcaaactgttcctgcagcttgcggagagtacatagctgactacgttctacgagaccaatatagatcagattccaaaacagttaaccaacaagcttatttctatgctaaatccctcagactcaacaacanagatgtctttgtcttggacgttgacgacactactctctctaatct

SEQ ID NO: 21573 - DNA, 455 bp, Glycine max
  unsure (1)..(455): unsure at all n locations
  Clone ID: LIB3049-012-Q1-E1-H4
taccggtcaggtattcccggctctacgtcntcnaactgcattctactaattagtttcacgagtgattctaacactacttgtgacttttgtacctctgtgtgtcattgtttccctgtgcagttaagaaagatactgctgcagaacttgccaagaaaagggaacaggagcggcagaggcaggaaaagcttgcagaaactagtagattgagtcggtatagatgccgcagccgcagcatgagtttcagcggttcccctccaagaagataccggcgcagtagaagtccaagtagaagcagaagttccagaagatattattctagttctcattcacggtccccttctcgcacacgttctccgtctccttactctcgatctcccaggataagaaatcgatcaaagcactgatggaatgctatatacgagtacaaggctgacgaagtttgtgtggcatttatt

SEQ ID NO: 21574 - DNA, 362 bp, Glycine max
  Clone ID: LIB3049-013-Q1-E1-F5
gacccacagcgtcaatacaggcgtcagtacgagcagcgagagggcggcataaggggtcaccaagttcacgagctcttgaggagaatatctttgcctggctcgtgtttttcttcatgtgtttctgtgagatgtagcgacctatgctgagatttgaacagttaacatttttaataatagttgtaattgacgtagtgggattaggttcatcgtctgtgtaaggatatggtagagtcaatcgtacacgggtaatttgagtgcttaaaggactgtcttgactattttatgtactcgtgattgtcactcaaatttcgttcgaggtcgacattcacttcgacggatgttaatgcgtatggccattggag

SEQ ID NO: 21575 - DNA, 419 bp, Glycine max
  Clone ID: LIB3049-013-Q1-E1-G7
aggtaacggtctagaattcccgggccgacccacgcgtccacggaggcgtgagggactttttcattgcaacgatcgattaatgacttgcttccagaatggttctgctagagaagctctgggatggcgttgttgctggccctcaacctgtgcgtggccttggcaagctcagaatactcaccaacctcaaaactattgatgaaggagacagtaacaagctgcagaagacgttgtcgatgccgtcgacaccgacaaccccgatgactcccacgactccaacgacaccgggatgcgcgcgtaaagctgacaacgtatggaggagcgtcttccatcctgtgagcaactccgccacaaatgacatcggtgctcatatgtgtgacataccacttcccaacactcctactgtctacgactggctgtac

SEQ ID NO: 21576 - DNA, 407 bp, Glycine max
  Clone ID: LIB3049-014-Q1-E1-B12
ccgggtcgaccaacgcgtccacccacgcgtccgaaggggaaaggagttaaagagtaaaagcaccgtctccgtctccactctcggcttcttcttcgttgcgctttttcccaaaaccaattgcatcactctcgtccgttaccgccgctgccctagaccaccgcaagcgacgtcgcacaccgccttcatccgttagggcaaaaatgagtcgaggaagtggaggtggatacgatcgtcacatcactattttctcccctgaaggacgtctctttcaagtggagtatgctttcaaggctgtgaaggctgcaggaatcacctcgattggtgtccgaggaaaggattcaatttgtgtcgttactcagaagaaggttccggataagcttttggacaacacaagtgttacacacctc

SEQ ID NO: 21577 - DNA, 83 bp, Glycine max
  Clone ID: LIB3049-015-Q1-E1-F3
gcacgcgtccaataggcaccaagaagacaaccgaaggggacaatttggttgtcaaaccgagatccaatccgttgccatgaaaa

SEQ ID NO: 21578 - DNA, 366 bp, Glycine max
  Clone ID: LIB3049-016-Q1-E1-B7
acccacgagtcaaacgggtgccaaaagaagaaagaagggggttctagtgtacgtgattgttgttactcgttcttcatcgtcgttatcttcatcatttgttgtttgtgtgtttgttttttcactcacctgaaaatgccctgcagcggtggtaactgtggttgtggaatctcctgcagttgaggctacggctgcagaggctgcatgatattgccagacttgagctacagagagtcaaccatgactgagacgttggtcatgagagtggcaccatttaaagcgcagttcgagagtgctgaaatgggtgttcccgctgataacgatggctgtatatgtggatctaactgcacctgcaatacctgaacttgc

SEQ ID NO: 21579 - DNA, 410 bp, Glycine max
  Clone ID: LIB3049-020-Q1-E1-B11
ccgggccgacccacgacgtccacggacgcgtgggggactttttcttttcatccatcgattaaagacttgcttccaagatggttctgctagagaagctctgggatggcgttgttgctggccctcaacctgagcgtggccttggcaagctcagaaaactcaccaccctcaaaactattgatgaaggagacagtagcaagctgcagaagacgttgtcgatgccgtcgacaccgacaaccccgatgactcccacgactccaacgacaccgggatccgcgcgtaaagctgacaacgtttggaggagcgtcttccatcctgggagcaactccgccacaaagaccatcggtgctcagatgtttgacaaaccacttcccaacactcccactgtctacgactggctgtacagtggggag

SEQ ID NO: 21580 - DNA, 456 bp, Glycine max
  Clone ID: LIB3049-020-Q1-E1-E6
tcccgggccgacccacacgtccacccacgcgtccgggcagccaaagaaaagaaaatcctcaattttctgagcagccaaacactctctctctgtctctcgaaaattctcagtttgcagagaaaatctgaatcatgtcgtggcaagcgtatgtcgacgatcaccttctgtgtgacatcgaaggtaaccacctcactcacgctgctatcatcggccaagacggcagcgtttgggctcagagtaccgacttccctcagttcaaacctgaggagataactgccatcatgaatgactttaatgagcctggatcacttgctccaactggattgtatctcggtggcaccaaatatatggtcatccagggtgaacccggtgctgtcattcgagggaagaagggtcctggtggtgttactgtgaagaagaccggtgcggccttgatcattggcatttatgatgaac

SEQ ID NO: 21581 - DNA, 404 bp, Glycine max
  Clone ID: LIB3049-021-Q1-E1-B4
gggtcgagccacgcgtccagggaaaggagagaggagaagagaagctaaagaaagaaaggagatgggagtggagaagcagttgttgaggtctggcaccggtccgaagccaattcccggtcagaacgtaaccgttcactgcactggtttcgggaagaacggtgacctttctcagaaattctggagcacaaaggatcctggccagaacccattcactttcaaaatcggccaaggttctgttatcaaaggatgggatgaaggtgtgcttggcatgcaaattggtgaagttgctcgtctccggtgctctccggattatgcttatggtgctggtggctttcctgcttggggaatacggcccaactctgtcttggaatttgaaatccaagtcttaagtgcgcaatgaaaac

SEQ ID NO: 21582 - DNA, 401 bp, Glycine max
  Clone ID: LIB3049-022-Q1-E1-D4
cgggccgacccacgcgtccagacagaaggggactgacagtggcagagagagaaagacgtgcatagtgtgagtgaagctctctgttctgttctaatgttcttctcttgcaacctctgaatctgtatgcttcagttgtgcaatttaacagagtgtgcttaagaaatagtaattttgtatatttactgtaaataagatcagtatgggtgaggaagaaccagcgaatgaagtttctatgattgactcagatgagaagaacttgcaggagaatactttggatgaaattactgagaaataggacttggaaactgatggaggaaaagtcttggcgaacaatggaatcaaagatttgaaagaatctactgtataagatattgaagataagcaagctgatagtatggaaa

SEQ ID NO: 21583 - DNA, 403 bp, Glycine max
  Clone ID: LIB3049-022-Q1-E1-H12
cccatgcatccagttggaagagaccacaagaaggggtcaaggaagggatttacaaggaaaatgtggaaattccaagctataagaccaccattatgatgcttggcgatggaattgatgtctctttcataactggtaacagaagcgtcagtgatggctggaccactttcagatctgcaactctagctgtttctggtgatggttttctggcacgtgatatagccattgagaacagtgcagggccagagaagcatcaagcagtggcattgagagtaaatgcagacttagcagccttttacaggtgtgcaatttatggctaccaagacactctatatgttcactcctttagacaattctatagagagtgtgacatttatggcaccatagattacatatttgggaatgc

SEQ ID NO: 21584 - DNA, 421 bp, Glycine max
  Clone ID: LIB3049-024-Q1-E1-G1
cggctcgacccacgcgtacgccgatatctcttcttttctcgatcatgttctcactcctggctctgaagttcacgccaaattgtctgcgtatcttcccaaggatgatgatcatgagatggaagtggacgctgcaacatctgcgattcaaaccccagccaaacacttgttgcccgagctagaaatctactgttacctgcttgtactcctttttctgattgatcagaaaaaatacagtgaggccaaagcttgttcctcagctagcattgtttggctgaagaacataaacaggagaactgttgatgttattgcatccagactgtatttttactattcgtatagctatgaacttatgggagatcttgctgaaattcggggcaaccttcttgcattgcaccgaattgccaccttccgccatgatgag

SEQ ID NO: 21585 - DNA, 338 bp, Glycine max
  Clone ID: LIB3049-024-Q1-E1-G2
acgcgtaagttacgctgccataatatcacaataagggacaactcacaagctcacaaagcaaaaacaatgttccaatactggatccaaagggatgcaaatcaaacatcctgaatcatgggttcaacaagttagaatcagattaccccaacccacgtatctgatgaacaagcaaatcttttcgacatgcaactagccagtgcttctgtccatcaatgattctcagatcaagacttgagcttgatctgttggaaatcagtatcaatgctgagacctggtgttcaactttcccccactgacatttcttcacagctcccaatacagaaccctgatgcacccgt

SEQ ID NO: 21586 - DNA, 404 bp, Glycine max
  unsure (1)..(404): unsure at all n locations
  Clone ID: LIB3049-026-Q1-E1-A1
taccggtctagaattcncgggccgacccacgcgtcaaagacgacagaaggggaagagtgaagagcgaagagaatggctcccaagggtttaatctttttggctgtgttatgcttctcagcactgtcactgagtcgttgtcttgcggaggataatggacttgttatgaacttctacaaggaatcatgccctcaggctgaagacatcatcaaagaacgagtcaagcttctctacaagcgccacaagaacactgctttctcctggctcagaaacatcttccatgactgtgctgttcagagttgtgatgcttcactgttgctggactccacaagaaggagcttggtctgagaaggaaacagatagaagctttgggttgggaaatttcaggtacattgagaccatcaaag

SEQ ID NO: 21587 - DNA, 406 bp, Glycine max
  Clone ID: LIB3049-026-Q1-E1-B6
attcccgggtcgacccacaacgtcagggggagcaagagtgaagagcgaagagaatggctcccaagggtttaatctttttggctgtgttatgcttctcagcactgtcactgagtcgttgtcttgcggaggataatggacttgttatgaacttctacaaggaatcatgccctcaggctgaagacatcatcaaagaacaagtcaagcttctctacaagcgccacaagaacactgcgttctcctggctcagaaacatcttccatgactgtgctgttcagagttgtgatgcttcactgttgctggactccacaaggaggagcttgtctgagaaggaaacagatagaagctttgggttgagaaatttcaggtacattgagaccatccaagaagctttgggaagggaatgccc

SEQ ID NO: 21588 - DNA, 208 bp, Glycine max
  Clone ID: LIB3049-026-Q1-E1-H8
gtcaggagttcccgggtcgacccaagcgtcaggcggaagacatcattggtattcaagggactaatattgaatacattcgccgcactagtggagccatattgactgtgcaggagagccgggttcctgatgaaatcgttgtagaaataaaaggcacctcatctgaggttcaaacagctcaacaattgattcacgatgttataagcagtca

SEQ ID NO: 21589 - DNA, 299 bp, Glycine max
  Clone ID: LIB3049-027-Q1-E1-C4
ccacgcgtccattctggcgtcaatagagcaacgaaagggagacaaataggggcaacatattcgaaaacttattttggctagtttcctggtaaacagttctagatatcaacagatctgggagtcggtaccctagttagagtaatcctccgcatacggatcaccatcatgattaagtacaagatcagaatgatagtcaccccgaaaacgatatgtagaatatgggcacgtataatcccaggttcctaatagcaacaataattttactcagtcatcattggaccttgctgggttactggaat

SEQ ID NO: 21590 - DNA, 344 bp, Glycine max
  Clone ID: LIB3049-027-Q1-E1-D3
accacgcgttcattcgggtgccaaaagaccaccgaaagggaacttacaattaacaatggggttggtccccttcggcggcaacggttcttcctcggaacctggcattcaccaaactctcggtctctcactctcacactcttctaccgcgcttcctttctttcccaactcccaagtcatcaaaccctcgcaaccgcgtcgcagtctctctccaaaccccacgcgctcaatccgccgcgtccgcttctccctccgcctccttccacggcctctgctacgtcgtcggcgacaatatcgacaccgaccagatcattcccgccgagtacctcaccctcgtcccttccaag

SEQ ID NO: 21591 - DNA, 376 bp, Glycine max
  Clone ID: LIB3049-027-Q1-E1-G3
ttcccgggtcgaaccacgcgtcagaccaagcgttcgtaacggtgccaaaaaacgacagaaaggggaattagcaagaatgaagagcgaagagaatggctcccaaaggtttaatctttttggctgtgttatgcttctcagcactgtcactgagtcgttgtcttgccgaggataatggacttgttatgaacttctacaaggaatcatgccctcaggctgaagacatcatcaaagaacaagtcaagcttctctacaagcgccacaagaacactgctttctcctggctcagaaacatcttccatgactgtgctgttcagagttgtgatgcttcactgttgctggactccacaagaaggagcttgtctgaaaaagaaacaga

SEQ ID NO: 21592 - DNA, 421 bp, Glycine max
  Clone ID: LIB3049-029-Q1-E1-C6
accggtcaggcattcccgtctcgacaaacgcgtcagtacagccgtcagtacagcagcgaaagggcaacagaaggggaagtatccctccgatttgaagattccggtgacggcgagccatggccaccggcggcgacggtgacacttccaaacaagagctcttccagctcatcaaacgcttcggatcttacgtcactttcatgatctccaatctcttcactctctctctccataacctcgatttacgctctatcggggcagttgctggtcttgctgttgcaattgttttcacatggaagctcttgagatctcgttctgggtctcatcggaggcaacagaaacggcaaggtccttcatctactaatcctgaagtccgttcaatttccaattcaaatgcgtccggtgttcccttcgaatccttgtt

SEQ ID NO: 21593 - DNA, 461 bp, Glycine max
  Clone ID: LIB3049-029-Q1-E1-E5
ccggttaggcattcccgtctcgacacacgcgtcagtccggtggtaaataacgatgcgaggggacacacactcgggttcccactcaatagtatataatctctgtttcaactttctatcttcctatgatggctagctccaccgtcttgtttacactagtcgccgcattgttcgtaacctccgtcgtggctcagtccccggcgtcctccccagccctgtctccaaagcgcacccccgtgctggccacgccgcagaagtctccttcgccggcgatttcgccttccgccgtgtcaccgtcatcctctcctcttgctccgacggtgaacgctccgtctccttcgcctacctccgtcgactctccgccatctcctccgttgtctccctccgattcgcccggcggtgttcccctccgtcactccctcagcagtctcctctccgccgtctgaagcagcagctccctctca

SEQ ID NO: 21594 - DNA, 437 bp, Glycine max
  Clone ID: LIB3049-029-Q1-E1-F11
aattcccggctcgacccacgcgtacgcccacgcgtccggggtgaaatgaagaggtagtgagagacaagaaaagaaaagaatgagtgaagaaggtcctccaaagctatataccgacaagccccgaaaagcgcgattgaagcagtttcgggggcaacagaaatcaaacgcgttctcctcgccggcggcgatggggacacacgccgctactccgccgccacctccgccaccgccaaaggaaccctttattcggcgctacaaattcgtttggcctatgcttttggctgtgaatcttggtgtcgcagcttatttgtttacgaggacaaagaagaagggtactggtgacgaggagcaagatgtaactcgtgtctcaactaaggatgctacccctcaggttgttgagatgcctgtgccgccaccatctattacaaatcccatga

SEQ ID NO: 21595 - DNA, 466 bp, Glycine max
  Clone ID: LIB3049-029-Q1-E1-F5
accggttaggcattcccggctcgacacacgcgtccgggaatgaatacgagagtgaagcagctaagaggggaagagcgatggaaggtgggtacggaaaccgtggttcctctttctcccaatcacgtcgtggtcgaggtcgcggtcgcggtcaaagatttccttcgaatcaatccaaagtttcaagttttgccgaaaggggcactccttcttctagtagtgccaacagagcttctgcctctgttatcagtaacacgctagaagacgacgcacaaccatcttccaattttgttggaacatgtccttacatgtgcccagaaagagagaggatccagcgtgaaaaactgcgagatttggcaatttttgagaggctacatggaaatcctggaaaatcatccccaagctcttgctgtcaagaagttttgcagaactatatccaccaaatatgttcaagcatcagatatgcggc

SEQ ID NO: 21596 - DNA, 441 bp, Glycine max
  Clone ID: LIB3049-029-Q1-E1-H12
aattcccgtctcgacccacgcgtacgcccacgcgtcagtagagcagagaaaggggtgcacacgaagtgacccaatttggtttcagtttctcgaattctgggaacgtgtctccgccctctggtctcttccccttctccgcaagcaaaaccccaatttcttcttcacgaaccctaattcactcttcccattccaaatctcaatcacctttctgattcaatctttctctcctcgccaatctcttcgttcacctcgcaaatcaaggtgagggattcgaattgaaacctcaagatgccagccacagcaggaagggttcgtatgcctgcgaacaatagggttcacagcagtgcagcgcttcaaacccatggcatatgggacagtgccattggctacgaaccttatgcacccaataacgaagataagagggattcttctcaaaatctg

SEQ ID NO: 21597 - DNA, 335 bp, Glycine max
  Clone ID: LIB3049-030-Q1-E1-B1
ccggacttgccgggtcgaaccaagcgtccggggaaaataaaaaggatagcatagtgccataatggaagcttgagaaggaagtggtccaaagaagaagaaagatgaaggagaactactcataccaatcgtatccagattcaggcgagtcctctccacgctccagagagatcgacttcgagagccctcctccatgggaccaccaaaactacaaagccaagttcatctgcagctatggcggcaagatccacccacgctcccacgacaaccagctctcctacgtcggcggcgacaccaaaatcctcgccgtcgaccgctccatcaagttccccgccatg

SEQ ID NO: 21598 - DNA, 441 bp, Glycine max
  Clone ID: LIB3049-031-Q1-E1-C4
cgtccggccacgcgtgggcgtacggtgcggtctccacctcgcacgcacgtgcgaccttgtttcacggccgtggcctacgcatccatttcctcacgtgctaactcccagtctcaggttctcctcggcttgtccgagaaggagctgcaacaactcgcccttgacctcaatcaggaaacctataggggcaaacaacttcatcattttttataccagaggaagctcagagaaattcaggatttcactcaattgcctcagggatttaggaatactcttgaggaaactggatggaaggtgggccggtctcctattttccaaactgtaactgcagctgatggaactgttaagttggtggttaaatttggaggacaatagattggttgaaactgttggcattccggttatggttgataaaggcctgactcgcctcacagcatgtgtttc

SEQ ID NO: 21599 - DNA, 364 bp, Glycine max
  Clone ID: LIB3049-031-Q1-E1-H5
gaattcacggctcgacccacgcgtacggacagaaggggggtgagaggaaacagaagagagaagagcaatcggtgagtgaatggaatggattcaggtcctccggcgaacgatttgtgttcagtgtgccatggcaactttcatattccatgccaagccaattgttctcactggttttgcggtctcttttgtctctctgactttgatttcaatattgaatgaatgaatgaatgaatgaagttacataattggtgtttcaggaaattgcataatgcttgtgtggcagcacggattagtgggttgttcatgcaagtgcccactgtgtcgtcgagccatcagtctcttagtccccacagaagagtctctg

SEQ ID NO: 21600 - DNA, 454 bp, Glycine max
  Clone ID: LIB3049-033-Q1-E1-C8
aattcccggctcgacccacgcgtacggggaaagcagaaagcatggaagtggtgcggcgggtggttccgaaggtgttggaaaagggcgtcgtaatgagtcggagggagatgagctcaggttcgggttggttggcgggaaagttggcgaaaatagtgaaagccggagaggctgttctgcactcgcgagccgaagaagttgaggccattgaaatcaagtcagagagagtgcagaagatcatcgacgacatggtccgcgttatgagaaaagcacctggagttggcctcgctgccccacagattggaatccccttaaggattattgttttggaagacaaaatccaatatatggcttattattcaaaccaagagctcaaggcacaagatagaacaccttttgatcttttggtcatcctcaatcccaagctaaagaacaccaccaccaggactgccctatt

SEQ ID NO: 21601 - DNA, 370 bp, Glycine max
  Clone ID: LIB3049-033-Q1-E1-G12
ttccggggtcgaaacacgcgtacgtagcgataagactacagaagggggagttcccttcctagaatagcaaagtatagtagcaatagcagcagcagcagcttgtcgcgtgcgtggctctccggcgaggccgtaacaatccataaacaacaagcttttaaatttctccttcgtatcgcttccaatggcatcaaataaccattcaccatctctcgagatattagttcgaggaccagatgatttctcgctctggatcggacacgctttcgcgaacgattaaccaagcgtcaagctcgagaaagtgatctgcatcaatgcgatattcagcgacaactgattcagtctcatggtgacgaattcgaactcgctgatt

SEQ ID NO: 21602 - DNA, 301 bp, Glycine max
  Clone ID: LIB3049-037-Q1-E1-F10
ggtagtttcaggttttcttttccttcagtttcacaagaaatggatagcacttttcactttcttcagtacgttctcactgcgatatggctcgtgagaggcatagggatcgcaattccagcggtggcaaagggctacgtatccagctcgccaccaaggacgctcggaattccgctccggcgaccggatgagtgtagaaaccctaccgcttcatgcccggatgcgtgtcgctgagggaaatcagaaggtactagaagatgactgagcttctcaacaggaaccttccatttcagaggtcttgtga

SEQ ID NO: 21603 - DNA, 170 bp, Glycine max
  Clone ID: LIB3049-038-Q1-E1-D9
aattcccggcccgacccacgcgtccatccaggcgtcagtacacgagtcagtggggttgcgaaaagactatagaacgggggcttcgttgattgggttgtgactcctccctttcctcctttgcaattaacaataaagggttaatgaaggaccacttaaagatctcgctccgg

SEQ ID NO: 21604 - DNA, 418 bp, Glycine max
  Clone ID: LIB3049-042-Q1-E1-A12
aagccttcattaaggcggcaaaaggcaaacggaagggaaatttaaaagaaaaggttccaacttaaaaggtttgaaacttgtaacggtggaccgtccttttgctgagaagcactatgctgatttgtctgccaagcctttctttagtggtttggtggattacattatctctggccctgttgttgccatgatctgggagggcaagaatgttgttacaactggccgaaagattatcggagccacaaacccagctcaatctgagcctggaactatccgtggtgactttgccattgacattggaaggaatgttatccatggaagtgatgcagttgaaagtgctaacaaggaaattgcattgtggttccctgagggccctgctaactggcaaagctcccaacactcttggattcatgagtaaatc

SEQ ID NO: 21605 - DNA, 304 bp, Glycine max
  Clone ID: LIB3049-043-Q1-E1-D9
ctgggccagctaaaatgccttacactctgctctatccttctagtgaggagggattgactttcagaggaattcccaacagtatctctatctaagggctctctcattgaggttgctgtactactctgcctgtttttcaataatgtgaaataggaggaatatgattccttcatctacctacgtatggtcaagttacatttggggtggttgaatgttctcgtgtttgctgtattctgtttttataacagatcgaagagaaggcaataaaggcaatcacgcatgtttcaacaatgatagctggcatgac

SEQ ID NO: 21606 - DNA, 370 bp, Glycine max
  Clone ID: LIB3049-043-Q1-E1-F12
taccggtacggaattcgcgggccgacccacgcgtcaatagaggcttcgacagctgcaaaaaaagggaaggtagggaatctcgactattgtaaccaacaaccttagagttactgagcatagggacaccattccaaaccatctaggcatcaccgattcctcaatgacaacacgcactcaccccctcttctatgtggtctccgaccgttttcaacaaacagaagtcactgcagatccattctaacaggcactcgctgaagaatatatatctcatggatatgctaacatttgttactcacccttcttgatgaagtcaccatacttcaaaacttagatgaagtcgcttcagacgaactctttactgacaccactg

SEQ ID NO: 21607 - DNA, 378 bp, Glycine max
  Clone ID: LIB3049-044-Q1-E1-B9
cggctcgacccacacgtcagcccaggcgtcagcacacgcgtcagggtgctacaagacgacagaaggggggcttactaatggcttctacgggagtcagccatacggtcttggcatgccatattctggaaagcagattgcaaattccacacttccttctcttggatctggaaatccactctttgagaatgaacgtatatcacgcttaaattctatgatgagaagttcagtgggaggttctggtggctcatggcatgctgatattggcaataatatagagggaagatatgcttcagccttacgagatgagttcacgaacaagaaaaccatgccatttgaacttccagatatcattgatcatgtggttcaattcagtactga

SEQ ID NO: 21608 - DNA, 349 bp, Glycine max
  Clone ID: LIB3049-044-Q1-E1-D11
aattcccggctcgacccacgcatcaggccacgagtcagtaaaggagtgaggggaaaacatagcgggacacataagtccatttgcaacatgacacattggcaatccgcatagctgatccatgcgtcgttgctgtgcagtaccgtccacaaaggctctctgaacatcatccttggtcggcaaagccgtaaagctgcacttaacatctccatatctcgcaagggagagcgtgccgaatatggtcatcaatcaggactcctcaggagaacaatagtggtaccgatactcaatcaagtacatgtgcacattctctgcacagcaaatctcctaaataattcgagaattacaaggc

SEQ ID NO: 21609 - DNA, 277 bp, Glycine max
  Clone ID: LIB3049-045-Q1-E1-G1
tgagctagtgcgttcgctgtgattcaagttttagtctacacatttgcaaacgggggtggaaaccctgagacctgacttttatcttgagaaatacaaacatgtgccaagcaattaatattctatcggttgtgttggatgaaattgagtaaattttagagaagttaatcatcactgttcatttttgtagtgcataatttatcaacatgcacaggatcgccgccgactgtttcgcccgactgtttctgctttatgaaaataatttgtgtatcatctgtgc

SEQ ID NO: 21610 - DNA, 455 bp, Glycine max
  unsure (1)..(455): unsure at all n locations
  Clone ID: LIB3049-046-Q1-E1-C7
ggtctagaattcccgggccgacccaagcgtccacccacgcgtccgggattcaactcagaaaggacttttggctgctggtgatggccacaaggttaaattttggaatatggacagtgttgagctctggacaagcactgatgttgatgctgaattactggaaaatccatgcattcgctttaacaagaagggaacattactggctgttgctgcaaaaggaaacaaaataaaaattttagcaattgatgacattttgcagaaacagaatgaaacacattcaattcatgtccccaataatcaacatgaagccttaaagtgtacacaaagtccaattttggttgatgctggtgctggaatcgcaggtgaaggcattgtcatgaatgggtaccaaaaggcttggangatgggaggtataattcaattgaggagtctcataacaactcaaagttttggaatgt

SEQ ID NO: 21611 - DNA, 429 bp, Glycine max
  unsure (1)..(429): unsure at all n locations
  Clone ID: LIB3049-047-Q1-E1-G5
aattcncgggccgacccacgcgtcagagaagggggcagtttcaaattttcttttccttcactttcccgagaaaaaaataacacttttcactttcttcactacgttctcacttcgatatggctcgtacgaagcaaaccgctcgcaagtccaccggtggcaaggcgccacgtaagcagctcgccaccaaggccgctcggaagtccgctccggcgaccggaggagtgaagaagcccaccgcttcaggccgggaaccgtggcgctgagggaaatcagaaagtaccagaagagcaccgagcttctcatcaggaagcttccatttcagaggctcgtgagagaaatcgcgcaggatttcaagaccgatttgcgtttccagagcagcgctgtttccgcgcttcaggaggctgctgaggcttacctcgttgggttgtt

SEQ ID NO: 21612 - DNA, 230 bp, Glycine max
  Clone ID: LIB3049-047-Q1-E1-G8
gacccacgcatcagcggacgcgtgggcggacgcgtggggacacgcaaaccacgcactctctctctctctctctcctcttgaagccctcaaaggctcaagcacaaacactaacactaacactagcattcactcaagagatcaataatgggatctggggccggcaatttcctcaaggtgcttctcaaaaacttcgatgtgcttgctgggcctgtcaataatcctgtttaacc

SEQ ID NO: 21613 - DNA, 421 bp, Glycine max
  unsure (1)..(421): unsure at all n locations
  Clone ID: LIB3049-048-Q1-E1-A3
taccggtccagaattcccgggccgatacaggcgtnaaaannnnnnagaaggggacagacagagagaaagatgcagaagagagagcagggcaagtccggcggatccgccggaggaggggcgacgccacctgcgaagagaggccgtcccttcggcagcggtaacaacagttcctctgccgctgcttcagccgcggattcggcggctccgtcaaccctccttggtccttcccttcacgttcacaactccttcgccgatcagaacaacaaaagaattgtcttggctcttcaaagtggtctgaagaatgagctaacatgggctttgaatacacttacgctgctctcctttaaagaaaaggatgacatgcgcaaggatgcgactccccttgcgaaaattcccggcttgcttgatgcgctcctacaag

SEQ ID NO: 21614 - DNA, 389 bp, Glycine max
  Clone ID: LIB3049-049-Q1-E1-A8
attcccgggccgacccacgcgtcagcggacgcgtgggtccaactgttgcattggggtatctttctacagcatttcttgttgcatccactgtgactggatatctgtctttgttttacccttacaaaggaaagtctattccacaaggggttctgtttaagcacaccactttcacagtgttcttcaacatttctttgttcaccactggattagctgcagctatgctgttatggccaacaatcaccgaacacattcacctgacacgcaatgtgcaccgcaatatcaactatgaatgtcctacagctaaaactggtctacttggaagtggtgcctttctatcacttgattcatctctcctttggttgattgcacttatgctagctgacaatgct

SEQ ID NO: 21615 - DNA, 51 bp, Glycine max
  Clone ID: LIB3049-049-Q1-E1-D12
gcgtccgacccgacgtcagtagagtagtgagtggggcagagagaggggtac

SEQ ID NO: 21616 - DNA, 268 bp, Glycine max
  Clone ID: LIB3049-050-Q1-E1-G4
gaagaagaagaagaagaaaagaggggtcttcgaagaaaccatgagtatcctctctctctaaactctctcagattcgatcctctcttctcttctttcaattccgcttccctcgcactaaatgacagggtttcctggccctcgccgcgatcacgcgtctgcgtcctcctcctcgcacaagtccaacagcagtggtagcaacgtatttaatttgcttgcaaggagggagatctcacgccgagcaagatatgtggcaaaatgggcattgggg

SEQ ID NO: 21617 - DNA, 333 bp, Glycine max
  Clone ID: LIB3049-051-Q1-E1-E1
tatggaagaggaggagggtacggctataatggacgagggaagggacgtggcatgcccagtcgcactttgtaggtggcagttaatgtttagtcatggacatggtggagaacaagagcctaggtagcctcccctaaaagcatcgtaactatgttagagataatgcttcattgttgtgttgcctgttatatgttttgcttcgcagaataagtaggacacttttttcctgttatgctaccctcttgttactcctctaccaaagtcacttggtttggtgtaaagatgtttgtacaccattttatatcagcatatatcaccaggcagaagtttagacgc

SEQ ID NO: 21618 - DNA, 415 bp, Glycine max
  Clone ID: LIB3049-051-Q1-E1-F5
acgcgtccaggaggtagaataattattaaaatcgtttttctttatttctcttattacgccaacgccatgctcattactcgtaaccctgttttgttgaattccacttttgtccccactctcatttcagattcagagcatcgttgcgcatctccacgctctctttgcttctcttctcgcacggacatggatactgctgctggtcaaagtctttacccattacaccgttgcaaaactcttcacctggtaagacatgcccaaggatttcacaatgtagaaggtgagaagaactttgaagcatacaagtcttatgatctttttgatgcaaacctgacccctctcggctggaaacaggttgataatctgagacaacatgttaaggccagtggtctttccaaaagaattgaactagttattg

SEQ ID NO: 21619 - DNA, 369 bp, Glycine max
  Clone ID: LIB3049-053-Q1-E1-A11
cgcgtcatccctgcagctgtgagtagaggagagagtgagttattgggcttcatgcattcatgccaactggtttgggagtgctgaaaattgctcagtcagtatggtctgtattacactcggctgggttctggggatgagtcagtactcgtgctcgatgttatgagatggtcatggctttgtcactgtacactcctgttgcttttctggcttggtttccaattgttgcacaatttcaaacgcgtatgctgtacattcaagtattcagcgctggtttgcaaatgttccgtattcttggttgccagatgaatgaacttccttcgcgtagcattgaagatgtagtcaccacataagggttacttacgacgagtc

SEQ ID NO: 21620 - DNA, 427 bp, Glycine max
  unsure (1)..(427): unsure at all n locations
  Clone ID: LIB3049-053-Q1-E1-B4
cgcgtccagggaaagaaaananaaaaaatcaaaagtggataatggcttcgttatcgctttgcatagccatgacagcacccactccctcagcttctctcattctcactgccccaaaaccatcttcgctctctttgaaccttacccgcacttgctccaacgctcgctctccgcttctccattgctccttcctctcttctccttcccttctctctcccccttcctccatttcagaagaggaaaaggttctggccttgttgtgagggcaggcaaggctgctctttgcctgactaagagaagcagatcaagaaaatcattggcacgcactcatggtttccgcaaaagaatgagcacaccaggtggaagagctgttttaaggcgacgacgcgccaagggacggagagtcctnatgcacaagacgcatccaaat

SEQ ID NO: 21621 - DNA, 96 bp, Glycine max
  Clone ID: LIB3049-053-Q1-E1-H4
taccggtctagaattccagggccgacccacgcgtccacccacgcatccgcccacgcgtccgcccacgcgtccgcccacgcgtccgcccacgcgtcc

SEQ ID NO: 21622 - DNA, 149 bp, Glycine max
  Clone ID: LIB3049-054-Q1-E1-A9
taccggtcgagaattcacgggtcaaccaagccttcgaacaggcgtcaatacggcaacgaaagggggaacttaaggggaagcttagagaaataacgtgcacttcttcaaaaggtgtgtaaattggtgttcctcagcatcggcattacagg

SEQ ID NO: 21623 - DNA, 372 bp, Glycine max
  Clone ID: LIB3049-054-Q1-E1-H11
cgtccaagctgcaaaaagacgaccgaaggggaactcaaaaaccacactaccatagcataacccttcgaaatcctcctttaacgctcctcgttcgcaacctcaacctttccctgtctctgaaaaagattaaagttgtccctgccttactgctcgccgttctcggtgggaacaagaacccctccaacgattacatccacggaatcctccgctccgttggaatagaagccgattaagatatgaatgaaaccttcctgtccgaagtttatggttatgagataattgaaccaattgctgccggttaagaaaaactgggctcggttccctccggtggccgttgttccgttgcccttgccgctgctcctggttgaagtt

SEQ ID NO: 21624 - DNA, 407 bp, Glycine max
  unsure (1)..(407): unsure at all n locations
  Clone ID: LIB3049-055-Q1-E1-C10
acgcgtcaagccaaacgtccggccaagccttcgcccaagccttcgtaacggtggcaaaaaaacaacaaaaggggaataaaaaagaaacaacagaaggtttgaagggtaaaccactcttaaattgaaaccatggtctcgtttcacaaagcgctggccgagaatactccaaagccaaaaattcatgcagaattcgaaacatcatcaaagaaaagaaagtgggaagagccattaaacgaaaggttcttcaaagatcaaatatagaaaaagaaatccgtctttgatatagaacttcaacctgagaaccctttttcttcagataaatggcgtcaatacctcactattcagtcanggcagatacagttgtgtaacacaagaacaacaacagagaaacccaaaaaaagctccga

SEQ ID NO: 21625 - DNA, 338 bp, Glycine max
  unsure (1)..(338): unsure at all n locations
  Clone ID: LIB3049-055-Q1-E1-G4
gcaaaaagacaacagaagggaattcaggaaatgttcaaaagggtgattgagcaattcactgcaatgtacaggcgcaaggccttcttgcactggtacactggtgaaggaatggacgaaatggagttcactgangcagagagcaacatgaacgatttggtggcagagtaccagcaatatcaggatgctactgctgatgaggatgagtacgatgaggacgaggttgaggagggggaacaagcttactaagaccagtaaatggttcatcactaccttgttttaattactaaatttcctgctagtagtcatgtatctatatatgtctgtctctacttttttcc

SEQ ID NO: 21626 - DNA, 439 bp, Glycine max
  Clone ID: LIB3049-056-Q1-E1-A9
attcccgggtcgaccaacccttcggacaagccttcgttacggcggcaaaagaacaataaatgggggtaccaggtccccaaaccatggctaaacccaccaggaaatttattggttgtgtttgaagacctaggtggaaacccaattggaacctttttggttaaaagggatatagatagtgaatgtgctgatatttataagtggcagccaaatcctataagctatcagatgcaaacgtcctggaaagcacctgttagaccataagttcatttatcatgtagctcgggacagaaaatctcatcaatcacatttgctagctttggtactccagcaggttcatgtggaaacttccatgaatgaagctgtcatgctcacaagtcgtatgatgcctttgaaacgaattgtgttggacagaactggtgcacagtaacagtgtcacctg

SEQ ID NO: 21627 - DNA, 560 bp, Glycine max
  Clone ID: LIB3049-003-Q1-E1-A4.F1
gcttatactcagctatcattgtagaatcaagagcatttgatctgttaataaacaatgaaatattctcacctacttttaaaaaaaaaaagaagaagaagaaaaaaaatccactttatcagtaacaccaccagacaactaaacattgaacaattaaacatatcgagatcgaattacgcatcagaaacaacgctaaggtcgtcgtcttccgccggagccggcaagtttgagatctatgaagctatgtttcaacttaacagaatcgttaacggttgaagacgaggaaggaattaggtgagatctcttgtgtccaccgagcgcttggccagagccaacaccttgtaacagaacggacattcgaaaaccttagtgctacggttgttgttgtaattattttggccttcctcgcggggacaacacacatttctgtggcttccgaacgcgcgagaagatcgaaaggatttgtgacatttgtggcagaggtggttccgcggacatttttcttgatctctgatccgcactgagcgcctcttaggtgtagctgcattggcgtgcttgtgttg

SEQ ID NO: 21628 - DNA, 433 bp, Glycine max
  Clone ID: LIB3049-003-Q1-E1-A4.F2
gcttatactcagctatcattgtagaatcaagagcatttgatctgttaataaacaatgaaatattctcacctacttttaaaaaaaaaaagagaagaagaaaaaaatccactttatcagtaacaccaccagacaactaaacattgaacaattaaacatatcgagatcgaattacgcatcagaaacaacgctaaggtcgtcgtcttccgccggagccggcaagttgagatctatgaagctatgtttcaacttaacagaatcgttaacggttgaagacgaggaaggaattaggtgagatctcttgtgtccaccgagcgcttggccagagccaaacaccttgtaacagaacggacattcgaaaaccttagtgctacggttgttgttgtaattattttggccttcctcgcggggacaacacacatttctgtggcttccg

SEQ ID NO: 21629 - DNA, 540 bp, Glycine max
  Clone ID: LIB3049-003-Q1-E1-E8.F2
atcaaaacgggggataaacatgcatcgtttagaggttttccccatacaagtcaatgaagggtagatacatgattaatacagaatctagaacgtggtcatagccaatttaacaagtatctaaattagacgaatagttacaatattttagtctcccaatattccaagtcactagagcaaagcacacaagtacaacaactgtggacattctcttctgctaccttatgccagcatcagtaccagcatacatcaagatttccaagtcaatattgcagcacaccctgcagacaataagcattatttaataactcccgagagtcgaaagaaacaaaacaaataatcaagtaagggtaagatggttaagggataagaaaagaggagaaagatcgtaggttccatcctctcggcaaacaaaaataacatttgtcgataaataaaaagtaaatcaaataagggtggtgcagcaacaccattgctttttacccaacatgttcaaaattgtctcagtagaagagatatgtgagttcattttgtatgacaagc

SEQ ID NO: 21630 - DNA, 534 bp, Glycine max
  Clone ID: LIB3049-006-Q1-E1-A5.F2
acagataaaaatatgtaagagatatataatagggttttatttaattaataattggagagggggttagaaatcatgaaacgtagtagagccagtaaaggaaagcaacagagaaggattgaactaaatgggtcctgcgtctcacagtggaattgatcatacacccggaaaagaagatttcactcagaattgaatacatcaatctcaaacatcaagaacaaaatgttgggcatttaaaaggcttaaataaataaaataaaataaaacaagacatgaaatggaagaagatcgagcgagctcaaagcaaagaaaaggaggttggtctacactctacagaggcagggctctcgtagaccataaactatgtaacaaaaatatcttaaaagagtgatgagaaagaaggaagaaagtggaaggggactctgtatgcttcaaccggagaatttatagaaccaaaaagccatgccagcaacttgatgaaaagaaaataagaagtctttttcaaatccaaaacgatcaacaaagaaacaagggaaa

SEQ ID NO: 21631 - DNA, 589 bp, Glycine max
  Clone ID: LIB3049-008-Q1-E1-H10.F1
ggacttcaatctattctctcaaatgtataactctactcccccaaaacttttacaattagcaaagagatgggattagatgaacaatgtgatatagagggacatcaaaagcaaatgttctaaaaatggtatgagattatctttattcacttcatatagctcgtaggaggattggtaatttacacataactcagcatcaatttgcagcttctctaacataggatacatctggatcaatgagggtatggattctatgtaaggtcgcactattactaatgatgaaaatgtagtagcaatcagtatacgagcagacactaaactaggcagcaaaggcggaaacatcttattctgctgagtgatttatcaacttgcattaaatgtcttctcatccttgggttactggtccccgaaagattgtacgaattggcgtatgtatgactgtttgacacgtggttaccaaagacccttgcatatatcatctcaccatagattccaaatgtgttgcccattgaaccagttgttctaatcataggtgaggtgtaccctatggaatcgagctgaagtgttgttgaggatgataaggtctactata

SEQ ID NO: 21632 - DNA, 618 bp, Glycine max
  Clone ID: LIB3049-010-Q1-E1-H5.F1
gggagcaaaacggtctctaccttctcaactatgtacatatagttttattttattgaattgcattatatattgtacagagacaaacagacagacccaaatgaaaggccacggaatccattcatttcacgagttccgatactcatccaatggaattctccctactaagcttcgcatatatccccgctctaatgtctctccccgattccaccctctccatcgcaggctcctcctcgcacccattcacactcataaacccgccacgtgggtacccgaacacgcaacgggtcagacccgaatacgacccttcctcatccagtttaactattccgcggacgaagctgtacggcgaagaatcggagaacgaagagttaatgagcaccgaagtgggagaggaaacaaacgacgacgacgatgaatccgtcacgacgcggagttggtcgctggtgtgggcgagaagcacactctgcggcggcaatttgttccgtctttgcagagctgggtccggtagcgagaagggtggaccagcattcgaaacgccgtggcgaactgacacgtgtcgccctctttgagttcccttcccggtaatcgggcaggaggtgctgagtagtgtactgcggg

SEQ ID NO: 21633 - DNA, 508 bp, Glycine max
  Clone ID: LIB3049-010-Q1-E1-H5.F2
gggagcaaaacggtctctaccttctcaactatgtacatatagttttattttattgaattgcattatatattgtacagagacaaacagacagacccaaatgaaaggccacggaatccattcatttcacgagttccgatactcatccaatggaattctccctactaagcttcgcatatatccccgctctaatgtctctccccgattccaccctctccatcgcaggctcctcctcgcacccattcacactcataaacccgccacgtggcgacccgaacacgcaacgggtcagacccgaatacgacccttcctcatccagtttaactattccgcggacgaagctgtacggcgaagaatcggagaacgaagagttaatgagcaccgaagtgggagaggaaacaaacgacgacgacgatgaatccgtcacgacgcggagttggtcgctggtgtgggcgaagaacacactctgcggcggcaatttgttccgtctttgcagagctgggtcccgtag

SEQ ID NO: 21634 - DNA, 586 bp, Glycine max
  Clone ID: LIB3049-012-Q1-E1-A7.F1
caaactgtatcaacattctttttcatttgatttttagttgtacttgcttgaagcaacttttaaaaaacaccatcatctactgcaactaaagtttagcattaacacatcagttggacatcaaacaaacaaaaataaaaaactaaagccattagcaaatattctttcccccctctctctctgttgaggttggtgtagatggttgatttggtcatttcactaaaatctcgtgtccccagatgaacctgatcaacagcaaagggaagcctcttcttcaattcttgcaagcaaatgatggactgccgttgcaataccatctactgaaccaagttggaatccttcttcaaccttagcactgaaggaatagaacaccaaagggtctatggtggtgacattaagatgtaggacggtgaggcacagcgtttgaaaaccagctactaactttgttagctgcccgtggtgcttctcctggtgagaattcgagatttgcatgggtctcgattaaagtaacctcgatatcagctatggcagcttttggtcttggatgtgtatttgttaggagtctgggaccatgtgtactgtggatacg

SEQ ID NO: 21635 - DNA, 468 bp, Glycine max
  Clone ID: LIB3049-012-Q1-E1-A7.F2
caaactgtatcaacattctttttcatttgatttttagttgtacttgcttgaagcaacttttaaaaaacaccatcatctactgcaactaaagtttagcattaacacatcagttggacatcaaacaaacaaaaataaaaaactaaagccattagcaaatattctttcccccctctctctctgttgaggttggtgtagatggttgatttggtcatttcactaaaatctcgtgtccccagatgaacctgatcaacagcaaagggaagcctcttcttcaattcttgcaagcaaatgatggactgccgttgcaataccatctactgaaccaagttggaatccttcttcaaccttagcactgaaggaatagaacaccaaagggtctatggtggtgacattaagatgtaggacggtgaggcacagcgtttgaaaaccagctactaactttgttagctgcccgtggctgcttctcct

SEQ ID NO: 21636 - DNA, 572 bp, Glycine max
  Clone ID: LIB3049-013-Q1-E1-F4.F1
cttccgctgcctaatatcaattccagcagccttcaattctctcttcttttgtaaagaagcaagcctcctggcttcctcaagctgtttctccctagctttcctttttgctttcttgccctttgtgttggctaaccgggctcgtgcttcagaaagcatctccttttcatcttcatccatatcaacaggatcggggcgtgcaggttttgactcagggtttggatcaatctccccaggacgcagtttccgaggatcatcaccgggctcatagttctcatccttcacacaggctacatcaaggagcttctcgtaccgctcaagacactgggaaggagtacggccaacaattggagcaattgttctccactgtgtggcataagcttagcaagatgaagtagcttctcatcctcttctctcgtccactcagtcttttttatggagggatcgagccactcataccagcgagctttgcattgcttggcagatttgcgaacaggagagaagagattcgagcccactggttcttgccatatttcataacagctgcttttaggatttcatcttcggtgtttttt

SEQ ID NO: 21637 - DNA, 480 bp, Glycine max
  Clone ID: LIB3049-013-Q1-E1-F4.F2
cttccgctgcctaatatcaattccagcagccttcaattctctcttcttttgtaaagaagcaagcctcctggcttcctcaagctgtttctccctagctttcctttttgctttcttgccctttgtgttggctaaccgggctcgtgcttcaaaaagcatctccttttcatcttcatccatatcaacaggatcggggcgtgcaggttttgactcagggtttggatcaatctccccaggacgcagtttccgaggatcatcaccgggctcatagttctcatccttcacacaggctacatcaaggagcttctcgtaccgctcaagacactgggaaggagtacggccaacaattggagcaattgttctccactgtgtgggcataagcttagcaagatgaagtagcttctcatcctcttctctcgtccactcagtcttttttatggagggatcgagccactcataccagcgagctttgcattgcttggc

SEQ ID NO: 21638 - DNA, 614 bp, Glycine max
  Clone ID: LIB3049-013-Q1-E1-H3.F1
gggaaatcaaagtaatgatgatggagttaagtagaattatacttaaaaacacaaacttgagatcagggtaattaaaataaaataatcttatattaattgattacgatgttacctagagtaacaatttagttgagaatctaggcacaatagagcataaattataagctatgattgtagcatcaaaagcatctgatctaacaatgaaccgcaatgaaatatcgttacctactataaaaaaagaaaaggactttacccaattgctgcagagaagaacaagtaattatcaggcatcagaaacaacactaaggtcgtcatcttcgggcggcgtggcaagttgagatctatgaagctctctttcaatctaacagaatcattattagcggttgtggaagaagaaggcatgaggtgagatctcttgtggccaccaagtgcttgaccagacccaaacaccttggaacaaaaggggcattggaagattttactatcgttacccgaaccttcgcaaatgcttctgtgactgccaatgcgcgtgaagatcgaaacgtcttcccgcagctctgacactggtgcttcccgcgaactctcctcaactttatctctagtactgatctccc

SEQ ID NO: 21639 - DNA, 533 bp, Glycine max
  Clone ID: LIB3049-013-Q1-E1-H3.F2
gggaaatcaaataatgatgatggagttaagtagaattatacttaaaaacacaaacttgagatcagggtaattaaaataaaataatcttatattaattgattacgatgttacctagagtaacaatttagttgagaatctaggcacaatagagcataaattataagctatgattgtagcatcaaaagcatctgatctaacaatgaaccgcaatgaaatatcgttacctactataaaaaaagaaaaggactttacccaattgctgcagagaagaacaagtaattatcaggcatcagaaacaacactaaggtcgtcatcttcgggcggagctggcaagttgagatctatgaagctctctttcaatctaacagaatcattattagcggttgtggaagaagaaggcatgaggtgagatctcttgtggccaccaagtgcttgaccagacccaaacaccttggaacaaaaggggcattggaagattttactatcgttacccgaaccttcgcaaatgcttctgtgactgcccaatgcgcgtg

SEQ ID NO: 21640 - DNA, 500 bp, Glycine max
  Clone ID: LIB3049-022-Q1-E1-B12.F2
ggtcgcaagaatcatcataatagaaatgcaggataaagggggaaatacaaatttatgaggtgggagttaagtataatttgtatgctcggtggatctgatatcgagcacgatccctttcagaattactaagactgccataaaatatgtacacatcaactttacagaaaaacaggtgattccccgatcttcccttgtatgattacaaggaatgcttccgtttagtccttcccacaaatgtgtcaataaaacggaatgcatacccttctaatacaagtaaatgcaagaaatgctcatccactgtacagtttactctcataaggaatgtacaatgctaacaaaactagcccccgccagagcaaaaagcctatctttacattttgccatattctcaaataaaacttccccacgagaaaaatagcatggcattcaatattatggatgtcagcctcgaaggaaaaataaagaaccaggctgagatccaacactctacctatcatgct

SEQ ID NO: 21641 - DNA, 163 bp, Glycine max
  Clone ID: LIB3049-032-Q1-E1-B4.F1
tatagggtgttttttttttttttttttttttttttttttgcttatttatttattatttattagctttattagggtttagtttattttaggtttatatttttagtttattatactatatgggtctatttagtaggttttttagtagttagttattatttatttt

SEQ ID NO: 21642 - DNA, 476 bp, Glycine max
  Clone ID: LIB3049-032-Q1-E1-B4.F2
gctaacaaataaagaatcaatgatctttataagggaaaagtcaatgaaatttttacacaaaaatgaaagaatactacatgtgtccagaaagaggtaaaaaagagttagtcagaacaaagaaaaagaagctgaggtggtgatttcatagttgattccaagcacagagtcattatctacaggtgtaactccaagtccaagcacataaccctggtgctattcgaccttttcaaaaccgggattttcgcaataacttggtcgatagaaggaataataggaaacccttcgttgagggaagctctgtgttttctcatgtggccacccagagcctggcccagagagaattcaaggccacaaatggagcactcgtgcattttgggtttgttccacaagctaagacttttggcctgttctttcagttcttccccctccagcttctgcctcttgtggcttgccctgtgccctcccagtgcttgaaa

SEQ ID NO: 21643 - DNA, 92 bp, Glycine max
  Clone ID: LIB3049-032-Q1-E1-G12.F1
aggggtgttgagtgttggtcggatgtgggagtatgtgtgtgtcgcttgtgtttataggtggctggtttgtgtcttggtttggttattttgtg

SEQ ID NO: 21644 - DNA, 416 bp, Glycine max
  Clone ID: LIB3049-032-Q1-E1-G12.F2
aggcaacattaatattagtcaaatgtgaaaaatatatgtatatacacacacacaaacaggaagctagtttgtgtcttagtttagttattttgtggcagcaagcaacaattacaaggctcagatgataaacataacaaataatgaatcccctaaactattttttttctgcacaatctacaaagaaaacaagtaactaacaaggaagcagatcatctccaaagagatagaggagtctctccacagcccaactaggctgaggaggaggcagacacgtggcagagctgtggtggcaagaagaactgagcaaaggagccctgcagataggacacgtggcgctgtgattctcgtgttcgtgttccaaccatctgtctatgcactctctgtggaacacgtggtagcagttcatgagctcccta

SEQ ID NO: 21645 - DNA, 590 bp, Glycine max
  unsure (1)..(590): unsure at all n locations
  Clone ID: LIB3049-034-Q1-E1-F3.F1
ggaagacaaaatatagttttcttctgagaaacttctacgaaaaaagtcccaaacggttaacgacgtacatttgacacgcgcgtctccgtgcttacagactctgattctctacgacgcccctaacttaacctaacgtgttacctagctattacaacgtcgtgggtcaattgcaaccctctgatttgctctatgacattgatttagccacggcgtttttttattttcgccacgtcctggtaaatccaacgcttcagatttgacgtccgcatgagacggctgatggagactcaaagccgtatcatacttggctccatgtccttgctggtctctgggtcgcttcttgccaatcgccagcccaaagagcttcggattgatctcctccagcggatcctcgccggagcaccgcttcggcgcggccgggaactaccgtccgcttggaggtgtgannattcggcatgagattgaatatattgtggcaggggatctcatcttcaccaattccttcgtcaacaggaatgtctcctttctgaggggctcgttctcgtgtaacagctcgcacggtgctctcgcgggggagggtttggggaaag

SEQ ID NO: 21646 - DNA, 489 bp, Glycine max
  Clone ID: LIB3049-034-Q1-E1-F3.F2
ggaacaacaaaatatagttttcttctgagaaacttctacgaaaaagtcccaaacggttaacgacgtacatttgacacgcgcgtctccgtgcttacagactctgattctctacgacgcccctaacttaacctaacgtgttacctagctattacaacgtcgtgtgtcaattacacaccctctgatttgctctatgacattgatttagccacggcgtttttttattttcgccacgtcctggtaaatccaacgcttcagatttcacgtccgcatgaaacggctgatgcagactcaaagccgtatcatacttcgctccatgtccttcctcctctctcgctcgcttcttaccaatcgccaccccaaacagcttcggattcatctcctccaccgcatcctcgccggagcaccgcttcgccgccgccgcggaactaccgtccgcttgagcgttagcgtaattcgacatgagattgaatatattgttgcagagcgatc

SEQ ID NO: 21647 - DNA, 275 bp, Glycine max
  Clone ID: LIB3049-034-Q1-E1-G9.F2
agggcacaaaatagttctttcatccttataattaagctgttttcatcttcatcaaagcattaaaaaaccacatggcctactcgacgacatgttattttattatgatctgcggagcagaacacacacggcccaaaatcgtgccaataatgtttgaggaaaaaaaatattaacctaggccggaggaagaacatccatcacctgttaccttgacattattgtaaaaaatcttggaaataagacatatgcttcataacaatgggctgtgtctgggccat

SEQ ID NO: 21648 - DNA, 487 bp, Glycine max
  Clone ID: LIB3049-043-Q1-E1-A1.F2
caaataaaattggaacggcaaatgtgctggtgcagtggatcttatgcaggaaacgcaaactatggtaaccatcctgccatgtaattgctcatgcttgggcctgctgtcaccactgatactggatcaggctgatacccaatttgtaacgttggctcacactccatttgttgaaagagggcttcaccatgagtttgagctggatgcctgccatatcccatctcttcaactccgggattcagttggagtggatttatttgatacccttccaacctttgtctgagagacctgttagcctcacttagcaagtgttccttacgttgaagatcagagagctgatccaacatgaactgggtcctggttgatcttatttgcttcaaggacgaatctagctgcctttcaagagactcgagctctttgctgcttaaaggaccaagatcttctcccataaggttcctctgggaccgttgtagggcctcataacgtgcct

SEQ ID NO: 21649 - DNA, 482 bp, Glycine max
  Clone ID: LIB3049-044-Q1-E1-E12.F1
cctctgggcgccgcttttttttttttttttttttttttttttttgggagagggagccgagttgccgacttgtctgtggattgtgattgctttgatgagatggggatagagagagagcattttcgaggctccgagagagttgagctgcctcgagcgagagagtgcttggggtggtgcaggggggagagagccggggttttgggaccgagacgtttctttctccctgttcgtcaaccggtgctggtgagattgagtcggatgggcgaggtgaacggcggcaggggtggcacttggccttgtcaggagtgtgttttcctcgaggcccccaggaggatggggccttttgtggccccccaaggcttggctgacctggagatcttgttggggttgggagctcgtgtgccttgcttttctttggcttgaatttcttcttcttcttccccttgctgggacttgggttgttcctgttgctgttgacctttg

SEQ ID NO: 21650 - DNA, 523 bp, Glycine max
  Clone ID: LIB3049-044-Q1-E1-E12.F2
gggaacaaaaaccaattacccacttgtctgtacattgtcattgctttcatcatatggggataaagacaagacattttcagaactccagagacattcagctacctcaacagaagatgcttcaaaatgatgcaaaaaaaaaaaaccaggattttggcaccaacatttctttctccctattcatcaaccggtgctggtagattgagatcaatgaggcaaggaacagcagcaggaggagcacttggccttatcacaagtgtgttttcctcagaacccccaacaaaatgggaccttttgtgaccccccaaggcttggcctgacctgaaaatcttgttgcaaattggacactcatgtgccttgcttttctttgacttcaatttcttcttcttcttccccttctggacactgaggttgttcctgttgctgtgagcctttggagcaggataagaatcagtgtcagtgctgttctcatcactcccataagcagaatcatcagaacaaccattgtacatttcattagtcccct

SEQ ID NO: 21651 - DNA, 559 bp, Glycine max
  Clone ID: LIB3049-048-Q1-E1-G9.F2
ggaaagcccccaatgcgtattaataataaatcataatatttcctcttgccagcaagaatgtcttacaacataaggtatgcaacacccttgactcattggaacatcatcttagaacttttgataagtaataataaaacttaaactcttccatctccaaggtttgctccataccttaagaaatgtttcaaataacgagtgtcctttagttaataataatacatcacatgacacccaagtcaataatcctgacttcttccacaacatatgcctttgcttttcaaacattggacgataaagccatttgaggttaaccttatacaagaacatcgcaaagcaaggcttagtgagacattgtatgcagccaccacctaatattcaaacattcatcccttgcaaagccccactgtttagaagcttcatcccctcttcactcatctgctgaacttctgaaggtgataaaattcttatgcagcggacacagcccacaaatttttcccaggatcatcaccaacaagtagaacatcactctcattatctacatagaccaatttccatcctg

SEQ ID NO: 21652 - DNA, 465 bp, Glycine max
  unsure (1)..(465): unsure at all n locations
  Clone ID: LIB3049-049-Q1-E1-B9.F2
accaacacgggaatcttcctctcacagaattaagatcatattaccatnatcttacatctgatcatcattttaaatatatatttcttctgcatagcaataacaaaaaaatcaagtaaaaaaatgagaaattaaaaatcatcatcgcacgataatcatcatcagagacaaagcgcggtgcggcgtagatcatcatccgcggcagcatcatcaaacggcagcgcgttgagatcaaacggcaagggaggtcgaaacgacgacgaaacgatgttgtcgtcgccgtcgtcaacgacggaggaggaagagtcgcagtcactgtggcagtcttcagggacaagagggggagtgcgcgggtatctccgcgtagcagtcaaaaacggcgtcacanttgtggttgtggtggtagtggtggtggtnngnaaanncnnnncccacctgaggactcaacggtgctactcatgccacttg

SEQ ID NO: 21653 - DNA, 509 bp, Glycine max
  unsure (1)..(509): unsure at all n locations
  Clone ID: LIB3049-050-Q1-E1-F6.F2
cgtcactcaatgtaaacttataataacaaataaagtacagtctttctgtttttcatagcacgctcttgccaaacactatataagcttagctaattctctacctggatagaaactagagaggttgcaagcaaagttgggtttaacaggtccaattaatacaaattaaagcataaataacaagtgcttagtgctggctagctagttaatttacattattgctagttaattgttgcactggatcaagcaaggcgaaggtcatgatcagttttaaagggttgctcttctccattagaatggtgggagaaaaggttcaaatgagaatggtgctgatgacagaatgcatacagggtggaggcaccgttggccagtgcaactgctgctgctgctgctgctgctgctgattcctcgtctccttcatcgngcaaaagaaattgtggatggatcacacacttttcaagttcaagcagcagatttccattcatctgcttcaggcttttaacctttttcct

SEQ ID NO: 21654 - DNA, 535 bp, Glycine max
  Clone ID: LIB3049-050-Q1-E1-F6.R2
gaattaaagggagggtaccagctgtcaaatagtgctttccacacactttcaccaatttataaattatttgcagttacactccaagtctactttttctttggcagcttagccttcctattttggaaaccctcttcactgctctcccaccttttttgtgtgtatgtgtatgagcttctcttctactctattcactgcactcttattaataaatatcagtgcttggaaagcagaagagaagatccatagctaagatagatctcgagatgggtcgtggcaagattgagataaagttgattgagaaccccaccaacaggcaagtcacctactccaagcgaaggaatggtatcttcaagaaagctcatgaactcagtgttctctgtgatgccaaggtttcactcatcatgttctctaaaaacaacaagatgcatgaatacattagccctggcctcacgacaaaaaagatcattgatcagtatcagaagactttgggggatatttgatctgtggcattctcactatgagaaaatgcttgaaa

SEQ ID NO: 21655 - DNA, 54 bp, Glycine max
  Clone ID: LIB3049-006-Q1-E1-A5.R1
gcctgccgtccggtcgacttccgggtcgaccacgcgtccgcccacgcatccgcc

SEQ ID NO: 21656 - DNA, 367 bp, Glycine max
  Clone ID: LIB3049-010-Q1-E1-H5.R1
cacgcgtccggggaacactaaacgatgatcccaaacgttcaaatccctacctgggacgcggacggaggaggagcactctccccgtcgatctcttccaatgctgacacgtgctcattattctcctccgaccatttccgaatgttccagttcaaggtgcggaactgtccacgtggcaggtcccacgactggaccgagtgtccctacgcccaccccgccgagaaggctcgccgccgtgaacccccgcaagtaccactactcaggcacctcctgccccgattaccggaaggggaactgcaagaggggcgacacgtgtcaattcgcgcacggcgtcttcgaatgctggctccacccttctcgctaccggacc

SEQ ID NO: 21657 - DNA, 510 bp, Glycine max
  Clone ID: LIB3049-010-Q1-E1-H5.R2
ccagcgtccggggaaccactaaacgatgatcccaaacgttcaaatccctacctgggacgcggacggaggaggagcactctccccgtcgatctcttccaatgctgacacgtgctcattattctcctccgaccatttccgaatgttccagttcaaggtgcggaactgtccacgtggcaggtcccacgactggaccgagtgtccctacgcccaccccgccgagaaggctcgccgccgtgacccccgcaagtaccactactcaggcacctcctgccccgattaccggaaggggaactgcaagaggggcgacacgtgtcagttcgcgcacggcgtcttcgaatgctggctccacccttctcgctaccggacccagctctgcaaagacggaacaaattgccgccgcagagtgtgcttcttcgcccacaccagcgaccaactccgcgtggtgacggattcatcgtcgtcgtcgtttgtttcctctcccacttcggtgctcattaactcttcgttctc

SEQ ID NO: 21658 - DNA, 449 bp, Glycine max
  Clone ID: LIB3049-028-Q1-E1-B7.R2
ccagcgtccgcgggcgcgtgggccatacaccttgcaagcagtcaggcaagggtttcaggatatcggtgcctcctctctacagtctgctcatgaccttctaagatccagggagttaagactggaggtccggagtggagcagcacaggttgaaggtggagttcatgggctggtttcttatgaaaagaaatacttttgaagtatgaaaccatccaaaatcataagcggtgctataatcccttgctgcagttcagcataaaagaagggaacacactgttattggttagtggcaacttgttgctactctgtcaagcgaattgaagtttataccaatagaacatcgtgggaattttcttccctgaggttctgaaggaagaacactgatttcgtggtttttttttgttttttttcatctccattagactttgtcaaatgtgtcatagactttccgg

SEQ ID NO: 21659 - DNA, 87 bp, Glycine max
  Clone ID: LIB3049-034-Q1-E1-G9.R1
aggataccgtaacagctgcgaaagggcgaacatataggggtcgtaacgatgatgaccgccccatttatgctgctccgccaggaacgc

SEQ ID NO: 21660 - DNA, 527 bp, Glycine max
  Clone ID: LIB3049-044-Q1-E1-E12.R1
ccacacatccgcccaaacataccgcccacgataccgcccacggtaccgatacaactgacaaaaagacgacagaaggggaactaatgaaattaacaatggttgttctgatgattctgcttaagggaatgatgagaacagcactgaacactgaattctataacctaactccaaaaagctcaacagcaacaggaaacaacctcaaagtccaaaagggaaaaaaaaaagaaaaattgaaatcaaagaaaaacaaagccatgaaagaccaatttgcaacaagattttcaagacaagccaaacctagagagggatcaaaaaaagtccatttaaaataaagggttcataaaaaaaacacaaaatgtgaaaaaaaaccaaaagaaaccaacaaaaatacatagatcctataccatcaaaagaataaaaaaaataaaaaaaaacgatataaataaaaagaaagaaaaaaaaaataaaaaaagcaaaaaataaagaaaaaaattattaaaataacaaaaaaaatatgaagaatcaat

SEQ ID NO: 21661 - DNA, 400 bp, Glycine max
  Clone ID: LIB3049-048-Q1-E1-G9.R2
cgaagtccattcactattttctacaatccaagagcatgcccctcagaatttgttattcctctggccaaatacagaaaatctgtatttgggactcaggtctcagttggcatgagatttggcatgatgtttgagacagaagaatcgggtaagcgcagatatatgggtacaatagttggtatcagtgatgtggatcctttaaggtggcctggttctaaatggcgaaatattcaggtggagtgggatgagccagggtgtggtgataagcagaacagagttagtgtgtgggagattgagactcctgaaagcctttttatctttccttctttgacttcaggtctaaaacggccattaccatctggtcttttggaaaatgagtggggaactttgttaagaagaccct

SEQ ID NO: 21662 - DNA, 106 bp, Glycine max
  Clone ID: LIB3049-049-Q1-E1-B9.R1
aggtagttgaaggagcagaagaagaagaagcgaaggtggtaccgcccttcaattctctttcctctctctccacttctcatcctcatcatcttactattccccctcc

SEQ ID NO: 21663 - DNA, 298 bp, Glycine max
  unsure (1)..(298): unsure at all n locations
  Clone ID: LIB3049-007-Q1-E1-B3.R4
ggtttatgctctcagnagcaaggaagaacttctacggatttggaggctagtttgtttttttttttttttttaatttttattgttaggtttcgtttgttttggaggtttatgtgggatgtaagagacccttgctattagggagatagggaaaaaaatgcaaggatttggtgtagtaagttgctggtggtgttttaggtataagggtttctataacatgtaatgtattgagctatattgctgccaagcttgtaattgtatcacaatatgttgctaatgtcagattcttgtttttctgtcc

SEQ ID NO: 21664 - DNA, 74 bp, Glycine max
  Clone ID: LIB3049-029-Q1-E1-D2.F3
caacagcaacagcttcttaccatttgtagtgtgcctaacggaaatatttgaataattagattcactttggcgcg

SEQ ID NO: 21665 - DNA, 342 bp, Glycine max
  Clone ID: LIB3049-029-Q1-E1-G6.R4
ggcggttaaaagcccgcgaagaagtcgggccgaagaaaacgaagaaagtgtcgacgcctgcgaagcccaagcagcccaggtccattaggtctccgaccaagagggcccgtaaagctgccgtcgctgcggcttgatgtttgatgtttttcttgtttagttaaaactctggcatataatatatgtagatatgaaaaggtgtgtgttaaccttgttgcacaatcttgaatatagttgtgtggtttaggatcgtagatagtttagtgttctgcaatgttcgctctaagaagtgatcaattggagatgaattttactgttagaaaaaaaaaaaaaacacggaatatt

SEQ ID NO: 21666 - DNA, 510 bp, Glycine max
  unsure (1)..(510): unsure at all n locations
  Clone ID: LIB3049-030-Q1-E1-E8.R3
gttcgtgaaattgcccagnatttcaagactgatctgcgtttccagagccatgctgtgcttgcattgcaagaggctgctgaggcataccttgttgggctctttgaggacactaacttgtgtgccattcacgccaagcgtgtgactattatgcccaaggatattcagctggcaagaaggattcgtggtgagcgtgcttgagttggtgcgttctgtgtttgtgaagatggattgttggtggctgcggatggtgttttgttactaagttttctttttgttgaagcctataggttattagggaaaaataggtgtttacttggtagtcatattaattgtcattggcaaatactgcctaagacactgtgaaggtctggttgttagaaatttggcatgtatttgatttttttggatcctttatttctcgttttatttctggttgtgcagccactttgggaattgtattggacaactttctgttgccatctaatctagttgaagctagcttatcgtgct

SEQ ID NO: 21667 - DNA, 623 bp, Glycine max
  unsure (1)..(623): unsure at all n locations
  Clone ID: LIB3049-032-Q1-E1-G12.F4
ggtcttgtgcttgatcttcanagtgatcaacgacaggagnaacaacacaatccgacgagaccccacaccagaaccatgttctcagatgacaagggacaaggacagcattcttttgctgacgactttcggagagattaaggagaggcttccagagacagaggagacgtgtgcggtgtgcctgagccagctgagcgtggaggacgaggttagggagctcatgaactgctaccacgtgttccacagagagtgcatagacagatggttggaacacgaacacgagaatcacagcgccacgtgtcctatctgcagggctcctttgctcagttcttcttgccaccacagctctgccacgtgtctgcctcctcctcagcctagttgggctgtggagagactcctctatctctttggagatgatctgcttccttgttagttacttgttttctttgtagattgtgcagaaaaaaaatagtttaggggattcattatttgttatgtttatcatctgagccttgtaattgttgcttgctgccacaaaataactaaactaagacacaaactagcttcctgtttgtgtgtgtgtatatacatatatttttcacatttgactaatattaatgttgcct

SEQ ID NO: 21668 - DNA, 137 bp, Glycine max
  Clone ID: LIB3049-032-Q1-E1-G12.R3
ttgttatgtttatcatctgagccttgtaattgttgcttgctgccacaaaataactaaactaagacacaaactagcttcctgtttgtgtgtgtgtatatacatatatttttcacatttgactaatattaatgttgcct

SEQ ID NO: 21669 - DNA, 99 bp, Glycine max
  Clone ID: LIB3049-034-Q1-E1-F3.R4
ttgggtattaccaggttcgtggtcggacaaataaaaaacgccgtggctgaatcatgtcatagagcaaatcagtagggtgtgtgaattagacacacggac

SEQ ID NO: 21670 - DNA, 171 bp, Glycine max
  Clone ID: LIB3049-047-Q1-E1-G5.F3
ggccttggtggcgagctgcttacgtggcgccttgccaccggtggacttgcgagcggtttgcttcgtcgagccatatcgaatgagaacgtatgaagaagtgaaagtgttatttttttctcgggaaagtgaaggaaaagaaaatttgaaactgcccccttctcggacgcgtgg

SEQ ID NO: 21671 - DNA, 454 bp, Glycine max
  unsure (1)..(454): unsure at all n locations
  Clone ID: LIB3049-047-Q1-E1-G5.R4
accgagcttctcatcaggaagcttccatttcagaggctcgtgagagaaatcgcgcaggatttcaagaccgatttgcgtttccagagcagcgctgtttccgcgcttcaggaggctgctgaggcttacctcgttgggttgttcgaggacactaacctctgcgcgattcatgctaagagggttaccattatgcccaaggatatccagcttgcacgcaggatcagaggcgagagggcttagaaacaaggttgagaggtttgggtgttaggtgcttagggttagggttctggtcttgaaggatgtgtttgggagtttggttgtaggaatcctntccatctgtgtgtttatgtggaatgtgaaatgtgaatctctttgcttttgtaattatattgtgttactatgaggagttaatgaaaatgctatggttatcaaaccggaagagtacgccagaaaccag

SEQ ID NO: 21672 - DNA, 551 bp, Glycine max
  unsure (1)..(551): unsure at all n locations
  Clone ID: LIB3049-056-Q1-E1-B10.R3
tgttggggcaacagctgcagtgtacttagcctcaattctagnatatctgactgctngagttcttgaacttgctgggaatgcaagcaaggatctgaaggtgaagaggatcacaccaaggcatttgcagctggctatcaggggagatgaggagctggacactcttatcaaagggaccattgctggtggtggtgtcattcctcacattcacaagtccttgatcaacaaaaccgccaaggattgagctctctttggccttctgaattcatgttgccctttactgaaaactaagtttgtggttattgtgaattgatcacagcagtaggctagtacgaggatttgttttaacagttttagaactcaggtggtagtgtgtaaatggcttgcttgctagacaatgctttctttaactgttttagttggtctgtttttagagctttaaccatgttggattgctagacaatgcttgcttttagatacaatctgtgatctgttgttgtctttgttgcccattgaccccttcatatatggttgttttattttaatctttgcaa

SEQ ID NO: 21673 - DNA, 312 bp, Glycine max
  Clone ID: LIB3049-056-Q1-E1-E1.R3
ctgttgccaagcccaggccaaagctgcggccacgactgccaagcccaagtctaagcccgctaaggtcgcggccaagaaggtcgctgctaagccagctaagaagaagaccccgtaaaggccgtgaagaagcccaagagtgtcgtgaagaaacctaagagcgtgaaatcaccagcgaagaagactaaggctaaggctaagaagtgatgatttggattggggtttggcttcggcctggcgttatagttttatgcattccgggttcattcgtagtagtataggtgaatatatttttagaagagtattgatgtaaat

SEQ ID NO: 21674 - DNA, 302 bp, Glycine max
  Clone ID: LIB3049-056-Q1-E1-G12.R4
ctcactatcgcgcgcctagctgctaagagacacagctgatcctagccacaggcctgctgcgacctcccgacacaccaagcccgtcaaggcttaacagggcttctacacgaacgtgtctcctgcgtgagaaagcagctcctgctgctaagcccgcggcgaagaaagttgcggtggcagcgaagaaacgccagtgaagagtgtgaaaccgaagagtgtaaagtctccggccaaaaaggctacggccaagagagggggtaggaagtgagaaagagtggtcggtggggtagggttgttttggggtt

SEQ ID NO: 21675 - DNA, 649 bp, Glycine max
  unsure (1)..(649): unsure at all n locations
  Clone ID: LIB3049-012-Q1-E1-A7.R4
ttgcgcatggggncccgaagcgtgagccgcgaccataagcttggccggnggcagaattcggtggcagtgcaaggggaggaagaagaggagaaggaagccagggtttgcaaaaacacggaagaggctgagacacaaaggatcacacacattacagtgngaaagaaaccgccggaagcagatgaatgagcatcttgctgtccttcgttcactcatgccggagtcctacgtccaaaggggtgaccaggcctctatagtgggtggtgccatagagtttgtaaaagagctggagcacctcttgcaatcacttgaagctagaaagctgcaacttttgcaccaagaagtggcacaaaccaatgaaaatacggccatttccaaactcatgcaacctccttttgcacattgtttttcgtatccacagtacacatggtcccagactcctaacaaatacacatccaagaccaaagctgccatagctgatatcgaggttactttaatcgagacccatgcaaatcttcgaattctcaccaggagaagcagccacgggcagctaacaaagttagtagctggttttcaaacgctgtgcctcaccgtcctacatcttaatgtcaccaccatagaccctttggtgttctattccttcagtgctaag

SEQ ID NO: 21676 - DNA, 444 bp, Glycine max
  unsure (1)..(444): unsure at all n locations
  Clone ID: LIB3049-003-Q1-E1-A4.F3
tgtgncatttgtggcagggtggttcccgcggccatttttcttgatctctgatccgctactgcagcgcctcttaggtgtagctgcattggcgtgcttgtgttgctgccacgtgtcgcgggagagcatcatgaggcacatggcgacgtcttcttcgggggaggtgtcggagacggagctgagaggctcgggttcggggtggggtggcggtgtgagcttcggcatggtggatttccggttgcgcttggatcgttggcgagtggggtttctagactctgtttcgctctctctgtcttcaggatccgcaaccctgaagctcttcttaggattctcccttaaagcataattaagagattcttgttcttgttcttgttctgagtcagaggaagaggaataagagtgaggctttggagggagagggagagtagcaaggtgagccttcatgtg

SEQ ID NO: 21677 - DNA, 382 bp, Glycine max
  Clone ID: LIB3049-003-Q1-E1-A4.R4
acaacaacacccgtagcactaagttttcgatgtccgttctgttacaggtgtttggctctggccaagcgctcggtggacacaagagatctcacctaattccttcctcgtcttcaaccgttaacgattctgttaagttgaaacatagcttcatagatctcaacttgccggctccggcggaagacgacgaccttagcgttgtttctgatgcgtaattcgatctcgatatgtttaattgttcaatgtttagttgtctggtggtgttactgataaagtggattttttttcttcttcttctttttttttttaagagtaggtgagaatatttcattgtttattaacagatcaaatgctcttgattctacaatgatagctgagtataagc

SEQ ID NO: 21678 - DNA, 543 bp, Glycine max
  Clone ID: LIB3049-003-Q1-E1-A4.TA
ttggttttgttattaaaaaaaaaaaattttccccccctttttaaaaaaaaagggggaggaggaaaaaaaaatcccttttttttttaaaccccccccccacttaaaatttgacaatttaaaattttttggggggaatttcccttaaaaaaaaaccccaaggggggggttttcccccgggcccggcaggggggaatttttaaaatttttttgaaattaaaaaaaaacgttaccggtggagaacaaggaaggaatttggggggatttttttttttcccccacgcctgggcccaggccaaaacccttttttaaaaaggggcttttaaaaaccttatggttcgggggggggggggaatatttttggccttcccccggggggcaaaaaaaattttttgggttttccaccccccccaaaaaaaaaaagggtttgggccttttttggggaggggggggcccccggccctttttttttttttttattccccacccgggcgcccctttaatggaagcgcctttgggggcctttgtttgttgccccccgcccgg

SEQ ID NO: 21679 - DNA, 632 bp, Glycine max
  Clone ID: LIB3049-007-Q1-E1-B3.TA
tgggtcaaataccaacctgggggggaaaaaaattaaaacaattacaatttttttaaaaaccctttttcctaaaaaaccccccccacctaattaacccaaaaccttgcaattttttttcttttttccctaaaaaaaaggggggttttattccccctaaaacctccaaaaaaaacaaaacctaacattaaaaattaaaaaaaaaaaaaaaaaaactttccccccaaaacccaaaggggggtttcttttttttttggaagaaaaaacaaaaacaattgcgggaaggggtttttttttaacggccccagggaaggaaaaggggccccaaaaaaatttttccaaaaaaaatttgggcccccccccgttttttttttaaaaaaaaaaaagaaaacctttaaaacaacccccgggggccaaaacccaaaaccaaggctggggggttccccaaaggtaaatggccaaaacccaacggggggggttggtttttcctttttcaaaaacctggccccccttttaaattcaaaaaattttttttgaaagggtaggttaaaaaaaaacacccccccaaggggaacccgaaaaaaaaatggaaaggggggttttcgggaacaaaacccctttttttttttttttaa

SEQ ID NO: 21680 - DNA, 310 bp, Glycine max
  Clone ID: LIB3049-010-Q1-E1-H5.F3
gtgtcgcccctcttgcagttccccttccggtaatcggggcaggaggtgccttgatagtggtacttgcgggggtcacggcggcgagccttctcggcggggtgggcgtagggacactcggtccagtcgtgggacctgccacgtggacagttccgcaccttgaactggaacattcggaaatggtcggaggagaataatgagcacgtgtcagcattggaagagatcgacggggagagtgctcctcctccgtccgcgtcccaggtagggatttgaacgtttgggatcatcgtttagtggttccccggacgcgtgg

SEQ ID NO: 21681 - DNA, 623 bp, Glycine max
  unsure (1)..(623): unsure at all n locations
  Clone ID: LIB3049-012-Q1-E1-A7.F3
gtatcagctatggcagctttggtcttggntgtgtatttgttaggagtctgggacctgtgtactgggatacgaaaacatgtgcaaaaggaggttgcatgagtttggaaatggccgtattttcattggtttgtgccacttcttggtgcaaaagttgcagctttctagcttcaagtgattgcaagaggtgctccagctcttttacaaactctatggcaccacccactatagaggcctggtcacccctttggacgtaggactccggcatgagtgaacgaaggacagcaggatgctcattcatctgcttccggcggtttctttccactgtaatgtgtgtgatcctttgtgtctcagcctcttccgtgtttttgcaaacccttggcttccttctcctcttcttcctcccttgcactgccaccgaattctgcctccggccaatgctttctggttcgctggcttcacgctttcgggtcctcattgcgcaattatcaaatgtagggtggtcatgctgctcctgatagttcacaaaactttccaagaaactagcctctggggagccatggctgctaaatggagttgcagagatagtgtcatagataatgaaattggagaactcattggattga

SEQ ID NO: 21682 - DNA, 529 bp, Glycine max
  unsure (1)..(529): unsure at all n locations
  Clone ID: LIB3049-013-Q1-E1-H3.F3
tggtngcttcccgcgnactctcctcacttnttctctagtactgatctcccaccctcctcctcctcttcttcttcttcttcttcctcttcgacaacatcctcatcattaacattaacaacgttgatgttgttgttcttactccatcggtctctcgacaacatcatgagacacatggcgacatcttcctcgggggaagtgtcggagaccgaactcacgggctcaggcgactccatgaaactcagtttgggctttttttgttccaaattcacgggccttcgggttcgcttggatcgtcggcgagttgggttctttgactcggtctcgctctccctgtcttgaacgacagagcccgtgtcaaactcgggatctgcgagcctgaagcatttcttgggattctctcttaacccataaatcagggacttttcatcgtgtgtggcttgttcttgttctgaagaggaattagaagagaaggaagcagcagcagagggagaaagtggtggttgttggttttgggggnggaagagggagg

SEQ ID NO: 21683 - DNA, 616 bp, Glycine max
  unsure (1)..(616): unsure at all n locations
  Clone ID: LIB3049-013-Q1-E1-H3.R4
cactcgccgnacgatccaagncgaaccccgaaggcccgtgnaatttggnaacataaaaaagcccaaactgagtttcatggagtcgcctgagcccgtgagttcggtctccgacacttcccccgaggaagatgtcgccatgtgtctcatgatgttgtcgagagaccgatggagtaagaacaacaacatcaacgttgttaatgttaatgatgaggatgttgtcgaagaggaagaagaagaagaagaagaggaggaggagggtgggagatcagtactagagataaagttgaggagagttcgcgggaagcaccagtgtcagagctgcgggaagacgtttcgatcttcacgcgcattgggcagtcacagaagcatttgcgaaggttcgggtaacgatagtaaaatcttccaatgccccttttgttccaaggtgtttgggtctggtcaagcacttggtggccacaagagatctcacctcatgccttcttcttccacaaccgctaataatgattctgttagattgaaagagagcttcatagatctcaacttgccagcttcgcccgaagatgacgaccttagtgttgtttctgatgcctgataattacttgttcttctctgcagc

SEQ ID NO: 21684 - DNA, 653 bp, Glycine max
  unsure (1)..(653): unsure at all n locations
  Clone ID: LIB3049-030-Q1-E1-E8.TA
gctagcttcactagnttagnaggcaccagnaagttgtccaatacaattcccaagtggctgcacaaccagnaaataaaacgagaaataaaggatccaaaaaaatcaaatacatgccaaatttctaacaaccagaccttcacagtgtcttaggcagtatttgccaatgacaattaatatgactaccaagtaaacacctatttttccctaataacctataggcttcaacaaaaagaaaacttagtaacaaaacaccatccgcagccaccaacaatccatcttcacaaacacagaacgcaccaactcaagcacgctcaccacgaatccttcttgccagctgaatatccttgggcataatagtcacacgcttggcgtgaatggcacacaagttagtgtcctcaaagagcccaacaaggtatgcctcagcagcctcttgcaatgcaagcacagcatggctctggaaacgcagatcagtcttgaaatcctgggcaatttcacgaaccaacctctggaaaggaagcttcctgattaggagctcagtgctcttctggtatttcctaatctcacgaagagcaacagttccagggcgataacgatgaggcttcttcacaccaccagttgttggtgcagacttacgtgcagccttggttgcaagc

SEQ ID NO: 21685 - DNA, 633 bp, Glycine max
  unsure (1)..(633): unsure at all n locations
  Clone ID: LIB3049-043-Q1-E1-G8.TG
ctattattcaaatatttccgtttaggcacactacaaaggtaagaagctgttgctgttgatatatctatcttctatacaaaacatacaaactggaaaataacactaaaaccctaagaaacaagaaatgtattgcaaaacgaaaaggcgacaactatgctattatcattattataagcctaagcacgttctccacggatgcggcgtgcgagttgaatgtccttgggcatgatggtcactctcttggcgtggatcgcacaaaggttggtgtcttcaaacaaacccaccaagtaagcctccgcagcttcctgaagcgcaagaaccgcgtgactctggaacctcaaatcagtcttgaagtcttgcgcgatttcacgaacaagacgctgaaaggggagcttgcggatcagaagctctgtgctcttttggtattttcggatctcacgaagagcaacagttccaggacgatagcgatgaggcttcttgactccaccggtggtaggtgcagattttcttgcagccttggtggcgagttgcttcctaggagccttcccaccggtnggatttgcgaagcggtttgcttggtacgagccatgaaagacgattgagagagaanattgattctgcaaggtgcgaaag

SEQ ID NO: 21686 - DNA, 608 bp, Glycine max
  unsure (1)..(608): unsure at all n locations
  Clone ID: LIB3049-055-Q1-E1-F3.TG
acatatataagnacctcattacaagnaaatctaatcagcaactgctcaacgatctagattcacacacaaggcgttaaaacaaagacacttaaaccccaaaccaaagtgaattatttaactaagccctctcgcccctgattcttctggcgagttgaatatccttgggcataatggtaaccctcttagcgtgaatagcacaaaggttagtgtcttcaaagagaccaaccaagtaagcctcagcggcttcctggagcgccgaaacggcgctgctctggaacctcagatccgttttgaagtcctgagcgatttcacgaaccaaacgctgaaacggaagctttcggatcagaagctccgtgctcttctggtacttcctgatctccctcagggccacggttcctggcctgaacctgtgtggcttcttcactccgccggtcgccggagcagacttgcgggcggccttagtcgccagctgcttccggggagccttgccgccggtcgacttacgggctgtttgctttgtacgcgccatctggagttttctggaagcttctggaagagcgaatcgtagtgggagaatgctttgcgctttgctggaatccccttctgtc

SEQ ID NO: 21687 - DNA, 634 bp, Glycine max
  unsure (1)..(634): unsure at all n locations
  Clone ID: LIB3049-056-Q1-E1-B10.TG
aacaaccatatatgnnaaggggtcaatgggggcaacaagacaacaacagatcacagattgtatctaaaagcaagcattgtctagcaatccaacatggttaaagctctaaaaacagaccaactaaaacagttaaagaaagcattgtctagcaagcaagccatttacacactaccacctgagttctaaaactgttaaaacaaatcctcgtactagcctactgctgtgatcaattcacaataaccacaaacttagttttcagtaaagggcaacatgaattcagaaggccaaagagagctcaatccttggcggttttgttgatcaaggacttgtgaatgtgaggaatgacaccaccaccagcaatggtccctttgataagagtgtccagctcctcatctcccctgatagccagctgcaaatgccttggtgtgatcctcttcaccttcagatccttgcttgcattcccagcaagttcaagaacttcagcagtcagatactctagaattgaggctaagtacactgcagctgttgccccaacacgtccattggcttggaccctttgtttcagctgcctatggatacgtcccacaggaaactggattccagcacgggaagagcgagaaataggtctcttctt

SEQ ID NO: 21688 - DNA, 382 bp, Glycine max
  Clone ID: LIB3049-001-Q1-E1-B8
ccacgcgtccggggggtgctggtggtgcagaaagggccattttctgaatgcgctctatctatctcttccgatctggctactaaccctaacccgcttcgaaccgtggcttcctcggcctcgcagaacctctctcgaagaaaatcttcttcttcgtcttcgttttctcaacaaacttccgggtcgacccggatcgtttaccgcgaacctcggatcccatcggaatccaattttccgatctggcagcagaactggttcatcgcattgctcttcctcatggctctcggattcttcgccctcgctctcttcctcttcatcactttcgactctgacatcgctccttcttccaccgcatccgccgcttcctccgaaggcgtcgaggtgc

SEQ ID NO: 21689 - DNA, 402 bp, Glycine max
  Clone ID: LIB3049-001-Q1-E1-E7
aattcccggctcgacccacgcgtccgccgacgcgtgggcggatgcgtgagcgggagagaaagggatagagaaggggattctccaattgattcaccaatgtactcaccattgcacatcgcagttctcgacgacgatatcgatggcaagtgcaatggaacgtgctaggcagtccactggcagatccgctggaaggaaggatctgaggaagcaagtggcacgcaagtcagctcgggagtcaggcgcggtgaccggcggagtgagcatcacgcaacgaatcatggcactaacggagactctgaaggagaatcggaggtacgagcttatgatcggacttctgatacgccagatgctagtcaaaaagctcgtccaagatttcgctcacgatctcagaattgatatcag

SEQ ID NO: 21690 - DNA, 449 bp, Glycine max
  Clone ID: LIB3049-002-Q1-E1-D6
aattcccgtctcgacccacgcgtcagcccacgcgtccgagaagaggatgatcctgagtatgctaagcagctggttgacgaaacatggggcatgcacaaggatgctgagaaggcaccatttgaggaggccgagtagacgacggaagacgaggaatcaaaggatgacccagttgacgctgatgctgatgaggaagaggaagatgctgatgaagcttgcaatgactccgatgctgaatcacagacggaagctggagaagacaccacggaagacggtgtacatgatgaactctacgaactttgcacaacggataaagagtgagcggacgtcatattccggacagtcatagctttttcagttgtattgtcgttttgtacctaattttccctagataagcacaccgtggaaaactgcacgtgaaagctggagcttttgcttcaatcatatttgac

SEQ ID NO: 21691 - DNA, 166 bp, Glycine max
  Clone ID: LIB3049-002-Q1-E1-E2
tgggaagaaagctgctagcagaagggaagttctacacttttttgtttggattgatcgagtgtaccttttcttttcgagattggcttggtgtgcagtggaaagacggtggaaaagagtggtaaaggggagggcggcgccccaaaaaacaacactcaacttccatcaa

SEQ ID NO: 21692 - DNA, 395 bp, Glycine max
  unsure (1)..(395): unsure at all n locations
  Clone ID: LIB3049-002-Q1-E1-F8
ccggctcgacccacgcgctcacgtacggggctgtcgagaaganncgacagaaggaggtagcatgcggacttcgtctgtcaatgcatatcttgttggtcgacatatgcgatgtcgtgatcgagagtgagtacagctttgctaaccattggatacaaatgtctgcactcttcacctatgaaacgcccctccattggtgaggtttcgcaaggtatattgaggattaagctatgactcctcatgaaagaacagccgatgtcatttgcatccagcaacttctctcgaactgtgagtcaaatagacgagtgtcaggttgagctatgtagcatcatcatcatgatacacagggaaatggggtgaactcagtcagatgttctggggcgattttttttttcggt

SEQ ID NO: 21693 - DNA, 673 bp, Glycine max
  Clone ID: LIB3049-003-Q1-E1-A4.R1
gacaaagaagtcatcttttattgcacgccaaagacaagccaacccaccctcatcgctttcctgggtcgtgcgtgccttttggcggcggaactgcttgccaccccccctcctcccccagctccccccaccacactcctctctcgccgccgccgcacccaccccccccccccccccccccccgccccccccccatcaccccccccccccccccccccctgccccctctccccccccccccctcccccccacccccccccccccccccctcccccaccccccccgccccccccccccccccccccccctcccctccccacccccccccccccccccccccccccccccccccccccccccccccccccccctcccccccacccccccgcccccccccccccccccccccccccccccacccccccccccccccccccccccccccccccccccccccccccccccccccccccccccccccccccccccccccccccccccccccctccccccccccccccccccccccccccccccccccctcccctccccccccccccccccccccccccccccccccccccccccccccctcccccccccctcctccccgccccctcccccccccccactccccccccccccccccccccccccccccccccccccccccccc

SEQ ID NO: 21694 - DNA, 475 bp, Glycine max
  Clone ID: LIB3049-003-Q1-E1-A4.R2
gacacaagaagtcatcttttattgtacgccaaagaaaagaaaagaaagaatcatagtttttttgggttgtgtgtgtcttttggtggaggaatgcttgtcacctactccttttaagttcccccaaaaacacttttgtgagtgagagaaagaagaagaagaagaagaagaagaagtagcataagtgatggatagacacaaatgcaagctttgttcaaggtctttctccaatggcagagcccttggtggccacatgaaggctcaccttgctactctccctctccctccaaagcctcactcttattcctcttcctctgactcagaacaagaacaagaacaagaatctcttaattatgctttaagggagaatcctaagaagagcttcagggttgcggatcctgaagacagagagagcgaaacagagtctagaaaccccactcgccaacgatccaagcgcaaccggaaatccaccatgccg

SEQ ID NO: 21695 - DNA, 469 bp, Glycine max
  Clone ID: LIB3049-003-Q1-E1-E8.R2
gaatgccaaagttggtcacgccctctctgaaaatgcagcaacagcaacagcagcagcaggcatgaagagcaacatacacaacaccactccttcaaatatcatcatcatttctcacttctcatccttcactctcttcttctctttcttcccttcactctctctttcgcttcatggctggtctcatcgatctcaacaacgccaccgaggacgatgaaacgccgtcgtctggctcctcctcctcctcctcctcctccaccgtctgccttgaactctggcacgcttgcgcgggtccaatgatttcattgcccaagaaagggagcgttgtcgtgtacttccctcagggacacttggagcaacaccttcacgattttccgctccctgcctctgccaacatcccttcccatgtcttctgtcgcgttctcgatgtcaagcttcatgctgaggaagggagtgatgaaatttattgcca

SEQ ID NO: 21696 - DNA, 394 bp, Glycine max
  unsure (1)..(394): unsure at all n locations
  Clone ID: LIB3049-003-Q1-E1-F5
cacgcgtccacccacgcgtccgcccacgcgtccgagaaaaaaaaaagacccttctttcccctccttctctcttccatagagatttttctccaaagagaaaaaatggcggcagcttcaagaaaatcaagaagtgcagtaattggatccctttcctccacccctaggttctgcaactctcactttcactcttactctccatcatcttcatcttattcctcagctttcgcctcttccacctccagcttcacttctcgctcctccaccttctttcaccgctcttcctctccgacacgtgtcaacctctgcggttcctccgctccctccgtccgcttctcnctcgaccgctccgtctctccgaaccggtccatctctgtggcgcctcgaacgggcgtgt

SEQ ID NO: 21697 - DNA, 317 bp, Glycine max
  Clone ID: LIB3049-003-Q1-E1-F7
cagttgtaaccctaatcagaagaagcgcagcttcaagcgagtgacagccaccagccatgggtcgtatgcacagccgcggtaagggtatatcctcttctgctttgccctacaaaaggacacctcctagctggctcaagatctcttcgcaagatgtcgaagaaaatatctgcaagtttgcgacgaaaggtttgaccccgtctcagattggtgtcattctcagagattctcacggtattgctcaggtcaatagcgtcactggcagcagaatccttcgcatcctcaaagctcacgggcttgcgccctgaaattccagagga

SEQ ID NO: 21698 - DNA, 58 bp, Glycine max
  Clone ID: LIB3049-003-Q1-E1-G7
cacgcgtccgcccacgcgtccgcccacgcgtccgcccacgcgtccgcccacgcgtccg

SEQ ID NO: 21699 - DNA, 269 bp, Glycine max
  Clone ID: LIB3049-004-Q1-E1-E8
ccaagttgtaaatgggatctactttcgactcatcgtcgccgccggcgatgatcagtcctcctccaacaattaccaagccattgtctggaatttgccgtggacggaaaattacatgaaccttatttcctttatccctgttcatgatgcacctcctagttactattaataataatgtatgttcctgtcctatactatgtattaattagcaatttggacccaataaaagtttatgctaaggtacacaaaacaaaaacaaccaccataagaaa

SEQ ID NO: 21700 - DNA, 87 bp, Glycine max
  Clone ID: LIB3049-005-Q1-E1-B7
gtcaggaattcccgggtcgacgcacgcatcagtccgcgcgtgcgcaaggcggtgaaagcacaagtgaacgtgaagtcaatgtcgtga

SEQ ID NO: 21701 - DNA, 427 bp, Glycine max
  Clone ID: LIB3049-005-Q1-E1-B8
ccacgcgtcagcccacgcgtccgcccacgcgtccgcccacgcgtccgcggacgcgtgggggatcgaaagacgcatcttttgcttcactcgtcatcactacgcagatcgcagcaaaccagactaaactccgacgatgcctcccgtcgctcctcgatccggtgatgccatattcgccaacgtcgaacgcgtcaatgcggagctgtttactttgacgtatggcgcaattgtgcgtcaattgctcacggatctggaagaggctgaggaggttaacaagcagcttgatcaaatgggttacaatactggaatccgtttgattgatgagtttttagccaagtctaatgtctccagatgcaacgatttcagagagacgactgatgttattgcaaacgttggttttaaaatgttcctcggtgttactgcatccgtg

SEQ ID NO: 21702 - DNA, 603 bp, Glycine max
  unsure (1)..(603): unsure at all n locations
  Clone ID: LIB3049-005-Q1-E1-E10.TG
catttgttatcatattatgccaatcttgncattatgaattattcaatcataaanaacccatattacaaaaggggaacatgggtcaaacttaaggcaaaaaaaaaaaacatttaagcatcattgtcattgacactagcacccataaaggttgaggtcgaggtcccaaccttcttaggaagcaacatgctgtgaatgttaggcatcacaccaccattagcgatggtcacatctccgagaagcttgtttaactcttcatcattcctaactgccaattggatatggcgaggcataattcgagtcttcttgttgtccattacagcatttccggccaactctaaaacctcagcagcaagatattcaagaacagaggcgagatacacgggagcagcagaactgatacgctcagcatacttgccagtcttaaggtatcgagcaacacgaccaacagggaattggagaccagctttgttgcttcgcgagatgccctttttggttgtgctagatccttgggctttgtcgtggctcgccattgctgaattaaggatatatgaagggggtgaaaaaggtttcaatgacaaagagagaaacaaaaagggtgatatc

SEQ ID NO: 21703 - DNA, 51 bp, Glycine max
  Clone ID: LIB3049-005-Q1-E1-E2
ggtcaggaatatccgggtcgacccacgcgtccgcccacgcgtccgaattcg

SEQ ID NO: 21704 - DNA, 356 bp, Glycine max
  Clone ID: LIB3049-005-Q1-E1-H1
ccacgcgtcagttccggtggccaaaagaccaccagaagggaacaaaggcaactccgaaatcccctcccaacaaaagaagattctccaaggccgacaatcaaaaccgggtccccaaccccgggcctcaccgccgatggccgcgtcctctcccgctacatgagatccgaatgcatcaactataattacacctacgagtcgccgctccccgtcggcagactagtcgttcagctcgccgataaggctcaggtttgcacacagcggtcttggaaacgtccttatggggttggactcctggtagctggattagatgaatcaggagctcacctctattacaactgtcccagtggaaactattt

SEQ ID NO: 21705 - DNA, 546 bp, Glycine max
  unsure (1)..(546): unsure at all n locations
  Clone ID: LIB3049-006-Q1-E1-A5.R2
gaagacaatttttttttcccttgtttctttgttgatcgttttggatttgaaaaagactttcttattttcttttcatcaagttgctggcatggctttttggttctataaattctccggttgaagcatacagagtccccttccactttcttccttctttctcatcactcttttaagatatttttgttacatagtttatggtctacgagagccctgcctctgtagagtgtagaccaacctccttttctttgctttgagctcgctcgatcttcttccatttcatgtcttgntttattttattttatttatttaagccttttaaatgcccaacattttgttcttgatgtttgagattgatgtattcaattctgagtgaaatcttcttttccgggtgtatgatcaattccactgtgagacgcaggacccatttagttcaatccttctctgttgctttcctttactggctctactacgtttcatgatttctaaccccctctccattattaattaaataaaccctttatatatctcttacatatttttatctgg

SEQ ID NO: 21706 - DNA, 60 bp, Glycine max
  Clone ID: LIB3049-006-Q1-E1-A9
ccacgcgtcagaaaacttatactccttctgatccaaaataatacagtaagtagttcttct

SEQ ID NO: 21707 - DNA, 473 bp, Glycine max
  Clone ID: LIB3049-006-Q1-E1-C7
aggtaccggtatggaattcccggctcgacccacgcgtccgcccacgcgtccgcccacgcgtccgggttgctggttttgacattgactttcttgtgttgcaattttcttcactggctttccttttgcttttgtctttcattttttctgccattggtagttaatttaatcatgtgctctcaaaggtagatgaagcatttgtagaaggcagagtgggtattgtaattttaatgtagggtagcttgcataagtatgatggtatcttgatgtgaattacttgatcttccttacctcagttatttatgtgaaaccttagctcggtcaaattcaaatgtgatcataccaatgcatagattctggcctgatgccttcattgtgtaccatttcagagtgcccgagaatttagcaagagccttaagcaagccgagaaaggaaaagatgcaacaacctaaacgggtgcttaaagggtagtgtgt

SEQ ID NO: 21708 - DNA, 439 bp, Glycine max
  Clone ID: LIB3049-006-Q1-E1-D6
ccacgcgtccgcccacgcgtccgcccacgcgtccgctcctcgaggcggcggcatggaaagcattgccgcgcagctgaagcgcggcatctcgcggcagttctcgtcggggtcgctgcggaggaacctctcgtggcagttcacgcgccaggcctcgctggatcctcgccggaacaaccagcgcttcagcttcggccgccagtcctcgctcgatccgattcgccgcagcccctgctccggcaacgccgagctcaccgtgccggagaacctggactccaccatgcagctcctcttcatggcctgccgcggcgacgtcaagggagttgaggatttgctcaacgaaggcatcgacgtcaacagcatcgacctcgacggccgcaccgccctccacgtcgccgcctgcgaaggccacgtcgaagtcgccaggctacttctcagccgc

SEQ ID NO: 21709 - DNA, 170 bp, Glycine max
  Clone ID: LIB3049-006-Q1-E1-H8
ggcggcaatagagagtagagagtaaacagaaaatctgaggcgcgagtggctggtgaaggcagcgactgcgagggaagggaagcatctttagctccaaatccaatggcggatacctcaagccgatcaagagacctcgacaagctccttctccgccctggcaatctcgtcgg

SEQ ID NO: 21710 - DNA, 442 bp, Glycine max
  Clone ID: LIB3049-008-Q1-E1-A4
ggctcgacccacgcgtcattaaggctgcaaaaaccgacaaaaggggaaacacacactttccaaaaattttcccagcttccttctcatttgttaaatttttccaccattttctggcttcaaaaatcgttcggaaataaggactgtgaacattttcgccctcccacttctggctttgttcatcatggcaatctctcgtctggcccaagctcatgacttgcctctttctccggcacctcctcctaccagtgatggtcagttaaatcaaatattaacctttcaatttgtatcaagtaatgaaattccttctttttatcaccttctgttttataactttttaatcttgttttgttttgggtgtcccaagaaccgcaatttattcagggaattcgctaaatcctaatgctgttggctctcggaatcacatacatgattcattaacttt

SEQ ID NO: 21711 - DNA, 435 bp, Glycine max
  Clone ID: LIB3049-008-Q1-E1-B8
ccacgcgtacgcccacgcctacataaggatgcaagaagatcacacacagagatgtcactcacacccgtgaataatcctctattaacattccacagtcaagttctagggttccgaaatggaatcaggaggggagatcaaggtaggcacgggaggtacaaagggcagaagcccatttcagagtccggtttcaacgtccgtcaaatccggtctcgaattcctcgtcgtaagaagtggacgtgaatgtaagaacagaatgtacgcacagcttctccgtaacagtgcgctcgtatacttgactgcagatctcgaatagcgatctacttaggtgcgagagttggatgtgaatgccgcacgtgacagcattaatcacaaggattatcctaggacacttacttatggcaatgaggaacgaaaatgacttgcggaaattgcatg

SEQ ID NO: 21712 - DNA, 449 bp, Glycine max
  Clone ID: LIB3049-008-Q1-E1-E4
ggctcgacccacgcgtcagcggacgcgtgggcggctccaaaaaaacaacagaagggggacatcataggcacccatttggttctaatcctcaaaatcagcttcagcctttctctctaactccctcactcacactcacagttaagcaatggcggggaaaggaggaaaggggcttcttgcagcgaaaaccaccgcggctaacaaggacaaagacaaggacaagaagagacctatttctcgttcatctcgtgccggaatccagtttcctgtgggacgtatccataggcagctgaaacaaagggtccaagctaatggacgtgttggtgccactgctgccgtatacttagcctcaattcttgagtatcctactgctgaaattccttgaacttgctgggaatgcaagcaaggatctgaaggtgaaaaggataacaccaaggcatttgcagcttgct

SEQ ID NO: 21713 - DNA, 463 bp, Glycine max
  Clone ID: LIB3049-008-Q1-E1-G1
tcaccggtcaggaatatccgggtcgacccacgcgtcagaattaagaacaagccataccccaagtcacgtttctgccgtggtgttcctgaatccaagatcaggatttatgatgttggtatgaagaagaagggtgttgatgagtttcctttctgtgtccatctggttagttgggagaaggaaaatgtttcaagtgaggccctggaagctgctcgcattgcttgcaacaagtacatggccaaatttgctggaaaggatgctttccacttgagagtcagggtgcacccattccatgttcttaggatcaacaagatgctttcgtgtgctggtgctgataggctccaaactggaatgagaggtgcttttggaaagccacaaggtacttgtggcaaagtgggtaattgggcaggtccttctttctgtcggctgcaaggacagcaacagccatcatgctcaggaggctctt

SEQ ID NO: 21714 - DNA, 461 bp, Glycine max
  Clone ID: LIB3049-008-Q1-E1-G4
aggtaacggttatccgggtcgacccacgcgtccgcccacgcgtccggatagatagaaagcgcggaataacctaaacttacccttcttctctctgtgtgtgtgcgcatcaaacgcaaccagaagcagccatggccactgcaagaactgtgaaggacgtttctcctcatgagttcgtcaaagcttactcttctcacctcaagcgatctggcgagatggagctgccagagtggactgatattgtgaaaactgcaagatttaaggagttggctccttatgatcctgactggtactatgccagagctgcttccatggcaagaaagatctacttgagaggaggacttggtgttggtgcctttcagaagatttatggtgggagcaagaggaatggtaaccgccctcctcaattctgcaagagcagtggtgctgttgctcgtcacattcttcaacagttgcagaacatg

SEQ ID NO: 21715 - DNA, 472 bp, Glycine max
  Clone ID: LIB3049-008-Q1-E1-H10.F2
ctttattgtttatttgtttattcatcggacttgagtctatactctgaaagtttaactcttctaccccaaaacttttacaacattggacagaaatgggcttggatgcacaatgtgatctaacaggacctaaaaagaaatgttctaaaaatgggtgaggaatatcattattaacttgatataactcgccgagagattggtaattaacacataactcagataaatttcaaaggttctataacatttaatacttttcgatcaaatagttaatgtattctatgctaggatccactataactaatgatgataaatgaattaccgatcaaaataagagtacactcacaactacgcaccaaatgcggaaacaacttattctgctgagagacttatgaacctgcattaaaagcctactcatacttggggtactgggccccgaaagatttttccaattggcatatgtatgaatgcttgacac

SEQ ID NO: 21716 - DNA, 461 bp, Glycine max
  Clone ID: LIB3049-008-Q1-E1-H10.R2
cagggggtactacatacatatccttgaccttttttcctgtcttcattccgttatacccttcaacgcaaccatctttctttattatggagcttccaatatattgacgccttgcaatacgaagtcgcaccctacaaactacttaccttttctttcatctggttaggtgctcgcatgaagagaacatattgtcaaactaaaacggaaaaatggccttagatcactttgaggagactgtgcaccaaaaaggaaaacgcaaatcctacagtgaaatcattgccgattctgatagaaatgcctactgggactatgactgcaacatctgcctggagtgtgtgcaagatcacacggtgacactatgtggccatatatattgctggccctgaatatacaaatggcttcattttcaaagcacctctttggatgatgaagaacaacagaggccacaatgtcctgcatgcaaa

SEQ ID NO: 21717 - DNA, 422 bp, Glycine max
  unsure (1)..(422): unsure at all n locations
  Clone ID: LIB3049-008-Q1-E1-H4
gtcccggctcgacccacgcgtcagcgcacgcatcagcacacacggggataccaccgatttgcagaaagaaaagaccatcaaagtttcacttcagccttatccggtttagggtttcggtttttgacccaacctttgacgtatcgaaaccttgagtttcggatcaggtctgagcaatctggttggtagaacctttggtcttagagagtcaagttttatgtctgaattagacgatcaaattcctactgccttcgatccttttgctgatgcaaatgctgatggctcgggtgctgggtcaaaagagtatgtgcatattcgcgtacagcagcgaaatggaatgaaaagcctgacaaccgttcacggattgaaaaaangattcagctataacaggatacttacagatgttaagaaagagttctgttgca

SEQ ID NO: 21718 - DNA, 464 bp, Glycine max
  Clone ID: LIB3049-008-Q1-E1-H7
aggtataggtcaggaattcccggctcgacccacgcgtccgcccacgcgtccgcccacgcgtccgaagaaaaagcagctctaaaggcaagagaggctgcaaggaaaagagtacaggagagggagaaacccttgcttggcctttacaacaagccttactaactgcaaaatttacttaacagccttgtcttcccccagaaatatgaggttgtttcttttttgtttgattcctttatgctggtcggtgtcctaattcttcaagtgtttcccatgtgactctaccttgtacaatgtaactgttccgtttctttttttagtttttgcaatacatgctaattttcagccttagaggagaaaataagggcttagaagtcttcgctaggctgatgaaaccaagttaaatccctggttgcagaaccttttagaaaacacatccaaataagttaatcttatgtggatacaaaagc

SEQ ID NO: 21719 - DNA, 379 bp, Glycine max
  Clone ID: LIB3049-009-Q1-E1-A4
cccgggtcgacccacgcgtacgcacacgcgtccgaaggggggttcaaagcacgccgtgtttcgctgtctctcccatcctttcgcattctcaatacccttttgatttgtgaaaggaaagcaaacatggttgatcaggtccaacaccctacaatcatggacaaggttgctggtcagctccatctccgttctggtctttcatctggtattagaagttatgatggagcctaccgccacccagctatgtaccaaagaccctcttttgggaattactcgaatgctgcattgcagtttcctgtgatgcccacatgcaaagctaccatggatctgtctgctactgcaacatctgcctcacccgtctttgttgctgctccagcagaga

SEQ ID NO: 21720 - DNA, 373 bp, Glycine max
  unsure (1)..(373): unsure at all n locations
  Clone ID: LIB3049-009-Q1-E1-E7
ccacgcgtacgcggacgcgtgggttgaacgtgttaagcttttgatccagaaccaggatgagatgatcaaaactggtagactttctgagccctacaagggtattggtgattgctttaagagaacaatggcagatgagggtgttgtttctctatggagaggaaacactgcaaatgtcatccgttatttccctacccaggctttgaactttgcattcaaggactacttcaagaggctttttaactttaagaaggatanggatggctactggaaatggtttgctggcaacttggcctctggtggtgctgctggtgcttcatcccttttgtttgtttactctcttgactatgcncgtacccgtcttgccaatgatgct

SEQ ID NO: 21721 - DNA, 417 bp, Glycine max
  Clone ID: LIB3049-010-Q1-E1-A10
ccacgcgtacgcccacgcgtccggagcgaaacagagagtgatttcagtgagtgatcggtgttcacttgatctcatcataatcgtcagcgtcaattgaagaagatgccgatcagaaacatcgccgtcggaaggcctgaagaggcgactcaccccgacacgttgaaggcggctttggctgagttcatctcaaccttcatcttcgtgttcgccggctcaggctccggcatcgcctacaacaagctcaccgacaacggcgctgccacccctgccggcctcatctccgcctccatcgcccatgcattcgccctcttcgtcgccgtctccgtcggcgccaacatctccggcggccacgtcaaccccgccgtcaccttcggcgccttcgtcggcggcaacatcaccttcctccgcggcatcgtc

SEQ ID NO: 21722 - DNA, 297 bp, Glycine max
  Clone ID: LIB3049-010-Q1-E1-A7
gcggcggagaaagaaagagagaggaaatttaaagaaggtggtaggagtgaggaatcggttgatgagcaagagcagcgtgtatccaagcaggtctttgaaattaatgattcaaagaaaattgatgagttgcaaggccctgaacctgataatcagcttgagaggcgaacaaggaagaagagggacgactatagtgatggtgacaagcatcaagataatgctggagatggttatgataggcatttgtcttctagggatgacattgccaaggacgaaaaaagaaatgaataattaaatcaa

SEQ ID NO: 21723 - DNA, 287 bp, Glycine max
  Clone ID: LIB3049-010-Q1-E1-C9
gaaggaatatggatatatttgttggcacctgttgtgggggccatagctggagcatgggtatacaacatcgttaggtacacagacaagccattgagtgagatcaccaagagtgcttctttcctcaaaggccgtgctgcctccaaataatttatatgagcaaatggagacactcaataatttcttccttgtaatagtaattaaaaaaaaataaatatgaatgaaagaaatcactcaaagaaactacgctatgctgtttcatttccttgttttatgaaaggtcatgcact

SEQ ID NO: 21724 - DNA, 381 bp, Glycine max
  Clone ID: LIB3049-011-Q1-E1-D11
acgccgcaatgtaccggctaggaattccctactcgacccacgcgtcagacgacagaagggggagaatatggagctattactagtgctgtagtgatgagagatgtagatggtaaatcaaaaggttttggttttgtcaattttgcgaatgtagaatatgctgctaaagctgtggaggctctaaatggaaagaattttgatggtaaggagtggtatgttggaaaagcccagaaaaagtctgaaagggagcttgaactgaaagagcgacatgagcagagtacgaatgagactgttgataaatatcatggtacaaacttgtatatcaagaacttggattatagtgttggtgatgaagaactcatggaactgttctctcagtttggt

SEQ ID NO: 21725 - DNA, 581 bp, Glycine max
  Clone ID: LIB3049-012-Q1-E1-A7.R1
gaacaactgagttagattttggtgttatcctttgatataaactaagctctttcatttttccaatattaaaacttccagcttcttccttcctctgtgactcaaactgcatcaaccaagttagtgggattttctataaattgttgtcaatttgtcatgtcatgtatatgagaaactcatgaaaactctggtggtgacttattagttctctcggcaagtaaggatttcaaacaaactaaagttgaagagagtataaatgactttggaaactcttcaatccaatgagttctccaacttcattatctatgacactatctctgcaactccatttagcagccatggctccccagaggctagtttcttggaaagttttgtgaactatcaggagcagcatgaccaccctacatttgataattgcgcaatgaggacccgaaagcgtgaagcagcgaaccagaaagcattggccggcaggatattcggtggcagtgcaaggggaggagaagaggggagggagccaagggtttgcaaaacacggaagaggcttagaccaaaggatcacacacattacagtggaatgaaccgcg

SEQ ID NO: 21726 - DNA, 447 bp, Glycine max
  Clone ID: LIB3049-012-Q1-E1-A7.R2
gaaccaactgagttagattttggtgttatcctttgatataaactaagctctttcatttttccaatattaaaacttccagcttcttccttcctctgtgactcaaactgcatcaaccaagttagtgggattttctataaattgttgtcaatttgtcatgtcatgtatatgagaaactcatgaaaactctggtggtgacttattagttctctcggcaagtaaggatttcaaacaaactaaagttgaagagagtataaatgactttggaaactcttcaatccaatgagttctccaacttcattatctatgacactatctctgcaactccatttagcagccatggctccccagaggctagtttcttggaaagttttgtgaactatcaggagcagcatgaccaccctacatttgataattgcgcaatgaggacccgaaagcgtgaagccagcg

SEQ ID NO: 21727 - DNA, 371 bp, Glycine max
  Clone ID: LIB3049-012-Q1-E1-G11
ccacgcgtcagcccacgcgtccgaagggggaggtacaaaaccctaatcaccgcttcgagctctgtcattgtctcaagttccaggtttcagcgatttcgatctcgcatagcattctacaatggccactattccagttaaccccaagcctttcttgaacaatttgactgggaagcccgtaattgtgaaactcaagtggggaatggagtacaagggctatctcgtttccgttgattcctacatgaacttgcagctggccaacactgaagagtacattgagggacagtttactggaaatttgggagagattttaatcagatgtaacaatgttctctaccttcgaggagtaccggaggatgaggaaatcgaagatg

SEQ ID NO: 21728 - DNA, 72 bp, Glycine max
  Clone ID: LIB3049-013-Q1-E1-D3
cagttgtgaccctactcagcagaagtgtagcctcaagcgagtgacaggggccagccatgggtcgtaggtaca

SEQ ID NO: 21729 - DNA, 523 bp, Glycine max
  Clone ID: LIB3049-013-Q1-E1-F4.R1
ggaagatggacaaaaatcggcgacgatccaaatccagttctttcatttacggtcctaagtgacacactcgattctggctccgcatcagacgaagaagctcgctctggattctcactcacctgaacggatccttcttcttccttatcgcgaaatccatacttcaaaccctaatcgcgactgggtttatgatttgtgacacaacacaaagttgacgaggtggtttttcagcatttgtattctagtattcttctacataagttgaagcgaaaatgaggattatgataaagggcggtgtttggaaaaaccccatgtatgaaatcctaaaagcagctgttatgaaatatggcaagaaccagtgggctcgaatctcttctctccttgttcgcaaatctgccaagcaatgcaaagctcgctggtatgagtggctcgatccctccataaaaaagactgagtggacgagagaagaggatgagaagctacttcatcttgctaagcttatgcccacacagtgtagaacaaattg

SEQ ID NO: 21730 - DNA, 504 bp, Glycine max
  Clone ID: LIB3049-013-Q1-E1-F4.R2
ggaagatggacaaaaatcggcgacgatccaaatccagttctttcatttacggtcctaagtgacacactcgattctggctccgcctcagacgaagaagctcgctctggattctcactcacctgaacggatccttcttcttccttatcgcgaaatccatacttcaaaccctaatcgcgactgcggtttatgatttgtgacacaacacaaagttgacgaaggtggtttttcagcatttgtattctagtattcttctacataagttgaagcgaaaatgaggattatgataaagggcggtgtttggaaaaacaccgaagatgaaatcctaaaagcagctgttatgaaatatggcaagaaccagtgggctcgaatctcttctctccttgttcgcaaatctgccaagcaatgcaaagctcgctggtatgagtggctcgatccctccataaaaaagactgagtggaccagagaagaggatgagaagctacttcatcttgctaagcttatgcc

SEQ ID NO: 21731 - DNA, 340 bp, Glycine max
  unsure (1)..(340): unsure at all n locations
  Clone ID: LIB3049-013-Q1-E1-G6
gggtcgacccacgcgtccatacagccgtcagtacgagcagcgaaagggaggcataaggggtcaagttcacatggagtggtacaggtggaatgcctggcagtcgtagagacttcaactcagcacagcatatggggatctcgnacatgtcatatgacatgcccttatgactgccatctgatcagcgctctaacgtctgatgattaactatagtgctagtgcgattatataagatccaacgtcagggaccttctccgtctaaacccatggataagagagacgcttatgcagtaactgagctattccctcatgactgagattctcggtacatctgacattgtct

SEQ ID NO: 21732 - DNA, 308 bp, Glycine max
  Clone ID: LIB3049-013-Q1-E1-G9
gacccacgcgtccacccacgcatccgaaaggattaggaaggggatgaggacatttttggaacaaaatgtcattaaaaacccatgtgccagtgacatgagagcttctgtcaacagagtcatcaaatgaaacaacatttgatggtgaggggtagttgctgttatgatagccaataaagtagggagatttttgttgggcgaaaaaaggacaagggattagtataattaacttgtgtagtggcaattcatgcatttataatctcactcaggatcatgtatcaatcaatataattgttctcacacaattcagc

SEQ ID NO: 21733 - DNA, 511 bp, Glycine max
  Clone ID: LIB3049-013-Q1-E1-H3.R1
ggtgtctattggtggaggaatgcttgttacctactcctttttaagttcccaaattccccaaagaagcctaaggccaaaccaaaccaaacgtatcagaataaacaaagaaagtcctctctctaatggagcggtacaaatgcaagctctgcaccagaacattctccaatggcagagcctacggtggccacatgaaggctcacttagccaccctccctcttcccccccaaaaccaacaaccaccactttctccctctgctgctgcttccttctcttctaattcctcttcagaacaagaacaagccacacacgatgaaaagtccctgatttatgggttaagagagaatcccaagaaatgcttcaggctcgcagatcccgagtttgacacgggctctgtcgttcaagacggagagagcgagaccgagtcaaagaacccaactcgccgacgatccaagcgaacccgaagacccgtgaatttggaacaaaaaaagccaaactgaatttcatggagtcg

SEQ ID NO: 21734 - DNA, 505 bp, Glycine max
  Clone ID: LIB3049-013-Q1-E1-H3.R2
ggtgtcctattggtggaggaatgcttgttacctactcctttttaagttcccaaattccccaaagaagcctaaggccaaaccaaaccaaacgtatcagaataaacaaagaaagtcctctctctaatggagcggtacaaatgcaagctctgctccagaacattctccaatggcagagccctcggtggccacatgaaggctcacttagccaccctccctcttcccccccaaaaccaacaaccaccactttctccctctgctgctgcttccttctcttctaattcctcttcagaacaagaacaagccacacacgatgaaaagtccctgatttatgggttaagagagaatcccaagaaatgcttcaggctcgcagatcccgagtttgacacgggctctgtcgttcaagacagggagagcgagaccgagtcaaagaacccaactcgccgacgatccaagcgaacccgaagcccgtgaatttggaacaaaaaaagcccaactgagtttcatg

SEQ ID NO: 21735 - DNA, 393 bp, Glycine max
  Clone ID: LIB3049-014-Q1-E1-B9
tcccgggtcgaccaacgcgtccggcgcctgatttctcagttctctcacacactcattcggtgctccgaatctcagattctagggttagggttcccaatttctccaccgatcagaaaatgagttcaactggtggttctaccaagggcggaaggggcaagcccaaagcctccaaatccgtttcaagatcgcagaaagctggtctccaattccccgttggaagaatcgctcgattccttaaggctgggaaatacgccgagcgtgttggtgctggtgctcctgtgtacctctctgcagtgctcgaatatctcgctgctgaggttttggaattggctgggaatgctgctagggataacaagaagaatcgtattgttcctaggcacattcagcttgctg

SEQ ID NO: 21736 - DNA, 97 bp, Glycine max
  Clone ID: LIB3049-015-Q1-E1-D8
gggggcattcttgtgcactcagttactctctctctctctggagcgtcgtcgtttcgttagggcacaaaaccccttttcggatcggtggagcaaggcc

SEQ ID NO: 21737 - DNA, 451 bp, Glycine max
  unsure (1)..(451): unsure at all n locations
  Clone ID: LIB3049-015-Q1-E1-F2
gtgcggtcagaattcacgggtcgacgcacgcgtccatacngcagcaaaaaaacaacaaaagggggggtgcaaatcattgacaggaaaaagaacctgcgcccggagagatattttaaacgccggcggaaccctaacgagtcgaacggcagcgggggcggcgaaggcagatcngagcgcgagcgaagangatgagcggcaaaggcngtggcggccagaaggcanggattcctccggccagtcggaagatggttcagagcttgaaggagatagtgagcaacaccccgaacacgagatctacgccactctcaaagactgtaacatggaccctaacgaagccgttagtcgcctcctctcccaagatacttttcacgaggtgaagagcanacgtgagaagaaaaaagaaggtaaggacacaacggattccaagtctcgtgtggtaagcaatacatct

SEQ ID NO: 21738 - DNA, 73 bp, Glycine max
  Clone ID: LIB3049-015-Q1-E1-G2
agggatacatgagataagccaattgtgataagccaatcactcagacaacattgaacatcaaaaaaaatcaata

SEQ ID NO: 21739 - DNA, 132 bp, Glycine max
  Clone ID: LIB3049-016-Q1-E1-H1
ggagaattacatcagtcgactcagtgagtttactgtttctctgactttgatgcatgcaggttgaagagtggaagacggtgaagactaaggggaacatcattaaataaaattcagagaaacaacccagaatcg

SEQ ID NO: 21740 - DNA, 424 bp, Glycine max
  Clone ID: LIB3049-017-Q1-E1-B11
attcacgggtcgacccacgcgtccactccaactagtactgcttttgcacacaagaccaacccagatttgttttaccctactaacaactcagacttgtcttcaagtcctactactgctgttgaccctaccctttttccttcctatggttggggagggtctattcaccgtaggagttgttcagtcaatgatgcttgtttgggctctgaggaccctagttctgggttgggatggaagccttgtctttactttgctagagggtactgtaaaaatgggactagttgcaggttccttcatggtggaattggagatgctgatggtggtggtgctgctgcgatggttggctctcctggcaagattgagatgatggagcagtgccatgaactcttgcgattcaaatctgttcagcaacaaagattggctgctg

SEQ ID NO: 21741 - DNA, 264 bp, Glycine max
  Clone ID: LIB3049-018-Q1-E1-F9
gcggtgaagggggtgaaaacctctacctcaaagttgctgatgatggaaactagctagctagccacccaaaatgaacaagcttttcttagtttaattagttaggaagacatcaagggatagtagcttgctgctgctgcttatatataatgtgtgcttcaacttgaggcaaacgcttgccttgatgtctctacattactattagtaacataaattagcacatcttctacgtccttgctcaaaaataatctaatctgaaagggaaac

SEQ ID NO: 21742 - DNA, 403 bp, Glycine max
  Clone ID: LIB3049-018-Q1-E1-G9
ggtctagaattcccgggtcgacccacgcgtccatacaggcgtcagctgcaaacagacggggcagtgaggagagtgtgagcatctaccacagaggtgcagatattatcatccatgtaccttgtttcacatgctgaacagtcattgcatacatatgggatatctgattacatcttcggaaatcagcttacagttgctgataagccctgaattctgcgtcaccgttacgatattgctgtacgtgcattctcaagattcatatcaatatcattgataagttcatcatctacatcactccgcacaagtctgatcccagttaagaaggccttagggaccacacgatgagatacaatctttcagttgacatccatgcaatctggccaacgaccaatcttttatccatttc

SEQ ID NO: 21743 - DNA, 302 bp, Glycine max
  Clone ID: LIB3049-020-Q1-E1-E12
aattcccgggccgacccacgcgtccatacaggtgtcagaacaagactcaacggagacttctgtacagctgtgatattattatatgacggggtagtaatcttatcttatctctctgattcactccacactgcttgcaaatttcatactatttttcacatggcctcagcacatcttaagttccgttgctttggtggcgagcatgcttggatcacagtcagcgatgaccttcatacacacttttcaatctaccgtcacatcgttgaattttgcgttaacacctagcgttatacatggtagtcaac

SEQ ID NO: 21744 - DNA, 372 bp, Glycine max
  unsure (1)..(372): unsure at all n locations
  Clone ID: LIB3049-021-Q1-E1-B12
cgggctcgacccacgcgtccagcggacccttggccggtgccaaaaaaccaacaaaagggaaggcaaaagggcaaaaattttgaccacattggccccaacacaagcctttttccacaacaagcccctaacaatccaaccaaaaccttcaacaaagcgcccaattttgaacaacanaccanaccacattgtttgcaaggcaacacagaagcaggttactgtccaagagggtgangacactactactggccttgtctctcgcaagttggccctcactgtgctcattggtgctgctgctgttggctctaaggtggcacctgctgatgcagcctatggagaagctgccaatgtgtttggaaaaccaaagacaaacac

SEQ ID NO: 21745 - DNA, 338 bp, Glycine max
  unsure (1)..(338): unsure at all n locations
  Clone ID: LIB3049-021-Q1-E1-D12
cgggtcgacccacgcgtcagcccacccttcgttacggctggccaaaaaccaacaaaaagggaacggcaaacaattaggaccccaatccaaccctaagccgccatttccaagggctgcatctcccagtaactgtgaaatgtcacatcaagaaaaaatccacaaagataaagatgctgaaccaactgaatttgaagagtcagttggacangcattgtttgatctggaaaataccaatcaagagcttaaaagtgatctgaaggatttatacataaactcagccgtgcaagttgatgtttctggaaaccgcaaggctgttgttattcatgtcccttacagat

SEQ ID NO: 21746 - DNA, 261 bp, Glycine max
  Clone ID: LIB3049-021-Q1-E1-E12
acccacgcgtcaggggacacacagcttgggaagaaaatcgagaattttccgagaaaatccgaagaaaggggggcaagggttccccggaaaacaacaattggctggtccaataaccgctgattgacgaagttaatcccgtccgggaagcctccttttccgtttccggctccggcttttcctgggccccaacttccggcaatgtcaatggtgaaaatgaagcctcccctggggaatccgaagggcccaaagaaaacggctttg

SEQ ID NO: 21747 - DNA, 520 bp, Glycine max
  Clone ID: LIB3049-022-Q1-E1-B12.F1
aatcccaaaatcatcataatataaatccactataaaatcctaaatacaaatttattacgttctatttaattataatttctatcctccgtggatcttatatccaccactatccctttcaaaattactaatactcccataaaatatttacacatcaactttacataaaaacattttattccccaatcttcccttttatgattacaattaatccttccctttaatccttcccacaaatttctcaataaaacctaatccatacccttctaatacaattaaatccaataaatcctcatccactttacagtttactctcataattaatttacaatcctaacaaaactaaccccctccataccaaaaaccctatctttacattttcccatattctcaaataaaacttccccactataaaaataccattccattcaatattatctatttcaacctccaactaaaaataaagaaccagcctgacatccaacactctacctatcattctccacttcttcactaccatata

SEQ ID NO: 21748 - DNA, 453 bp, Glycine max
  Clone ID: LIB3049-022-Q1-E1-B12.R2
ggtagctgtgacaagaacttcgtccgagaaatattcagaattttgcatgccaacctcagatttgtctaaggagcaatgtaaatcatgtgatatttgcagacgatcagagtttattttaaaccctatcctagtgtgctctggttgcaaggtttcggtgcacttggattgttatcgtagtgtgaaagaaacaacaggtccgtggtactgtgagttatgtgaagatttgtcctctagaagctctggggcagctgctatcaatttctgggagaagtctgttgtagaatgtgctctctgtggtggtactactggtgcttttagaaagtcttctgatggtcaatgggttcatgccttctgtgctgagtgggtttttgagtctacattcaaaagaggacaaatagatgctgttgaaggaatggaaactttgcaaaaaggagttgacatttgttgcatctg

SEQ ID NO: 21749 - DNA, 350 bp, Glycine max
  Clone ID: LIB3049-024-Q1-E1-F7
aattcccggctcgacccaagcgtcagacgggtgccaaaagaccaccgaagggggagagacagtggcagcggcggtactctcacactgatactctcactctgaggaacgcacacggtgcgttcgtaaaaactgctaagaagatggcagaactgagtttgggaaagcacacggatatggtttattacgaagtcacgagagatactctacctgataaagatcgttcacgctgccggttctggtcgtaaggacggttgatgctgaagattcactacatgatacgctggctatggctctggagccatggcctcaatgctgacctggctcatgacgtaagttgcatcgttaaccac

SEQ ID NO: 21750 - DNA, 330 bp, Glycine max
  Clone ID: LIB3049-027-Q1-E1-A8
gacccacgcgtacgtacagccgtcagtacagcaccgaaaggggaacagagcggacaatggctccctcgggttcaaactttctgtctgccttactatgcgtttcaccactgtcactaggtggatctgttcccgcggaatggcataatcatggccttgttatgcacttctacagggaatctttccctctggccgaagacatcatcatcttaccagtcactcttcgctacacgctccacatgaccactgcttgtctcgtggctcacgaacatcttccatcactgtgctgttcacacttgtgacgcttcactgttgccccactccacaatacgg

SEQ ID NO: 21751 - DNA, 449 bp, Glycine max
  Clone ID: LIB3049-028-Q1-E1-B7.F2
ccggaaagtctatgacacatttgacaaagtctaatggagatgaaaaaaacaaaaaaaaaccacgaaatcagtgttcttccttcagaacctcagggaagaaaattcccacgatgttctattggtataaacttcaattcgcttgacagagtagcaacaagttgccactaaccaataacagtgtgttcccttcttttatgctgaactgcagcaagggattatagcaccgcttatgattttggatggtttcatacttcaaaagtatttcttttcataagaaaccagcccatgaactccaccttcaacctgtgctgctccactccggacctccagtcttaactccctggatcttagaaggtcatgagcagactgtagagaggaggcaccgatatcctgaaacccttgcctgactgcttgcaaggtgtatggcccacgcgtccgcggacgcgtgg

SEQ ID NO: 21752 - DNA, 410 bp, Glycine max
  Clone ID: LIB3049-028-Q1-E1-G6
gacccacgcgtccgcggacgcgtgggccatacaccttgcaagcagtcaggcaagggtttcaggatatcggtgcctcctctctacagtctgctcatgaccttctaagatccagggagttaagactggaggtccggagtggagcagcacaggttgaaggtggagttcatgggctggtttcgtatgaaaagaaatacttttgaagtatgaaaccatccaaaatcataagcggtgctataatcccttgctgcagttcagcataaaagaagggaacacactgttattggttagtggcaacttgttgctactctgtcaagcgaattgaagtttataccaatagaacatcgtgggaattttcttccctgaggttcctgaagaggaacactgatttcttggttttttttcgttttttt

SEQ ID NO: 21753 - DNA, 345 bp, Glycine max
  Clone ID: LIB3049-028-Q1-E1-H8
cagttgtaaccctaatcagaagaagcgcagcttcaagcgagtgacagccaccagccatgggtcgtatgcacagccgcggtaagggtatatcctcttctgctttgccctacaaaaggacacctcctagctggctcaagatctcttcgcaagatgtcgaagaaaatatctgcaagtttgcgaagaaaggtttgaccccgtctcagattggtgtcattctcagagattctcacggtattgctcaggtcaatagcgtcactggcagcaaaatccttcgcaccctcaaagctcacggacttgcgcctgaaattcagaggatctgtaccatttgattaagaaggcagtttc

SEQ ID NO: 21754 - DNA, 187 bp, Glycine max
  Clone ID: LIB3049-029-Q1-E1-B3
gaattccaggctcgaccgacgcgtaagtacggcagtcagtacagcacagaagggggaaccacagggtgattgcagtgcatgtcaagtggttacaccactacaccatgatcgtccgcatcgtttcacatagctgctgttgagacccagcgccgtctctatgcattacacggcgactcaactggatcca

SEQ ID NO: 21755 - DNA, 430 bp, Glycine max
  Clone ID: LIB3049-029-Q1-E1-D10
aattcccgtctcgacccacgcgtacgtggaggcgtgagcagatgagagaagggacagaaggggggcttgactcctctcatcagaagaaagcgaaaaaagcataaatgcaatctatgtccctgacgctgagcaagaggctctccaattcaaagcctctcttcagaatctcttccagcctcgtcgctcacgcatcctccgccacaacctctccgccgccatcttcgccgccagtcacctctcactctgccctcaacagcctcatcaccgctccgtggtccgccactcagtcaggcggaatcacgctttccggatctgatattagagtcaggaatctcattggaaaccgaggacgcgctcacgacgttttcacactgtatcgccctcttgaatgaacgggcaaagccactcatgacgttccgcctcaaagtgt

SEQ ID NO: 21756 - DNA, 449 bp, Glycine max
  unsure (1)..(449): unsure at all n locations
  Clone ID: LIB3049-029-Q1-E1-D11
ggtaccggctacgaattcccggctcgacccacgcgtcagtgaagacgacagaaggggacttcatggtataaaaataaatgtagacagattctgcctggctgtgatgcacttaacactaagaaaaagatggcactcagaagggcaacccctaacaccgttcatatgtataggaatttttcttaccaccacctaaagtagtagaagcctttgaaaatttgacacagtgcaacaaaatcccttcaccttatctctttttcttcatgcacagtcatcacctttgtcttttccatggctaaaatctggattgaggtgtgcttgatatctgctcgtggtgtgaggggttctccctcactttggaagcgtcaatggtatgctgtanggtgggttgatcctaagagcaagtactgcacaanagttgacgcttctgggaacgccaaccctgtctggag

SEQ ID NO: 21757 - DNA, 201 bp, Glycine max
  Clone ID: LIB3049-029-Q1-E1-D2.R3
agttccaggacgatagcgatgagacttcttgactccaccggtggtaggtgcagattttcttgcagccttggtggcgagttgcttcctaggagccttcccaccggtggatttgcgagcggtttgcttggtacgagccatgaaagacgattgagagagaaaattgattctgcaaggtgcgaaagagtaatgttgtgcgatgtc

SEQ ID NO: 21758 - DNA, 391 bp, Glycine max
  unsure (1)..(391): unsure at all n locations
  Clone ID: LIB3049-029-Q1-E1-D9
tacgcgtcgaggtaccggctacgaattcncggctcgacccacgcgtcagtacacgcgtcagtagaggagcgaaagggctagagaagggggtgcttcggaagaacgctcgcctgcaccgtccagctcgttctcaagagaagaggaccgagtgatgtttttccttgcagttcatgcgatggcgcctctgatcctgcatggtggaaaatacaatagcagttcgtacaagagactcagtgcggcggagtatgccggcgtccaagttgactttgcaccaacttttgacatgggtgtctctactagaactcgtgaatttcgcaagatcagtcctagtggcagggttcctgtgttggtaacatctgagggtccagtagtctagagcattgccattgct

SEQ ID NO: 21759 - DNA, 325 bp, Glycine max
  Clone ID: LIB3049-030-Q1-E1-B2
gggtcgaaccacgcgtccggggaaaatacgtcggatagcatagtgccataatggaagcttgagaaggaagtggtccaaagaagaagaaagatgaaggataactactcataccaatcgtatccagattcaggcgagtcctctccacgctccagagagatcgacttcgagagccctcctccatgggaccaccaaaactacaaagcgaagttcatctgcagctatggcggcaagatccacccacgctcccacgacaaccagctctcctacgtcggcggcgacaccaaaatcctcgccgtcgaccgctccatcaagttccccgccatgc

SEQ ID NO: 21760 - DNA, 310 bp, Glycine max
  Clone ID: LIB3049-030-Q1-E1-F4
cgtccgtaacggtgccaaaaaaacaacaaaaggggggggaagggaacaggtttaaattctgggaagacgactggatacaatgagaggcctcattaatcacaaagtatccaagactgtttgtagtctcccaacaacagaaccagacaatccagcagttgggagattttaaggacaatgaatgggagtggaacttgtcatggacgaggccattgtttgacaatgagataataatggcttcaaatttcctaagggacattgagaggaacacaatacagtgaaacagaagggatgagtgggtgtggaaggcata

SEQ ID NO: 21761 - DNA, 309 bp, Glycine max
  Clone ID: LIB3049-030-Q1-E1-F7
ccacgcgtccgggaaaataagtggaataaagtttccagattgatttagtcggcaattgaatacatggcccttgggtcaaagtttacacctgtagaccaccagaggcattcaattggccttaccaaggtgaacttgcaaatgagcacaacacaccatgtggttgaaagcctgctgggatgattgtggatttgtgtgtacatatattggtgttgtgcttgttatactgaggtggaggaggatgaaaagatgcctgatgcacattgagacgacatcgattgagtccatgtgcaaattggtttttgtatgtgt

SEQ ID NO: 21762 - DNA, 324 bp, Glycine max
  Clone ID: LIB3049-031-Q1-E1-F4
ggatggtgttttgttattcagatttcttttttattcaaagatagggttgttagggagtaggtattaattgtgatacgggcaaatactgctaagtgtccatgactgtgtcttcttcctttcagaaaattggcatgtaattgatttttggacatatgtgtctgtctgtcataatgtttatgtttttacgggatgtgtgcagccactttggacaacattcagttgccatctaatctcgtttaagctatgtttcttgtgctttgccttgttcttatcgggagatctatcccagttgtttgcaaaaaaaaagcaccccggggacacaaa

SEQ ID NO: 21763 - DNA, 537 bp, Glycine max
  Clone ID: LIB3049-032-Q1-E1-B4.R2
gatccatcgaaattctagacacacaacacataaaagatttccttgttctttttactgcttaaccgttcggctatctcatatatgaacaacaacatgttaggaatgaagagacggagagatgataatgaagggtccttggatttggcaaaatgtcttatgctgttttcttgtccaatagaaagcaacaagacacaacagaaaagttttggttctgtggaatttgagtgcaagacgtgcaaccgcaagttctcttcttttcaagcactgggagggcacagggcaagccacaagaggcagaagctggagggggaagaactgaaagaacaggccaaaagtcttagcttgtggaacaaacccaaaatgcacgagtgctccatttgtggccttgaattctctctgggccaggctctgggtggccacatgagaaaacacagagcttccctcaacgaagggtttcctattattccttctatcgaccaagttattgcgaaaatcccggttttgaaaaggtcgaatagcaccagggttatgtgcttg

SEQ ID NO: 21764 - DNA, 506 bp, Glycine max
  Clone ID: LIB3049-032-Q1-E1-G12.R2
ggcgtagaagagagtgaaagtaaaaggaaagctaaaaagagcagagtagcctccactgcaccaccatcatattttggctttataaaaaagccatagaactcattagaacttccccctttcccctttcttcttcttcttcttctctctaatttcatttccttgattatagctttcaattaatgggcttctacgctgaagatcctctctcaggcttgacaataggccaggccatatatgaggtagctctcatgattgcagttctgagatgggtcttgtgcttgatcttcagagtgatcaacgacagaagaacaacacaatccgacgagaccccaacaccagaaccatgttctcagatgacaagggacaaggacagcattcttttgctgacgactttcggagagattaaggagaggcttccagagacagaggagacgtgtgcggtgtgcctgagccagctgagcgtggaggacgaggttagggagctcatgaactgctaccacgtgttc

SEQ ID NO: 21765 - DNA, 356 bp, Glycine max
  Clone ID: LIB3049-033-Q1-E1-B6
aattcccggctcgacccacgcgtacgtacaggcgtcagaacacgagtcagtggggctgctaaaagactacagaatgggaacccaattaatctttgttttcaattccttatctcaataattctctttctccttcttctataactctcctctgtttactctgtttttttcacaaaacaacatggctgcatacagagaaaccatgaacatgaacatgatcgatagatccccggtttctccgcagcaaccacactcgccgtggcattctccggttccgtaccttttcggtggtttagcaactatgttgggtctcataaccttcgctctgttgatacttgcatgttcctattggaagctct

SEQ ID NO: 21766 - DNA, 197 bp, Glycine max
  Clone ID: LIB3049-033-Q1-E1-E9
ggatttgaaaggcgaggttgtcgcaaacccagacccaatctctcttgcgaaggaagacgatgggtccgatgctacaaaccattctcactgtgcttcttctccttatgcttcttctcatcgtcatttttcttttctttctcttcaaaccatggcgcttctttttctcttcgcgtttcctctcctccatcaagggcgag

SEQ ID NO: 21767 - DNA, 466 bp, Glycine max
  Clone ID: LIB3049-033-Q1-E1-G6
aggtagcggctaggaattccggggtcgacccacgcgtacgtccaggcgtcagacagaaagggcaggcacattgagaatggggcgtgttcgcacgaagacggtgaagaaatcctcgcggcaagtgatagagaggtactactcccgcatgacgctggacttccacacgaacaagaaggttctggaagaggtggccatcattccctccaagaggctccgcaacaagatcgcggggttctccacccatctcatgaagcggatccagaagggtcccgtgcgtggaatctccctgaagctgcaggaggaggaacgcgagcgtcgcatggacttcgtccccgatgtctccgccatcagggacgaccagatcgacgtcgatcaggagacgctcgacatgctcgccgccctcgggatgtccgaggttcctggcatcgttcaggtggatcctgttgccgtccaggcgcccctcggc

SEQ ID NO: 21768 - DNA, 311 bp, Glycine max
  unsure (1)..(311): unsure at all n locations
  Clone ID: LIB3049-033-Q1-E1-H6
aattccggcgtcgacccacgcgaccgtacagncgtcagaacacgactcaatggggatgcaagaagttgtcatttgggagcaccgtggattcattacaataatctcaatggttgcccaatagcagaacacacgtgttccatatgtttaaccgcaacggctcacggagtaataacacaatgagctcacctagcccctgagtaatcggtgcaccgtcaactcagataatgccctgaatcctatgattcagaggattcacgtcaacagcgacagttgcattgacattgacaattttggagatctgtatcagacca

SEQ ID NO: 21769 - DNA, 379 bp, Glycine max
  unsure (1)..(379): unsure at all n locations
  Clone ID: LIB3049-034-Q1-E1-F2
gacggcaacagaagaataatcaaatttctcagatctatccgacgtcgtcgcagatccaccaaccgttatggctgccttcagcggtgatgaaacggctccgtttttcggcttccttggagccgcagctgccctcgtcttctcctgtatgggagctgcctatggcacagcaaagagtggtgtgggcgtggcttccatgggtgtgatgagacctgagctggtgatgaagtctattgtccctgttgtcatggctggagttttgggtatttatggccttattattgctgttattatcagtaccggtattaatccanaggccanatcttattacctctttgatggttatgcacatctctcctctggtcttgcctgtggcttggct

SEQ ID NO: 21770 - DNA, 434 bp, Glycine max
  Clone ID: LIB3049-034-Q1-E1-F3.R2
gattccttttcctttctatctctctctcttcttatatttccacattccacgtgaaccttctagaactataatagaaagaaaccctccattccatggctccgccgctcgaacacaacggcgtttccacgagcggtgactctcagagatccattcccacgccgtttctcaccaaaacctaccagctcgtcgacgatcacaccatcgacgatgtcatttcgtggaacgattctggatcgtccttcatcgtctggaacaccaccgctttcgccaaggatttgcttcctaaatatttcaagcacaacaacttctccagcttcgttcgccaactcaacacttatggatttagaaaagttgtacctgaccgctgggagttctcgaacgagtattttcgaagaggcgaaaagcgtcttctctgcgaaatccagcgacggaag

SEQ ID NO: 21771 - DNA, 303 bp, Glycine max
  unsure (1)..(303): unsure at all n locations
  Clone ID: LIB3049-035-Q1-E1-F11
gatttcaattaaaccaaagcataagccatataatttttttttatttgaaataatgtccgggatcatccacaagattgaggagaccctccatgtgggagggcacaagaaagaggagcacaaaggagaacaccatggtgagcacaaaggtgaacacaaaggagaacaccatggtgagcacaaaggtgaacacaaaggagaacaacaccatggggagcacaatgagggacttgtggataagatcaaggacaagatccatggtgatggccatgacaagggcaaaaaaataacacnatcaattacaca

SEQ ID NO: 21772 - DNA, 408 bp, Glycine max
  unsure (1)..(408): unsure at all n locations
  Clone ID: LIB3049-035-Q1-E1-G5
gggccgacccacgcgtccatacaactgcnacatacgacaggctggtcgaagacgacatgaagggggtgatactcacatctatactctctaatgccacacgttttagaatgtgccttccaatctgattgaacagcatatttcttggagcacttttcacacttccacttcttctcaccatgtttgcgagagtagtgtttcttaatgccagtgaggtctccaagagcccttgaagggtcgtggtgaacacatgtgggctcgggacacagataaacctttctctttggctctttgttggtcttttgctttagcttccaaggcaagttgtgtcctcttctgtgtagctgtaggttttgctctctttggaaccctttattgcacacttcaaatataaacctgtttgttgccatt

SEQ ID NO: 21773 - DNA, 375 bp, Glycine max
  Clone ID: LIB3049-038-Q1-E1-A7
cgacccacgcgtcagtacaggagagaaaggggcaagaaaagtgattacggttgttgagtgcggcggtcaaaacactcttctctgcagcttttgcctacaactcccttcaccatggctgaacaaaccgagaaagcttttctgaagcaacgaaaagtgtttctcagcacaaagaacactgggaagggaaagagacctggaaaacgtgggaaccgcttttggaagtccattgggcttggatttaagactcccagggaagctatcgaaggaacctatattgactagaagtgccccttcactggcaatgtttccatccgtggccgtatcgtggctggaacatgtcacagtgcctagatgaacacgactattattgttaga

SEQ ID NO: 21774 - DNA, 434 bp, Glycine max
  unsure (1)..(434): unsure at all n locations
  Clone ID: LIB3049-039-Q1-E1-D11
ccacgcgtccaccacacgcgtccggggaattggttcagacttgagttcagttcggtttcacacactaaaacgcaattgttcaaagttgaagctgaaagtgtctgaaactggaagttgatatctataaagcgctcactctgtcttaggtggggttttaagtgttgtgttaataacagaacttcatcgtgacaatggttttgataagtggcaacaacaaaagtgtcttacaacaaacaaatgatgagagggccaaagcacaaggtgttacagtgcttcagaattcacatcagcatggaaacaagaacattgaaagtgggcgtacacagaatgtggtcaactctgggttgaccaaagcaatatcaacaatggatgaattcaagtgtggatttccatcagaaggcctatcgnacacatcaaataaatggtggggaaat

SEQ ID NO: 21775 - DNA, 101 bp, Glycine max
  Clone ID: LIB3049-040-Q1-E1-A10
gaacgaatggggggccttcactctgaaccagatactataagcttcactttgtccgtgacaaaacagttcccgcaagaggagtacaaacaaagaacagaaac

SEQ ID NO: 21776 - DNA, 337 bp, Glycine max
  Clone ID: LIB3049-041-Q1-E1-A4
gagtccgggcttcccgggtcgaaccacgcgtccgtccacgcgtcagcacacgcgtccgcgcacagcgtcagcccacgcgtccgcccacgcgtccgggggacacaacaattccatggctaaccctaacaccttagtctccttgagtccctaactctcactgtcgtcgcaagcttgaagtcgtgaggtctcacggttgccccttgcagtcgcgggctatctgtttatctctctccctgtctaagttccctttaactgtcgccacaagagtgaatcgtgaaatgggttgggaagcagctgagaaactcattaggcactggaaagttctcagaggggataa

SEQ ID NO: 21777 - DNA, 102 bp, Glycine max
  Clone ID: LIB3049-041-Q1-E1-F10
cgacccaagcgtcagtacaggcgtcagtacagcagcgagagggcgaccgaaggggcattctactgcagaggattgcaaagatatagagagagaggaagagag

SEQ ID NO: 21778 - DNA, 320 bp, Glycine max
  Clone ID: LIB3049-041-Q1-E1-G2
tccgggcttcccgggtcgacccacgcgtccgcccacgccttcgttcaggcttcaataaaacaacagaaaggggcacgaacaagggtaatttaaaatttaatcggcatcattcaagtagaacatttcgaagaacaagagagttagggcaataaaaccctacaaataatatggcaaaaagattaaccccggaaaagcgtcacagtttcgtccacaactgtcataaggtgttcgaatggggtcaaacccttgacgaggtcaatatttacatatctcttcctcctaacgttcattccaagcaattctactgtaagattcagtcc

SEQ ID NO: 21779 - DNA, 330 bp, Glycine max
  unsure (1)..(330): unsure at all n locations
  Clone ID: LIB3049-041-Q1-E1-G3
cgggcttcccgggtcgaaccacgcgtccgttcaggcggccaaaaaaacaacaaaagggggtttttcgtcagggtttccttttcgcacttggacctccaaattgaaaccaatttcgtaatccctccacactttctcgttcgggaaactcgcgaattggaaagacatcgacggctccgcgtgatacgttctcttcctgtctggttatcactgttggctattactgcaattgcatctttgcccgtattaccaccagtcaaaanatgtggccactgcattgaacagaatgttgtttccacattgagctttccaagacgactacagacaactaat

SEQ ID NO: 21780 - DNA, 53 bp, Glycine max
  Clone ID: LIB3049-041-Q1-E1-H9
gggtgttactatgcgatagttgtcaccaaaaaatataaaaacaagagataaga

SEQ ID NO: 21781 - DNA, 334 bp, Glycine max
  unsure (1)..(334): unsure at all n locations
  Clone ID: LIB3049-042-Q1-E1-E3
gacccacgcgtcaatcaggtgggaaaagacgacagaaagggggttcaatgtgttaatggttggtggtggtaatccttcctctcctttgtggtccgggttggggttgtttttcccccacttaaaatgtcttgncgcggtggtaactgtggttgcggaagctcctgcaagtgcggcaacggctgcggaggctgcaagatgtacccagacttgagctacactgagtcaaccaccaccgagaccttggtcatgggagtggcacctgttaaggctcaatttganggtgctgaaatgggtgtgcccgctgagaacgatggctgcaaatgtggaccaaact

SEQ ID NO: 21782 - DNA, 202 bp, Glycine max
  Clone ID: LIB3049-043-Q1-E1-A1.R1
gacgaacgagcgaaccacaaaaatattcatcacacagggttttggtttattatacaaatttttggattacccatttaatggatattagagtgtgaaagaaagagaagaaagaagaatgggaaaaggaagagtggagttgagaaaattgaaaacaaaaataacgacaatgacctttacaaacaaaaaacaaacttttgaaaaa

SEQ ID NO: 21783 - DNA, 457 bp, Glycine max
  Clone ID: LIB3049-043-Q1-E1-A1.R2
gacgcagcgagcgagccactgaaaatattcatcacacagggttttggtttattattccaatttttggttttcccttttgttggatattagagtgtgtaagaaagagaagagagagaaatgggaaggggaagagtggagttgaagagaattgagaacaagatcaacaggcaagtgacctttgcaaaacgaaggaacgggcttttgaagaaagcttacgagctttccgttctttgtgatgccgaggttgctctcatcatcttctccaatagaggaaaactgtacgagttctgcagcagttcaagcatgctcaaaacgctagagaggtaccagaaatgtaactatggtgcgcctgaggctaatgtgtctacacgggaagccttggagttaagcagtcaacaggagtacttgaagctgaaggcacgttatgaggccctacacggtcccagaggaaccttat

SEQ ID NO: 21784 - DNA, 567 bp, Glycine max
  Clone ID: LIB3049-043-Q1-E1-A1.R3
gatccaacatgaactgggtcctggttgatcttatttgcttcaaggacgaatctagctgcctttcaagagactcgagctctttgctgcttaaaggaccaagatcttctcccataaggttcctctgggaccgttgtagggcctcataacgtgccttcagcttcaagtactcctgttgactgcttaactccaaggcttcccgtgtagacacattagcctcaggcgcaccatagttacatttctggtacctctctagcgttttgagcatgcttgaactgctgcagaactcgtacagttttcctctattggagaagatgatgagagcaacctcggcatcacaaagaacggaaagctcgtaagctttcttcaaaagcccgttccttcgttttgcaaaggtcacttgcctgttgatcttgttctcaattctcttcaactccactcttccccttcccatttctctctcttctctttcttacacactctaatatccaacaaaagggaaaaccaaaaattggaataataaaccaaaaccctgtgtgatgaatattttcgtggctcgctcgctgcgtc

SEQ ID NO: 21785 - DNA, 197 bp, Glycine max
  Clone ID: LIB3049-043-Q1-E1-E4
gaagaaaaagttgtgtaattcaaatgaaaatggaagattaacttggaaccagtaaaacttgatgtaacatgccttagagaccaatgaaacactgttaaatctctggatcactttaaggggaagcagtaagcttgtattaacagaactcaaggtctcgaatgccacacaagaaaagaaaaagggaagagagagaaaaa

SEQ ID NO: 21786 - DNA, 346 bp, Glycine max
  unsure (1)..(346): unsure at all n locations
  Clone ID: LIB3049-044-Q1-E1-C2
ccggctcgacccacgcgtcagtgaaggcgtgagcggatgcgaganagcgacagattggggagaagtacagtgttgtatgcaattgcattcctcatctcagtctcattctcacacactgtgctccctctcttctcatccatttttatgtaatacacactctctcaaaccctaactctccaatcaatggtcatcctgtctcaatccagtgccagcttctccttcgtctccactcggaccgattccactcacctaactcgcttcccctgccgcgtcaccttccgaacccgctctcacctctctccgcaccgccctcgtctcttcgcgcctcaactcctccatgtctccc

SEQ ID NO: 21787 - DNA, 396 bp, Glycine max
  unsure (1)..(396): unsure at all n locations
  Clone ID: LIB3049-044-Q1-E1-C3
ccggctcgacccacgcgtcagcccacgcgtccgttacgctgccaaaaaacacaaaaagggaaacctccggtggttcccaaccgcctccggcaagggtccggaaacaaaaaagggtccggtttcctttccccaatagggcaagtggaagaagaagcgtatgangaagctgaagangaagcgcccaaagatgagacagagatccaagtagtgcgttaaacctagtttgtttccgttgcttttacaattgcttatgttgtcaaatangacacccagttgttagtggcactggtctctcctttttgatgttttgatacattttgttggattttatttcgtcttatgttcttagctgaaaacaatgctgttactgcgtttgcgaatcaacangatatcttg

SEQ ID NO: 21788 - DNA, 367 bp, Glycine max
  Clone ID: LIB3049-044-Q1-E1-C8
aattcccggctcgacccacgcgtccgcccaggcgtcaggctgcgagaaaacgagagacggggagatgaaatggtatagtacagataaaattcaaggcgaggaacactacactattgccgacaccatgctgaagtctacccatgagaatggcatttctgtgagaggtcataacattttctgggatgatccaaaatatcagcctgattgggtgaggactctatcagcctgcggatttaacgaaggcagcagcaaagagaatgaaatctgtgctttcaagatacattggagaactgattgcatgggatctgatgaatgagaacctccatttccacttttacgatgacaaattcggtgaaaatgtctctgc

SEQ ID NO: 21789 - DNA, 489 bp, Glycine max
  Clone ID: LIB3049-044-Q1-E1-E12.R2
gactaatgaaatgtacaatggttgttctgatgattctgcttatgggagtgatgagaacagcactgacactgattcttatcctgctccaaaggctcacagcaacaggaacaacctcagtgtccagaaggggaagaagaagaagaaattgaagtcaaagaaaagcaaggcacatgagtgtccaatttgcaacaagattttcaggtcaggccaagccttggggggtcacaaaaggtcccattttgttgggggttctgaggaaaacacacttgtgataaggccaagtgctcctcctgctgctgttccttgcctcattgatctcaatctaccagcaccggttgatgaatagggagaaagaaatgttggtgccaaaatcctggttttttttttttgcatcattttgaagcatcttctgttgaggtagctgaatgtctctggagttctgaaaatgtcttgtctttatccccatatgatgaaagcaatgaccatgta

SEQ ID NO: 21790 - DNA, 403 bp, Glycine max
  Clone ID: LIB3049-044-Q1-E1-F9
aggtactagttaggaattcccggctcgacccacgcgtcagtccggtggcaaaaaaagaacagaggggaacacacgcacgtctcttgcttccacttccagtccagcatgccgtcagatcatctcaaacatcgggtcaccagcacaatagcaaccaccagccacgtcaataggaccagcagaggctcacgactgctgatggccgcacgcggtcttaagtcactcgccagagccgttgtccgccctctctctctcagctccttatcatcttacagaggctcctcctcctcaagtgcatactgcgcgtcgagaatctccttcaggttcccaccctcgagggccctagacttgacgtgtccagcttcaagcttcatgatggtgtctctctgcatggatggtgtgagca

SEQ ID NO: 21791 - DNA, 432 bp, Glycine max
  Clone ID: LIB3049-045-Q1-E1-F1
ccgggccgacccacgcgtcagtaatgattaccagctcattgatattgctgaggatggatttttgagtctgcttactgaaaatggtaacactaaggatgacctcaagcttcccactgatgagagtctgctcactcagataaaggatggatttgctgagggcaaggatcttgttgtgtctgtcatgtctgctatgggtgaggaacagatttgtgccctcaaggatattgggccaaagaactagcttttggtgcttgttgcttgttatttctattttctatttaagcaaagatatttttgtaagccttttatattggtttgttcaagacctggcgtatagattctagtcagactagtcttaacaatggtttttatggatgtggtgacagaaactattatcacatttttctggttttctttgttgtcctgtgattt

SEQ ID NO: 21792 - DNA, 52 bp, Glycine max
  Clone ID: LIB3049-046-Q1-E1-H12
ggacacaccctgtatcgtcgcattaaacgtcgccgatgtcgtagttagacgc

SEQ ID NO: 21793 - DNA, 212 bp, Glycine max
  Clone ID: LIB3049-046-Q1-E1-H7
attcccgggcctgacccacagcgtccgatacggcctgtcgagagacgacatgaaggggagcggacgaagggtttcagtttcggggtgagacacttgcttcagtgaacagagatctcgcgaggtcgaatcagaacgacatcgatttagtgatgcactggcgaaggagcaggactgtgtcagctgggactcgaaacatcttcacccggacagac

SEQ ID NO: 21794 - DNA, 344 bp, Glycine max
  unsure (1)..(344): unsure at all n locations
  Clone ID: LIB3049-048-Q1-E1-A4
attcncggatcgacccacgcgtccgattctgcagctaaatcttctggtggggatcctaggtatcctgctagcatacaacaacctagacccaatgttcctatccaaagttggccagctactggctattcaattcctggagtaatgcccatgggtggtcacggagagttgcaaaaacttgtgcacggtcagactangaacatgaccccagcacattttgcaaggagttctgttcaatatccaccatccagtttctatggtatgggacaagttcctcctccagttaacggtatgacaatgggagtgagtaaacctcagtcaggagctcctgcagtgtcatctaacac

SEQ ID NO: 21795 - DNA, 423 bp, Glycine max
  Clone ID: LIB3049-048-Q1-E1-B2
acccacgggtccaaacagctgtcaaagacgacacaagggggagacatggccgaaaaagaagaagaatcagagctcagcgataaacaaaaagtggatatcgcgaaatggttcctcctcaactctcctcccggagaaatccaatacgttgccaaagatgtgaaatcgattctcaacaacgacgacttgtacaacgaagccgcttccgaggcttttccctattacaacaaatcgcacttgatttccattccaatgcccatccgaagcggagacgtactggttacttcgttcggtgaacttgagggtaatgcatttcttgaacctatgactgcgcaagttgcaattgttgaccatgctaaacaagtttgtacagacgtgagacctgccacagacgaagaactttcatccccatatattgaagaattt

SEQ ID NO: 21796 - DNA, 381 bp, Glycine max
  Clone ID: LIB3049-048-Q1-E1-H5
ccacgcgtccgaataggcaccaaatacacatttatgatacaccaatttgaagcttgtccacacaagacaagattatcaccagcccctttccattcacaaacctgagagtaagaagcagttgtcagtgaccaacaaaccaaccaaccaaccatgatgcctgctcatggcctcatcatctctctcatttttgtgtccattttagccaatgaggcaagcttggtccatgaggcaaatgggtcatttccaatggtgcccttggtggaggctgggaagatggagatgatgatggtgatgaatgagagcagaaggaaacttggaagcttccagatatgtgccttgtgcacctgctgtggtggagcaaaagggatgtgcttgccctct

SEQ ID NO: 21797 - DNA, 453 bp, Glycine max
  unsure (1)..(453): unsure at all n locations
  Clone ID: LIB3049-049-Q1-E1-B9.R2
ggtagttgaaggagcagaagaagaagaagagaaggtggtaccgccttcaattctctttttctctctccatttctcatcctcatcatcttattattcctcttccatctctattctccataacacccaccacaccacttgtngaaaaacctcattaatatcacacactgacatgtatctctgagctccaatccaatacaagaccacaccttgtcgtgtcggacgaaccttggtgtctgtttttttttttttttcattattttctccnaagagatgaggaagggcagaggtggaggcgcctcggcggcggcggtggatgtgaacggatccattttaaaggagcctcggtaccggggcgtgaggaagagaccgtgggggagattcgccgcggagatcagagacccgttgaagaaagccagggtttggttgggaaccttcaattctgccgaggatgct

SEQ ID NO: 21798 - DNA, 358 bp, Glycine max
  Clone ID: LIB3049-049-Q1-E1-C4
acgcgtcagacagaccggttggaagccacaaattggttttcttcaggagaagttatagaagagattcaaaggagacccaggaaaagtgaaactcctaacgtttccgaagtgattgaggaacaacagatgcccaaagtcgttgctcctagacctgagcaaatgattgctattatggctgccattgtgaattctcagactcttgaagaggttgctagacttgataaggcattgaagtcaggccagcgtcctgcagatttattgttggacaatgttgatgaaagagatgaggacatgattcatgacgatagaggtcaagctgatggagaatctaatgatacacaagagcagagaaatactg

SEQ ID NO: 21799 - DNA, 321 bp, Glycine max
  Clone ID: LIB3049-050-Q1-E1-A7
tccgggcttcccgggtcgaaccacgcgtccgcccacgcgtccgcggacgcgtcggcggatgcgtcaatacggcagcaaggggcattgcaagtgggaacataagtctttacacccttcacctcacacacaagatatgtgtcacgctacgccagctcattcattatgttcatgcactgccatcacaatccgaatcattctctctctctctcgcgcttctcgctcgcacattcatttaggcattttctctgtcaaatcgcaatgcctaccatggcgatgcgtcttcctctggatcgcgttacccacatacttatctgggcaaaa

SEQ ID NO: 21800 - DNA, 179 bp, Glycine max
  Clone ID: LIB3049-052-Q1-E1-C4
gcttacttttttgttttcttatgtttgcttttgctgctgtatatatggactacgccttcttttgtttgaattatgcaatgtaaagttgcaaaaaactcttgctgtgtatcgattttgtagtttgttgattgtttttggatgaattttgacacagaagaaaaaaaaaaaaaaagaaaaag

SEQ ID NO: 21801 - DNA, 175 bp, Glycine max
  Clone ID: LIB3049-052-Q1-E1-E6
gtacacagtttcaatatctgacaggcttcttcctagatgagtgtctgttgaaagtttaaatgtatgttccaaatttgatggttgtcatttgaaactgatttgtagtccgtattttcactatagaagtagatgtctcaaatttattgggcaaagggaaaaaaaacaaaaaaagcaa

SEQ ID NO: 21802 - DNA, 428 bp, Glycine max
  Clone ID: LIB3049-054-Q1-E1-A6
cgggtcgacccacgcatccgtacaggcgtcagtacagcagcgaaagggcgcacaatgggccatcacaaacctaccagtgacggtttttggtgagctgtggaaattggaaccactatctgaagaaaggaagagaaaatggcaaagagaaatggactggttattgtctcctaccaactatatggtcgagctagttcctgctaagcaaagcagttccaatggtggcatttttgagataatgaccccaaaagctcgtgcagacatccatatgaatcttcccgcacttcagaaattggactctatgcttattgaaacactagatttgatgatgaatacggagttttggtatgcagatggaggaagccaggcggaacggaggagggacacaggttcacagcatagcaaaagatggtggcttccatcatcccaag

SEQ ID NO: 21803 - DNA, 135 bp, Glycine max
  Clone ID: LIB3049-054-Q1-E1-B10
cgtccaaacggcagtgagtagaggagagaatggggggtccatcgggcatcgtcccgcttgctcgatgacgttatgacggtttgcgtcaagctgcactgtgtcgtcgcctggcactcttgtcatgggcatgactgg

SEQ ID NO: 21804 - DNA, 412 bp, Glycine max
  Clone ID: LIB3049-054-Q1-E1-C5
cgggtcgacccacgcgtccaaacagccgccagaagagcacagaaagggagataggtggaggagtatatcaaggctcgataccatgcatatctacatgacgattaataacgtctgtgggtctgcactagtgatggtggcagtgcagcctctggtgaaggtcactcgcacggcataggctgtcacttgtaccccagtgtagctgacatccttgtatgggggcagatacttcctctcatccaccagtcaggattttgttaccacaacgtcacggaacctcagcgttgcctctgtagtcacttcatacagtccaagtctaacgccatacgccatttcacctggctccagaagggttgctaactcatgtcaggtactcttgccaccttgttatttaccgatatctcatctcagacat

SEQ ID NO: 21805 - DNA, 183 bp, Glycine max
  Clone ID: LIB3049-054-Q1-E1-D1
cgcacgcgtccgtacagccgtcagtagagcagcgaaagggaaagcaaccggggcaattaaacgctcacgcatttgccacttagcctgaaactcaagaagactcacttgattcgtcacagacattatgtcgatgatcagtcacatgtctgaagtcggaggtcacgactccgctcatggcgcagc

SEQ ID NO: 21806 - DNA, 403 bp, Glycine max
  Clone ID: LIB3049-054-Q1-E1-D5
attcccgggtcgacccacgcgtccgaacaggcgtcagtacagcagcgagaggagcacagaagggggactatagatcggttctttgcttggagtgaatacgaatcaatttatggtcacttgcgttagtcctggaagaaacatatacaccactcacacaatcagattctcgatttcttggtgggtttgagcgatctcgttagtgtgacaaaataagtgaaatgtctcagacgatgaaattgacgccgaatctggatcagcacagcacgaatgtactgaacctcatggtgctccagccaatcgatccgttcatccaacagattctcttaacagccgcgcatgtctccttctactacttcgacatctatagcaaccactacagtcgcaacgatgttgaaggatctct

SEQ ID NO: 21807 - DNA, 159 bp, Glycine max
  Clone ID: LIB3049-054-Q1-E1-D6
atgcccgggtcgacccacgcgtccgaacaggtgtcagtagagcagcgaaaggggcacagaaggggtagtatctcttggtgctgtaccttaaatgaatatgaatcaatttatcgtctctggcgtcactgtttctggatatctgtcatgtgctactcagtc

SEQ ID NO: 21808 - DNA, 467 bp, Glycine max
  Clone ID: LIB3049-054-Q1-E1-D7
ccggggtcgacccacgcgtccgaacaggcgtcagtagagcagcgaaaggggtacagaagggatcgcatttcatggtactcaacctcaatatgatcacaaatgcatatccactaccttttttcgaagtctctgattgtcctaaaggcaccggtaatggaagagaagaagccggcggagaataaaccagcgtcggagaatgtaactgtggagaagaatccgaacgctgataataagatctcgactgaaggaaggagctagaagtatacgatgcgcacgatgaagagcgtggagacatacaagatgtacatcttgaaggtcctcaaacaggttcagccagacattggtatttccatcagcgccatgggcagcatgaacagcttcatcaatgatcttctctataacctcgccctagaagcgttgcgtttggcccgcttcgacatgaatcccaagatcacctcgagggagat

SEQ ID NO: 21809 - DNA, 51 bp, Glycine max
  Clone ID: LIB3049-054-Q1-E1-D8
aattccgggtcgacccacgcgtccaaatcgatatgatacgagcatagatag

SEQ ID NO: 21810 - DNA, 250 bp, Glycine max
  Clone ID: LIB3049-054-Q1-E1-E11
cgcgtccaatacagatgtgagaagaggagagaatgggaccacaaaggttgcaaatgaccaggtcaagccacaggtacctatctcagcgttaccaacacatgcatctgtctgtcgtcacacgagcgctaagttctcatcaattccaaggtcaggaacgaacccactgtctcggtggtacgagatactgaatctgaatgagtcaatagtcacgcggacgagaatgatgtgaccatgtatgacatcaacgcta

SEQ ID NO: 21811 - DNA, 332 bp, Glycine max
  Clone ID: LIB3049-054-Q1-E1-E5
ggtcgacccacgcgtccaaacaggcgtcagtacaggagtgagtggggctccgacgggaccacagaaggggttgcaggtctatatatcgacatcaacggttttacgttctaccaacaacaccaccagctccatcatcttcgatgacaacatgtcaaatttgacctctgcatcatgtcacgctagtgcttcctcacgttacctatctcaattttgcatctgctacatggctccaccaccaattcatgttcaaccaccgcatgaactcaagagacctccttggcgatccatacaatgattctgaagttacagcctagtctcccaagagtcttcct

SEQ ID NO: 21812 - DNA, 109 bp, Glycine max
  Clone ID: LIB3049-054-Q1-E1-E6
attcccgggtcgacccacgcatccgaacaggcgtcagtagagcagcgaaaggggaacaaacggggttgcagcttcggttcatgttcactaagtcgacatccagtgtttg

SEQ ID NO: 21813 - DNA, 269 bp, Glycine max
  Clone ID: LIB3049-054-Q1-E1-F5
attcccgggtcgacccacgcatccgaacaggcgtcagtacagcagcgaaagggcaacaaaaggggactaagaaaaacaataagatcaatggttggtcagcctcactccatctgaatacatccaacaaaatagaatatatcttataccctcatcaactatcaacgatagcgaatactgatgatctcgaccttgattcatgggaaaccctctatcaaaggctgagcgtcggcgataatcatctccgatcggtcttcatccgcaaggtctac

SEQ ID NO: 21814 - DNA, 136 bp, Glycine max
  Clone ID: LIB3049-054-Q1-E1-F6
tccgggtcgacccacgagtccgaacagccgtcagaagaggagagaaaggggaacaaacggggtcgatgatatggtacatggtcattgaattttcatccatcgttggcagctgtcatgcaatctcctcggactgatc

SEQ ID NO: 21815 - DNA, 363 bp, Glycine max
  Clone ID: LIB3049-055-Q1-E1-B4
gatcctcgcatttctcatccaccacgtccagggaaccgaaaggtgcaaatcagagaagaagattatcccggaccagggcctaacactatacattatcctttctcccctcatcctcccccacttgatgattgaagacttagtgttatagacatggctaatggagtgacagtggagttaaattataagcatgtttaaaaagattaagttacatatatatgggaacaaatttgaaattaaaatgtataaatttctctctctaagtattttaataaacatatatgtttaggacttgatctcaaaattattagttgttgtttctttttatttatttttaccacacgacactcgggtaggggtgaaaaa

SEQ ID NO: 21816 - DNA, 468 bp, Glycine max
  Clone ID: LIB3049-055-Q1-E1-F3.R4
tgcccctggttcttctggcgagtggaatatgccttgggcataatggccaccctcttagcgtgatatagcacatggttagtgtcttcaaagtgaccaaccaagtaagcctcagcggcttcctggagcgccgaacggcgctgctctggaacctcagatccgttttgaagtcctgagcgatttcacgaaccaaacgctgaaacggaagctttcggatcagaagctccgtgctcttctggtacttcctgatctccctcagggccacggttcctggcctgaacctgtgtggcttcttcactccgccggtcgccggagcagacttgcgggcggccttagtcgccagctgcttccggggagccttgccgacggtcgacttacgggctgtttgctttgtacgcgccatctggagttttctggaagcttctggaagagcgaatcgtagtggagaatgctttgcgctttgctggaatc

SEQ ID NO: 21817 - DNA, 398 bp, Glycine max
  Clone ID: LIB3049-055-Q1-E1-G3
cccacgcgtcaacaaagcgtcgttcggtggcaaggggacaacagacgggggaaaacatcgagataaagatatagggtgactatctagcacctccttctatttccggtgtcggtgtgggtgtttgaatctggtgaatgatgtcaattgttccaatcaaccagggtgatgccaattggtctaaccccttcgcttcgtggggtcaattcgtggattttcctctccctccttccatctccggcttcttccccggcttggaattcggattcggattcggatcatccgtgaacacacgtatagactgaaaggagactctcagagcgcacgtgtggaagctggtgcttcccggcttctccaacgatgacgtgctggttgaactccaagacgagacggtgctccaa

SEQ ID NO: 21818 - DNA, 410 bp, Glycine max
  Clone ID: LIB3049-056-Q1-E1-A10
gggtcgacccacgcgtccgacacgcctccgtacggtgccaaaagaccacaaaaaggggaagacttaaccccaaaccaagaaaaaagaccgaaaacaatttgcacaacacaaatttgaaagatgtccatcttcgagtacaaccgaagcgccgtggtggctatggtcggcaagaactgcttcgccattgccatcgaccgaaggctctgcgttcagctccaaaccatacccacggatttccaacgcatttccaagattcacgacaagctcttcatcgctctctctggcctcgccaccgatgctcaaacattgtatcaacgtcatgttttccggcacaaactgtatcagcttcgtgaagagagggatatgaaaccagagacctttgccagcttagcctctgctctgctttatga

SEQ ID NO: 21819 - DNA, 136 bp, Glycine max
  Clone ID: LIB3049-056-Q1-E1-C6
ggcctttcaaatcaaaacgtgattatctcacagtcgtttcggggcattcttgtgcactcagttactctctctctctctggagcgtcgtcgtttcgttagggcacataaccccttttcggatcggtggagcaaggcc

SEQ ID NO: 21820 - DNA, 440 bp, Glycine max
  Clone ID: LIB3049-056-Q1-E1-D9
acgcgtccgaccacacgtccggcgagaagacgaaagaagggggtcttgtacaagtttgtaatggttaaggtattttcagctctgtgaaaagatactggttttcttccttggctctttatcaacaatgatataaaattcgctgttgttattaattccaagcaggcagcacatggggtttgtgtcaaatatctgataaagagttgaaagtacttgggggcagtgggaatttggcagtgctctttagtttggttagtgcccatgtctgctacgaaatttccttcggggccatctatatgcgatggatgcaacttgttccatgcggatgtctcatcgatattaaagaatgaataagaactcacggtaagtgcgtgagatctccttctttatttcctcaaaatttaattggagatattatcatgactaagaataagaatatcaca

SEQ ID NO: 21821 - DNA, 293 bp, Glycine max
  Clone ID: LIB3049-056-Q1-E1-E1.F3
gcttcttgtaggttgcaggcaactccttgtgcttcccttcgatgtatttggttatcgcgtattggctcgaaccggttctctctttcagactcgcaaccgcctctgctatcatcacggcgaagggagggtgggagaggggcttcttggacgacgccgttttcttggccttgggttgcgatgcggtagacatgatgatggcttgattgaaactcaaaacgaaaaaggagtaaccgttgttgaaattgaaacaagagatagatagaaattctgagagagagagagaggtgtggatc

SEQ ID NO: 21822 - DNA, 439 bp, Glycine max
  unsure (1)..(439): unsure at all n locations
  Clone ID: LIB3049-056-Q1-E1-E10
gggtcgacccacgcgtccgaacngaggccaaaaaaacaacaaaaggggttgcaaaaaacctgaggctgaatccggcaattccggttgcaaatgctgaaaccattgtaccaaaggcaattcgtgatggtgcaattgatgcaacattggatcatgccaatggttggatggtgtccaaagaaactggagatatttactccacanatgagcctcagttagcctttaattctcggattgctttctgtcttaacatgcacaatgaggcggttcgagcacttcgatttccaccaaacacacacaaagagaaggaaagtgctgaaaagagaagagagagacaacagcaagagcaagagctggctaagcatattgtagaggaggatgacgatgatttctgataattgttttttttcaccctatgaattgctatctggataccttcatt

SEQ ID NO: 21823 - DNA, 378 bp, Glycine max
  Clone ID: LIB3049-056-Q1-E1-E11
cgcgtccgaacacacgtccgccggtgggaaaagacgacaaaaagggggtccagtgggttaatggttggtggtggtaatccgtcctcctcctttggtggtccggtgttggggttggtttttcccctaaccgaaaaatgtcttgctgcggtggtaactgtggttgcggaagctcctgcaagtgccgcaacagctgccgaagctgcaagatgtacccagacttgagctacactgagtcaaccaccaccgagaccttggtcatgggagtggcacctgttaaggctcaatttgagggtgctgaaatgggtgtgcccgctgagaacgatggctgcaaatgtggaccaaactgctcctgcaacccctgcacttgcaagtgaagtg

SEQ ID NO: 21824 - DNA, 540 bp, Glycine max
  Clone ID: LIB3049-007-Q1-E1-B3.F6
aacccttatacctaaaaacaccaccagcaacttactacaccaaatccttgcaatttttttccctatctccctaatagcaagggtctcttacatcccacataaacctccaaaacaaacgaaacctaacaataaaaattaaaaaaaaaaaaaaaaacaaactagcctccaaatccgtagagggttcttccttgtctcttgagagcataaaccacatccattgccgtaacggtctttctcctagcgtgctcagtgtaggtaacggcgtcacgaatcacgttctccagaaagatcttgagcacgccacgtgtctcctcgtagatgagaccactgatacgcttcacaccacccctgcgagccaaacgccgaatcgcaggcttggtgattccctgaatgttatcgcgcaacaccttacggtgtcgtttcgctcctccctttcccaaacccttgcccccctttccacgtccagacattttgctcgaaaagttagttaacaaacaatcacagtcgaaagggaaacgagaatgaatagtgaaatgtgcg

SEQ ID NO: 21825 - DNA, 664 bp, Glycine max
  unsure (1)..(664): unsure at all n locations
  Clone ID: LIB3049-034-Q1-E1-F3.F5
ccaacagcttcggnttcatctcctccaccgcatcctcgccggagcaccgcttcgccgccgccgcggaactaccgtccgcttgagcgttagcgtaattcgacatgagattgaatatattgttgcagagcgatctcatcttcaccaattccttcgtcaacagaatgttctcctttctcagccgctcgttctcgtccaacagctccaccggtgctctcgccggcgacgagttcgacgaaagcacctgctcctccgcggagttcgacggcgacacgatcggcttcgccgtcgggatcgcagatagcggcagcggcgacggaaccgccacggtggcagttgctcccgccggcggaggagatgcggagaggatcttccgtcgctggatttcgcagagaagacgcttttcgcctcttcgaaaatactcgttcgagaactcccagcggtcaggtacaacttttctaaatccataagtgttgagttggcgaacgaagctggagaagttgttgtgcttgaaatatttaggaagcaaatccttggcgaaagcggtggtgttccagacgatgaaggacgatccagaatcgttccacgaaatgacatcgtcgatggtgtgatcgtcgacgagctggtaggtttttggtgagaaacggcgtgggaatggatctctgag

SEQ ID NO: 21826 - DNA, 619 bp, Glycine max
  Clone ID: LIB3049-034-Q1-E1-F3.R5
ctctccgcatctcctccgccggcgggagcaactgccaccgtggcggttccgtcgccgctgccgctatctgcgatcccgacggcgaagccgatcgtgtcgccgtcgaactccgcggaggagcaggtgctttcgtcgaactcgtcgccggcgagagcaccggtggagctgttggacgagaacgagcggctgagaaaggagaacattctgttgacgaaggaattggtgaagatgagatcgctctgcaacaatatattcaatctcatgtcgaattacgctaacgctcaagcggacggtagttccgcggcggcggcgaagcggtgctccggcgaggatgcggtggaggagatgaatccgaagctgtttggggtggcgattggtaagaagcgagcgagagaggaggaaggacatggagcgaagtatgatacggctttgagtctgcatcagccgtttcatgcggacgtgaaatctgaagcgttggatttaccaggacgtggcgaaaataaaaaaacgccgtggctaaatcaatgtcatagagcaaatcagagggtgtgtaattgacacacgacgttgtaatagctaggtaacacgttaggttaagttaggggcgtcgtagagaatc

SEQ ID NO: 21827 - DNA, 595 bp, Glycine max
  unsure (1)..(595): unsure at all n locations
  Clone ID: LIB3049-056-Q1-E1-G12.F5
tcgtcgtcgccggnaaactcgtcaagtcaaggctcgttcaagctcccacctaccanacctgctgcatcttcttcttcttcttcttcgccggcaaagaagaaaaagcccgcagctgccaagtccaagcctaagcctaagcccaagcccgctgcgaaagccaaggatactaaggcaactaaatcgaaggcaccagctaagcccaagccagctgctaagcctaaagccaaagctccagccaaggccaaacccgctgctaaaccaaaggcttctgctgctgccaagcccaagcctgctgccgccaagcccaaagccgctaaaccagctgccaagtccaagcctgctgctaaaacaaaggctgttcctgccaagcccgcggcaaagcccaaagccaagcccgtcaaggcttcaaggacgtcgacgaggacttcaccagggaagaaagcagctcctgctgctaagcccgcggcgaagaaagttgcggtggcagcgaagaaaacgccagtgaagagtgtgaaaccgaagagtgtaaagtctccggccaaaaaggctacggccaagagagggggtaggaagtgagaaagagtggtcggtgggg

SEQ ID NO: 21828 - DNA, 168 bp, Glycine max
  unsure (1)..(168): unsure at all n locations
  Clone ID: LIB3049-056-Q1-E1-G12.R5
agcggcgggctacatcttgaccgccggcggaggaacaagagcagcaagagcaggaggacngagcggcgggagctagaacgagccaagaactaggacgagagagccggcggagaccagctttctcaatggtgaagaagaagctgctggaagggcggggaagctgctgga

SEQ ID NO: 21829 - DNA, 669 bp, Glycine max
  Clone ID: LIB3049-004-Q1-E1-G9-F1A
cgcaacaaagcacaacctataatatatgtgaagtgtctggaatgacgtacaaattccaacagtaacaaatcacagcatccctgactacaaatatataaccacattctcccaaaatatgggaaaaaggagaaattgactcaataaattcagactatcggatctagggaggaaaatgaatcaaggactatgaaaaattgcatgaaattgaaacccactttcccgtcaggcaccataggacctcaaaaacacccatcagccacatgatactccgaagaaacaaacaattactgctgcttgcactctggaggtcgctcaccatcaccatcaccagcctgtgccttaccactcttcttctttttagtcttagtgtcatcctcctcttcatcgtcttcgtcctcgtcatcctcttcgtcctcatcttcgtcctcatcttcctcttcgtcctcatcatcctccaggtcttcaaactcatctccctgagcggcctccccagtaaaccatgatacagcatgagggataattttatctcttaatgttgacccaatgtcataatcttgttccatctgattctgaagttcttcagccaaatcttcatcaatgtcagcatcatcttcagggacttctgggtggtttgaaaaaattgaagaagctttcacagcttttcagttt

SEQ ID NO: 21830 - DNA, 355 bp, Glycine max
  Clone ID: LIB3049-007-Q1-E1-D4-F1A
ggcacaattcttcaggtgattccacttatttaaggatagaacaaggacaaatatgtatatggtaattaatctaatttggaagccaaagaagattctcctcagtgaagacatggcatactgtaccattcccaggcttaagattgagcactttgaatgccccatgattatggtcccactttgtcgtgtctctgtggcacgtaacaactgctttcactcgaaccccatcttctcccttcaagcgcaccaaatatccgctactccttggcactagatgacacccaaacacaacatatgggtaacttcatggatgtcaggcaataaccttattcatctcccaacttccttatcccatttt

SEQ ID NO: 21831 - DNA, 365 bp, Glycine max
  Clone ID: LIB3049-019-Q1-E1-H7-F1A
gtcaaagtgaatctaattattcaaatatttccgtttaggcacactacaaatggtaagaagctgttgctgttgatatatctatcttctatacaaaacataacaaactggaaaataacactaaaaccctaagaaacaagaaatgtattgcaaaacgaaaaggcgacaactatgctattatcattattataagcctaagcacgttctccacggatgcggcgtgcgagttgaatgtccttgggcatgatggtcactctcttggcgtggatcgcacaaaggttggtgtcttcaaacaaacccaccaagtaagcctccgcagcttcccgaagcgcaagaaccgcgtgactctggaacctcaaaccagtctg

SEQ ID NO: 21832 - DNA, 533 bp, Glycine max
  Clone ID: LIB3049-042-Q1-E1-D6-F1A
caacataaataccatatatacagcagaaagcgaatgataagccaattatattgatacaaacttaaccagatttcaacaagaaaactctaaatcaaactaaaagctctacaagagataaacaccccttaactaaacagttggatttagaagtacaaataaagaactcccttctttaaactattcacgttttggaaagacaaccaatttacggagggagcagggaaatattttttggaagcaagaaatatgtttatcaggaaatgaccagaccacctacaacagatgatcaaaatcatcagaacctacataaatgcaattatcagtccattctccaatcgtcatcctcttcctcgccactgccttcctcatcatcatcttcatcattcacctcagatacaggcttctcagattcttcttcatccccaccagtagggccttccgcctggttcttgttataggctctcaagatcttctcgtactccacttttcttttctcagactttgccacataaggtggccttttcagcatcaga

SEQ ID NO: 21833 - DNA, 639 bp, Glycine max
  Clone ID: LIB3049-054-Q1-E1-C7.F3
gcctctaatgttctccgcaagcttcttgttcgcgctttgcaatctgctaacttcatcggtcagatcctccagctgtttctgcttcctcatccgcgatcgccgcgccgactcgcggttcgacagcatcctcttccgcttcctctcatcgatgatatgcggatctcctccttcagatccagaacttgtagtagtcgagcgttgttgttgttggatcggtgatgccatttccgagaaggagattttttatttgatttgataacagaaccaaaaaagaaactaatccaaaaaggagacgcagatctaattaattattggaaaagacaaggattaactaaggagatagatctaattaatcacggatttaagagggagttcatgagaaaacgtagaaccagtagaggaacacgacggagaaggagtgcagcatacgaattcgacgcatggtcatataatttcaagaaacattggagagttttgcaaaagccctatctatgcttttcatccacaaaatcaaactcaatggactcgtgatttgggacagggaaacactagatctgaagcagatcctaattttctggagctagctaggcgaggaagaaagaggaaaaaatgggggaagagaagaaagggctctatggt

SEQ ID NO: 21834 - DNA, 499 bp, Glycine max
  unsure (1)..(499): unsure at all n locations
  Clone ID: LIB3049-054-Q1-E1-C7.F4
tgcggctctctcttcttcanatccacaacttgtagtagtcgagcgttgttgttgttggatcggtgatgccatttccgagaaggagattttttatttgatttgataacagaaccaaaaaagaaactaatccaaaaaggagacgcagatctaattaattattggaaaagacaaggattaactaaggagatagatctaattaatcacggatttaagagggagttcatgagaaaacgtagaaccagtagaggaacacgacggagaaggagtgcagcatacgaattcgacgcatggtcatataatttcaagaaacattggagagttttgcaaaagccctatctatgcttttcatccacaaaatcaaactcaatggactcgtgatttgggacagggaaacactagatctgaagcagatcctaattttctggagctagctaggcgaggaagaaagaggaaaaaatgggggaagagaagaaagggctctatggtaaagaagaagaac

SEQ ID NO: 21835 - DNA, 271 bp, Glycine max
  Clone ID: LIB3049-054-Q1-E1-C7.R3
gccgatcgatctgcgcttcttgaacttcatccctgagacgctgaagagtcgaagggttatccgttgagattcccgagattccagatcctctcctcaagccctggcagattcctcatccgatacaaccgattatggccaccgcaaacatgtttctgcgttgatcattcctgaggattttactttaattagggttattcagtgcggtagtaactttctctgttatgtgtattatagtactattagtgttaccctgctgcatggaggcctccct

SEQ ID NO: 21836 - DNA, 516 bp, Glycine max
  Clone ID: LIB3049-054-Q1-E1-C7.R4
cgcgccgcggctcgcgatggcggatgaggaagcagcaacggtggaggatctgaccgatgatattagcagattgcacagcgcgaacaagatgcttgcgaacaacatagaggccggggagaagcgtgcgtagagaccgaagcggcgaacagttttctgagcagcacagacagtggaactggccgatcgagtgctctttttgcactccattcttgagatcgctgaagaggtcgaggggttatccggtgagattccagagattacagattctcttctcaagccgtgggagatttctcatccgatacaaccgattatggccaccgaaaacgtgtttgtgcgttgatcattcgtgaggattttactttaattagggttattcggcgcgggagtcactttctgtgttgtgtgtattatatcacatatgagtgttatctgtctgcaacaaaagtactcgtgtgcacatcaatgcatgtgctctcctgagagagaagaatgtgaggcaccagggttgttgatggc

SEQ ID NO: 21837 - DNA, 361 bp, Glycine max
  unsure (1)..(361): unsure at all n locations
  Clone ID: LIB3050-024-Q1-K1-B11
cgtgtctaatcatcatcacgtagttcagacctcgccaccgaaactattcggtttcccactaacagagcaggaggaattgaattcagatgcagaaagaaaatacgaggttggagaggacagaaaattcagatgccactactgcaaacgagtattcggaaactctcaggccttatggggccaccaaaacgcccacaagaaagagcgtcagagggcgaggcgtttccaaatccacactcatagacgctccattgcagcaccatcttctgcttctgttctcaactcacatgcaataataagatcagtaccttcagttacagttactacgctaccctncttcatttacttacgaggaggcccttct

SEQ ID NO: 21838 - DNA, 341 bp, Glycine max
  Clone ID: LIB3050-028-Q1-E1-G9
ggtgttttggttgatgatggagatgatgacatcgtaggtgctgtgaaggacgatttgatagctgttaaagagagggaccctgcttgcataagttatgtgcattgcttgctgaatttcaagggttttttggcatgtcaggctcataggattgctcacaaattgtggcttcaagggaggaaggtcttggcgctgttgattcagaatacggtgtctgaggtttttgctgtggatattcaccctggtgccaaaattggacgtgggattttgctggatcatgcaacaggacttgttgtgggggagactgcagttatttgcgaataatgtgtcaattttacataatg

SEQ ID NO: 21839 - DNA, 328 bp, Glycine max
  Clone ID: LIB3050-028-Q1-E1-H1
gacagacaaccaaacggtttatcaccaatgcttgtcaccgtttggtggttacaatttcgccagtacaaggttcgctcgctactcacgaagctgtgagcatggtgaataatctacaaactacaggcagtatacatgcgccatgtatggtgatgagttctgaggagcttgccgtgggggtgatgaagatattattgggccatagaattgtggtgcgacgattttgcaacggtgttaattgtaccaccccacagtatggcccccatgattaacggggggcacatgttgctatcactactacatttcctacgaatccttttcactacatttt

SEQ ID NO: 21840 - DNA, 400 bp, Glycine max
  Clone ID: LIB3050-028-Q1-E1-H10
ggaagtaaactgtgcattctaatctgcagagtgcatcagcattggatctggaaacgcgtggaagaagaagaaatggctcgcgcaggagggataacaaacgcagtgaacgtgggaatcgcagtgcgagccgattgggagaaccgcgaattcatctctcacatttctctcaatgttcgtcgcctcttcgacttcctcgtccaattcgaggctacgacgaagagcaagttggcgtttttaaatgagaagctggatgtgttggagcggagattggagctgcttgaagttcaagtgggcaatgcttcggccaacccttctctttttgccacatgatttttgtgttgtaagcactctccacctataatgtaaaatctaaatggaattccttatatgtaagtcgttt

SEQ ID NO: 21841 - DNA, 395 bp, Glycine max
  unsure (1)..(395): unsure at all n locations
  Clone ID: LIB3050-028-Q1-E1-H11
ggagtgagcgtagttgaggttttgccacttcgaaaccaaattttcttccttcgttggcatctgtgatctcttctcctcacaatgagcagatcagggcaaccaccggatttgaagaagtacatggacaagaagcttcagatcaagctgaatgcaaatcgcatggttgttggtactctccgtggcttcgaccagtttatgaatttagttgttgacaacactgtggaagtgaatggcaatgagaaaaatgacatanggatggtggtaatcagaggaaatagtgtggtcactgttgaggcgcttgagcctgtgaacaggacttgatttctgtggcttgtaaacattctatataagtattttctggttaatggttgtgtatttgaacaatgtagctattg

SEQ ID NO: 21842 - DNA, 338 bp, Glycine max
  Clone ID: LIB3050-028-Q1-E1-H2
gggcgaattgagaaatgggtactgaggagggcctttgatgatgaagaacatccttatctgccaaagcacattttatacaggtagaaagaacaattcagtgatggagttggctatggttggattgatggccttaaagctcatgctgagaaacatgtgactgacagaatgatgctcaatgctgctaacattttcgccttcaacacaccaaccaccagagaagcatactactatagaatgatatttgagaggttcttccctcagaactcacccaggctgagtgttcctggaggacgaagtgttgcatgtagcacagccaaagctgtagagtgggatgctgc

SEQ ID NO: 21843 - DNA, 314 bp, Glycine max
  unsure (1)..(314): unsure at all n locations
  Clone ID: LIB3050-028-Q1-E1-H3
gatgagaggctggttgtgcacgccactgctgcggctgctgctgggggtttggctgctgtcgttaccacgccgctggaggtcgtgaagactcaattgcactgtcagggtgtctgtggttgtgatangttcacaagcggatcacgtggggatgttatgacgacacgactgggcaaagatggttacagaagggtgatgcgagggtcgattccaaggatggtcttgtcatgctcctgctgcggcgacttgctggtctacatatgaagctgggaagtccttattggaagattgcggtcagcagacagacactgggaccg

SEQ ID NO: 21844 - DNA, 204 bp, Glycine max
  Clone ID: LIB3050-028-Q1-E1-H4
cgagaaagacaccggtagacatcattttggtcgtggttacgacggtgacactaacaggcaacatgatgctactcgtgtttatcccggaatagacattggtagagatgatggggactaccggtgtttatcggctaaacaccgacagacatcatggaacttctgggctgaatcccgggatagacacgcataaccaacaacatggga

SEQ ID NO: 21845 - DNA, 247 bp, Glycine max
  Clone ID: LIB3050-028-Q1-E1-H6
ggaaaatgataaatctgagctgaaaaaatttgttattagacctatgcccaatagaaacagtttgaatgatgccaaccgagttgggacgaaagggaatcctgtgggaactgtggaagaaaggaaggaggaatatgaccgggcgcgggcacgtatctttagtagccctacgagctcggaatgaggcgagccgtcatccatggttccaatcgacgggagaaattcgtcgactagcaaggatgagaatgaa

SEQ ID NO: 21846 - DNA, 251 bp, Glycine max
  Clone ID: LIB3050-028-Q1-E1-H8
ggggatgcaaggactgtggtaaagtgaaagcaggcggtgcttatactttgaataccgcaagtgctgtgacggtacggagcaccatcaggaggttgagggagcaaactgagagttgagctttttgttgatgttatcaattactattagactttgcgtgatatgcctagtttgtgttcactgaactgcattggttgtattcaaagtaaactccttaaagtttaattttgagatgactcttttaattttaaaaa

SEQ ID NO: 21847 - DNA, 399 bp, Glycine max
  Clone ID: LIB3050-028-Q1-E1-H9
ggtaggaaagcaaaaacagtaagtgttcccctaattcagttaaggtccgaattggtcaacttgagatgatggcatcatttgcaaggactactcaaaagttcaaagcatgttaaaagactgtgtaattggtggattaactcaatggtgacaacaagattcaacaccaatcaagtttcaaatgccaacaatggaaaggtaaccctaagttgaattaataatggtcccttgaaggtgttttaaaccgttagcctcaatttggttaactccttaagaagacacggaaccttgacaaaagttttgaaggtattccaagaactgcaagacttgaaagatctgccgatcaggtccaaaccaatacaaaggtttcaaatttgtttgctggaactcacgaaaaatgtg

SEQ ID NO: 21848 - DNA, 323 bp, Glycine max
  Clone ID: LIB3050-028-Q1-E1-G8
gaggacgtacaatagcatcatagtctcaattttgatgtgcatgagaggagagaatctcataagatgaaagcgatacgatttagcttcagaggcttcatttggtgtcgagaggtgcgagtcttggcagaagaggcatcctcatttaacatttcgatggcgttgcgcgaaggattgagaagagaaaaaaagaaagaaggaaaggataggtttgatgggtcaaagcgcatcacgtacaacacagatgagaggagagtttagcggtggtggatgccctgttcattcaaaacggcaagggcgctttggcatcataaaggagcacaaat

SEQ ID NO: 21849 - DNA, 372 bp, Glycine max
  Clone ID: LIB3050-026-Q1-K1-F8
taccggcgatattttccggcagagcataacggaaatgcttgcggagtccccttccggtgcgccagaacttcacgttctcgccgtcgatgacagcctcgttgatcgcaaggtgatcgaacggttgctgaagatttcttcctgcaaagtgacggttgtggagagtggaacgcgcgctcttcagtatcttgggttggagggagagaacggttctcttgggtttgatagtgttaaggttaatctcataatgacggattattccatgccggggatgacaggatatgaattactcaagaaaatcaagcaagagtcttctgtgtttagagagattccggtggtgatcatgtcatcggagaatgttttgacccgaattga

SEQ ID NO: 21850 - DNA, 432 bp, Glycine max
  unsure (1)..(432): unsure at all n locations
  Clone ID: LIB3050-026-Q1-K1-F9
cccacgcgtccgaagacgacagaaggggaacgctcagcactcaaatcctctgagagaaaaaaaaattagggttttgcatttcgggtcagacagactcagacatgggaggaggcaatgcccagaagtcaaagatggctcgcgagaagaacctcgagaagcagagggctgccgctaagggaagccagttggattcaaacaagaaagccatgtctattcagtgcaaggtgtgcatgcaaacatttatatgcaccacatcaggagtgaagtgcaaggagcatgctgaagccaaacaccccaaatctgatctccatgtttgttttcctcatcttanaaagtgaaagagtgcatgttgagacatgatatatcaatatatggcctgttatatagtctctatccacagagatcttcaatttcttttataacaaatatgtc

SEQ ID NO: 21851 - DNA, 366 bp, Glycine max
  unsure (1)..(366): unsure at all n locations
  Clone ID: LIB3050-026-Q1-K1-G1
gaggaaagaagagagagaacaaagcacttagtgctattcaataattacgaaaaaccaacagcgagtgttgtttttgtttggtccaggctggaccagggaatgaatagagatgagaggctttcggttgaagagaactgagttaagcggcgaagccaaacgcagaatcggcggcagaaattgccaccggaagcacgtcgaaggcgggtgaaccaaacacaaaattccatccaccacttctcttttcaatccccaactcaaatctgtgaagaaaatctcaatttctaaattgtaattcttagcactactgctagtagtagtaaaaaaaaacaattagaaagtagtagagtgtttttttttctttntttc

SEQ ID NO: 21852 - DNA, 396 bp, Glycine max
  Clone ID: LIB3050-026-Q1-K1-G10
gtacctttggggtaggagtcctggcaagactggttctcactttgaccctagcagtgacttgttcgttcccaatgaaagaaaagatgttattacttccacagcttgttgggctgctatgttgggattgcttgttggattggggtttgtaatgggtccaattcaacttcttaagctttatggtgttccctatgttatattcgtcatgtggttggatttggtgacttatttgcaccatcatggccatgaagaacaattgccttggtatcgtggaaaggaatggaactaccttaagggtggtctaactactcttgatcgtgattaatggttgatcaataacattcaacatgacattggaactcatgtcattcatcacctatttcctcaattccacactat

SEQ ID NO: 21853 - DNA, 398 bp, Glycine max
  unsure (1)..(398): unsure at all n locations
  Clone ID: LIB3050-026-Q1-K1-G11
ggccgaaaaccctaacaacacaggcgcagagcgtgatccattgacgaagatggtgcagcgtctcacctaccgcaagaggcacagctatgtcaccaaatccaaccaacacagggtcgtcaaaacccctggtgggaagctcgtttatcagaccaccaagaagagggccagcgggcccaagtgccccgtcactggcaagaggattcaggggattccacacttgaggcctgcagagtacaagagatcaaggttacccagaaaccgtaggactgtcaaccgtgcatatggcggagttttgtctggaagtgctgtcagggagaggattatccgagctttcttagttgaagagcanaagattgtgaagaaggtcttgaagatccagaaggcaaaagaaaagcaag

SEQ ID NO: 21854 - DNA, 372 bp, Glycine max
  Clone ID: LIB3050-026-Q1-K1-G12
atcgacagtaggggtccgaaaaccctaacagcgcaggcgcagagcgtgatccattgacgaagatggtgcagcgtctcacctaccgcatgaggcacagctatgtcaccaaatccaaccaacacagggtcgtcaaaacccctggtgggaagctcgtttatcagaccaccaagaagagggccagcgggcccaagtgccccgtcactggcaagaggattcaggggattccacacttgaggcctgcagagtacaagagatcaaggttacccagaaaccgtatgactgtcaaccgtgcatatggcggagttttgtctggaagtgctgtcagggagaggattatccgagctttcttagttgaagagcatatgattgtga

SEQ ID NO: 21855 - DNA, 364 bp, Glycine max
  Clone ID: LIB3050-026-Q1-K1-G2
tgaagtcttgaatttctgaacatagaacaactcttcacacaacacaactttttctagcattgtagcatcatgactggcaaagacatcctccatataatgaaggtgaaagcagggtttgcaccaccagacacagggaaaggaaaaggcaaaatatcaaaacacatcacacatggctttcacttgatgaagggcaaatcggcacatcctatggaagattatttagtttcggaatttaagcaagaaaaggatagagaattaggcttgtttgcaatatttgatggccacttaggccatgatgttgccagctatttgcagaaccaccttttccaaaacatcttgaaagagcatgacttttggactgaga

SEQ ID NO: 21856 - DNA, 385 bp, Glycine max
  Clone ID: LIB3050-026-Q1-K1-G3
gatgaataagatcttcagattttgttacagtttttcaaattattctgtggcaaggagagaagaaaagatcatagaaagtggtgattcttcgaatattgaagagagaaatatggggttgagattgaaggagacattctacttgtcccatggagcaccaactcttgccgtagatgattcaatccctgcgtggaacttcttcaattcgtggaaggagcagtttccgacgagaccctcttccattcttattatctccgcccactgggacacccatgttcccaccgtcaacgtcgttcaccagaatgataccatctacgacttctatggcttccccaaatccatgtacaagctgaagtatccagtaccaggggctccacacttagcaaag

SEQ ID NO: 21857 - DNA, 376 bp, Glycine max
  Clone ID: LIB3050-026-Q1-K1-G4
gactcacattcattcattcactcaccccaaaacccaaaaacctttccttttactttttctcaaactgaaacataaaaaatggagggtcttattccttttgtttacaaggctatcatgcaatccaagggcgacaaagagggtcatcctataggatcatggctttgtgagtctccttactcatacatgagacttcctggtgactcgggtaggtttcaaattcaagcaccagctgctgcttcaccctcttccaccaaccctaattcttcttctgctacacaaatcattgtttcctctggtgttcagtccccacatcagtgtttaacacatcgtcgaattgcatcatgaaaatgaacaagtttgtgcctgaagaaaaagc

SEQ ID NO: 21858 - DNA, 360 bp, Glycine max
  Clone ID: LIB3050-026-Q1-K1-G5
gatgcagcaactctgctttactttccaagtccacaaccctcaattcaaaactgctacctcaaggtagtggtggtattataagtggaagaaatagtgccctagtacatggaggtggtacattttctacttcctcaacaaacttttgtttaggtcctgaggcagcacctcaactctctttacctgctcctgttcctgtatcctctgagaagccacaacctacagctgcaagattgaatactgatgatctttgccgcagaactgactctcttctagaagaatatttcagtgttcggcttttggaagaggcattacagtgtgtggaggaattaaaatctccttcttaccaccctgaggttgtta

SEQ ID NO: 21859 - DNA, 353 bp, Glycine max
  Clone ID: LIB3050-026-Q1-K1-G6
gacaaatattgggatctgtattctaacgagtcacttgagcatgaccttcccggtcaccttctccgctaccccatcggggttgccagtgaaggagatgtcaccgagctgccaggatttgaattctttcccgacaccaaggctcgcattcttggtggcaaagctgactacctcccccctattctcactacttaatttgattttgtactttgttacaaacttgttattgcttacatcctaatctgtgttttcattactacttagtaataatcttaatatagtctgtgatgtcttgtggagatgttttttctgctatttttctgaagatttcagtgacagattttagttatctgatg

SEQ ID NO: 21860 - DNA, 348 bp, Glycine max
  Clone ID: LIB3050-026-Q1-K1-G7
gtgttcacttgatccttcataagtcgtcatcaccatcattatcatcaccgttgattgaagaagatgccgatcagaaacatcgccatcggaaggcctgaagaggctactcaccccgacacgttgaaggcggggttggctgagttcatctccaccttgatcttcgtgttcgccggttcaggttccggcatcgcctacaacaagctcaccgacaacggcgccgtcactcccgccggcctcatctccgcttccatcgcccatgctttcgccctcttcgtcgccgtctccgtcggcgccaacatctccggcggccacgtcaaccccgccgtcaccttcggcgccttcgtgggc

SEQ ID NO: 21861 - DNA, 348 bp, Glycine max
  Clone ID: LIB3050-026-Q1-K1-G8
ttgtggacatgcctggaaacggcgacgttccgtttactcacgcgaatattagttcggcccggagagaactcgggtacaagcccaccaccgatttgcaaaccgggttgaagaagttcgtcaagtggtacctttcctattacggctacaatcacggcaaacctgtaaattaattttattttattttgtttcccccccctttttttttctttttcggaaagggtttttttctttttttagtgtggtaggttttaagtcacagattaaaacagacggggaaaaaaaagaagaaagaacctggtcaagaagattagaagaagaagggaaattggggctaaaaggaaggaagaa

SEQ ID NO: 21862 - DNA, 412 bp, Glycine max
  Clone ID: LIB3050-026-Q1-K1-G9
aggggaatctcagcatgatgacacagatgcagaggaacaaatcatatcagcttttcagaacattactgcttccactgcagcctctgacgaagaattgttgaatcaactggagaagcttgaactggagaaacacgatgatatccttaacattcatgttaaggaaaaccaagaggctaccacttccatagatgtcactgaaggagagaaaaaagttgttcttgttcatgctgaagaaagtgctggtgcagtcacagcttcatacaacttggaaaagcatcctctttatcctccaggcaggatcatgcatattgttcctgcaccatctaattcatctgaaaattctaattcagatgactatgatcctgatgagaagtacctttacttatatgaaacgcctaaacagctgtatgga

SEQ ID NO: 21863 - DNA, 272 bp, Glycine max
  Clone ID: LIB3050-026-Q1-K1-H1
gattcataagaaggggaagaaatatatggctgaaactgcagtgtcccttctattcgaccatttggtgaagttactgagtgaggaaacaacaatcttaaaaaatgtgcacaaggaggttgagggcatcaaggatcagctaagcctaataaactcttacataagggatgcagaaaagaagcagcagaaagatgctgtcaaagaatggttgaattcattgaggaatgtggcgtttcgcatggaagatgtggttgatcactatttgctcaaagtgg

SEQ ID NO: 21864 - DNA, 394 bp, Glycine max
  Clone ID: LIB3050-026-Q1-K1-H10
ggaagttgaaggggaaagagagaaaagaactagctagctggagtctgagaactctagcatgtactagtactactcctacattcctccatcttcctttgtactatttttttttaaccataaaagcaagagcacaaagatggtgagagctccttgttgtgaaaagatgggtttgaagaagggtccttgggctcccgaggaagatcaaatcctcacatcttacattgacaaacatggtcatggcaattggcgtgccctcccaaagcaagcaggcttgttaaggtgtgggaaaagctgtagactccgctggattaactatttgaggcctgatattaaaagagggaatttcacaattgaagaagaagaaactatcattaagctgcatgacatgctgggg

SEQ ID NO: 21865 - DNA, 129 bp, Glycine max
  Clone ID: LIB3050-026-Q1-K1-H11
tttaagtttgaacacgaagactactagattgaggacagggatcttactacgatactataactttaacattttctaatactactttaacatacctttattatcatatatactatttaattacatccataa

SEQ ID NO: 21866 - DNA, 391 bp, Glycine max
  Clone ID: LIB3050-026-Q1-K1-H12
gttctaagcaggattatgcaaattatggattgtcatatctcatcgactatgtacacggaaaaagccagaaaaagcctgaattgttgcaggagcaactgaaactttcagggaagtcccctaatttgatcacatataaaggaactccaaatctaatgggtcttaaagacattgcggaaacattgtctgcttcagataggtctgcttcagatagtgtcatgccagatggcatggataaacgagagcaacaacgaaggccactgttgaggaatggcattgctaaaactttgtccggtttagacaagtctgctttagacagtatcatgccaaatggtgtggataaactagagcaactgtgaaggccattgtggaggtttgaaatagctcatttttt

SEQ ID NO: 21867 - DNA, 366 bp, Glycine max
  Clone ID: LIB3050-026-Q1-K1-H2
tggtggggaccatcgctggtggataacgaaagatcttagacaaaaaacaaggatcagaaccgttgaatcaagttgaggaagatggcactagtctctggaggaagatcaacactgaaccctaacgcccctctttacattcctgccgcgtttcgccaagtggaggatttctctccggaatggtggcagctggtgacgacgctgacatggtaccatgactactggctaagccagcaacacgatgagggaaccttctacggcgaggacgacgggtttgatggcaatgaatgtcgtgatttgctttcctgattcgttgatcttgatgctggcgaggatctttttgaagagtttattagatcttctgaatcc

SEQ ID NO: 21868 - DNA, 386 bp, Glycine max
  unsure (1)..(386): unsure at all n locations
  Clone ID: LIB3050-026-Q1-K1-H3
tgggtcacgtncaacaccaacaacaccatcctcaaaatctccaaactcgcgatcctccccgttttgttcgcttcagtctgcaacgtcgctatgtcggactccaccgccaaacccctcgaccagcacgccaccacgggctctgaccctactgcgccagcggttcacatcgtgtacaccgagagaccacagaacgaggagcctgaggcctaccacatcagaaccctcacttcagtccttggcagtgaagaggctggcaaaggaggctttgttgtataggtacaagtctgcaaccagtgggttctcagctaaagcttactccggagcaagttgaacagatttcaaagctaccaggtgttcttcaagttgttcctagcaggacatatcag

SEQ ID NO: 21869 - DNA, 214 bp, Glycine max
  Clone ID: LIB3050-026-Q1-K1-H4
attgatttcatctacaacaatcgctcatcacagttgagttttgttacaacctccaatggccctcttacttttgttggcgaatgggttgctgaatggcaagtcaacggagctacaaaagaagattatcaaaagttcgccaaggctcaattagacgtttatgggccaacaacatttcggtgggcttattgggctttcaaaaacgtcaacaatcact

SEQ ID NO: 21870 - DNA, 370 bp, Glycine max
  Clone ID: LIB3050-026-Q1-K1-H5
gacattgagaagctatctgatgaaacagccgcaaattttgtaatgcaacagctcaagaagatgtgtccaaaatcttctaagccagttcagaatcttgtgtctcgatggggaacacgtgctaaaactctgtaggatgctactatgatgaagtaggaaaaccacttcatgtggattatgagattcttccaccatttgggaactaattatttgggggggaacatgcatgcttgtcaaacaagggattttggcgtgcatggaacttactcagctggagtcatggctgaaaaaaattgtgagagctaatctttagaaaaactgggccacgtggaaaagctatctctagcttctgtaggcatgaaatgcttgaaac

SEQ ID NO: 21871 - DNA, 316 bp, Glycine max
  Clone ID: LIB3050-026-Q1-K1-H6
ggacaaagcatgaacgtggtgttagaaggcctgctagttcaagaagatcttcagctattgggaggccatcaaggaccttgcttgtaattaattttgatacataccataccagaacaagggacttggagaggcactttgaaccatgtggaaagattgtcagtgtgaggatcagaaggaattttgcttttgttcaatatgaatcagaggatgatgctagcagagcactggaagctacaaatatgagcaagttactggatcgagttatttctgtcgagtttgctgttaaagatgatgatgattggagaaatggatatag

SEQ ID NO: 21872 - DNA, 381 bp, Glycine max
  Clone ID: LIB3050-026-Q1-K1-H7
ggagataaactagtacacgctgtgatagcacttgtacaatcaagcgaaactaaaaaggacgcgaaggagaaaaaagcagatccttcccgagagagagagatcagtagtgtcagagatggcgagagggcaagttctgagcgcgtaccgggcgcttctgaaagcgacacggaaatcattttccggcgacaccatgatgctgaaggaatcagcgttggaagtgaggaacaagttcgaggaaaacaagagcgtgagctcccaggcggagatccagaagcttctcctagaggctgaagaggcctcccatttcatcaccaccatgatcgtccaggcgcaactcaatcccgattctggcacctacttggtgaagccgggtaaagagca

SEQ ID NO: 21873 - DNA, 319 bp, Glycine max
  Clone ID: LIB3050-026-Q1-K1-H8
gtagttcagtttctgtagatgcaccccagaggaattttgccgagactgttagcatcagtaatcataatattgacgaagttaattcttggcatgatcgtggttctcgcatgactgccagcattggcagtgcaaagtttttgagtgatggtgatgaattggtcaaagaactgcagtgcactgctgattcaagtatagtttattcacaacctcagccagaagatccatcatcatccagtttaatccaggataccattttaaatgctgatgcacgacgatatgccagcttcaaactctttcagttgcaagatttgatcctgac

SEQ ID NO: 21874 - DNA, 326 bp, Glycine max
  unsure (1)..(326): unsure at all n locations
  Clone ID: LIB3050-026-Q1-K1-H9
gatggccaataataccaagaaactagagatttccgagtgtggtggtcctcactgttggacctttctgagcactgctgcttatggaaaacagaataaagttccacaggaaaacatcccatctgctacagcagcaaaggtaaaggcaggaatgctagatggagttgagtctgcccttggattatcaaaagggtcacttccaaaaccgttgtataccaggcttcaactatggggtgcagctcttccaactaatacacctggagttccttgcatttttgacccctttggaagggcanggatatgtggtgattggctgctanggtctaata

SEQ ID NO: 21875 - DNA, 265 bp, Glycine max
  Clone ID: LIB3050-027-Q1-E1-A10
ggggtcgtcgatgagaaggagcttgatcagttcatgagccattatgttctgttgctctgtgcctttaaagaacaactgcagcagcatgtccgtgttcatgccatggaggcagtgatggcttgttgggatctggagcagtctctgcaaagcttgacatgtgtatctcctggtgaaggaacgggtgcagcaatgtcagaggatgaagatgaccaggcagagagcaatgccaacttatactaaggaagccttgatgggggtgaaactc

SEQ ID NO: 21876 - DNA, 394 bp, Glycine max
  Clone ID: LIB3050-027-Q1-E1-A11
tcaaatagcgcaacttattttgaaatgtttagaatctatgccaaagaaacgaccgtctatggaggaggttttggaaaccttagaaaaagttgaagccataaaatacaaacccaaagtgaagaaaagaagtgcggttcgttagataagcatcccccaaataaccagggttggtcaccacttattcattacaacaacgtttatcccaaaccactaactcattctcctccatagtagttcaccatgcatctaccatttatttttcaagcagttacatggttagtaaatttcgtaaggactagataagttttttgtccagtacaattttaaattttggattttatttatttatttttatctattttaaatcctttatttaatttatcgttcatgatta

SEQ ID NO: 21877 - DNA, 296 bp, Glycine max
  Clone ID: LIB3050-027-Q1-E1-A2
cccccaaatcatgtgtaacaagtttcagcagcagcatgttggatttctccaacaataacgccgatgcgaggcctcctccaccagatccatcctcagagtgtaatagcagtactgcaactggtggggcattcaagaaagctagggttcaaccgcccacaactcagtcgaccttcaaggttacgaaggagaaattaggtgacagaattaccgcccttcatcaactcgtttccccattcggaaagactgacacggcttctgtcttattagaagctattgggtatatcagattccttcag

SEQ ID NO: 21878 - DNA, 205 bp, Glycine max
  Clone ID: LIB3050-027-Q1-E1-A3
ggctgcgactgcacgggatgatgaggactgcagtggcgacgacgccgctgtcgcttctcgactggtctgctccttgcatttctgtccgttctgctgcctttgctcctctgttgtccgtggtctggtcccttcctgctcggcctctctcttgcttccccctactctctccctggtccctccgtcccttgcctgtccttccgccccg

SEQ ID NO: 21879 - DNA, 104 bp, Glycine max
  Clone ID: LIB3050-027-Q1-E1-A4
cgtccaacccgatgcccgcggacgacagtaggggggtgtttcagttgaccgtgtgttctcgcaccttgcctggcttgcccccgatcgcccgtccggtggtcttg

SEQ ID NO: 21880 - DNA, 305 bp, Glycine max
  Clone ID: LIB3050-027-Q1-E1-A5
gagatgagggatgaggaaatgaagcctcagtggaactttgacatctttgatgatcagatgctgccccagaataataacgttcgctctaatgctgccgagcaagccagagatcagatagcgcactacttgttgcaccatggccgtgcagggactaattttttctagacttcttgggatatcacactttctcattaattcttttggctatgccttattattatagtcacttgcattataataacattctcatcatctacttcttatatgtatcaatttgtatcgatatcttttgccccacaaaagac

SEQ ID NO: 21881 - DNA, 75 bp, Glycine max
  Clone ID: LIB3050-027-Q1-E1-A6
cgctgccagacgacgacacactgggggaggatgattgggatgatgctcctgttcgtgctggtttctctctccagt

SEQ ID NO: 21882 - DNA, 301 bp, Glycine max
  Clone ID: LIB3050-027-Q1-E1-A7
gatgagaagtgttttttgtccattgtagattgtcatatatagagaagcagaattagaacgaagggtagctaggagactttctgaattgaagccttttttttcactgagtggttgagagcatggagaacatgaagatgaacaaagatcagaggtttgcacaaaacggtgtcccaatacatagccaggttatgaagatcaggcaagagtcagagaagattgttgattggtccccgggcaagtcagagatcagacccgttctccgtgaaatacgccggcagacttcccggtcgccgttggggat

SEQ ID NO: 21883 - DNA, 206 bp, Glycine max
  Clone ID: LIB3050-027-Q1-E1-A8
aatgaaaaaagctattgaattaactgaacaggcgggtacaaaaggagttcaagtacaaattgcacgacgtatcgacggaaaagaaattgcacgtgttgaatggatcagagaaggtagagttcctctacaaaccattcgagcgaaaatcgattattgttgctatacagttcgaactatttatggggttttagggatcacactttgga

SEQ ID NO: 21884 - DNA, 333 bp, Glycine max
  Clone ID: LIB3050-027-Q1-E1-A9
ggcacaacaaagtacaacacagtgcaggggctcaattatggagaaagcaattcaaagacagagagctctgcttgaacatcttcaacccatttcttcaagttcaaatttttcctctcaaacccatcaatctacggatctctcagcttcatctatgttttgctgggaattcttcgcatggtcaaacaggtggatcagatgatgacgtggtgattgcagctgcatatcgtactgccatctgcgaggcaaagcgtggggtgctttaaggacacccctccagatgaccttcttgccacagttctgaaaggtgtaatagagaaaacaaatggtggaccc

SEQ ID NO: 21885 - DNA, 307 bp, Glycine max
  Clone ID: LIB3050-027-Q1-E1-B1
gattcaacataattttcattcagagaagagatttgaaaatcgcatcgcacagagatgaattcaattacaagaagcggatcgctaagtatcatcctcgttgctttctctttgcacttcattcttggtttttccgacgagtcagctggttctaaagatgctacaaagacagaacctcatgccggcagaagcactagcactggttgtatcattgtattaattttgcttgtgctcttttctttaatctcctttgtactttttaagctgtggccgaagaagaaaagggaaagagcaatatgctcgtcctttg

SEQ ID NO: 21886 - DNA, 246 bp, Glycine max
  Clone ID: LIB3050-027-Q1-E1-B11
ggaggagagaggagaagagaagctaaagaaagaaaggagatgggagtggagaagcagttgttgaggtctggcaccggtccgaagccggttcccggtcagaacgtaaccgttcactgcactggtttcgggaagaacggtgacctttctcagaaattctggagcacaaacgatcctggccagaacccattcactttcaaaatctcgcaaggttctgttatcaaacgatgggatgaccgtgtgcttggc

SEQ ID NO: 21887 - DNA, 379 bp, Glycine max
  Clone ID: LIB3050-027-Q1-E1-B12
gaacaactgcaactactactactcatcattgtctcaaaaaccttctctctcaacaaaacctacaacaacaacaaaaaaagagaaattttttagaacaatggaggcatcaaagatgaagtttttcttggttttggtgattgccatgttggcgatggtagcaactggggtttcagctgctgaggcacctgccccaggtccttcatccgatgccgccaccttctttgtacccactgctcttgcttctctctttgttcttgcatttggccttctcttctaattaattcttcaacaacctttggttatttgttacattacatatatggaattcactttgttcagaagtgggtgtgtttttgtgttcgttcctccctttttttca

SEQ ID NO: 21888 - DNA, 352 bp, Glycine max
  Clone ID: LIB3050-027-Q1-E1-B2
ggtgaggcgagggtaaggtcgcgttgtgttgcgtcgtgtcgtgcgctgttcctctgtttctcgtttttgtgttcagaccgaaccctagctccgcatcgcaaccatgtcgaccaagcaaggtggaaaagctaagcctttgaagaaacccaagtctgataagaaggattacgacgagattgatgtggctaacattcagaagaaaaaggaagaggagaaggcgctaaaggagttgaaagccaatgcgcaacagaagggaagctttggaggttctgggctcaagaaaagtggaaagaaataagggctctttatcatgattgtatgcattcaatattgagccctgtaattacagttg

SEQ ID NO: 21889 - DNA, 283 bp, Glycine max
  Clone ID: LIB3050-027-Q1-E1-B3
gaacaataataatagcaataacaatagcaacgagaaaaaattaacgagggaggggagaagagaaagaacgaaggagacatttataaaaagctctttcccttcccctaaatccctcacactcattccatttttacctttctctctcgctcgcaaacgcaaattataaaaaacaaggttttagccatggcatcgaagcggatcttgaacgaactcaaggatctccaaaaggatcctcctacctcatgcagcccccgtcctgttgctgaagacatgtttcactggc

SEQ ID NO: 21890 - DNA, 296 bp, Glycine max
  Clone ID: LIB3050-027-Q1-E1-B4
ggtgaggcgagggtaaggtcgcgttgtgttgcgtcgtgtcgtgcgctgttcctctgtttctcgtttttgtgttcagaccgaggcctagctccgcatcgcaaccatgtcgaccaagcaaggtggaaaagctaagcctttgaagaaacccaagtctgataagaaggattacgacgagattgatgtggctaacattcagaagaaaaaggaagaggagaaggcgctaaaggagttgaaagccaacgcgcaacagaagggaagctttggaagttctgggctcaagaaaagtggaaagaaat

SEQ ID NO: 21891 - DNA, 252 bp, Glycine max
  Clone ID: LIB3050-027-Q1-E1-B5
cgggtacacgtgggttgttattatggagttggcatagcaatgggcgcgtgttctcggcttttattttcaatttggtgccaacggaatgtggctgggaatgctaggtggcaccgttaggcacccacttattcgactgtgggtcacttttagaaccgattggactaatcgacgtagacgacgcagccacgcggctgaccagatgggaggacacgcacgaaccactactatattgcagaacctcttgtttatgta

SEQ ID NO: 21892 - DNA, 301 bp, Glycine max
  Clone ID: LIB3050-027-Q1-E1-B6
ggcatcccaaattcaaccacctactgcatcataaaattcttaaggatggccacatcagaagaaatttcatctttgaaactgttaggcgaatatctcttgggggatatttcagagccttttctcaccaatctcattccatgtaaaactcgattactgctcatcacaacttgatattggttcaaacttctcagaacatcgcagcttctgcaacttgctcgaatgcattgattttgatccacacacagaagtggtacgtctcacctctcatccttttgtccaaatctccatttaaataagtctt

SEQ ID NO: 21893 - DNA, 263 bp, Glycine max
  Clone ID: LIB3050-027-Q1-E1-B7
gacgtcctatcgctctcagacttgtgttacaaacaaaaacccttcttcaaaaccttttctctaaaatttcccacaacccatgtctaggctctactcattccacacccaactcagaagagacccattctttcttttgctcactcattttcttaatcatgtgtggcggtgccatcatagccgacttcattccccgccgtggaggccgccgcctcacgggctccgagctctggcctaactccttcggcaaagacggtgactttgac

SEQ ID NO: 21894 - DNA, 412 bp, Glycine max
  Clone ID: LIB3050-027-Q1-E1-B8
ggccaaaccaaagagccgaacccggcctttagggaaaaaaagaagaaaaaaaaaatcccttctctttttgtttccctctcttctctcttccatggaaaaaatggcggcagcttctagaaaaccaagaagcgcagtaattggatccctttcttcaacccctaggttctgcaactctcactctacatcatcatcttcttcttcctcagctttcgcttcttccacctccagcttcacctctcgctcctcctccttcgttcaccgctcttgctctccaacacgtgtcaacctctacggttccaccgctccctccgtccggttctccctcgaccgttcggtctctccgaaccgctccatctcggtggcgccgccaaccggcgcttcaaggcaaagcagtagcccgcaacaccagcag

SEQ ID NO: 21895 - DNA, 226 bp, Glycine max
  unsure (1)..(226): unsure at all n locations
  Clone ID: LIB3050-027-Q1-E1-B9
gacgacagnnggggaatctctgactccacaattcacaaccgaaacagtttccatctctctcacaatatgacaacaatatcaaattgctcccttctcttcgtcttcctcttcctctccaccctccacataggttccaccctctcaacccccaccaacttcatcaagtcctcctgcagcaccacccagtacgcagccctctgcatccagtccctctccgtctacgcct

SEQ ID NO: 21896 - DNA, 173 bp, Glycine max
  Clone ID: LIB3050-027-Q1-E1-C1
gaatcacatgaggagcaagtcattgccgtgtttgacctcagaaatcataaccacgacgcgggattgggggcaacgcagctcacgctgccctcgggagcgcagatcatctcacatttcattctcctttatgctcctctctcaccatttttccgttaaaaagattattattctga

SEQ ID NO: 21897 - DNA, 264 bp, Glycine max
  Clone ID: LIB3050-027-Q1-E1-C10
acagaatgggacagacaaacaaacaatttaccagctatacttgttccttttgaacgttagaagtgctacaatacaaacaatggcagctactcaggaagatgtgaagcttttgggtattgtgggaagcccatttgtgtgcagggtccagattgcccttaagttgaagggagttgaatacacatttttggcagacaatttgggcaacacgagtgatttgcttctcaaatacaaccccgttcacaagaaggttccagtgtttgttca

SEQ ID NO: 21898 - DNA, 377 bp, Glycine max
  Clone ID: LIB3050-027-Q1-E1-C11
cactgagagagatctcgaagacgaattccgcgttttcggagttattcggagtgtttgggttgcacgtagaccacctggttatgcttttattgactttgatgaccgcagagacgcacaggatgatatccgtgaattggatggcaagaatggttggagggttgagctttctcacaactctagaggtggaggtggtggtcgtggtggtcgctctggtggttctgatttgaaatgttacgagtgtggtgaacctggtcattttgctcgtgaatgccgcatgcgtggtggttcaggaagacgccgtagccgtagtccgcccagattccgtaggagcccaagttatgggcgaaggggttacagtccccgtgggcggtccccta

SEQ ID NO: 21899 - DNA, 421 bp, Glycine max
  Clone ID: LIB3050-027-Q1-E1-C12
gacagacaaacaaacaatttaccagctatacttgttccttttgaaggttagaagtgctacaatacaaacaatggcagctactcaggaagatgtgaagcttttgggtattgtgggaagcccatttgtgtgcagggtccagattgcccttaagttgaagggagttgaatacaaatttttggaagaaaatttgggcaacaagagtgatttgcttctcaaatacaaccctgttcacaagaaggttccagtgtttgttcacaatgagcagcccatagcagagtctcttgtgattgttgaatacattgatgagacatggaagaacaaccccatcttaccttctgatccttaccaaagagccttggctcgtttctggtccaaattcattgatgataagattgtgggtgctgtatccaaatctgttttc

SEQ ID NO: 21900 - DNA, 322 bp, Glycine max
  Clone ID: LIB3050-027-Q1-E1-C2
ccaaacagacatgaaaattatggaatcattagctcttatcttctacagtactcttgttttagctacgatttcagttccagcaactaactccagaatcatccatcaaaaaaacaatgccaatctgattgaagaaacttgcaagcagacaccccatcacgacctttgcatccaatacctctcctccgaccctcgcagcaccgaagcagatgtgacagggctggcacttattatggtcaacgtaatcaaaatcaaagcaaacaatgcattggacaaaatccaccaactgcttcagaaaaaccctgaacctagtcaaaaggaccac

SEQ ID NO: 21901 - DNA, 210 bp, Glycine max
  Clone ID: LIB3050-027-Q1-E1-C3
gcgtccaacccgatgtcagcacacgactcaatgggactcacataggtcaacgtcaggttcatacttcatcacatcccggggaagttctgaaacctaaatcatacatagctataattcatgaggggatgcgctatgtatcccacgtcattcatgactgggaaactttacattcacttcactgtagcatttccatattcacataactctgat

SEQ ID NO: 21902 - DNA, 353 bp, Glycine max
  unsure (1)..(353): unsure at all n locations
  Clone ID: LIB3050-027-Q1-E1-C4
ggaggtggaatagaattcgccgcaacaggaaacgaaacatgccctctcactgtagtgcaatctccccttgaggtctctaanggtctaccactaatcatttcatcaccattcgaaatccttagcatccaagaaggccttattttgaacattgggttcacttttgtgcccccctgtgccctaattccttctgagtggactactgttaagggtttaccagaaggactcgctgttaaacttactgggtatgaaaataaagtgcctgcttggtttaaaattgagagattttcccttgaattcaatgactataaacttgtgttctgtgcaactgaaaataccacgtgtgtggatattgg

SEQ ID NO: 21903 - DNA, 394 bp, Glycine max
  unsure (1)..(394): unsure at all n locations
  Clone ID: LIB3050-027-Q1-E1-C5
agttgggtgtttcttaagccagtggaccctgtagcattgagtattccagattattttacaatcatatctcatccaatggatttgggcacaattaaatctaagctggagagaaacatttattctggcactgaggagtttgcagatgatgtcagactgaccttctcaaatgcaatgaaatataatcctcccggtaatgatgttcatatgatggcgaaggaactcagcaaaatatttgacagaaaatggaaagactttggtaggaaatggaagtttgaagatgagcatgataaaagcgaaactgaaacaattaacgaaactgggagaaaaagtcttgatgcaatgcttccccggcatanagattcccttcccacaaaaagcacaattattcgaacac

SEQ ID NO: 21904 - DNA, 407 bp, Glycine max
  Clone ID: LIB3050-027-Q1-E1-C6
ggtacaaatccaaggacgtagcgcagaggatccttctctcagttgaatgccaaatgaggaggtgttcctacacgctgggtttgggtgagccgaacctagcgggcaaaccgagcctgctctacgacctcgtgtgtaagccgaacgagatccacgcgctgaagacgacgccgtacgatgagcgcgtagagaatcacgagaaccacgcgttgcacgcgacgcaccagatcgccgagtcgtggatccacgcgtcgcggaaggttctagagaggatcgcagacgcggtgctctccagaaccttcgagaaggcggctgacgactgctacgccgtggaaaggatctggaagcttctcccggaggtggaggacctccacctgatgatggatccggacgatttcttgagactgaag

SEQ ID NO: 21905 - DNA, 303 bp, Glycine max
  Clone ID: LIB3050-027-Q1-E1-C7
gacccacaagtccaaccagctgccaaaagacgggggtaagcggtagcactacggtttgctctcctcaattgcctgcagcccgtagtctcagcttccatacacctactgttctgtgtcaggccaggggaatagttgctggtatctttgccgcagaaggatactttgtcctattattgctgcttagtgcgttagtggtgtagatccccacatgagttaggcttgtactgccgtttgtctccgagacaagcaattttgattgtctattatcttgctgcttaacttttgattttgacccccagtgct

SEQ ID NO: 21906 - DNA, 420 bp, Glycine max
  Clone ID: LIB3050-027-Q1-E1-C8
ggagaagagaggtgctggagctgatgcagactctgggaatggcaaatcatctgacaataagaatcaagaagttaccaatggccagaatcctacacctgctgcaaacacacaaaatggagtgctgtctgagaccaaagaagatgtcaagaatcttccaccaaataatgaagaatcatccaagcttgaggtcactgatgcagctggaggagacaatgatggtgaatatgaggagggaatggtgtacgatgaagcaggtgaggatcagtattatgaaggtgatgatcagagagatgcggactatgagtatgaacaaggtgaacgtgatgagggatactatgagtacgagcaaggtgaagagggtgaaaatcaagacgaagattacatggaagaagaagatggggatgattttgctaagaagat

SEQ ID NO: 21907 - DNA, 263 bp, Glycine max
  Clone ID: LIB3050-027-Q1-E1-D1
gagaatggtaaggccactgaaggtgtggatattttcctgggagggagaattggaagtgattcacatctagctgaggtgtataagaagggtgtgccttgcaagaacttggtgcctagtgtggtagacatactagtacagcattttggtgctgtccaaaggaatagagaggaatgggaagatcaaactttatcgccattgcgcattttactttcttcactaaatctaccattctccctctatcacagtatcagtgtcccccacat

SEQ ID NO: 21908 - DNA, 404 bp, Glycine max
  Clone ID: LIB3050-027-Q1-E1-D10
ggatgatgacgaacacattctcggcatcaggattgttggaggtgaccatacgctggggaactattcttccataatcaccgtccagcgacaggtcatcgatgggagacccggtacaatggtgatcgaatcatttgtggtggatgtgccccatgggaacaccagggatgaaacgtgtcacattgtggcggctttgctcaggtggcatccgtgctcctaaggttatttccccccatagattagtctctcatccgtcgctgcagattaagattacacccagttgctccaccagaggttcgacgagcatacaaacggataatgatctcatcatccaatctatcatcatcatcatgaggcgcaatctgagccttccaatcgacattccaacaggtttcacgcccacttgc

SEQ ID NO: 21909 - DNA, 399 bp, Glycine max
  Clone ID: LIB3050-027-Q1-E1-D12
gattgtttgttgttgtaactcgttcttcttcttttgttgttctgtgtttgtgtttgttttttctctcacctgaaaatgtcttgctgcggtggtaactgtggttgcggaagctcctgcaagtgcggcaacggctgcggaggctgcaagatgtacccagacttgagctacactgagtcaaccaccaccgagaccttggtcatgggagtggcacctgttaaggctcaatttgagggtgctgaaatgggtgtgcccgctgagaacgatggctgcaaatgtggaccaaactgctcctgcaacccctgcacttgcaagtgaggtgttgggagagcaagcttcaagcagagatagcccttaattaggaataatgataaactattaatgtgtagctaaaaacttatg

SEQ ID NO: 21910 - DNA, 184 bp, Glycine max
  Clone ID: LIB3050-027-Q1-E1-D2
tgggaaacaggatcgataaatagagatataactcggttagaaagggtactaatacgtacttgcaggctgcatcaacctcgtatgctagttcaggctactgggacgttgtgtgcatacaagcacaggcaaattacagaaaaagtcatcatcatactcacaattagtacaaattaggcattgatct

SEQ ID NO: 21911 - DNA, 306 bp, Glycine max
  unsure (1)..(306): unsure at all n locations
  Clone ID: LIB3050-027-Q1-E1-D3
cgtccaacnccaaatacgacagaacgggactaattggaattatacagctgcaaactgtgaacggaaattaaggctcgtaagtttcgatttcggttgcacattggggtggtagcgttgcgaatgcaccaagtcttgaagaggaaaaacacaaagattcggaatactttagtcatttggatcctctaaatttgatggactatatctaatctaggaattcgttcctttaagtcttcaaagttcatctaaggtttgcctttacaatttggtatccatcagatcgattaacctgcatctatgggccgaaca

SEQ ID NO: 21912 - DNA, 121 bp, Glycine max
  Clone ID: LIB3050-027-Q1-E1-D4
gggagatttttgcggtcctcttctctcctcggtgctttcttcccgtctgcctctggtgtccgtgctgcctctgttggctctgctggtgtttttgctcgtcttttctctgctccggctgggg

SEQ ID NO: 21913 - DNA, 310 bp, Glycine max
  Clone ID: LIB3050-027-Q1-E1-D5
ggaacggcgaggtagaacgacgacccccttctgcgttttgaccttcaatctcaatcatggccaaagctgaaggtggcaaggaaccaataaatgaacaagcagtagcaaatatgtatgctgcaatgaggtctgagctcaaccaaatttactccaaaataactgaactggagatggaagttagtgagcacacattggttaccaatgccattcaaccacttgaccaatctagacgatgctatcgtatgattggaggggtgcttgtggagagaaccatcaaagaggtcttgcctgctgtgcagcgaaataaaga

SEQ ID NO: 21914 - DNA, 329 bp, Glycine max
  Clone ID: LIB3050-027-Q1-E1-D7
gataacagaatggtgaaccattttgttcaggaattcaagaggaagaacaagaaggatattagtggaaatgccagagcattgaggaggttgagaacagcatgtgagagggccaagaggactctctcttccactgctcaaaccaccattgagattgattccttgtatgagggtattgacttctacacaaccatcacccgtgcccgtttcgaagagcttaacatggacctattcaggaagtgcatggagcccgtggagaagtgtttgcgggatgctaagatggacaagagcaccgtccatgatgttgttcttgtcggtggttctactaggat

SEQ ID NO: 21915 - DNA, 416 bp, Glycine max
  unsure (1)..(416): unsure at all n locations
  Clone ID: LIB3050-027-Q1-E1-D8
cacttcacttcactaatacatcatggcagacgagacccagaacaagtatgagagctctgaggttgaggtccaggatcgtggtgtttttgactttctcggtaagaaaaaggatgaagaagacaagcctcatcctcaggaggaggtcatcgccaccgagtttcaaaaagtcactgtctcagaccaaggagagaacaagcacagcctcttagaaaagcttcaccgatctgacagcagctctagctcttcaagtgaggaggaaggagaagatggagagaaaaggaagaagaagaagaaggaaaagaaagggctgaaagagaagatcgaggagaanatagagggtgatcatcatcatcacaaggatgaggacacaagtgtccctgttgagaaagttgacgttgttgaaacaacacatgctg

SEQ ID NO: 21916 - DNA, 278 bp, Glycine max
  Clone ID: LIB3050-027-Q1-E1-D9
gaagtgaaatggggaattgacttagcatctgagcatgaaagatacctaacagaggtaaagtttcagaagcccgtcattgtatatagctatccaaaagatatcaaagcattctacatgcggcttaatgatgacttaaagacagtggctgctatggatgtgcttgtacccaaggttggagagctaattggtggaagccacaaggaagaacgttatgatgtcatccagacaagagtaaacgagatgggtttgcctgttgagccatatgagtggtaccttga

SEQ ID NO: 21917 - DNA, 315 bp, Glycine max
  Clone ID: LIB3050-027-Q1-E1-E10
gatgatggagccttctatggcgaggatgggtttgatggcaatgatgtggttgatttgcttcctgattcgtttgattttgatgctggtgaagatccttttgaagagtttattcgatcttctgaatcccaagaagaaactggacccataggaactgcatgagcttttacagatgaacccttttaacagaagctaccaacctaagagactggacccaaggccttagctttaggtcatttagctgatatgtttgtcccatgttgttatccgtcgcctcaacttcccggtacttcctgtataggccacgtttcaagcttc

SEQ ID NO: 21918 - DNA, 398 bp, Glycine max
  Clone ID: LIB3050-027-Q1-E1-E11
gattcacacaaacggaacaagatagatatatagaagagccttccatatatagcctcccaaaaaaatgaagagtactacctctttggctctctttctactttgtgccctaacttcatcatatcagccttcagccaccgctgatattgtattcgacaccgaaggcaatcctattcgaaacggcggcacatactatgtgttgccagttataagaggaaagggcggcggaataaaaatttgcaaaaccgaaacaaaaacatgcctctcactgttgtgcaatctccctttgaggtctcaaagggtctaccactgataatttcatccccatttaaaatccttgacaatcaccaaagacttattttgagcctcagttttcactatgttaccccctgtgcctcaac

SEQ ID NO: 21919 - DNA, 388 bp, Glycine max
  Clone ID: LIB3050-027-Q1-E1-E12
agggagaccatcaaagtttcacttctgccttatccggtttatggtttcggtttttgacccaacctttgacgtatcgacaccttaagtttcggatcaggtctgagcaatctggttggtaaaacctttggtctaagagagtcaagttttatgtctgaattagacgatcaaattcctactgccttcgatccatttgctgatgcaaatgctgatgactcaggtgctgggtcaaatgagtatgtgcacattcgcgtacagcatcgaaatggaaggaaaagcctgatcaccgttcaaggattgacataagaattcagctataacaagatacttaaagatgttaagaaagagttctgttgcaatggaacagttgttcacgacccagaactacgac

SEQ ID NO: 21920 - DNA, 318 bp, Glycine max
  unsure (1)..(318): unsure at all n locations
  Clone ID: LIB3050-027-Q1-E1-E2
ggttctagtgtgtgattgtttgttgttgtaactcgttcttcttcttttgttgttctgtgtttgtgtttgttttttctctcacctgaaaatgtcttgctgcggtggtaactgtggttgcggaagctcctgcaagtgcggcaacggctgcggaggctgcaagatgtacccagacttgagctacactgagtcaaccaccaccgagaccttggtcatgggagtggcacctgttaaggctcaatttgagggtgctgaaatgggtgtgcccgctgagaacgatggctgcaaatgtgggacanactgctcctgcaacccctgcac

SEQ ID NO: 21921 - DNA, 347 bp, Glycine max
  Clone ID: LIB3050-027-Q1-E1-E5
ggaggcaagaagttgtattttggcatccccgtggcttcaagaagagaatctcaatggaggcccaggagctgaagcgcgtgttccagatgttcgaccgcaacggcgacgggagaataacgaagaaggagctgaacgactcgctggagaacctgggcatcttcatctctgacaaggacctgagccaaatgatccagaggatcgacgtcaacggcgacggttgcgtggacatggacgagtttggggagctgtatcagaccataatggacgagcgcgacaatgaggaggacatgagggaggccttcaacgtcttcgaccagaacgccgacggcttcatcaccgtcgacgag

SEQ ID NO: 21922 - DNA, 268 bp, Glycine max
  Clone ID: LIB3050-027-Q1-E1-E7
gatagactaaacaaccaaatagtgtaatcagacatacctacttttttcttgtttaaagtgagaaggaaaaatggatagataagaaagggaacttctcttgtatacccgttaaggctgttaaatgaaatgacgctaattaagagtttccaatgagaagatatagagatcaaattaatattggtacttcacgcaagaaatgaatcaattctcttaatgagattaaaatgatatgaattacgaacgttacatcaaaatttactatgcaact

SEQ ID NO: 21923 - DNA, 352 bp, Glycine max
  Clone ID: LIB3050-027-Q1-E1-F1
gacacaaattatcaaccatatctattcttacaagttacatccattgaggaaacatgaatgtctcccctttagcattttcaatccttggtttgtccttcaccatataactcttcattggcattgcttcagcagcacatgaaccactgcttgacacctcatgccagaagctgataacatgtgtcaagcactacattctaccagtcttcagaggcagaggtggaggcctaacactttcaaccagtggcaacaacacatgccccctccttgtggtgcaagagaatcttaaagtctcaaagggcacccaagttaccctcacaccctacaatgcccatagtggtgtcattctaacctc

SEQ ID NO: 21924 - DNA, 248 bp, Glycine max
  unsure (1)..(248): unsure at all n locations
  Clone ID: LIB3050-027-Q1-E1-F10
tcctctttggcgtttcctcttcttcnttcttcccgtttcccttgcgctctggcggggngcgggtttttcttctccgctttccttcgtgctctggccttctcgggcctgtgcgtgtgccttgctgctcgccttcttttgctgtctcgtcctgctccctctttgccgggtcttccctgtttgccttcgcgctctttgcctcctttgccttctctttccgcgctgcctcnggcccctgttccgcctttgcc

SEQ ID NO: 21925 - DNA, 275 bp, Glycine max
  Clone ID: LIB3050-027-Q1-E1-F11
gatgatcaacaacaacaaccaggaaaagacgttctctcctcatagctaggaaccgcagaaccctttcgcaaaattatacgtagcaacaccttcacaacattctataaacgaaagttaaaatctagctagggttaaagaaatgtccggggtgtgggtagtcacgaatggtgtgtttcgtttggtggaaaaccctcaagctgacgcctcagatgggaggcatgggaacggaagtagctcacagagaaaggtgtgggttcactgccaactggtgaggt

SEQ ID NO: 21926 - DNA, 402 bp, Glycine max
  Clone ID: LIB3050-027-Q1-E1-F12
ggagaacaattggacggcatcgaaagccacgtggcacgcgccaattcatacgtgcggggtggggtccagcagctgcacgtggcaaggaagcaccaaaagaacacccgaaagtggacatgcatagccatcatattgctcattattatcatcttgatcatagtcctccctatagttctaagaaaatgatcgatcacatattctaattggtatatggtggtggctgcgaagaacttggactagttcaaacttcagagattgttagtatcttatattagttaagtcaattcatatgctgcctagaccattgcattagaaaaatatataccttggcctttgtgattagttttattttttctttttttgggtcgcatcatgtgttgattaaattatattttccacgta

SEQ ID NO: 21927 - DNA, 345 bp, Glycine max
  Clone ID: LIB3050-027-Q1-E1-F2
gacagagttgcaagagaaagataaaagaagatggcgactcttgattccgacgtgcctatggttcccgccggcgagccctcgagcagcgccggtccttcttccaagaagcccaagcgcttcgagatcaagaagtggaacgccgtcgctctctgggcttgggacatcgttgtcgataactgtgctatctgccggaaccacatcatggatctctgcatcgagtgccaagccaaccaggctagcgccactagcgaggaatgcactgtggcttggggagtttgtaaccatgcttttcacttccattgcatcagtcgatggctcaagactcgtcaagtttgtcccctagat

SEQ ID NO: 21928 - DNA, 279 bp, Glycine max
  Clone ID: LIB3050-027-Q1-E1-F3
gtccaaccggatgcgagacgacgaccgctggggactctcttgcccgtgtcgcttctttgcctttcggatcgttcgtgaccacggtggtttctcttgtcttcttctgtggcgagcttggtttcgcttgttcattcatctcacttccaattaaggaacaagctttccaccaatttgaatcaccaatggctcgctctttctccaacctcaatgttctctctgctcttgtcgccgacggattctccaacactctcaccaagcgtgggtacgcagtagcgacac

SEQ ID NO: 21929 - DNA, 336 bp, Glycine max
  Clone ID: LIB3050-027-Q1-E1-F7
gaccatcgtgtgtgtgtgtgtacgctttctattcctttcattgtttcttttctcttcgttctgaaatttcgtttctctcggccagggctacaatgtcggaagctaagacccagattgaatccataaggaagtgggtcgtcgagcacaagctccgtactgttgggtgtctgtggctcagtggtatttcgggttcaatcgcttacaattggtctcgagccaatatgaaaactagtgttaagatcattcacgcaaggttgcatgcacaggctcttactctgggagcattagccggagctgcaccactagaatcatatgattcgtgatgcgggagcaaag

SEQ ID NO: 21930 - DNA, 410 bp, Glycine max
  Clone ID: LIB3050-027-Q1-E1-F8
ggaagaatgaaaaaaaaaatgaaagtggaggaatgaaaaaaaaacgaaatagagtaaaaaaagagtgaaaaataaaaaatgtttggttgaaataaaatagagtgaaaaaataaaaatatttgaattaaaattggttgataggtaaaaaaaaaaaacatgtgcattatttaactctattcaccgtccctcttctctctatttaaaaccttaagatatttattggctattgtatgtaattttcatgtcggaaagaaatcttaaataaacacttcaacaatcgtattgatataggacatgtctaaaatgatagagctaatgtttttgtagccacttttacttttttagaagaaatgcaatagggaaaaaatcaagaggtctaccgttggaaactagaaatccgatgcaatgat

SEQ ID NO: 21931 - DNA, 286 bp, Glycine max
  Clone ID: LIB3050-027-Q1-E1-F9
gacaacaaaaagtggtgtcctaaagaaagaccatctttctcttttctgtatcaccgttggaagagactgagatgggttcaaaaaccaagacttttacctttgaagaggtggctaaacacaatcacaggaaggattgttggattatagtcaaagggaatgtgtatgatgtcaccgcatttttggatgatcatccaggatgtgatgaagttttagtgactgcaacatagaatgatggcacaactgattttgaagaaattggccacagtgattcagcaacacagatgat

SEQ ID NO: 21932 - DNA, 335 bp, Glycine max
  Clone ID: LIB3050-027-Q1-E1-G1
cgtccaagcgaaaagacgacagaaggggaatagggagatgtctcagaggaaccaggaagctgtagagatggcacggcgtgagagacaaagaacgagtacgaggcagagatggatttggggatcgattactactgccattgcagttggtactgcagcaatagcatggtcctatctccctgtgggtagaggatcaacatctgcagttcatgatcaggttcctgaacatgatgatgcagccaactaatataccgtcaatactaacttcattgccgacttatggtacaggaggagactccaagttatatgtgccactatgtggctaacatgttgcatat

SEQ ID NO: 21933 - DNA, 344 bp, Glycine max
  unsure (1)..(344): unsure at all n locations
  Clone ID: LIB3050-027-Q1-E1-G10
tgncggggagattctgtcctggggtcccttgctggntnggtcactcatcatcatgtcggacgaagagcaccatttcgagtccaaggcagacgccggtgcctccaaaacctaccctcagcaagccggtaccattcgcaagaacggctacatcgtcatcaaaggacgcccctgcaaggttgtggaagtttcgacttccaaaactggaaagcacggtcacgccaagtgccactttgttggaattgatattttcactgccaagaaacttgaggatattgtgccctcttctcacaactgtgatgttcctcatgtgaatcgtactgattaccagctcattgatattgctg

SEQ ID NO: 21934 - DNA, 382 bp, Glycine max
  unsure (1)..(382): unsure at all n locations
  Clone ID: LIB3050-027-Q1-E1-G11
ggactggataaagtgtgctcttcaacggaaaattgatcactcctgaaacagtttcacgctgctattttgtttaccaaatacttttgttgaacccttttactcaacaaagatttttctcagttctaactgagaggtctaaagcaactaaatggaggttggagaaacagagagaaacaagcttcaagggcacgttccttgggtccccaccacccctttgatgcncattcttccaaaaccagcgccgatctggactcctatggagggaaaccacctatactctcattccaatgggttttttaaccaatttgctcaatgcgtttaatgcacagttcaaccccccaccgaccctatgcattacttagccatcaatatcatccctctc

SEQ ID NO: 21935 - DNA, 399 bp, Glycine max
  Clone ID: LIB3050-027-Q1-E1-G12
gactgaaaaaagagaaagtgagaaaagggtcgaacaactggtgaagtcattgatggctacagaggaagagagtgcggtgaaggagcctttggatctcattaggctcagcctcgacgagcgtatctatgtcaaactccgttccgacagagagcttcgtggcaaacttcacgcttatgatcagcatcttaatatgattcttggtgatgttgaagaaattgttactacagtggaaatcgatgatgagacatacgaagaaattgtgaggactacaaagcggacagttcctttcctgtttgtcaggggagatggggtgatattggtttccccgccattgacgactgcatgactggactgatgaactctgtgatcattttagtcacaagtgtcactgttactaaa

SEQ ID NO: 21936 - DNA, 278 bp, Glycine max
  Clone ID: LIB3050-027-Q1-E1-G2
caaggaggctgcggctaaggctctcgctcaacatggttcctccaccaccaacatctccaatttggctctcaagtggacccacaaattcaactagtagcttcttcctttcaattatctgcacttaacttatcaaatgtcacttggcatacatgacattaataaaataattgggtaagtgtacgtaaatttcaaatccacatcccgacgatgttcaatggctagacctctaacttgtagtatatgtttcaaaatgcctttcaaccttaaattactaagtt

SEQ ID NO: 21937 - DNA, 270 bp, Glycine max
  Clone ID: LIB3050-027-Q1-E1-G3
ggaaaatattatagagaaccacagaaatcagcagcacctcttccttttcaccttattggggaaataataaggagcttcaagactgggcattttgttagtgacacgggggatgttgtgtgctatcacaccgactctaacattaatggctcttccaaattagcgtgactattcaacttcttttctatatagacaacacacgcttatccccaattcttattgctttaactattgtcctgagtttctcccgacgttactgcccctacttggcgt

SEQ ID NO: 21938 - DNA, 324 bp, Glycine max
  Clone ID: LIB3050-027-Q1-E1-G4
gagagtggtggagtgtgcaaaagagcgtcgtagtcgcaaccctaatcagaagaagcgcagcttcaagcgagtgacagccaccagccatgggtcgtatgcacagccgcggtaagggtatatcctcttctgctttgccctacaaaaggacacctcctagctggctcaagatctcttcgcaagatgtcgaagaaaatatctgcaagtttgcgaagaaaggtttgaccccgtctcagattggtgtcattctcagagattctcacggtattgctcaggtcaatagcgtcactggcagcaaaatccttcgcatcctcaaagctcacggac

SEQ ID NO: 21939 - DNA, 251 bp, Glycine max
  Clone ID: LIB3050-027-Q1-E1-G5
gagacagagaagcattagcatttgcacgacgaactagtctgagcatagatggcctcttcagtgatggcatctgtggccctcagacctgcacctttcactgttgagaggtcctcagttataggccttccctccatctcaaggaactccgcttcatgcagagttgtggccagtggctggcaataatgatcatgactgacattcctgacggtattaatggttgcatgtctttgacggaatgagttgatgcatct

SEQ ID NO: 21940 - DNA, 286 bp, Glycine max
  Clone ID: LIB3050-027-Q1-E1-G6
cgatacgacaacagacaggtagggatgcgagaagacaacactgcggtcctgctgctagattatcatcatctggtattgctgctataatattactcacgggtatggctgctagaagaccatacatggggatgttggtcttgatgctaacaggtgtcatgtgttggtcaccattgtgcacgcatccccagctttccttcagtgtgtgctcggccactttcacctctcgccctgatgatgttcgtgctcagtaccatggtcacatgtttgggtaagtcagctatgatcc

SEQ ID NO: 21941 - DNA, 355 bp, Glycine max
  Clone ID: LIB3050-027-Q1-E1-G7
gatagtgtactcacacacgcttcatttttttcgcgtccgttcactcttttccagttttctacgttccctcttcttcttcagtcattcaagcgtatctcagttccatcctcgtttcgttaaccttctaattcattccattcgtcacttccttttcaaccgaagcttttctctgatcatcgcagagataatgaatggtggattggggaaacgtgactgcggaggatgtgatcgacgcgctccgcaatgtcgattggtcatctccgcggcgcatgctgtcggcattcttctcacgattcactgtgcccagatcttcgtcggattcgagaagccgcctcaggtgcaacctctactacta

SEQ ID NO: 21942 - DNA, 414 bp, Glycine max
  Clone ID: LIB3050-027-Q1-E1-G8
gaagaatgtgatcatttgataactctggccaaggacaagctggagaagtctatggtggcagataacgagtctggtaaaagcataatgagtgaagtcagaacgagttctgggatgtttctcaacaaggcacaggatgaaatagttgctggtattgaagccagaattgctgcatggacattccttcctatagagaatggtgagtcgatgcaaatattgcactatgagaatggtcagaagtacgaaccacattttgattacttccatgacaaagctaatcaagttatgggtggccatcggattgccactgtattgatgtatttgtctgatgttgagaagggcggggaaacaatttttcccaatgccaaggcaaagttgttgcagccaaaagatgagagctggtctgaatgtgctcac

SEQ ID NO: 21943 - DNA, 271 bp, Glycine max
  Clone ID: LIB3050-027-Q1-E1-G9
cagtctcagttacttagagacaccgtggacgaaaggaaagcgttctaagcgtagccgcacggagcaacaactgcaacacccttcatgcaccgaggaagagtacctcgctctttgtctcatcatgctcgctcgcggcggcgccggcagtgtctccaccgccaaacccgctgtctccgacaacaattctgcgccgctatccgccgccaaactgagctacaaatgttccgtttgcaacaaagccttctcctctttacaagcactccgatgacac

SEQ ID NO: 21944 - DNA, 343 bp, Glycine max
  unsure (1)..(343): unsure at all n locations
  Clone ID: LIB3050-027-Q1-E1-H10
ggattggnggtgtntnggttgggannnctctncttggtcgctgcggtgtgttgtgtccgtgtgttcgttgcgctcacggtgtcggaactttgcgtgttgcgagatcgatgctgaagtctgctacgtgtgcactggcgcatgtggcactggatgtggttgacattgggcccagtgctgatgctgctgtgacctgcaccacgtcacactctggtccttgtcttccagcaactaattcatgttctgcaacgtccagtgcttgttgaccgctcacttgaggagcaagaacgttccttctgtgggaaccccaatttacctcgctcgaagcactatgtcctcactcctg

SEQ ID NO: 21945 - DNA, 413 bp, Glycine max
  Clone ID: LIB3050-027-Q1-E1-H11
ggtggtgagaagaaagagaaagaaggcgacggcgagaagagagagaaagacggtgcggcggcagcggctgcggaggttattaacaaaatggagtatatgcaccggatggcacctccttcgttctggtacgacggagggcactttcccggtcaaacaagttacgctatggaggttcatccagggtatggtgctagtgctaataatcattacgtggagccagggtacgtgaaccaaggttatcctctgcagccacctctaccgtactacatgcacccgcacgctcctcctccgcagatgttcagcgatgagaaccccaatgcatgttcaatcatgtgatgatcggtgattaattttcggtgtacacttacacacgtacgggatacggatacggaatacgcatggtgtaatttgta

SEQ ID NO: 21946 - DNA, 424 bp, Glycine max
  Clone ID: LIB3050-027-Q1-E1-H12
ggacacaaagaagaaagagaagagaataatacgaagagccagggttttgcctcagaaagggttcacccatttgcaaagtgcctcgagagttgagatcacatcggaacaaaacttggagaattattacaatttacaaggtgacaaaagtgcatggcatagatttttttttatctgtataaatcaaggtaccagagaatttataacaactcagacacttttctcaattgagacttcttggtaaatggtatgtcatagataaagctacatgcgtgctcaacaaagttcttattctcaatctcccttaattatgttggaacctttcgctacttgcttcacctttcttcataggaagaccaaattcttcctcaacaaaccaagaatcaaggagatgatgggtgcatgctgcaagagaagacaatccaac

SEQ ID NO: 21947 - DNA, 363 bp, Glycine max
  Clone ID: LIB3050-027-Q1-E1-H2
cgtccaaacggaagcgagaagacagaaggggagaccaaacaatactcagaacctgattaaggagagtatggcacagtttagtggcaaaactttggtgcagtggttggtagcaacactgctgattgccttgttgggtggtgcacaagctgttgtgttatgtaacatcgactcaagtcaactaaacttgtgtcgtgctgcagttacaggtcaaaaccctccaccaccagatgagaaatgttgtgcagttattcgccaagccaatttaccttgcctctgcagatacaattcaattcttcctttaatttggataaacccgaaaaggctttggccttgcctggtaaatgtggtctccaatcccctcct

SEQ ID NO: 21948 - DNA, 150 bp, Glycine max
  Clone ID: LIB3050-027-Q1-E1-H3
ggttctagtgtgtgattgtttgttgttgtcactcgttcttcatcttttgttgttctgtgtttgtgtttgtcggggctctgacctgaaaatgtcttgctgcggtggtaactgtcgttaccgcaactcctgtaagtgcggcatctgtctgcg

SEQ ID NO: 21949 - DNA, 287 bp, Glycine max
  Clone ID: LIB3050-027-Q1-E1-H4
ggaaactagaaagtaccgttatctaacttttatctctctctctctcaacgtgctcgtgcaattaagcaatctgaatccaaggttgtaattgtaactagctaatatgtcttcttcataccattttcaatctcagtcctatgctccatctgcgccagaacaacctccatattccaattaccatcacacttcttcatcagcatcatcgagttttccaccagggacaccccatgacgtcattaggagctttcagattgtggatagggaccgaagtggcttcattgatgaac

SEQ ID NO: 21950 - DNA, 303 bp, Glycine max
  Clone ID: LIB3050-027-Q1-E1-H5
gaatctaaagataaataaaattcaggaaaaaaaaaaaacatggtggtgaaggtgtatggtccaacctatggaccccccaagagggtcctggtgtgtctgattgagaaggaaattgagtttgaaacagtgcatgttgatctcttcaagggagagaataaggaacctgagttccttaagctgcaaccatttggatcccttcctgttattcaagacggtgattatactctctatgaatctcgtgcaataatcagatacttatctgagaagtataaagaccaagggactgacttattgggaaagaca

SEQ ID NO: 21951 - DNA, 414 bp, Glycine max
  Clone ID: LIB3050-027-Q1-E1-H6
gacactaacactacaagttcccatcttcaccacgaagcatccttagcattctacagagagaaaagtgacactctacaatggttccaaagcttagtggtgacgtggatgatggtggaactgggcttgaaactaagcctatctgaacaataccctcctcttccttcttctattaaggttgaagttcttagataagaagaagaagagagcataagatagccttttgaagctgaaagcaaattttgtgaagtagcatatatactttcaatttgtttagttcttctgggtggagttccttcatttggtgtttgtagtcatggaggtttcttggttctataccttttgcagctttttatggattcaaccatcccaaatgtgccaatggttcaaaagaaatgatatgataacagaagctca

SEQ ID NO: 21952 - DNA, 408 bp, Glycine max
  Clone ID: LIB3050-027-Q1-E1-H7
ggccctcaggttgacaaggaacaatttgaaaaggtcctttcatatattgagcatggaaagaaagaaggagctacccttttgactgggggtaaaacagtgggaaacaagggctactttattgagccaacaattttctccaatataagggaggatatgcttatagcacaggatgaaatatttggcccagtaatggcactgaagaagtttaagaccattgaggaagcaattaagagtgctaacaataccaagtatggcctagcagcaggcatagtgaccaagaatttggatacggcaaacacagtgtcaaggtccattcgtgcaggcactatttggattaactgctattttgcctttggcgatgatgttccctttggagggtataacgtgaatggatttggaaaagatcat

SEQ ID NO: 21953 - DNA, 382 bp, Glycine max
  unsure (1)..(382): unsure at all n locations
  Clone ID: LIB3050-027-Q1-E1-H9
gagaacanaaaacaacattgaaaactccaaagtcttgtccttctcaagcacttgctccaactccaattcaaccatggttgcgagactcgcggtaacagcgctggtgctgatagctttggcaacaatttctctccaatcttcagcttcaccttcatcagtgggtaaattcgtcgacgaaaccatcacttcccacaagatcgtcattttttccaagacctattgcccgtactgtagaagagcaaaagctgttttcaaagagttgaaccagttccacatgttgttgagctccacgagagagaggatggttcaaagattcaggatatcatggttaaataattgttgggaggcgtactgtgccacangttttcatcaatggaaaaca

SEQ ID NO: 21954 - DNA, 375 bp, Glycine max
  Clone ID: LIB3050-028-Q1-E1-A1
gaaaagtgaaggatacagaccagatatagaaagatagagaaataccaaaaccttggcgcagcatagtctttattccctcacttggatcgttagattccgggaacgagcttctgggcttcaaattaaccatggggaatattggtgaggagtacggctactggccggagaacgacatgcttttccaaaacgaagaccttgggagctgggcgataatggatgaggcagcgttatcagggtcagggtactatgattcaagctccccggacggtactggtgcctcttcatcggtggcatctaagaacattgtctccgagaggaatagaacgaagaagctcaaccataagctttttgctctaagagcagtggtccccaaca

SEQ ID NO: 21955 - DNA, 405 bp, Glycine max
  Clone ID: LIB3050-028-Q1-E1-A10
gtacttttcattaacattactgcaaattcggaaaatggcatcttcctgtctggttcaaagagaggattgttaagaaatttgagattcattgatatggacattacttacagaaggttcaccaattatgctggtgggttattggactataggccaggatgccaagagttggtaaaacacaggactgcagggattatgatggagcacattgaagggcttgaggttaaaaatgttgaaatgagatggtcaaacgatcaactagagcagtggaataatcctctagagttcacgccatctactgtgaataacatctctttccttaattttagttctggtttgtatacaaatagcatatcatattattaactttgaatctgcaaagggagaatgtcaaatcattggctgcat

SEQ ID NO: 21956 - DNA, 314 bp, Glycine max
  Clone ID: LIB3050-028-Q1-E1-A11
tctcaaagatccgggaaactaggaagcagaacaagacaaatatttccagggcaagccttggcaatgaagaagaattcatggattcaacaacctccagcagcgtcaacactgcccacagcagtgagcaccctcaaccccactaccatcaaacccactctccaactgcaaggaagagcttcctcagctacttcaattgttgtgtgaaagcctaatattcaagggcaagtgcaatctttctcttgttttctgaagattctggataggaacagcttgcttgtctgttcgtttggtgattaatacttattagctattga

SEQ ID NO: 21957 - DNA, 282 bp, Glycine max
  Clone ID: LIB3050-028-Q1-E1-A3
ggtgatatatagtgaaattcgtaagttataactgacaaagttttctgagaacgtaaggatgagtattatcgagagaatgcgcaggctcctcggacgagggacaagtcattagctgtcacaccgttgacgcatggaacgatcaactccagaagggcaaccagtcccggaagctcattgttgtgcattttagtgcttcttggtgtggaccatgccgtttcattgcaccattcttggcggagctggctaagacgttcgccagtgtcgtattcctaaacgtggatg

SEQ ID NO: 21958 - DNA, 364 bp, Glycine max
  Clone ID: LIB3050-028-Q1-E1-A4
ggcaccaatattatccaaattcgtgagagcttattcaatcaaaatgtctcccaaatacaagctagtgctgttgatagcattggttttggttgcaacctcccttgctggtcgcacaaaggaacatcctaagcatcctccatcccttcaagaacaacaacacaccccagaccttgatagctacccgccaaagcatagaccgaaaccacctcatcctgtacatggtgccggggaggaaccaacctccattcctcgaaagaagggaccaagaaggcctccgaactgatgagtgagtcaaaggtttcagattgcctcaaatggtttaactttgactcgatctctaacaccacagcatcaagatatgttg

SEQ ID NO: 21959 - DNA, 328 bp, Glycine max
  Clone ID: LIB3050-028-Q1-E1-A6
gaagacgggagcaacatagaagagggaggagcaagtagtgggtttggtaatagatccccaagagggtcgtccccacacaagaaaactcgctcgagcaacttcaacactagcgacggcctacttctagtgggtgacaagggagcaaggttcctttgactggttcaaactggtgatgaatcacgtggctgaagaggatcataggggagtcgttgagctccacagctattgcactacgtgtctatgaagagggtgacgcgcgcgcaactcttattgctatgttgcaatctttaaaccatgccaaaaatggcgtggatattgtccctggcac

SEQ ID NO: 21960 - DNA, 263 bp, Glycine max
  Clone ID: LIB3050-028-Q1-E1-A7
cacatctcatttgaactcaaatggaaggatttccaatgtggctgaagccccattgaaaaaaactggccacttgtttgatctaaaccttaatgctaggagttctagtaaaagagatgcttcctttaacggttctgctccaccagtgtttgagttgaatcacgaacaaaggagtcacagcagcaaggaagccacaaagaagagtgtaactccatttttcgacttgaaccacatttccagagaagaggaggaattgcacgggaaca

SEQ ID NO: 21961 - DNA, 268 bp, Glycine max
  Clone ID: LIB3050-028-Q1-E1-A8
gttcgtagaaggcaaattccatgctatgtgtttccggatggttatagacgatctcggccatcgcggccaacatcacaatttgagaattgtggatcagttgaggaggatgaggtttctgtgactgaacaggtggagagaatccgtaagcggaagaggcagtcatggtgtggatctgagggaggatgctatagttaaaaggcagtatgcgtgtcctcctggggatagactggcgagaggcagctgccttggtactggtggtatgtctgtt

SEQ ID NO: 21962 - DNA, 350 bp, Glycine max
  Clone ID: LIB3050-028-Q1-E1-A9
gacggtggtgatgatccttttcttgatggaaatttaaaagctgaatcagtagccaagcacatgagagcaataatggagcctctcttgtccacaaagtttggtgcaaaagttataaatgaactattcaccaggtttcaaaagaaaattatgcaactgatggaggtggagaaatcggagtgggctactttgatgatatccatgataaaaactgcttgaagatgttgctcaataaaagatcttaaaaacttgtttttcttcctttatgatttttttatttatttgttcaaataaagttatggagcagtaacgacaaggcatatcataataaaagatgaacaactgtgttaatt

SEQ ID NO: 21963 - DNA, 260 bp, Glycine max
  Clone ID: LIB3050-028-Q1-E1-B1
gacagacaaacacatactttaccagctatacttgttccttttgaaggttagaagtgctacaatacaaacaatggcagctactcaggaagatgtgaagcttttgggtattgtgggaagcccatttgtgtgcacggtccagattgcccttaagttgaagggagttgaatacaaatttttggaagaaaatttgggcaacaagagtgatttgcttctcaaatacaaccctgttcacaagaaggttccagtgtttgttcacaatg

SEQ ID NO: 21964 - DNA, 404 bp, Glycine max
  Clone ID: LIB3050-028-Q1-E1-B10
ggttaaaaaaagagagaagaaaaatgcgaaagttcgatccatggcccgttttcttcaagcgcgagtggaaacgcaactggcccttcctcgttggattcgcagtcaccggagctctaatcaccaaactttcccttggccttaccgaggaagaggctaagaattccaaattcgttaaggcgcacaaaaggtgacttctgaatcgtgacatctgcctggctttgcattttatgttagggttgtcaagattactttgcttgacttgattttatggattgtaataacagaagagagatgctctagataatctctccaagtctgtatcccatgttcttattttcagttttggaggttgtttacctaaacctggttgagaaaatccacaataagttagtaatttccgattc

SEQ ID NO: 21965 - DNA, 323 bp, Glycine max
  Clone ID: LIB3050-028-Q1-E1-B11
ggagctgacagatttaagataccagatgttcttttcaatccatccctggttcagtcaattcctggcatggagagctttgcagaaattgctccttcagttcgtggcctgccccaaatggtgattgaaagcattaataagtgtgatgtagacattcgaagagagttgtttaatagtatactgcttgctggtggtacagcttcaatgcaacaactaaaggaacgccttgagaaagacttgttagaggaatcccctcaagctgccagagtaaaagtattggccagtgggaatgctactgaaagaaagtttagtgtttggattcgggg

SEQ ID NO: 21966 - DNA, 385 bp, Glycine max
  Clone ID: LIB3050-028-Q1-E1-B12
ggggcattgcattgtggaggagcaagggaagggtgtggagaggtacacgttgaggttgcccgaagatgtgaggaggtacattctggtgaaccatgggaggagtgttcaacgttccgcgagtgttaagggggtgtgttggagtgatagtgaagagagttataagggaaagagggtcaatggagaggtgagggtggagaagaggtgggtgatctgcacaccaccatttgtgggacatggctgacgaatttcgtcgaacatttagtctgcgttacgctttgcctcttctctctgcgtctttgctgagaggaaaaggttgtgaaaaagtgaacgtttgagatgtttgggttgcttcactacattggtcgttgtcaattcttgcagagat

SEQ ID NO: 21967 - DNA, 329 bp, Glycine max
  Clone ID: LIB3050-028-Q1-E1-B3
gaagaacagccagtaacacttaccagtatggctatccaacaatctctgttagacaggcctagaaaatctgtttccaaaactatctgcttaatcttttcgatagctgctgtcatgatctcatcagcctttgttggttcttatctcatcaaatccacctccttcttcaaccaatcctcgcctcaacatctctgtgatcatgcacttgatacggcaacatgtttaacccatgtctcagaagtggtacaaggtccgatcttgacccccacaaaagaccacaaattcaatttgttacagtcattcctaatgaaataaacctcacacattaagag

SEQ ID NO: 21968 - DNA, 422 bp, Glycine max
  Clone ID: LIB3050-028-Q1-E1-B4
gaccaaacaacagatattcatggctttctttattctctccttcctcttccttcgtcttgtttcatctgccactgcttgtgatcgctgcttgtatcaatccaaggcttcctatttctccaaagctcctgctctttcatctggggcatgtgggtatggctctttggcactagacataagtggtggacaccttgcagctggtgtggattctctcttcaaaaatggagcaggttgtggtgcctgctttcagataagatgcaagaacccaactctatgtagcaaagaaggtaccaaagtggtattgactgatcttaatcacaacaatcaaactgattttgtgctaagcagcagagcctttgcgggcatgggtcaaaagggtatgggccaacaaatactgaagcttggcattcctgaaattgaataca

SEQ ID NO: 21969 - DNA, 372 bp, Glycine max
  Clone ID: LIB3050-028-Q1-E1-B6
gaccgtttcggttaacactttccaatacaataatcactaactgaatattcgatcggagatgtctgccgccgccgaagaagctaacgctcccgccgtcgagaagccggttgaggaggtgaaggcgccgaaccccgcgaaggagaagaaacctaaggctccgaaggaggagaagccagaacaggccagaacagcttcacatcctccatattttcagatgattaaggaggctttgatcgctttgaacgagaaaggaggatcgagtccttatgcgatagcgaagtacatggacgagaagcacaaggcggtgctccctgcgaatttcaagaagattctaggtctgcaactaaagaaccaagctgcgagagggaagct

SEQ ID NO: 21970 - DNA, 312 bp, Glycine max
  Clone ID: LIB3050-028-Q1-E1-B7
ggcattgtggaattaatagagagacataaaaaataaacatatatcgagaatggagggttgtgtgaagaagttgctatgccttgttgggtttgtggtgcttgtgagtactattggtggggtggagagtgctggcgaaagtagggatgcaacgacctctgcaactgaggcttatagacttgcgacacgtcatcgcagcagcacaggaacagatgctcttcgtgacgatccagattactatgggcgagtccagaacttctgatacgcaagctcctgttccagcgtcatgttcgtgagatttcacacgacctcaag

SEQ ID NO: 21971 - DNA, 398 bp, Glycine max
  Clone ID: LIB3050-028-Q1-E1-B8
ggcagccaagaaaagaaaatcctcacccattttcttcgtagccaaacactctgaaattctcagttatgtcgtggcaagcgtatgtggatgatcacctactgtgtgaaatcgaaggtaaccacctcactcacgccgctatcatcggccaagacggaagcgtttgggctcagagcaccaacttccctcagttcaaacctgaggaaataactgccatcaataatgactttaatgagcctggatcacttgctccaactggattgtagatcggtggcaccaaatacatggtcatccagggtgagcctggtgctgtcattcgagggaagaagggtcctggtggtgttactgtgaagaagaccggtgcggccttgatcattggcatttatgatgaaccaatgact

SEQ ID NO: 21972 - DNA, 390 bp, Glycine max
  Clone ID: LIB3050-028-Q1-E1-B9
caaggaattggctgaacagatagcaaaagatccatcgttcaatcagatggctgagcagcttcagaaaacttttcaaggagctccacaagatgctatccctagcttcgataatcaacaatatttttcaaccatgcaacaggttatgcagaatcctaattttatgaccatggctgagcgcctgggtaatgcattgatgcaggatccgtctatgtctgccatgcttgaaagtttttctaatccatcaaataaagaccagcttgaagaaagaatggcacgcatcaaagaggattcatctctgaaacatattttggaggagatagagactggggggtcctgctgctatgatgaggtactggaataatgaggaggttttgcagaagttgggacaag

SEQ ID NO: 21973 - DNA, 307 bp, Glycine max
  Clone ID: LIB3050-028-Q1-E1-C1
ggtgaggtaagaaatcagccatcctgtgagaagtggtcaaatgatggttcagtcttctctgcgtcttcatcctcgatcaatcgttttccatggttcgtagtattcaaactgttcgcaaatctaccggtgataaggctcttacgaagcatagcaatatcacagttacaacgctcacggacttcaaatatagttaagtctgaaactaataccccttcataactataactattactctggcacagatgcaacatccagtggtcccatcaagggctcagataacactgctacgatccacctgtaagttgcc

SEQ ID NO: 21974 - DNA, 377 bp, Glycine max
  unsure (1)..(377): unsure at all n locations
  Clone ID: LIB3050-028-Q1-E1-C11
gggtcaaagtcagataaaatctttgttttaaagtatggatcggcaccaatttgtttggtgatgagcttcatgttcagctccatggccataggatatctgattgatgccaattttctgatgaatgcatatggagagtttttgtccgggggttacacacaaacaatattagaaagagggttcaccttagctcttgttggtaatanggtgctttgtgttgctgttcctttgatgttatggatgctgggtccagtgctagtacttttagctaccttggtgttggtttttgtgttgcatgagtttgattttgtctgcaaattcccagacaacaattaacaaggtatcataaaatagcctagctaggtacagcaatatatatg

SEQ ID NO: 21975 - DNA, 165 bp, Glycine max
  Clone ID: LIB3050-028-Q1-E1-C12
ggaagaagaaggatgtggcacgaggcgagaaggtcggagaagaaggtccacgacatgatggacgcggctcggaagagagcgcaacgacgcgccgtttacctcgccaagagacgcggcgatcctcagcaatccattcagctcgtcggctttcctagcccaacctat

SEQ ID NO: 21976 - DNA, 309 bp, Glycine max
  Clone ID: LIB3050-028-Q1-E1-C2
gacaaagcattctatcattacatagtcattacttcattacattggtcactactaatcacttgctgcattttctttcctactcttcacccttgagaatttgtcatttggacatggaacttagttttaagcaccaacttggcttgcttgtgttgtacttcttttacctgcattgtgtagctcacaggactcttttactgactccagagcaacatattatggtagccctgattgctatgggaatccaaggggagcttgtggctttggcgaatatggaaggactgtgaatgatgggagtgtggcaggagtgtc

SEQ ID NO: 21977 - DNA, 278 bp, Glycine max
  Clone ID: LIB3050-028-Q1-E1-C3
gagggttgaaaattcacacgttgaattgaaatttggaaatcgtgacaccaaccctacaccaccatggcctccgtagacaaattttgggcttttgccctcgctcttctcctccttgcctcccctctcctccaagttgctaggtgtcagtcagactccgaagatgtagtggacgctgctgaagaatcaagtgatatcggcattgttggtgatgatgtccaagactttggtgatgggaccttcccttctgctccaggaattgaaacaataagtgtttttcc

SEQ ID NO: 21978 - DNA, 400 bp, Glycine max
  Clone ID: LIB3050-028-Q1-E1-C4
gtcagagaagaagaggagcttaatggattagggacccaggcaacaaactggatgcagagtgtaggttacaagggtggtggccgtggcagcagtttggaaggaaacagtggcacgggtagtggatcaagacatcggcatcataattattctggcagtggaatctattacagtacaagaaagtgaatggtacttgagtgaatactgaaggcagatatttgttgccttctgcttcccctcagcaaggcagatatttgtttgccacactaccacactttgctgttcaaaaaattcatggcaaaggcaagtctaatagcttatcttgttggtaagtggtggtttcaaacatagagtgttggagatgctggcaggggttataaaatggtgtacacaacactttggg

SEQ ID NO: 21979 - DNA, 352 bp, Glycine max
  Clone ID: LIB3050-028-Q1-E1-C6
gagagtggtggggtgtgcagaagagcgtcgcagttgtgaccctaatcagaagaagcgcggcttcgagcgagtgacagccaccagccatgggtcggatgcacagccgcggtaagggtagatcctcttctgctttgccctacagaagggacacctcctagctggctcaagatcgctgcgcaagatgtcgaagaaaatatctgcaagtttggcaagaaaggtttggccccgtctcagattggtcgcagtcgcagagattctcacggtattgctcacgtcaatagcgtcactggcagcggaatccttcgcatcctcaaagctcacggacttgcgcctgaaattccagaggatctgt

SEQ ID NO: 21980 - DNA, 396 bp, Glycine max
  Clone ID: LIB3050-028-Q1-E1-C7
attgatggggggaggtgaaggtatggggcccattgaggctactgctcgggcacttggagattcattatatgacgagaatattggggctcccgtaggtcagatccttgtgatctgtggtcgtaataagaaacttgctaataaactgagttctattaattggaaggttcctgtgcaggtcaaaggatttgttaccaaaatggaggaatgcatgggagcttgtgattgcataattacgaaggcgggcccagggacaatagcagaggcccagatccgaggcctccctattattctgaatgattacattactgggcaggaagctggcaatgtcccctatgtagttgaaaatggatgtgggaagttctcaaaatcccccaaggatatagcaaaaattgttgc

SEQ ID NO: 21981 - DNA, 362 bp, Glycine max
  Clone ID: LIB3050-028-Q1-E1-C8
gacagcacaacgtgtttatcggaacgttgctataaacgttgttgttttcagagagacgcgtgactcactatctatctatggatcgatatcgccgagttgagccgaagcagactcggaagctatggcagagctcgaggccaaggttgaacctgttacggtcccgggtccggtggatcgcgagcgagcgctagctgaggctccgccgctcgagaagaaagcggtggcggtgccaccacctgttccggctgcggcagacgagaccaaagctcttgttattgtggagaaggagaaggagaatgagaagataccggagcctgtaaaaaagaacgcctcatgtgggatccttgatagagacaatgctc

SEQ ID NO: 21982 - DNA, 354 bp, Glycine max
  Clone ID: LIB3050-028-Q1-E1-C9
ggaggcggagacgaagaagtgaagagaagagaagagaagggatttggatctgaaaagagaagatggggggaggaatggaagcaaacaagaacaagttcatagaggattggggcactgccagagagaatctggagttcaatttccgttggactcgccgcaaccttgctcttgttggcatcttcggcatcgctattcccgtcctcgtctacaagggcatcgtccgtgaattccatatgcaagatgaagataatggtcggccgtacaggaagttcatgtgagagagtatggagagtcctttgtaataattcctcaagttagaccttgatattatgaggctacaaaacatgttttttt

SEQ ID NO: 21983 - DNA, 246 bp, Glycine max
  Clone ID: LIB3050-028-Q1-E1-D1
gggatgggagacacagttggactcatcgaatctaaaatctagagtaggcatcagaagttttctgtcaactcatgctagttttgtcaggcgacaaacacatcacataatgcggtatgtaccgacctctgtcaacgtgcatagcccttataggcaacccgtcatttttcaagggtgcaaaagtggttataatctaactcatcaccctagtgaagacatgaggtaatggcacaatcaacacaacacaaa

SEQ ID NO: 21984 - DNA, 411 bp, Glycine max
  Clone ID: LIB3050-028-Q1-E1-D10
ggtgatcgctaaaccatgattcatgattaaaccatattttctatacaagggaaggaaacaaaatacatactcatggagccgagccgagtcaccaagaacagtagtatttgtctgcggatggaagaaaagaagaaatctacaaattagaataagtaaaagaatcatttggctgtaagaagtggattcaacttaagaggcctacgtggtgccatggttcttctcttccatagattaatctctttccgtggctgcacattaagattaagcgcagttgcaccaccaagggtaagaggagcagagaaagggataatgatctcatcatccaatctatcaacatcatcatgaggcgcaatctgagccttccaatcgaaattccaaaaggtttcacgcccacttgcaaatcgcctcatg

SEQ ID NO: 21985 - DNA, 409 bp, Glycine max
  Clone ID: LIB3050-028-Q1-E1-D11
gggttctagtgtgtgattgtttgttgttgtaactcgttcttcttcttttgttgttctgtgtttgtgtttgttttttctctcacctgaaaatgtcttgctgcggtggtaactgtggttgcggaagctcctgcaagtgcggcaacggctgcggaggctgcaagatgtacccagacttgagctacactgagtcaaccaccaccgagaccttggtcatgggagtggcacctgttaaggctcaatttgagggtgctgaaatgggtgtgcccgctgagaacgatggctgcaaatgtggaccaaactgctcctgcaaaccctgcacttgcaagtgaggtgttgggagagcaagcttcaagcagagataaccccttaatagggaataatgataaactattaatgtgtagctaaaaac

SEQ ID NO: 21986 - DNA, 406 bp, Glycine max
  Clone ID: LIB3050-028-Q1-E1-D12
ggggggttgtgaatttgtgtcttcttggctcccaacccacacgcaacgcaaccatagaatggaatgaatgaaggcaaagcttatacttataaaagagagatagaaattggttgtgaaaaacagaagcactttgtttctaagtaaaaggaatcttcagctgccatgtttcatcgctggagcaattctcatcaacaggatcagggaagcagcgagctttatgctgaatccaagattaaagagctgaagggtgttatcggacccttatctggacgcagtttgacgtattgcactgatgcatgttttaagagatatttggaagctcgaaactggaacgtagacaagtccaagaagatgttggaggagacactcaggtggagatcaacctataagccagaggaaattcgct

SEQ ID NO: 21987 - DNA, 337 bp, Glycine max
  Clone ID: LIB3050-028-Q1-E1-D2
gggagtggaagtagtagcaagtacgtcgtatatgtggttgatcttttgctggttgtttgttgtgttccttccaattgtcatatctgaatcaccggagtcagtcttcagactcacgcacactgaataccttctgaaggcgaccatcaccaccaccaccaccaccatgaagatcacgatcatcagcagtcatgatcatgatccccatcatcatcacgatggagagggagagaccaactcatgggtaggtaaggatcggaaggtgtaccatagccacgatggtctggcgccgcattctcacgaacccatttactccgccgggtacttcaccagaagagct

SEQ ID NO: 21988 - DNA, 80 bp, Glycine max
  Clone ID: LIB3050-028-Q1-E1-D3
cgggggactggaagtggtagcaagtacgtcgtatatgtggttgatcttttgctggttgtttcgtgtgttccttccaattg

SEQ ID NO: 21989 - DNA, 212 bp, Glycine max
  Clone ID: LIB3050-028-Q1-E1-D4
gacggcaacagaagaataatcgagacacagatcatagtgatcagttgtgagtgtctcagatttatccgacgtcgctgcagatccaccggccgtgatgggctgccttcagcggtgaggaagcgggaggcgtttttcggcttccttggcgccgcagcggcccgcgtcttcgcctgtatgggagctgcctatggcacagcgaagagtggcgtggg

SEQ ID NO: 21990 - DNA, 283 bp, Glycine max
  Clone ID: LIB3050-028-Q1-E1-D7
gaacgcagccaagacgggaaaatccgcacccactttcttcgtagccaagcactctgaaattctcagttatgtcctggcaagcgtatgtggatgatcacctactgtgtgaaatcgaaggtaaccacctcactcacgccgcgatcatcgggcaagacggaaatgtttgggctcagagcaccaacttccctcagttcaaacctgaggaaataacgtgcatcaataatgactttaatgagcctgcatcacttgctccaactggattgtatatcggtggcacccaata

SEQ ID NO: 21991 - DNA, 350 bp, Glycine max
  Clone ID: LIB3050-028-Q1-E1-D8
gaacacagatccacttgaaagggttaggtttcgggagaaaaagcaatccactcagagagctagaagaattcaacgatgcctcgctaggatgatagataccgcaatacccgtctctatgtggggcacttagcttcgaggactcgttcccgggatctggagcgtgccgtcagcatatatcgaagagtgcggggtgtggatatgaagaatgatttcgcctttgttgattttagtgatcctcaagatgctgatgacgggagatataacttggatggtcgggatgttgagagaagtcgtattattgtggagtttgcaaaaggggctcctcgtgggtgccgggaatatttggggcg

SEQ ID NO: 21992 - DNA, 322 bp, Glycine max
  Clone ID: LIB3050-028-Q1-E1-E1
ggagttgaagctggttggtgagtacgggcttcggtgcaagagagagctgtggagggtgcagtacgcgctcagccgcatcctcagcaacgcgcggaacctcctcaccctcgacgagaagaacccgcgccggatcttcgagggagaggcgctgctccgaaggatgttccgttacggtctcctcgatgagacacagaacaagcttgattacgtcctcgccctcaccgtcgagaactttctcgagcgccgcctccagacccttgttttcaagtccggcatggccaagtctatccaacatgctagggttcttatcgagcagagacat

SEQ ID NO: 21993 - DNA, 384 bp, Glycine max
  Clone ID: LIB3050-028-Q1-E1-E10
ggaatcagagagagtctggatttcttgttgaagatgcgacgctcttctgcatccaaaaagacgggtcaatccaattccacccccatcgccgccgatctcttccgctccgcttcaagtaaggcaagctcgaaggaatcagagcgaattgatagtctattctattcgtatgccaatgggtctactgggttgattgacccagaaggaattgaaacactttgtgctgatatggaggtggaccatacagatgtgagggttttgatgcttgcgtggaaaatgaaagctgaggagcaaggatattttaccttggatgagtggacgagaggcttaaaagcattaagggccgatactgtaagtaaattgacgaaggcactcccagacctagaa

SEQ ID NO: 21994 - DNA, 399 bp, Glycine max
  unsure (1)..(399): unsure at all n locations
  Clone ID: LIB3050-028-Q1-E1-E11
gggatcttcgtgagcgaagagcttgaacagaaaatacggaacgttggtgggggtgtgttggaggagaacacgcccttagcatactcgcacgtgggaacagagctgcgtgtgcacaccaagatgtcgccatatcttaagcccgatgctgacatggcgtgttgtcatgacttggaggcttacttgcacttggtggatgggttcttggcctccaattgtcctttcagatccaatgctaagagaagcttggctaggttaatgcaagaccaaagtgccaatgtaaagaagttgtatactagcaaggcaaaatccctcactgtcaatcttagtaggcagggatctatgtccatgtctaattgtntgcctagtccatcttaatcaaaactcatatgcttccctttt

SEQ ID NO: 21995 - DNA, 394 bp, Glycine max
  Clone ID: LIB3050-028-Q1-E1-E12
ggttctagtgtgtgattgtttgttgttgtaactcgttcttcttcttttgttgttctgtgtttgtgtttgttttttctctcacctgaaaatgtcttgctgcggtggtaactgtggttgcggaagctcctgcaagtgcggcaacggctgcggaggctgcaagatgtacccagacttgagctacactgagtcaaccaccaccgagaccttggtcatgggagtggcacctgttaaggctcaatttgagggtgctgaaatgggtgtgcccgctgagaacgatggctgcaaatgtggaccaaactgctcctgcaacccctgcacttgcaagtgaggtgttgggagagcaagcttcaagcagagatagcccttaattaggaataatgataaactattaatg

SEQ ID NO: 21996 - DNA, 344 bp, Glycine max
  unsure (1)..(344): unsure at all n locations
  Clone ID: LIB3050-028-Q1-E1-E2
gggagttgggaagaatagaatacgccttggatcttattcagctcaactcagatatggttatcccaccccctgtaaggcctcccaggattacacaatttctcaaaccttatgttctgaagatgaattttaccaataagtatgtgagtgcccaggtgattcacaacccaactggtactgtancctcttctgcaagctcgcaggagaaagcgttgagatcaagcttggaaactagtcgcgatgtggctgcagctgcaaagattgggaagatactagcagaacgccttttgcttaagaacattcctgctgtttctgttcacttgaagagagagcagaagtatcatggt

SEQ ID NO: 21997 - DNA, 324 bp, Glycine max
  Clone ID: LIB3050-028-Q1-E1-E6
gattgtggcgcagacggatgctcggcaagctgtgtccttggaggaagcgtggacgagggtgcaaggcttatcgcgatcctggggccgatgttcggttcatagacgcactcgcttcggttcaggaaatgaagactctctgtcaactttctccccatcttcccaaactcgatgaggcaaaacgtctatacttagtcctcaggaacttgaagacgttggtgatgaacttgctatttatccaatttccttgattggggtttgcatacaagcaatggaggatgcactcactgctattaaaggaagcgctgttcctcctccgggaaacat

SEQ ID NO: 21998 - DNA, 345 bp, Glycine max
  Clone ID: LIB3050-028-Q1-E1-E8
gacaggcaaacaaacaatttaccagctatacttgttccttttgagtgttagaagtgctacaatgcaagcaatggcagctactgaggaagatctgaagcttttgcctattgtgggaagcccagttgtgtgcacggtccagattgcccttcagttgcggggacttgacgacaaatttttggaagaaaatttgggcaagacgagtgatttgcttctcaaatacagccctgttcacaagaacgtcccggtgtctgttcacaatgagaagcccatagccgactctcttgtgattgttcgatacattgatcagacatggaagaacaaccgcatcttaccttctgatcctta

SEQ ID NO: 21999 - DNA, 408 bp, Glycine max
  Clone ID: LIB3050-028-Q1-E1-E9
ggagccggagcgatgaggttttggatgctgaggagcaactgagaatcgctaatgagatcagagcccaattcgatgccttggaacccaagcgacccatcaagcccaacagaagcgaacccgacgccgttttgcaataccccgtcgcagccgcttctgtgaacaatatacctgagcttcacaagtttcaatcccttcaatctccctctcatgctataatttcatcggcggggtttgtggatgcacaggatgagtttgtggagacgcagtactataaagaattggcatccattgacaaacagcatcacacgacagggagtgggttcataaaggcggcgagagaaggacgggaaggtgaatatgagattcagttgcccaataatcatgttaatgccgctgaaacccaaccca

SEQ ID NO: 22000 - DNA, 371 bp, Glycine max
  Clone ID: LIB3050-028-Q1-E1-F1
atacgggatcgagcagaccactaagagggggtccattcataattctagtagaactcaggatgcacttttagcggctgcatgtgtctcattgtgaatttgcttgataactgtatgccttcaataagtttgatacattttcgcagactatatagaaactttatcaggatactcatactcagcgcaatattgcaatgttgaatgatgaactctatgaagtccaccagataatgactcgcaatgtgcaggaagttcatggtgtttgtgaacacgttcgccatgtcagccaaatgtccagtcgcatatcatcaaaatcctcacatatatgctgatcacgctatagatttagaccgggagaaatatcatgctgcaat

SEQ ID NO: 22001 - DNA, 383 bp, Glycine max
  Clone ID: LIB3050-028-Q1-E1-F11
gagcatctagctagttaattcacaaacttgagttggattttggtgatcttgtgaattgatctgcgatgtcggacgaggtagttctgttggatacatgggctagcatgtatggtatgagggctaggattgcattggctgaaaagggtgttaggtatgaatacaaggaagagaatctcatgaacaggagtcctttgcttttgcagatgaacccaattcacaagaagattcctgttttgatccataatggcaaacccatttgtgaatctgcaataatagtgcagtacattgatgaggtctggaatgacaagtctccactcatgccctccgatccttacaagagatctcaagccagattctgggtggactacattgacaaaaagatt

SEQ ID NO: 22002 - DNA, 396 bp, Glycine max
  Clone ID: LIB3050-028-Q1-E1-F12
ggatccattgctattggatcttgcttcacttctcagtggttgcaacttagtggttgccactcctctctcgaactgcaatgccaagcttccttctactgggggtctcatttcaaccctaaactttgctgggatcactagtgttggcactcaaaccatggctaacatcattccatcagggtttcatttcttgccatccatttaagtattacaagatggaaaagatatatttatagcatgcatgacaaaattattatgaaataaagtcatgcaatgtcttgtcttattattgtactactttaaattgccacgcctgctatatctaaattaattggcgtttggataaattaatagatgtcatccgtgtgactataataaaagtgtttatgtttttaccaa

SEQ ID NO: 22003 - DNA, 385 bp, Glycine max
  Clone ID: LIB3050-028-Q1-E1-F2
ggaggtgaaggggaaaaaaaaagagtagagtggataatggcttcgttatcgcgttgcatagccatgagagcacccactcgctcagcttctcgcagtctcactaccccaaaagcaccttcattcgctttgaaccttacccgcacttgctccagcgctcgctctccgctcctccattgctccttcgtctcttctccttcccatgtcgccttcccttcctccgtttcaggcttgtcacttggattggagttgacatctaatgttgggaccagaagaggaaaatgttctggcctagttgtgagggcacgcaaggctgctctttgtctgactaagagaagcagatcaagaaaatcaattgcgcgcactcatggtttccgccaagaatgag

SEQ ID NO: 22004 - DNA, 300 bp, Glycine max
  Clone ID: LIB3050-028-Q1-E1-F4
cggggtgaggcgagggtaaggccgcgttgtgttgcgtcgtgtcgtacgctgttcccctgtttctcgtttttgtgttcagaccggagcctagctcggcatggcgggcatgtcgacgaggcaaggtgggaaagctgagcctttgaagaaacgcaggtctgataagaaggagtacgacgagattgatgtggcggacattcagaagaaaaaggaagatgagaacgcgctaaacgagttgaaagccatggggcaacagaagggaagcgttggaggttctgggctcaagaaaagtggagagaaata

SEQ ID NO: 22005 - DNA, 344 bp, Glycine max
  Clone ID: LIB3050-028-Q1-E1-F8
ggaagctgaaacctaactagctgagcagacggaggagaactcgactgaggctgcgtctgcgacgccgtttcgattcggcctcagacatttcggtggcaatgatcgtgcgggatgatggcaggaggaagagaccgaacattcgtgtgactggcacaccgggggataggagggacagctgtgtggactgctctagctgaagctacccagctctgccacatcaatgtcggagaattagtcgtagaagataacattcgttgtggatgggatgatgagcttgattgttaccgtcctaaggaaggattggttggtgatgaacttgaagatgttatggaacacgggggaaa

SEQ ID NO: 22006 - DNA, 403 bp, Glycine max
  Clone ID: LIB3050-028-Q1-E1-F9
gacaccgagtcgcagaaaaagaaaaaagcgatcatagtttcacttcggccttatccagtttagggtttcggttctctaccctatctttcacgtatcgaaaccttaaatttacgatcaggtctgagcaatctggttggtagaacctttggtcttagtgagtcaagttttatgtctgaattagacgatcaaattcctactgccttcgatccttttgctgatgcaaatgctgatgactcgggtgctgggtcaaaggagtatgtgcatattcgtgtacagcagcgaaatggtaggaaaagcctgacaaccgttcagggattgaaaaaagaattcagctataacaagatacttaaagacgtcaagaaagaattctgttgcaaatgaacagttgttcaggacccagaac

SEQ ID NO: 22007 - DNA, 369 bp, Glycine max
  Clone ID: LIB3050-028-Q1-E1-G1
caaaggaaagaggtctttaagatgaaaacaaaaaatgcaaatgtaggttccctttttcgaacacaaaatatttttacttccagtttttgactgaaagaatacaaaaatgatatgattcaacctcaaactcatttgaatgtagctgataatagcggagcacgcgaactgatgtgtattcgaatcctaggaagcagtaatccacgatatgcctaaattggggacaatggtgttgctgtaatcaaacaagcagtaccaaatacgaacttagaaagatcagaagtgatcagagctgtaattgtacgtacttgtaaagaactcaaacgtagcaacggtataataattcagtatgatgattatgctgcagttgtc

SEQ ID NO: 22008 - DNA, 335 bp, Glycine max
  Clone ID: LIB3050-028-Q1-E1-G10
gtaaaaacgatgttttgatccacataaagaattgggtcagttccttgtcggggcagcttggagttgtaggacttggaaaatcaaggtataatttttggcttaactaacatagattagagctgcaaatgtgtagttgtctttacgtttaataataacttgtaaagagagtttgaaattccaattatatattgaattctgcttttgccttttaccttcctactcggggataaaatattttcacacttttttggcagcagggtgtgtagggttctacacacaggcagtgcctgtaggtcttttgtcaaagtccaatcattgatttgtgactgaatgag

SEQ ID NO: 22009 - DNA, 189 bp, Glycine max
  Clone ID: LIB3050-028-Q1-E1-G11
ggttctagtgtgtgattgtttgttgttgtaactcgttcttcttcctttgttgttctgtgtctgtgtctgttttttctctcacctgaaaatgtcttgctgcggtggtaactgtggttgcggaagctcctgcaagtgcggcaacggctgccgacgctgcaagatgtacccaaacttgagccacactgagtc

SEQ ID NO: 22010 - DNA, 405 bp, Glycine max
  Clone ID: LIB3050-028-Q1-E1-G12
ggtgtgtgagttcattaacatatacaaattctctgtgttgtgttgtgtacttgtgttaattgtgttgttgttgtaggaaatttaagtgaagagagaatgatgatgaagtctgctatgtgtgcattggtgcttgtggcactggttgtggttgaagtggggcccatggctgaggctgcggtgacttgcaacccaacacagttgactccttgtcttccggcaattaattcaggttctgcaccttcgagtgcttgttgccagaagctgaaggagcaaaagccatgcttctgtggctacctcaaaaaccctagcttgaagcagtatgttaactctcctaatgccaaaaaaaccgttagttcttgtggtattgcctatccaacttgttaagcacctcttatatatatatat

SEQ ID NO: 22011 - DNA, 344 bp, Glycine max
  Clone ID: LIB3050-028-Q1-E1-G2
ggcagccaaagagaagaaaatcctcaattttctgagcagccaaacactctctctctgtctctcgaaaattctcagtttgcagagaaaatccgaatcatgtcgtggcaagcgtatgtcgacgatcaccttctgtgtgacatcgaaggtaaccacctcactcacgctgctatcatcggccaagacggcagcgtttgggctcagagtaccgacttccctcagttcaaacctgaggagataactgccatcatgaatgactttaatgagcctggatcacttgctccaactggattgtatctcggtggcaccaaatatatgggtcatccagggtgaacccggtgctgtca

SEQ ID NO: 22012 - DNA, 306 bp, Glycine max
  Clone ID: LIB3050-028-Q1-E1-G3
aacggaagtgacagagaggatgccttttatctaaagtccctccaagccccagtgaagcgagccaaatctaacacttaaaagtttctgagatcctttggtcaaagttcaacattttaaggagcgggggagacaaagatgtgtgttaatccagttttttgcttaaatgaaatagtatatatatatatatacacacacatatgtatattacacgagataataggtatgcttcgtgttaccttttccactcatgtaatgttcattagttacagtctaaatctgttagagaagtcacagtagctttaataa

SEQ ID NO: 22013 - DNA, 401 bp, Glycine max
  unsure (1)..(401): unsure at all n locations
  Clone ID: LIB3050-028-Q1-E1-G4
gagggagaattacgtttttagggtttacaccgagcagccacacctcccgcagcagccatggttctcaaaactgaactatgccgattcagtggtgccaagatctacccaggaaagggcatcaggtttgttcgtggtgattctcaggttttcctgtttgcaaactcaaaatgtaagaggtatttccacaatcgcctgaagccttcaaagctcacctggactgcaatgtacagaaagcaacacaaaaaggacattgctcaagaagctgtgaggaagaggagacgtgctgccaaaaagccttactctaggtccattgttggtgccaccttggaagtaatccagacnaagagagctgagaagccagaagttcgagatgcagctagggaaactgctcctcgtgaaaa

SEQ ID NO: 22014 - DNA, 347 bp, Glycine max
  Clone ID: LIB3050-028-Q1-E1-G7
gggttaaaggatgcagagaagtgcattgaacttgatccaagctttgtaaagggttatacccggaaaggtgcagtccagtatgtcatgaaggaatacgacaaggctttggagacatatagggaggggttgaaatatgactctaacaaccaggagttgcttgaaggcatcagaacatgcatacaacaaattaacaaggctagccgtggagacttaagtcctgacgaattgaaggagcgacaggcgaaggcaatgcaggatccagaaattcagaacatccttcaagaccctgttatgagacaggtattgattgatttccaggaaaatcgcaacgctgcacaggaacacac

SEQ ID NO: 22015 - DNA, 349 bp, Glycine max
  Clone ID: LIB3050-026-Q1-K1-F7
gagagaaagagagagaaagatgtcgaagcgtggtcgtggtggttcggcggggaacaagttccgcatgtcgctgggtcttccagtggcggcgacggtgaactgcgccgacaacacgggggcgaagaacctctacatcatttcggtgaaagggatcaaaggccgtttgaaccgtcttccctcggcctgcgttggcgacatggtgatggccaccgtgaagaagggaaaacccgatctgaggaagaaggtcttgccagctgtcatcgttcgccagcgcaagccatggcgccgaaaggacggcgtctacatgtacttcgaagataatgctggtgttatcgtcaatcccaaggga

SEQ ID NO: 22016 - DNA, 400 bp, Glycine max
  Clone ID: LIB3050-024-Q1-K1-G6
gacacagagcagtttacaccaaggctttcaggtaatggtgtttccctcactcttggtcttgactcattaccaggaactcatcaaacatttctcccaaaccaaaacattcaactgggaagaagcttggacattggtgaaccaaacgagtttggtgccataagcacttcctctcctcactcaacagctgcttatgagagtatcagcatgcaaaacccaaagaggtttgctgcacaattgttgccagactttgtgacctaaataagacattgaaaggtgagcaatgtggtagcacactgctactactcgctgtttccaagtccctcacaatttcttcttaggcctctgctattatgtcggggagtggcgaacaattgtagtgtaaagaaagaaggaattttac

SEQ ID NO: 22017 - DNA, 363 bp, Glycine max
  unsure (1)..(363): unsure at all n locations
  Clone ID: LIB3050-024-Q1-K1-G7
ggagaaatcagagctggagggtgagtttatcaaggaggctgctaaagagaagatggtgcagctcaagggacatagatcagtgggaggtatgagggcttctatttacaatgccatgcccttggctggggttgagaagttggtggctttcatgaaggattttcaggcaaggcatgcctaaaggagtaacctcaatctgaaacaaatacttgcatngcataaacctaatgcctaaaggattttatgctaataaaggtgttggctggtattcaaaaagggtcacaatctcttgtcaagtttttgctttccttaattaaggattcttgctggccttttttgggttaccttcttgttccatgtttgata

SEQ ID NO: 22018 - DNA, 404 bp, Glycine max
  Clone ID: LIB3050-024-Q1-K1-G8
gatgatgggccattcttgcttggccaattcagtttggtggatattgcttatattccatttgttgaaagattccaaattgtctttgctgaggtgttcaaacatgacatcacagaaggaaggcctaaacttgcaacatggtttgaggagttgaataagctaaatgcttataccgagactagagtcgatcctcaggagatcgttgatcttttcaagaaacgcttcctgcctcaacagtgaacgttgtattgctgcaggcttcctctaaaatgtagactctgcccatatagcgtcctttcattcacgggatgggatgcatctgcagtcaaatgtcggttgtgtctatctgccagagttgcaggatagtttgaagtcataatcacgttcatttttcagcttggttggtt

SEQ ID NO: 22019 - DNA, 406 bp, Glycine max
  unsure (1)..(406): unsure at all n locations
  Clone ID: LIB3050-024-Q1-K1-G9
ttgtgagacgagggtaaggtcgcgttgtgttgcgtcgtgtcgtgcgctgttcctctgtctgtcgtttttgttttcagaccaaaccctagctccgcatcgcaaccatgtcgaccaagcaaggtggaaaagctaagcctctgaagaaacccaagtctgataagaaggattacgacgaggttgacatggctaacattcagaagaaaaaggaagaggagaaggcgctaaaggagttgaaagccaaggcgcaacagaagggaagctttggaggttctgggctcaagaaaagtggaaagaaataagggctctttatcatgattgtatacatncaatattgagccctgtagtttattaccatgataacttctgtcttattgtggccttctttattgctctaatgttagtactg

SEQ ID NO: 22020 - DNA, 328 bp, Glycine max
  Clone ID: LIB3050-024-Q1-K1-H1
tatggcattgtaactctgaacgatgaaatgaaatggagttcccagacacgcgtttgtctctgagatcgagcttgacgttcggagagacgctgtgctcggtgttcattccgctcataggaatagtcgaagctttggttttcacattcgccagttgcttcgatttccaatctcccaagaagaataagaaacattcttctaccttcgatgacattctcaccctcgccgaggattctccatttttaagttgctgatttgtgtgtggcagttagtgttaatgaaatcgaggcgttgcatgagttgttcaagaagttgagtaggtctatcattg

SEQ ID NO: 22021 - DNA, 341 bp, Glycine max
  Clone ID: LIB3050-024-Q1-K1-H10
gagagacatatatattatgtcatattggcatactagattccaatgcttacttgcttcacattctatactatctaccctttgttggtccgcgaacttctttgttcctccaacatataatacctcatctatcatatttcaatatgatctcttcgctacactctgaatcacacacaatgggtctctgggattccttcctcaattggctacgcagctcgttttttaaacacgagatggaactttgacttgtcggccttcagaatgctggcaagacttctctagtcaatgcaattgctactgtaggctacagtgaggacatgatatcaactgcaggctcaacatga

SEQ ID NO: 22022 - DNA, 406 bp, Glycine max
  Clone ID: LIB3050-024-Q1-K1-H11
cgacagaagggggcttcttcgtttgctacctaaaccctagtctccatacatcaacttgggaggttaaagagacggcaacgttgtgctgtccgccttgaccgagccagagcttcgtcttggccctcgattttgccctgtaaaactaatcccagtcacaacagaaataatcaatggcaccgaaacagaccaaggctgagaagaagatcgcttacgatgcgaagctgtgcgacctaatggaggagtacggccaaatcctcgttgtaaactccgacaacgtgggatcgaaccagctccagaacattcgcaagggtctccgcggcgactctgttgtcctcatgggggaagaacaccatgatgaagcgctctgtcaggatgcacgctgagaaaaccggaaacaatgcctatc

SEQ ID NO: 22023 - DNA, 326 bp, Glycine max
  Clone ID: LIB3050-024-Q1-K1-H12
gacagacagacaaacaatttaccagctatacttgttccttttgaaggttggaagtgctacaatacaaacaatggcagctactcaagaagatgtgaagcttttgggtattgggggaagcccatttgtgtgcagggtccaaattggccttaagttgaaaggagttgaatacaaatttttggaagaaaatttgggcaacaagagtgatttgcttctcaaatacaaccctgttcacaagaaaggttcagtgtttggtcacaatgagaagcccatagcagagtctcttgtgaatgttgaatacattgatgagacatggaagaacaacccca

SEQ ID NO: 22024 - DNA, 400 bp, Glycine max
  Clone ID: LIB3050-024-Q1-K1-H2
gaggcttataagcttgcaccatgtgcctcagcagcacaagatgagaatgctagtgtttctcagagttgctgtgctcaggtgaagaaaattgggcagaacccaagctgcctctgtgcagttctgctctccaacacagccaaaatggctggtgtcaaccctcaagttgctgtcaccatccccaagcgttgcaacctggctaatcgccctgttggttacaagtgtggaccttacactctgccttgaaagagttgaggttgttgctgaaaacaaagatgacggggcgtaagtgcactatggctgttggctactacaaactgtgactacatgtttgttgtatcgtcttgtaactttctagtgaataagagctagctgctcactagtgtaccctataataaacatg

SEQ ID NO: 22025 - DNA, 325 bp, Glycine max
  Clone ID: LIB3050-024-Q1-K1-H3
cttttgcagattatggaccggggtcactgcgtgacgcctgtcgcagaaaagaacctttgtggattgtgttcgaagtttccggcaccattcaactctcctcgtacttgaacgtgtcgtctcacaagaccatcgatggtcgtggccagaggatcaaactcagcggaaaaggcttgcggctgaaggaatgcgagcacgtgataatttgcaatctggagttcgaaggaggcatgaggcatgatgttgatgccattcagatcaaacctaattccaagcacatatggatcgatcgttgcacgctcaatgattttgatgatgggctcataga

SEQ ID NO: 22026 - DNA, 309 bp, Glycine max
  Clone ID: LIB3050-024-Q1-K1-H4
caggggacacataaaaatcatcacttcaaattaagctagagctagaaagattcagaggtagctatagagagagaaacagaggtcatggatggtttgcaaagatctgaggtgtctttcaggagacagggttcatcagggcttgtttgggacgacaagttattgtcaggggaattgaacaaagtgaacaacaacgaagaccaaaagggtggtggttctggtggtgaccttaaccttaaagttagaactacaccacccaacaccaccatccagagaagccgctccaacggcggctaccgcaccggaaaagtc

SEQ ID NO: 22027 - DNA, 364 bp, Glycine max
  Clone ID: LIB3050-024-Q1-K1-H5
ggaagagaaggccgagatgaagaagatgtacggcctgatcgagacctacaagttgaacgggcaattcagatggatttcatctcagatgaaccgtgtgaggaacggagagctgtaccgtgtgatctgcgacaccaagggagctttcgtgcagccggctatatacgaggcttttggtttgacagtggttgaggccatgacttgtgggttgccaacattcgccacatgcaatggtggtcctgctgagatcattgtgcatggcaagtctggcttccacattgacccttaccatggtgaccgtgctgctgatctccttgttgacttctttgagaagtgcaagcttgacccaacccactgggaaacaatc

SEQ ID NO: 22028 - DNA, 358 bp, Glycine max
  Clone ID: LIB3050-024-Q1-K1-H6
gggtgttgtgttaatctcattcacacattcacagttatactctctctctctttgtcgcttggatcactgatctcatctcaattttcagatatgtcgacatctgataagccagaagtggtggaaaggggtagcaaggatgaaaaacacaaggaagatgatcaagaggaggggaagggtggattcattgagaaggtgaaggatttcattcatgacattggtgagaagattgaggaagctattgggtttgggaagccaactgctgacgttactgcgattcacattccatcgattaatcttcacaaggcagatcttgttgttgatgtgctcatcaagaacccgaatccggtgccaatccctc

SEQ ID NO: 22029 - DNA, 310 bp, Glycine max
  Clone ID: LIB3050-024-Q1-K1-H7
ggaaaagctaaaagttacgatgaaccatgaccgggtatcaagctgactgatcctgatatcttgatcacagtgcaggattatgacgatgagggttatgatgacagtgattacatggatactgatgaatacatatgtttcacactaagagctcatgcgatgcaattggacgcagagacacttcagagacttgctgctgcccgagctaatgatgctataccatagattgaaaagcctactcatgccatgttaggaaggccagatatgcgtgtcttcgacgatggatcattagaaacatccaatgatgaattgc

SEQ ID NO: 22030 - DNA, 365 bp, Glycine max
  Clone ID: LIB3050-024-Q1-K1-H8
gagagacatatatattatgtcgtattgccatcctagattccaatccttccttccttcacattctattctatttaccctttgttggtccgcgaagtttcttgtttcctccaacatataatacctcatctttctctttcaatttctctcttcgcttttttttgattcacacacaatgggtctctgggattccttcctcaattggctccgcagcttgttttttaaacaggagatggaactttcacttgttggccttcagaatgctggcaagacttctcttgtcaatgcaattgctactgggggctacagtgaggacatgattccaactgttggtttcaacatgagaaaagtgactaagggaaatgtca

SEQ ID NO: 22031 - DNA, 383 bp, Glycine max
  unsure (1)..(383): unsure at all n locations
  Clone ID: LIB3050-024-Q1-K1-H9
gatctaaaagaagaaagaaccagcttaagaaagtttgtcaagtgccagttgagaatctctcctcagacatatgggcatggaggaaatatggccagaaacccataaaggggtctccatatccaagggggtactatagatgtagcagctcaaaggggtgtttggcaaggaaacaggttgaaagaaacagatcagacccaacaatgtttatagtgacttacactgctgagcacaaccaccctgctcctactcacagaaactctcttgctggctccacacgtcagaagccattggtacctcaaacagccaccaccactgaagaagactctgacaagagcaagagcctcacaaaacccacttnccctgccacctcaggggcagaagaa

SEQ ID NO: 22032 - DNA, 252 bp, Glycine max
  Clone ID: LIB3050-025-Q1-K1-A10
gtcttaccgtgtgaacaatatctgaagctagggatgaaattggttcttttcgctcacaggagatggtacttatgacaaattcaagtggactgaatgcatacagtgcaggagtagggcgtctacgacactgaggccctaatgtttctgaaatacccgactcccaattaaccgtccactcacctctatgctctctgcatgttaataactgatagtgtgtttcttctgctgattacctatatgctatatgatgat

SEQ ID NO: 22033 - DNA, 381 bp, Glycine max
  Clone ID: LIB3050-025-Q1-K1-A11
agatggttggtttaggattcaaagagcttactctgaatccaactactataagttggtgttttgtacatctaatgatgatagttcgtgtggggatattgtggctcccatcgatcgtgaaggaaacaggcctttgattgtgactcatgatcagaatcatccattgttggttcagtttcagaaagttgaagcttatggatcatcaactgcatgagttggccttgaaaaatcatgcacgtgctttccggaattattccgatactttggttacttgtaagaccgaataaataatgctttggttgtaataaattattattattattatcattattattccaacgctaaataaattaaataaggatatataatgctttatttctatgt

SEQ ID NO: 22034 - DNA, 384 bp, Glycine max
  Clone ID: LIB3050-025-Q1-K1-A12
ttatgagtggttgaggattcaaagagcttacgctgagtccaactactataagtaggtgttgtgtacatctaatgatgatagttcgtgtggggatattgtggctcccatcgatcgtgaaggaaacaggcctttgatagtgactcatgatcagaatcatccattggtggttcagtttcagaaagttgacgcttatggatcatcaactgcatgagtcggccttgaaaaatcatgcacgtgctttccggaattattccgatactgtggttacttgtaagaccgaataaataatgctttgggcgtaataaattattattattattatcattattattccaacgctaaatagcatcaaatcggatatataatgctatatttttatgtaaa

SEQ ID NO: 22035 - DNA, 255 bp, Glycine max
  unsure (1)..(255): unsure at all n locations
  Clone ID: LIB3050-025-Q1-K1-A2
gaagctctgcgagttaacccgccaaatcttgatttaagcatcgcctcccctatcacaactatactctatttggccaaaactccaaatgggaaaagaaaaagagcagcctaagaatgaaacctagaagaagcccgaggaggccgncacagcccccaagattgacgacgggcccatccctgtcgattacaaactcgacttgcattgcgaaggatgcgtcangattatcaaacgcacatgtcgtcacttacaaggtgt

SEQ ID NO: 22036 - DNA, 362 bp, Glycine max
  Clone ID: LIB3050-025-Q1-K1-A3
ccactgaaaggggaaccgtgaaccaaaaggttactctagaaaggtacagggatttcataaagccagacatgaatactgctaacggcaatcttgcaaagcaggctatggtgataattgctgtacgtaataacttctagatggatactttcaagccgatgaacgagttccttgagctaatgtaccttaggaatcactgatcaagtatgagtgacaagccaacaagataactgctgaatactattagaccttggtcatgtattatacatcacagattttgcgttgttgtaacgtgctacatagatcactcattatgtaaatgggactgtgctaagcattgataaaaaccattctacaaaagctag

SEQ ID NO: 22037 - DNA, 418 bp, Glycine max
  Clone ID: LIB3050-025-Q1-K1-A4
acgactgaatgggagggagcaacaagcagtgtaccgggtatactgggaccttgagaaggttagaagtgctaccatacaaacaatggcagctactgaggaagacgtgaagcttttggacatagtgggaagcccattcgtgtgcagggtccagattgcccttacgttgaagggagttgaatacaaattctcggaagaaaatttgggcaacaagagtgatttgcttctcaaatacaaccctgctcacaagaaggttccagtgtttgtgcacaatgagcagcccatagcagagtctcttgtgattgatgaatacattgatgagacatggaagaacaaccccatcttaccttctgatccttaccaaagagccttggctcgtttctggtccaaattcattgatgataagattgtgggtgctgta

SEQ ID NO: 22038 - DNA, 347 bp, Glycine max
  Clone ID: LIB3050-025-Q1-K1-A5
tgagtgtgtgagagagcgagcgtgcaagcagtttccaagagaggattcgtgattatcaactcgagggattgatcctggtttcttgctcttatatgtctatttatcccttattcataatcttactatacagcatcgtgattctcacactcacacatacacacatattaaactcatatagatcctacgatggctttaaagcacatacttgaggagctcatggactagcagaacgtcccatcaacttcttgcaacgctattaccgtaattctagacatgttccattggcaagcaactattataggtactgctgatagtccttatgctggaagtctattccgtagtactat

SEQ ID NO: 22039 - DNA, 420 bp, Glycine max
  Clone ID: LIB3050-025-Q1-K1-A6
gaaccaacttctttctttgttccgttctactttcccttcccaacaacaacaagaagatgccttctgcagaagcttcctccgaaaccatttgtgtcaccggcgctggtggcttcatcgcctcttggatggtcaaactcctcttggaaaaaggctacactgtccgaggaaccctcagaaatccagatgatcccaagaacgggcacttgaaggagtttgaaggagcctccgagaggttaactctgcataaggctgacctccttcatcttgactccgttagatcagttattaacggttgccatggtgtctttcacactgcttctcccgtcaccgataaccccgaagaaatggtggagccagcggtgagtggagctaagaatgtgatcatagctgctgcagaggctaaagttagacgtgtggtgt

SEQ ID NO: 22040 - DNA, 363 bp, Glycine max
  Clone ID: LIB3050-025-Q1-K1-A7
gaacgaagaagaagaagaattgaattcgaaaaatcgtagcgtagcgttggttgcgattgaaacggtacgatgggaagaggaaaattcaagagtaagcccaccggtcgccgccagttctccaccccggaagatatgcttgctggaacctctaaccgtcctcgaacttttagacagaaagaagctgagcatgaagaggagcctgaggaagtatctggggatgaatctggagaagaatcagaagaggaaacttctaagaaaaaaggaacacaaggagttattgagattgaaaatcctaacttggtaaagccaaagagcttgaaagctagagatgttgatgttggaaaaacaacagaactttcaagg

SEQ ID NO: 22041 - DNA, 266 bp, Glycine max
  Clone ID: LIB3050-025-Q1-K1-A8
gcttcaaagaaacacaaaaacggtgcgtttcgatcaggttggttttctccttcctcgctcgcacttcttcgttcagcatcagcatgatctgattgtgtttcgtctcaccccaccgttccgttttcagggaaatgggtctgtggactttacttgaggggtttcttcttcttgcaaatgcgctagcgatattaaatgaggaccgctttcttgcacctagaggatggggcttccaagatttctcgggtggaaggactaagtcgttcaaa

SEQ ID NO: 22042 - DNA, 321 bp, Glycine max
  Clone ID: LIB3050-025-Q1-K1-A9
ggatgttttgaagacgtatttgcagagtaaggctcattacgttagcattgcaagttttgctcctcctgagtttgctcattatttacttacttttaggcactactgctgtattgtcttttctatgagctaggtttgagtgttgtaataatttgcttgctgcattatgtatgccgtctagtgttccatattggggcatccttaatatttgttgtaaattttctttgctgagcatttgatataatagctcaagtaggaaaatgaattgggtactatgaggaatgcatatcattggcttgctattactggattccagaccacccc

SEQ ID NO: 22043 - DNA, 166 bp, Glycine max
  Clone ID: LIB3050-025-Q1-K1-B1
acgtgagaactgctggtgttggttactgaatggactccaagttgcaaaaggatggcattcgaaacatggtaacggagctttctatgcgattgaaacatttccaatggcatagaaagcttcatgagtaggcggacctaccgccgtctgctctgcagcaccaacgata

SEQ ID NO: 22044 - DNA, 363 bp, Glycine max
  Clone ID: LIB3050-025-Q1-K1-B10
gctggtgaatgtgggaaatctaccaccccagataatgaggcttataagcttgcaccatgtgcctcagcagcacaagatgagaatgctagtgtttctcagagttgctgtgctcaggtgaagaaaattgggcagaacccaagctgcctctgtgcagttctgctctccaacacagccaaaatggctggtgccaaccctcaagttgctgtcaccatccccaagcgttgcaacctggctaatcgccctgttggttacaagtgtggaccttacactctgccttgaaagagttgaggttgttgctgaaaacaaagatgacagggcgtaagtgcactatggctgttggctactacaaactgtgactacatg

SEQ ID NO: 22045 - DNA, 324 bp, Glycine max
  Clone ID: LIB3050-025-Q1-K1-B11
ggggggggctcaagccttaaaggtgtaaggttataaaataaaaaaatcttagccacagactctaagggggagatagataccataatgatgatgagctgcatttcgatttcgagttcaatgacatgaggcgctattaacatgggttcctattaatctttgtgtttctgcacacccaagttgttcaattcagcaagggtagctgtgaatggtccgcaaataaacaaaagtttgagttgcaactccatgttcggtcttggggttcccgaactggtcgttattgccgacattgccgccctgggtattgggcccaagaaattgcctgaa

SEQ ID NO: 22046 - DNA, 362 bp, Glycine max
  Clone ID: LIB3050-025-Q1-K1-B12
gacatacttaaaataatacgggttaaccatgaagtttatgtatcttgcattgctacatctatgtgtgatctgtagacaattcttgctcggaggagcatatgctttccccagacaagtgattgacacataatgcacgaaagttcgagctgtcgtagattactatatcagaccggtcctaacatccacatgtgatggccgtggaccgtgtgtgattggaagtggctatgtactgatagcaagttcatcctaccacacttgcccacttagtgttgcgttgctggagggcctccatggactatcgagcacattaaaactagttaaccctaacaaaggtgtcattaggctgtctactgacttgaaca

SEQ ID NO: 22047 - DNA, 406 bp, Glycine max
  unsure (1)..(406): unsure at all n locations
  Clone ID: LIB3050-025-Q1-K1-B2
ggcatcacaaactatatactaatctccatctaatagtgttaatttgtctttctctatctctatcggtcatgggtgcttttgcttttgatgaggaaaactcctccaccgtggctccggcaacactctacaaagctctgacaaaagatgctgacactatcatcccaaagattattggggccatccaaactattgaaatcgttgaaggaaatggaggacccggaaccgtcaagaagataacagctagtgaaggtgaccaaaccagtttcgtgctgcaaaaagtggatgcaatcgacgaggctaacttggtatacgactacagcatagtgggagggacggngttgcatgaaagtttggagaaggttacattccaaacaaaggtggttcctggcactgatggtaatggctc

SEQ ID NO: 22048 - DNA, 377 bp, Glycine max
  Clone ID: LIB3050-025-Q1-K1-B3
gtagagagtcagtggaatttctgtttcctacctttgtattctaagaccaagcgcaggtattactgcaccatgtgcaccagaaaactcgtccttcagtaatactgcatgatgctgatgctcatcttactttttttcccgggttttatttactacttaatttccatgtatattttttcgggatttgatttactacttttccatgtatatgtagggttttcataggatcattaggatcagcaccattaagatcaacttagaagtggatttttggttgtttacataaggtctagccttgtataccaaaaaggcaaaaacaaaatagtggaattcgtattacaatgttgaagaattcgtattatcattggtggataacatgc

SEQ ID NO: 22049 - DNA, 348 bp, Glycine max
  Clone ID: LIB3050-025-Q1-K1-B4
gtattgtgttacaattgttgctggtgctgcgttgttgcgttattgaacaaacattttgggttgaaattgagacatactttagtgacatgcttcgtgctagaacgttcttgttgggacacatgtggtgatcatttaggatttgatcgttgttgattttaatttttacttcgatttgcatatgaattatttgttaatagcatgattttgtaatcgtgaggatttcgttggaatttaactttcagatgcaatttaaatgtggctcgattatgtgaattaagtttttgggatcatttttgttctacgtgtttgtgcaagttcttagttgtcatctcagaattttaaatattg

SEQ ID NO: 22050 - DNA, 280 bp, Glycine max
  Clone ID: LIB3050-025-Q1-K1-B5
ggagagagaatggagaaaaaggaggaaaaggtggtggtgggcgtgccagtgccagtgtattacggtggagaaaatgaataccaaaggggaatcatccctcctaacgccgtgtttggagatccaaagggcatccccatccagcaaaccatttacagggacactcctgctcctttcaactggccttactgggcttataccggtcttaataacgtcagatcaaaacccaatcttgcagcatttgttggatgcttgattccaatgattcttggagtttgctttc

SEQ ID NO: 22051 - DNA, 368 bp, Glycine max
  Clone ID: LIB3050-025-Q1-K1-B6
gattgaaattaacttgtgaaagaagatgggaagcgaagaagtgaagctgctgagcttttgagtgagtccatttggtaaaaggattgagtgggctttgaaactgaagggtgtagagtatgagtatatacaagaagatatcttcaacaagagtagtctccgtctggagttgaacccggttcacaagagggttgcggttcttggtcatgcagaaaaatccatcatagctgaatcattcatcatcgttgaatacatatatgaaaaatggaagcaatattcattgatacctcatcatccttatcaaagagcacttgctagcttttgggctgctactgctgaagaaatgttcaagaaggtagcatggattgctt

SEQ ID NO: 22052 - DNA, 280 bp, Glycine max
  Clone ID: LIB3050-025-Q1-K1-B7
ttatggggtattgagattaacttatgaaagaagatgcgaggcgaacaaatgaagctgctgagctttcgagcgagaccatttggtaaaaggattgagtggtctataaaactatatgcattgcagtatgagtatatagaagacgatatctgctacaagactactctcattctggagtagaacccgattcacatgagctttccagctcttgttcatgcataataatccattatagctgaatcattcataatccgtgaatacataatatgaccatggaatgcaa

SEQ ID NO: 22053 - DNA, 364 bp, Glycine max
  Clone ID: LIB3050-025-Q1-K1-B8
ggcagttcaattccaatatattccattctctctgtgtatttccctacctctcccttcaagatgcagatcttcgtcaagaccctcaccggcaagaccatcacccttgaggtggaaagctctgacaccatcgacaacgtcaaggccaagatccaggacaaggaaggaatccccccggaccagcaccgtctcattttcgccggaaggcaactggaggacggccgaacccttgctgactacaacattcagaaggagagtactcttcacctcgtcctccgtctccgtggtggcatgcagatcttcgttaagacactcaccggcaagaccataaccctagaggttgaaagctccgacaccatcgataacg

SEQ ID NO: 22054 - DNA, 377 bp, Glycine max
  Clone ID: LIB3050-025-Q1-K1-B9
gtaggaagtgaaaaattgagtgatgaagcaattgaagaaactcttgaaaaggttgtcaagttgcttgcctatattagtgacaaagatttgtttgctgaattttataggaagaagcttgctcgaaggctcctttttgacaagagtgccaatgatgatcatgagagaagtattttgacaaaactgaagcaacaatgtggtggtcaatttacctcaaagatggaaggaatggttacagatttgacattggcaaaggagaaccaaacaagctttgaggagtatttaaccaataatcctaatgcataccctggaatagacttgaccgttacagttttgactactggcttctggcctagttacaaatcttttgatctcaatct

SEQ ID NO: 22055 - DNA, 371 bp, Glycine max
  Clone ID: LIB3050-025-Q1-K1-C1
ggagagagagagagagagagagagagagagatagatggtgtctctgaaacttcagaagcggcttgccgctagcgttctcaagtgtggtagaggcaaagtttggcttgaccctaatgaggtcaatgaaatctccatggctaattctcgacaaaacataaggaaattggttaaggatggtttcattatcaggaagccaactaagattcattcccgttcccgtgctcgcagaatgaaggaggccaagaggaagggacgtcactctggttatggtaagcgtaagggtacaagagaggctaggctccccaccaaaatcctttggatgaggaggatgcgtgtcctcagacgattgctccgcaagtacagggaaacca

SEQ ID NO: 22056 - DNA, 389 bp, Glycine max
  Clone ID: LIB3050-025-Q1-K1-C10
tctctcaagccgctccgcttcccggctcacgcccagaaggcgcccatcctccccaccaaggatctccccaaggatttcgattggcgagacaaaggagccgtcactaacgtcaaggaccaaggggcgtgtggttcgtgttggtctttcagtacgacgggagcgttggaaggagctcattatctggccactggtgagctcgtgagccttagcgagcaacagcttgtggattgcgatcacgtgtgtgatccagaagaatatggagcgtgtgactcaggctgtaatggtgggttgatgaacaacgcatttgagtacatacttcagtctgggggagtacagaaagaaaaggactatccatacaccgtgagagatggcacctgcaaatttgacaa

SEQ ID NO: 22057 - DNA, 394 bp, Glycine max
  Clone ID: LIB3050-025-Q1-K1-C11
ggtgagcgcgaatatcgttttttagctgttgtccctgaaacactagatgggaagccctttatcaatccagcagttctctgtgcttcttacactgatgaggaattctttaaatttagatgcagtgagggcagggaaaaatattttgaacaatacggagaatataagatccataagatttggcgggatgatgttttcccatgccgtgtttatcttcgtcactgtgtcctggctgcaaaaagccttggcgatgaagtccacaataactttttggatcatactttccttgctgaccgtaaaacgaccatacgtcagtactttgaaaaagtgggtacaagcatcttggaagaagagccacctgagtctttgaaaacccgttatggtggttgattgatgt

SEQ ID NO: 22058 - DNA, 297 bp, Glycine max
  Clone ID: LIB3050-025-Q1-K1-C2
ccaagaggtttacttatgggggagagagagagagagagtgagagagagtgatagatggtgtctatgaaactttagaagctgcttgccgttagcgttatcatgtgtggtagaggcatattccggcttgaccctagttatgacaatgaagtctccatggctgacactagacataacataccgaaatcggttaaggatggtttcattatcatgtagccatctaacatccattgtagatcctgtgctttgataattacggatgccataatgaaagtacgtcactctgcttatggtaagcct

SEQ ID NO: 22059 - DNA, 401 bp, Glycine max
  Clone ID: LIB3050-025-Q1-K1-C3
gtacagaaattaacaaccatatctattcttacaagttacatccattgagaaacatgaaggtctcccccttagcattttcaatcctttttttgtccttcaccatagaactcttcattggcattgcttcagcagcacaagaaccagtgcttgacacctcaggccagaagctgagaacaggtgtcaagtactacattctaccagtcttcagaggcagaggtggaggcctaacagtttcaagcagtggcaacaacacatgccccctctttgtggtgcaagagaagcttgaagtctcaaagggcaccccagttaccttcacaccctacaatgccgaaagtggtgtcattctaacctcaaccgatctcaacatcaagtcctatgtgaaaagcaccacttgtgataaa

SEQ ID NO: 22060 - DNA, 359 bp, Glycine max
  Clone ID: LIB3050-025-Q1-K1-C4
gaatctctgaaaccacagttcacaaccgagacagtttccatctgtctcacaaaatgacaacaatatcaaattgctcccttctcttcctcttcctctttctatccaccctccacatagctttcaccatctcaacccccaccaactgcatcaagtcctcctgcagcaccacccagtacccagccctctgcatccagaccctctacgtctacgcctccaccatccagcaggacccccacgagctcgtacagacagccctctccctctccctcaaccacaccgaggccactaaaaccttcgtcgcagaatgcatccaatttagaggcctcaaaccgagagaatacgctgccttgaaggactgc

SEQ ID NO: 22061 - DNA, 359 bp, Glycine max
  Clone ID: LIB3050-025-Q1-K1-C5
ggactcaagttggtcaaactgaggggagaggccatgcaggatgccgctgatgctgctagaagtgctatggttagtgtgataggactggactcagagaaggtccaacaattgtgtgatgcagccaatcaggaagttcctgaagctgagaaggttcagattgccaattacctgtgcccaggaaactatgctgtctctgggggattaaaaggagttgaagtgctagaatccaaggcaaagtctttcaaggctcgaatgacggtgcgcctagctgttgctggtgctttccacactagttttatggaaccagctgtgtcaagattggaagcagcattggcaacaacagaaatcagaaccccaag

SEQ ID NO: 22062 - DNA, 420 bp, Glycine max
  Clone ID: LIB3050-025-Q1-K1-C6
gatccaatcgaaaaaaattgataacatcacacagcattagtatgtatcagcaacacgggtcagatccaacaaagcgatcaccggcaaccggttttccggtgagctatagcaattcaacaacgtattcgaccaacgaggcttcctacgctccagtcccacctccacagaccaaacctcttgtcgattggtccaccggcctctgtgactgcttctccgaatgtggaaactgttgcatgacgtgttgatgtccatgtgttacctttggccgagttgcagaaattgttgacaagggatccacatcatgtggtgctagtggggctctgtatacgctgatctgctgcgtcattggctgtggctgcctatactcttgcttctaccgacccaagatgagacgacagtatggtctaaagggaaatggtt

SEQ ID NO: 22063 - DNA, 342 bp, Glycine max
  Clone ID: LIB3050-025-Q1-K1-C7
gtaggggagaaagggagaggcgcgaaaatgagcggagcgaatgtgaagaagaagggagcgagcttcgtgatcgattgcacgaagtcgacggaggataagattatggacattgcttctctggagaagttccttcatgagaggattaaggtcggcggcaaggccggtgcactcggcgatttcattaccatcaccagggacaagagcaagatcaccgtcacctacgacagcaacttgtctaaacggtatctgaaatatttgaccaagaagtacttgaaaaagcacaatgtgagggattggcttctcgtgattgcatccaacatggagcggaatgtttatcagttg

SEQ ID NO: 22064 - DNA, 354 bp, Glycine max
  Clone ID: LIB3050-025-Q1-K1-C8
taggggtcaggaacaaaggcagatgcgcgaaaattagcgaatctaatattgagaaacatccagcatgcttcgagatcgagtgcgcgaactccttttaggatgagattatggacattgcttctctggagaagtaccttcaagagaggtttaagggctgcggcctggcctgtacagtcgactattccattaccatcaccagtgacaatagcacgataacagacacttttaacagcaatttctctaagatagagctgaaatattctagctctacgaactcgataaagcgcagagcaagggatcggcatcacagtgttgaatccaacacggagctcagtgtgtatcaatggagatgct

SEQ ID NO: 22065 - DNA, 386 bp, Glycine max
  Clone ID: LIB3050-025-Q1-K1-C9
gtgtgtggtgaacctggtcattttgctcgtgaatgccgcatgcgtggtggttcaggaagacgccgtagccgtagtccgcccagattccgtaggagcccaagttatgggcgaaggagttacagtcctcgtgggcggtcccctaggcaccgcagttcgtcacctcgtggacgtagctacagcaagtctccttcttatcgtgggcgtgaggaggttccttatgctaatggaaatggccttagggaacgacgcataagcagaagttgattttgagagtttggtattgcgtatctgtgatcgctaagagaatagtgagattttgttaatttagtggtgctttgactgaagtatgagtctgttttgatgggcaaggccctgagtttttactc

SEQ ID NO: 22066 - DNA, 381 bp, Glycine max
  Clone ID: LIB3050-025-Q1-K1-D1
tttgggttgtgatgagaagtggaatccctaaggtccgggcagctgcattagctctcagggatttacgatacaaagcagatggcattagattggactctggtgaccttgcatatttatcctgtgaggtcaagaacttctttcgctctatcgagaaggaatttggagtgcctgaatttgggaagttgcaaatcactgctagtaatgatcttaatgaggaaacattagatgctttaaacaaataaggccatgaggttgatgcctttggaattggtacatatctgggtacatgttacgctcaagcttgattatgtgttgatttcaagctggctgaaataaataattcaaccctctattaaaactttttgaaaaaatgttaaaggt

SEQ ID NO: 22067 - DNA, 397 bp, Glycine max
  Clone ID: LIB3050-025-Q1-K1-D10
gactccagatagaaaaatggaagctctgctctcccaattcaccttcctctcagaccaggccctacaagacaagaacttcgatccttcgacaatcgaagatctaatgaagctgttcgagatcgagtcctacaaggcatgggcagcagctgagcttgagcaagagaaagaggtggaagaagcagaggctggcatggaagaagccgaggagtaccttgactcagtgatggagagtgccatggatgagtttagacgctttgaagaggagctagagaggatgtcaaagaatgaaatggaaggcttggttcaaactgctgagagagccagaaaaatgggaaatttgatggaaaaaggtgcctctattgcttccaagaagtatattgaggctgctcttaattca

SEQ ID NO: 22068 - DNA, 381 bp, Glycine max
  Clone ID: LIB3050-025-Q1-K1-D11
gaaggcaccagtaattaataacaagctagctattagttcgattctgtagtaagtgaggtgccaatatggtgaagatagctcttggtactttggatgactcttttagcgctgactctcttaaggattatttcgcagagttccacgcaactctgattttcgtgttcgctggtgttggatcagccatcgcttacaacgagcttacaaaagatgcatccttggacccaacggggctggtggcagtagctgtggcacatgcatttgcactgtttgtaggtgtctgcgtcgccggcaacatctcaggtggccatttgaacccagctgtcacttttggattggccattggaggcaacatcactctcatcactggtttcttatactgga

SEQ ID NO: 22069 - DNA, 226 bp, Glycine max
  Clone ID: LIB3050-025-Q1-K1-D12
tgatagctaagattggtaaaaagatgcccattatcacaccggctggctattttgaggagctgggagaaaatgctattgccggcgcacaggctattgactctgtaaatgatgcgctcgaaaacgggtcgccattgacgaatggcttaaaaagaatgcacgtataccatgtacccgcaggctattatgaacaactgcctggccaggtattaaaaacaattagagcaca

SEQ ID NO: 22070 - DNA, 405 bp, Glycine max
  Clone ID: LIB3050-025-Q1-K1-D2
ggctcaagagtgatctgaaagcccagttttgagagggtaatatttgagaattgagggaaccttgttagaacttagaagggacattttctgggcaaaggtggttaataatgttgataaggattgaggatacagattttgccacacttcaatatgcggttcagaagccttctgacaacggtgtgtgaagcaagaattatcaaccaaggttcctgcaagctatgtgacattttagattccaatgcacataaaatttatgtatataaagatggacactgaaatcaaatcaggcatttcatttagtcctttgtactgtatactagtagtatgttgctggccatcatttgttgaaaacttaaaatgttagaaatagttaaagggtgacaaattgtaataatgtatttatct

SEQ ID NO: 22071 - DNA, 92 bp, Glycine max
  Clone ID: LIB3050-025-Q1-K1-D3
cagagagggttcactactagtactacgacccaagggttcagatgctagtatacgacagttgggggcaccttcttaaagactacagagggctt

SEQ ID NO: 22072 - DNA, 55 bp, Glycine max
  Clone ID: LIB3050-025-Q1-K1-D4
atagcataggcaaaagggatgaccatagctcatgacgcacttagatgggtgtacc

SEQ ID NO: 22073 - DNA, 368 bp, Glycine max
  Clone ID: LIB3050-025-Q1-K1-D5
gatgtgatgagaagtggaatccctaatttccgtgcagttgcattagctctcagtgatttaggatacaaagcagttggcattagattggactctggtgaccttgcatatttatcctgtgaggtcaggaacttctttcgctctatcgagaaggaatttggagtgcctgaatttgggaagttgcaaatcactgctagtaatgatcttaatgaggaaacattagatgctttaaacaaatagggtcatgaggttgatgcctttggaattggtacatatctggttacatgttacgctcaagctgctttaggtgttgttttcaagctggttgaaataaataatcaacctcgtatcaaactttctgaagatgtgtc

SEQ ID NO: 22074 - DNA, 413 bp, Glycine max
  Clone ID: LIB3050-025-Q1-K1-D6
ggcattgtgaaattaatagagagacataaaaaataaacatatattgagaatggagggttgtgtgaagaagttgctatgccttgttgggtttgtggtgcttgtgagtactattggtggggtggagagtgctggtgaatgtgggaaatctacaacccctgataatgaggcttataagcttgcaccatgtgcctcagcagcacaagatgagaatgctagtgtttctcagagttgctgtgctcaggtgaagaaaattgggcagaaccctagttgcctctgtgcagttcttctctctaacacagccaaaatggctggcgtcaaccctcaagttgctgtcaccatccccaagcgttgtaacctggctaatcgccctgttggttacaagtgtggaccttacactctgccttgaaagagtt

SEQ ID NO: 22075 - DNA, 353 bp, Glycine max
  Clone ID: LIB3050-025-Q1-K1-D8
gaggtgtgaaagggacttatacagaaaatgttgacatctcaagaagaagaccaacgtgatgcttgtagatatggtatggatgcaactgtataccgtctacttgaatttatcgactgaacaaccacgtttaagactgccatgtgctgctgtgggtgatggatatatagctcagacatatggtttcaaaacacacaggcccacagaagcaccaagcagtggctcttcgcgtaggcgctgaccaatccgccataaacctctgtcgcattgatgccttccaagacactctctacgctcactctaacaggcagttctaccgagactctcttattactggcactgttgactctatattt

SEQ ID NO: 22076 - DNA, 380 bp, Glycine max
  Clone ID: LIB3050-025-Q1-K1-D9
gctattataatttgtttcacttcatcaggaagggctgcaagattgatcgcaaagtataggccaacaatgccagtactatctgttgtgatcccccgactcaagacaaatcagctaaagtggagctttagtggagcttttgaggcaagacaatcacttatcgtgagaggtctctttcctatgcttgcagatccacgacatcctgctgagtcaacaagtgcaacaaatgagtctattcttaaggttgcccttgatcatggaaaatcattgggagttattaagtcacatggccgggtagttgtttgccagaaacttggtgatgcatctgtggttaagattattgagcttgaagattaaactattaaagagcactcaaccaacta

SEQ ID NO: 22077 - DNA, 311 bp, Glycine max
  Clone ID: LIB3050-025-Q1-K1-E1
aggcgtgagaacacgtgagagaggaccaccgacggctgtaatcgcgtgagaaagttcattgaagctactaagccttttaccgtattggaaccatgtctagaagaaaggttatagatgccatggaagagaacgttactctgggcccatgtggtagagatggctaacatgtgtgcggcgtcggttacatgtgcgtctactatgaatcgatacatttattcatgtctgtgatctgtacgagagggaaacacttgatcggatcacaagctgaatgagcgctaaggctggcagatatgaatcgtgtccctattctg

SEQ ID NO: 22078 - DNA, 363 bp, Glycine max
  Clone ID: LIB3050-025-Q1-K1-E10
ggactcggtttgtttgatatgatggtgaaaaagtatggactcaaggccagactacaacattatacttgtctggttgacctactgggcaggtctggttgtttggaggaggcagaggcaatgatacggtccatgcctgtaaaagcagatgcaattatatggaaaactttattatctgcatgtaaaatccacaagaatgctgaaattgcaagaagggttgctgatgaagttcttaggattgatcctcaagactcagcttcatatgttctacttgccaacatctattcttcagctaacagatggcaaaatgtttctgaggtgaggagagccatgaaagacaagatggtgaagaaagaaccaggcata

SEQ ID NO: 22079 - DNA, 388 bp, Glycine max
  Clone ID: LIB3050-025-Q1-K1-E11
ggttttggaatattggagcgtcaccctctcacatggcggcagcaaccacaatttgctacggtccctcctcttatattcttcttggctcaaatttacttagacagggacacttgaaaaacacttcatttgctcatcgtttttctccttcaagatcattcctttgtaacggatttgttcccaggaaacctgttttgggaagaaactcgttctgggtatcaaaaaccatggatgaatccgcgagaacttctgctttcagagatggaaaaggcgatgaaaccatccaagtgtttgaacaagaagctttcatcgatgggtcaaccccgtttcagtccaagtttctgtccccggaggtggaatacaacctcaatcgaatgagcaagtggatagt

SEQ ID NO: 22080 - DNA, 352 bp, Glycine max
  Clone ID: LIB3050-025-Q1-K1-E12
aacaaacaatttaccagctatacttgttccttttgaaggttagaagtgctacaatacaaacaatggcagctactcaggaagatgtgaagcttttgggtattgtgggaagcccatttgtgtgcagggtccagattgcccttaagttgaagggagttgaatacaaatttttggaagaaaatttgggcaacatgagtgatttgcttctcaaatacaaccctgttcacaagaaggttccagtgattgttcacaatgagcagcccatagcagagtctcttgtgattgttgaatacattgatgagacatggaagaacaaccccatcttaccttctgatccttaccaaagagccttggc

SEQ ID NO: 22081 - DNA, 76 bp, Glycine max
  Clone ID: LIB3050-025-Q1-K1-E2
cacggggaatagtggatgcggcagactagaacatcggatggcgatggtctacatggcattcagtggctgcactgcc

SEQ ID NO: 22082 - DNA, 363 bp, Glycine max
  Clone ID: LIB3050-025-Q1-K1-E5
gaagcatagcagcatcatacaaagcattgaattcaaaaacttaagttcattccttgtgttttgctttcttcctcaaaaccaaacatgtcgaacacatgcggcaactgcgactgcgctgacaagactagctgcaccaagggaaacagctatggtgttattgtagagactgagaagagttacatcgagactgttgtcatggatgttccagcagctgagcatgatgggaagtgcaagtgtggcactaactgcacttgcacggactgcacctgtggccattaaggaatatgtatgaaaatgtaattgccatgtgtttggcaatacaaatatccaaataatgtaatcttcgtatgaataaatgtgtgt

SEQ ID NO: 22083 - DNA, 306 bp, Glycine max
  Clone ID: LIB3050-025-Q1-K1-E6
agggaagagtgcattcagtgcgtaatgtagataattagacaaatttctaatgtgagaatctttctgagaatgagatgttgctaaatatttcggatgttgacgataaggatgaggtaataatagtttgagacaggacagaacattggaacaggcagagcatggatggagctatcaacactatattgtcaagaaactgagagtgagaggagaaatatgttgtcgatatgctcatgcactgcctctaacctggctctgtctgcattgctgcttccatgcatctattctttgatgcattgagtatgatct

SEQ ID NO: 22084 - DNA, 418 bp, Glycine max
  Clone ID: LIB3050-025-Q1-K1-E7
gctgctgaagaattgggtgtccccgaggtgctgttttggaccactagtgcatgtggatttatgtgttacgtgcaataccaacaactcattgaaaaggacctaacacctctcaaagactctagttatatcacaaatggttatttggagactaccatcgattggataccaggcattaaggaaattcgattgaagggtattcccagtttcgttaggaccacaaatccagatgagttcatgcttgatttcatacagtgggagtgtgggagggctcgaagagcttctgcaataattttgaacacgtttgatgccttagagcacgatgttttggaagcgttctcgtccattttgcctccagtttattccataggtccctttgaatttacacgtgaagcatgttgatgacaaagagttgaatgct

SEQ ID NO: 22085 - DNA, 320 bp, Glycine max
  Clone ID: LIB3050-025-Q1-K1-E8
ggctccacagattgtgatgagtttcgatctcctgagatttatagtttgtctgctgtggctacttcaaacttagagatttacaagatagagtctggtacaacaacaacaacaacaacattgacccatgtgtgaaggtcctagtttgtttatgctgatgatgagaacattgtagtgggtggtatatttctcttatacttttttgtggtgatttttatgtaccacatgacatgacaaccctcgttgctgattatataacccctagttgaaagatttacaataaacgaaaacccttaacaaaactgacagctcgaaaatgtgca

SEQ ID NO: 22086 - DNA, 392 bp, Glycine max
  Clone ID: LIB3050-025-Q1-K1-E9
gtaggcaccagtaattaataacaagctagctattagttcgattttgtagtaagtgaggtgccaatatggtgaagatagctcttggtactttggatgactcttttagcgctgcctctcttaaggcttatttcgcagagttccacgcaactctgattttcgtgttcgctggtgttggatcagccatcgcttacaacgagcttacaaaagatgcagccttggatccaacggggctggtggcagtagctgtggcacatgcatttgcactgtttgtaggtgtctccgtcgccgccaacatctcaggtggccatttgaacccagctgtcacttttggattggccattggaggcaacatcactctcatcactggtttcttatactggattgcccaattg

SEQ ID NO: 22087 - DNA, 377 bp, Glycine max
  Clone ID: LIB3050-025-Q1-K1-F1
gaagtttaatgagtctgatattcccaaaggtggtgacagggcttatggggcttatattccccctgtacctagatcatttgaattggtagaagatgtgaatctcttgatcagaagggctgagagatgtctggaagcaggtgcagacatgataatgattgatgctgatgatgtcagcaaacatgctgataacatgcgtgcagacatcattgccaaaatcatagggcgccttggtattgagaagactatgtttgaagcatcaaatcagagaatatcggagtggttcatcaaacaatatggtccaaaggtgaacctctttattgatcattcgaacgtggtggatgtggagtgcctcagggggcgcaacttgggtagaaatc

SEQ ID NO: 22088 - DNA, 359 bp, Glycine max
  Clone ID: LIB3050-025-Q1-K1-F10
gtacccaacttggtgtggtgtatgctattcatcatcatcatctaagatgctgagaaaactcatgaggctgctactgctgctgatgttctttctgtgtttctcatatgttctctctgtctctgctattcctgcaacaagaacccaaaatttgaaaggcgaagaagaagaattttcagccctgccttctttaactaggttggatcatgtggttggaaatggtgaggtggtgctcgttgacatgaatgaaggattcatggagaggagggtcgatttggaaacccaagactatgaagggactggtgcaaataaagatcatgatccaaaatccccaggaggggcttaattaaccttaatcccaa

SEQ ID NO: 22089 - DNA, 343 bp, Glycine max
  Clone ID: LIB3050-025-Q1-K1-F11
agtgttgtggaaatgtggttggtcctatgatggcttatgggcctgtgattgatattgcttcatcttgtactaatgtagcttatgacaggcttcccttggtatgaagaggaatctatgcagatgcatcaagggcaatcatctgctggcagtggtggtagcggctgtagcatcattgattactttctatcggacacaatttctgggctttcattcttcaattggtaccttaacatgcctaagcctcctgttaatggttgttctgtggactctggtggaaggacctcttactgatccagcttcttgtatgcctcagaggtctacaattgaatacatcttatatata

SEQ ID NO: 22090 - DNA, 413 bp, Glycine max
  Clone ID: LIB3050-025-Q1-K1-F2
cggctctgagttagcacagcgaattggcattaatgaagttgccgagagcattatggctttcaacaccaattacaaggacacaggtctttttggtgtttatgccgttgccaagcctgattgcttggatgatttgtcctatgcaataatgtatgagacaaccaagttggcttatcgtgtttcagaagatgatgttacacgtgctcgtaatcagtcgaaatcttcactgctactacacatagatggaacaagcccagtggctgaagatattggtcgtcagctactcacatatggtcgaagaatcccatttgctgaattgtttgctagaattgatgctgttgatgccagtacaattaaacgtgttgcgaaccgatttatctatgacaaggatgttgttattgctgccacgggtccta

SEQ ID NO: 22091 - DNA, 369 bp, Glycine max
  Clone ID: LIB3050-025-Q1-K1-F3
ggagagaaaaaatggccaaatcaatcaaattctttgagttgaacacaggggccaagattccttctcttgggttagggacttggcaagctgaacctggtgttgtagctgaagctctcaccacagccattcaggttggatacaggcatattgactgtgctagtgcgtataagaatcaagcagagattggttctgctcttaagaagctttttgatgatggtgtggtgaagcgtgaggacttatggatcacttccaaactctggtgttcagatcatgcaccagaagatgtgccaaaagcattggataaaacattacaggaattgcaacttgactatcttgacctctatctgatccactggccagtccgcatga

SEQ ID NO: 22092 - DNA, 335 bp, Glycine max
  Clone ID: LIB3050-025-Q1-K1-F4
caacggggagagttagcatggccaaatcaatcaaatgctttgagttgtacacaggggcctcgattgcttctcttgggttaaggactgggcaagctgaacctggtgtagcatctgaagctctgaccacagccatgctggttggatacaggcatattgactgtgctagtgcgtataagaatcaagcagagattggttctgctcttaagaagcttttcgatgatggtgtggagaagcgttaggacttatggatcacttccaaactctggtgtacagatcatgcaccatactatgtgccagaagcataggataaaacattacatgaattgcaacttgac

SEQ ID NO: 22093 - DNA, 419 bp, Glycine max
  unsure (1)..(419): unsure at all n locations
  Clone ID: LIB3050-025-Q1-K1-F5
gagaagcaaggagaaagagaagggttagaaggcgaagaagcatggcttcactcaagaagaagaaaccctattacccgcttccgttaattcctatctattactacttcttattcaaagggtgatatgatcttcttcttccaagagtctcatgcatgctactttcttctctcttctcggggaattgaagcgttgtggtccgattgtttgctagatcgagcaaattaacctgtatactggtttatatatcttcaccttgcacctttctctctctctctctatctctctctctctatatatatatgggtttaatctcttactttctttatcttttcactttttttcagttttggtttgatttaattacgtgattaanatttacacatatggatttgaatatatagtacgtggttttcgagctt

SEQ ID NO: 22094 - DNA, 424 bp, Glycine max
  Clone ID: LIB3050-025-Q1-K1-F6
gctggccttccggtacagtacagaggtaatcacttatgaattctataatttcttgctttggctgatgaaagtgaagtcttgaacttgaatgaagaaggatggtggattctgaccttccaccgagtccaaatgatttcctatttcccccaatcgaccacgaaaatctccaaattgcgtcacaaacccctccctcacctccttcaccccaacccttcgattctcgtcttcgcggctggattagtatctccttccacatattgcgttccaagctttcatctttgatgcagagagggccaatttggtcaattgggctgccttctgcagcgcttctaatgtcatgctggatcttcatctccatcaggaagaagataaccctcacgcccaatgaagcgcgtctcgttaacatcatcaaggacaaagatcg

SEQ ID NO: 22095 - DNA, 417 bp, Glycine max
  Clone ID: LIB3050-025-Q1-K1-F7
gaacacaacctggggtgttaaatagaaaagaggagtttgagaatggcaacgatcagcgcggttcaggtggagttcctggagtttccagcggtggttacttcaccagcctccggcaagacctatttcctcggcggcgcaggttcaatttcatttaatttctgcatgcctacctccaattaagtttctatgataagaaattaaacaaaagaatgaattgaattatgtatgtatatgcttgtaggggagagaggattgacgattgaggggaagttcataaagttcacaggcataggagtatacttggaggataaggcggtgccatcactcgccgctaagtggaagggtaaaacttcagaggagttagttcacaccctccacttctacagggatatcatttcagggccgtttgaaaagcta

SEQ ID NO: 22096 - DNA, 395 bp, Glycine max
  unsure (1)..(395): unsure at all n locations
  Clone ID: LIB3050-025-Q1-K1-F8
gataccaaaaacaaaacaagccaagtgaaagagagaagaaaagtcaaagacaatgtcagggatcattcacaagattgaggagacccttcatgtgggaggccacaagaaggaggaggagcacaagggtgagcagcaccatggtggagaatacaaaggggagcatcatggtgaacacagtactgaatacaaaggagagcatcatgttggtgagcacaagccggagcaccatggaggagaagagcacaaagaggggttcctagacaagatcaaggacaagatccacggcgaggagggtggcgccaccgccgagggcgagaagaagaagaagaagaaggagaagaagaagcatgaacatggncatgacagcagcagcagcagtgacagtgattagatta

SEQ ID NO: 22097 - DNA, 390 bp, Glycine max
  Clone ID: LIB3050-025-Q1-K1-F9
tatgtagtacaagatgcaggggagttctttgactcctctagggatggaaatgcagttacaagttttaaacttggtgaagattctaaggatattgcaacatctggggtcttggatcgcacaagcactaatggttggtcttattgttcaaatgagcaatttgaaaataatatttctgatagtgaacctgccctaaattctgttatcaatgatgagaaagagaagcaagttatggcaggcaattcacccagatcacataccgatgaaaagcatatggcagtctccgaagcttcaaagtcattgttggaccttactggggattatgacagtcacattgggaacttacaatatggtcatatgtgtaatggttatcctgtctctctcgttgtgcct

SEQ ID NO: 22098 - DNA, 395 bp, Glycine max
  Clone ID: LIB3050-025-Q1-K1-G1
ggcgggtggacaacgaaatttctcagccaaagaacaaggatcagaatcgtttaatcaagttgaggaagatggcactagtctccggaggaagatcaacactgaaccctaacgcccctctttacattcccgccgcgttccgccaagtggaggatgtttctccagaatggtggcggctggtgacgacactgacatggtaccatgactactggctaagccagcagcacgatgatggagccttctatggcgaggatgggtttggtggcaatgatgtggttgatttgcttcctgattcgtttgattttgatgctggtgaagatctttttgaagagtttattcgatcttctgaatcccaagaagaaactggacccaaaggaactgcatgagcttttagagat

SEQ ID NO: 22099 - DNA, 408 bp, Glycine max
  Clone ID: LIB3050-025-Q1-K1-G10
agacgacagaaggggtttatgcatcaacaaagaaagcggaaagagagcttaaatggaaggcaaaatatggcattgatgagatgtgccgtgatcaatggaattgggctagcaaaaacccttatggctatggagatcagggctccaccgattaaccacttagttttctctttgggttcttttctgaactcacccacaccgtagtccgtaggtcttgtgaatttagttttcccaaaagcttttctttctttagtgatcttaaggtgacaaagtacttgtattattactattcatagttacatagtaaataagtagtggtttactatactgtaatttaaaggttctctaagttccttcttacaggttattgattattagattcggattctctcatgtggaagattctctcat

SEQ ID NO: 22100 - DNA, 381 bp, Glycine max
  Clone ID: LIB3050-025-Q1-K1-G11
gactaattaacacacatcaaaacaaccttctttctttcaggtttttgatcagtgtcaaaaccaaaagggtggttgcaaattgcaatggctaagcatgatgttgagggtggttccttcgctgcaaaggactaccatgatcctcctccagcaccattgattgatgctgaggaactcacacagtggtccttctacagggctttgattgctgagttcattgccacaatgctcttcctttacatcacagtgctcactgtgattggttacaagagccagagcgatgtaaaggctgggggtgatgtgtgtggtggagttggcattcttggcattgcttgggcctttggtggcatgatcttcattctggtgtactgcactgctggaatc

SEQ ID NO: 22101 - DNA, 402 bp, Glycine max
  unsure (1)..(402): unsure at all n locations
  Clone ID: LIB3050-025-Q1-K1-G2
ggagggtgtgaattctaaaaggaaagaacagctgagctggtcagaaaatcaatggcatcatccttgggttttgagttcctgacgaagaagccttacagtcctccatcctgggcatcccatctccaccctttaccttcccacttcttctctcttgcccatcttcccactccaattcacagatggaaccttcccaatctgcccaccaataccgagctgtggatcaagcgagacgacctttccggaatgcagctgagtggtaacaaagtgaggaaattggagttcctgatggccgatgccattgcgcaaggcgccgactctatcatcacaatcggaggcattcggagcaaccactgtcgcgccaccgncgttgccgccaagtatttaaaccttgactgttttctc

SEQ ID NO: 22102 - DNA, 399 bp, Glycine max
  Clone ID: LIB3050-025-Q1-K1-G3
ggagaacaaaacaagtgtttcgaatagattatcctaagtctttgggaatagtgctgcaatggcttcaagtcaggaggaggtgacccttttgggagctactggaagcccatttgtgtgcagggttcatattgccctcaagttgaagggagttcaatacaaatatgtcgaagaaaatttgaggaacaagagtgaactgcttctcaaatccaacccagttcacaagaagattccagtgtttattcacaatgagaagtccatagcagagtctcttgtgattgttgaatacattgatgagacatggaagaacagtcccatcttgccttctgatccttaccaaagagccttggctcgtttctggtccaaattcattgatgacaaggtttttggtgcttcatggaa

SEQ ID NO: 22103 - DNA, 393 bp, Glycine max
  unsure (1)..(393): unsure at all n locations
  Clone ID: LIB3050-025-Q1-K1-G4
ggaaactgaacgctgcagcagaagatgttcaaaaaaattttctggcgaagatgtgtctgcacagaaccaagtgaaggcatctgttcaacgaaaaatacgacaaagtattgctgaagagtatccgggccttgaacctgttttggatgatatacttcccaagaagtcccctcttatagttgctaaatgtcagaaccatctcaatctggttcttgtgaacaacgtgcctttgtttttcagtgtccgtgatggaccatacatgcccaccttgcgacttctccatcaatatccaaatataatgaaaaagttacaagttgaccgtggtgcaattagatttgtcttgccgggtgcgaacataatgtgtnccggtcttacatctnctgggggtgttttgga

SEQ ID NO: 22104 - DNA, 383 bp, Glycine max
  Clone ID: LIB3050-025-Q1-K1-G5
ggatgaccaggtcctcgagagagcgctccaagaatgtggcaatgacctagatgctgccatcaagagcctccacggcctctgtttgggatctgctgatgataattctcaaattgctccacaacctgacctccctaatgtcgtccacacaggcacgttggaagagaatgacgatgcttctgcttctggggatcagcccgcttccggcaattttcccgccgatggagcagaatggattgacttgtttgttagagagatgacgtgtgctactagtgttgatgatgccaggtcccgtgctgctagattgctcgaggttctagagaaatcaatcactgcacacgcaagttccggggcaacaacggctcttcaaagggaaaatttgatgc

SEQ ID NO: 22105 - DNA, 392 bp, Glycine max
  Clone ID: LIB3050-025-Q1-K1-G6
cttactcagactagtttgaaagatcttcgccgctctcacctgaatgctctcttagcaagcattgctgaaactgagaagcaaactgaaatggctacaagggtttcagcgtggaaatcaaaaattgacgacaacttgtaagaacaggacttgcatccaccatttgatatccaagactatggtgagaggattcttgacaagttctccctgctttcccttgaagcaagcagtagtggtgtcctatccttttctgatttagcgaagggtcaaaacaagtatgatgtggctcagaagttcatcttcatttcttcaactggtaaacaatgcagatgtacctctagagagaaatggagttgatgggtctgtctgattactcatgcgttaatcccttacat

SEQ ID NO: 22106 - DNA, 405 bp, Glycine max
  Clone ID: LIB3050-025-Q1-K1-G7
gaacgaacaaatagaaaaacaaaatgttgcagcttctgtacgcggtgatatttgcggaaatgttcgtgatcgtgagcttcctcttcaaaactccggcgaggaagctggtgatcgtcacattggatcggctcaagcgcggtcgcggccccgttgtcgtcaagaccgtcgccgccacgctgctggtggtgctcgcttcctccctctacagcatcgcaaaaatccggcatcggaacctcgatgctcccgtcgctaaccccaccgaccaagtcctcgtgtacaagcacatgctcgaagcttctcttatggggtttgtgctgttcttgtctctgatgatagatagattgcaccattacataagagagcttcggttactgaggaaggccatggaggctgctaagaaacaga

SEQ ID NO: 22107 - DNA, 370 bp, Glycine max
  Clone ID: LIB3050-025-Q1-K1-G8
gagtcttctccttatggaattaatgacacatctattctactataatgcctttgctaatagtgatttgtggaagcacttatctcctatggacgtgttcatcattggatatggcgtgttaaacttcatgtggctaaaatttttactgatctggcgctttttccgcttctggtcactgataaacggaattgagactccagagaatatgccaaaatgtattaataattgtcacaacttggaaggcttttggaaaaactggcatgcttccttcaacaagtggcttgtgaggtatatatacattcctcttgggggatctaagaaaaagctactaaatgtgtgggttgttttcacatttgttgcaatctggcatgat

SEQ ID NO: 22108 - DNA, 393 bp, Glycine max
  Clone ID: LIB3050-025-Q1-K1-G9
gaaaacagattcaattaaactaaacatatcccaagtgttcttacttattatataagtcttgaattcagttcatattttgctgatcactctactttatacatctgtataagcctttagtcatgtttgaaccaagggacatgtggaccaagctgaaggaaaagggtgagacaattttctctaatgctggctggattcaccgtgaacctagccagggaattcaaggaaaggagaagagttcacctgggttggctgtggttgctggccaacaacacgcgcaagttcacacacctaggatgatgtattccgaggcttcagtttccatgcttgtcgaatgcttcagtgcttgaaagaacaaaaaaggataagtgcctactcttgtacttgttattttaa

SEQ ID NO: 22109 - DNA, 328 bp, Glycine max
  Clone ID: LIB3050-025-Q1-K1-H1
aggcgtgcgaacacgacgacgacagactgcgactgtgccaagaattcataacaaggtagctacaaaatcgaatggataggaagcgatgtgcccatatgcataagacaggtcatggaacttgggatgactataagatcactgcatgcttgaaagatgattgccataaggtcaaagcacctgtcattgtagcgttcgctgccgacgtatcaaacatcgatgacgacgagcctacatcagatgcatccgtggacccgacgcagctgatgggcacaagctgctgcacatgcatgtgcactgtaggtaggcacatccttcgacggctcaacat

SEQ ID NO: 22110 - DNA, 382 bp, Glycine max
  Clone ID: LIB3050-025-Q1-K1-H10
tgaggggacaatagaaggctgtgaatatgaagatgtcatactctgccttgctagttttggtcctttcgcttaccttcttcaccccttcgacgcttgcttggatgtggccatggtattctcctttgcgacctccttcttgtcctgatggtggttgtaggataccacggctactccctacttataagcccgcaccattgtatagatctacttgcaaggggaaccactcctactataacccccaccattggataaatctactttcaaagggaaacctttagaacgatcaatgtccctatagtactctttgcagcagcatcagcagaatgtgtctacctcatcttcaggtagtgtgcttattagaataatttaactttctcaaatg

SEQ ID NO: 22111 - DNA, 379 bp, Glycine max
  Clone ID: LIB3050-025-Q1-K1-H11
gattcaaggccttcacagcattcgttgcggcattttaatcgatttatccaagcaggacagaatgaactaatggagtctaaaggtgggaaaaagaagtctagtagtagtagtagtaaatcattgttctacgaagctcccctcggatacagcattgaagacgttagaccaaacggtggaatcaagaaattcagatctgctgcttactccaactgcgctcgcaaaccttcctgatatccatccagattgatagttcattgcatgcaaccatagttttattaggttttttcttctttgttttcaattaggtttttgctgctctccttcaaactccgtctttccgaatcctctctttgtgattgtgttctgttctgcttcctac

SEQ ID NO: 22112 - DNA, 372 bp, Glycine max
  Clone ID: LIB3050-025-Q1-K1-H12
gtacgagcaaagggaaggaagttcgagagggctagaggaaggagggacagcagaggatttagagtttaagaagataacttggttctaatttttttacaagtattcacttctgaaattcaactttttgctataggcgttggtgacaggttttatgatatatttctgttacaagacatcgtgagtcgttttacattgacgtgtactaaaaaaactagcattaggttttgattccccctattgaaaggctagtcattttttcgtgatctgcttgtcctccgattgattggctactctttataatgttgcaccccctgccctatctctttccaaaattctatttatatgtatttagtaagctatagattaatcata

SEQ ID NO: 22113 - DNA, 355 bp, Glycine max
  Clone ID: LIB3050-025-Q1-K1-H3
gagagtggtggggtgtgcagaagagcgtcgcagttgtaaccctaatcagaagaagcgcaacttcaagcgagtgacagccaccagccatgggtcgtatgcacagacgcggtaagggtatatcctcttctgctttgccctacaaaaggacacctcctagctggctcaagatctcttcgcaagatgtcgaagaaaatatctgcaagtctgcgaagaaaggtttgaccccgtctcacattggtgtcattctcagagattgtcacggtactgctcatgtcaatagcgtcactggcagcaaaatccttcgcatcctcaaagctcacggacttgcgcctgaaattccagaggatctgtacca

SEQ ID NO: 22114 - DNA, 435 bp, Glycine max
  Clone ID: LIB3050-025-Q1-K1-H4
gaggtgcaggaaaattaatctccctttcattttctctgcatctgtactctccaaaatgccgtccttagaggaggagctcttcccttcaaccccaggcaagttcaagatcgagcgggcccaccacatgaaccgccagctctaccgctgcttcgcctccaccagcaccatgttcctgtgggccctctttttaatcgccctcaccgcttcatatctcagcttccaaggcttcgttgattccggcagccgctacctctccgcctcctggggcgggatccagtgggagaagcaggtccgcacctccgcccagatccaccgtcaaggcggcatgtccgtcctcgtcaccggcgctgccggcttcgtcggctcccacgtctccctctcgttaaaacgacgcggagacggcgtcgtcggactcgacaacttcaacgactacta

SEQ ID NO: 22115 - DNA, 388 bp, Glycine max
  Clone ID: LIB3050-025-Q1-K1-H5
ggggttacagatttgctgagcatgcagacaaggattagagcagttgaaaagttaatgatggaagaacttgaaagacatgtggaggaggaaggttagaccacaaatgtcaaagcagaagctgttacagaaatgactgagcattcaaatttggaagttggcacgtatccagaaattgacgacagaaaagtggtgatgaaaattaagaaagacaacagcaaacgtggcaataatgcatggagaacaaaatctcagaaaaggttgataatgatagacattcctcttgatgactacaaggatgatccagactccaacaagtattgcaagagagatcacactacgtgcaatgatcatatgcttgagctatgtgaaactgatcagcatgatgtta

SEQ ID NO: 22116 - DNA, 53 bp, Glycine max
  Clone ID: LIB3050-025-Q1-K1-H6
tacggatgcaaaacgactacagatgggtaggcctaggggaagacgacagaagg

SEQ ID NO: 22117 - DNA, 363 bp, Glycine max
  Clone ID: LIB3050-025-Q1-K1-H7
ggtgtgagagagagagagaaagagagagtgaaacagcgcaaagaagatacaaaattgagacgaggctgaacaaaaataagagtgtttagtttcccttctgatggtcgtgagtggttcctccccactaacttcgaagaggagaagggtcaccaacttttgttccaccgacatggacgctgaaactgctaaggccaagcttgctgctgtgaaagaaagatttggacgagagatccatgtttttgaaacatcagttctttcttcatcttcaaaggctgcgttatccaatgaaggagaggagacggatgacttctatgagtttactgctgaagattattacagacttttggctactaaaaaagaaga

SEQ ID NO: 22118 - DNA, 404 bp, Glycine max
  Clone ID: LIB3050-025-Q1-K1-H8
ggtcatattctccgatatattcagcatggcatccttaaagtgaacttcttttaagagtctttggttttccagatccagatggaggaaagcaggaacaacccttctcaagttgacagcttccaggtggatgaaatgcacaatcttagcattgttgaatggaaaaagaaaagaaaattacagagcgatcagctggatttgcttagacctaaacatagatgctgggttggaagtttctcctctgcacatgcttcagtgtttgatgagaatccagttttagagagcatgcataaccacacagttgaaagctcggaacctgaatctgccaaagacagcaatagtcttatggaagactgtgatactgccatttctgtaaatgaagaatcccaacctgaggcggattgcgg

SEQ ID NO: 22119 - DNA, 391 bp, Glycine max
  Clone ID: LIB3050-025-Q1-K1-H9
gaaggcaccagtaattaataacaagctagctattagttcgattttgtagtaagtgaggtgccaatatggtgaagatagctcttggtactttggatgactcttttagcgctgcctctcttaaggcttatttcgcagagttccacgcaactctgattttcgtgttcgctggtgttggatcagccatcgcttacaacgagcttacaaaagatgcagccttggatccaacggggctggtggcagtagctgtggcacatgcatttgcactgtttgtaggtgtctccgtcgccgccaacatctcaggtggccatttgaacccagctgtcacttttggattggccattggaggcaacatcactctcatcactggtttcttatactggattgcccaatt

SEQ ID NO: 22120 - DNA, 405 bp, Glycine max
  Clone ID: LIB3050-026-Q1-K1-A10
tagaggggatctatgacaacaaggatggaacggtttttgttgcatctggttctaatggccatattgagctctactggggtattgcaggtgatggttctgttataatttctgaaaatctggagcttataaaagcaagttgtgctaaatcatttgcaccatttccagctgggtgtatgtttcatagtgaacacggtctcatgaactttgagcatccaacacagaagatgaaagcaatgcctcggattgacagcgagggggttatgtgcggggccaacttcaatgttgactctcagtcaaagatccaggtgatgccacgtgttggaagtgaagctaattgagcaacttgcggctaacaagcttagctgattcttagtccagcatttttctttctaagtggttaaaagt

SEQ ID NO: 22121 - DNA, 296 bp, Glycine max
  Clone ID: LIB3050-026-Q1-K1-A12
aggcgtgcgaacagacttagggtactacagaagggcatggatggaacgggaagggaggtatccgatgatatctgccaataccatctctattgggcttgcatcagttattgaatggtaatgagtctatagaggtggtccagaaaataagtccgacactagcaattatggctaaactattggatggatggagaatcaatagttgcagcccattcatggactgtagacattgtaaagcaacatatgtcagaccttcaacgaaacgaagcaaatattttattggctcaaccaacataaaa

SEQ ID NO: 22122 - DNA, 203 bp, Glycine max
  Clone ID: LIB3050-026-Q1-K1-A2
tacagctagaattatgaattgcgttggcctgtatttaaaaaagctggtgttgaccacaaacttgaattcagagaaggtcctgctctaccagttcttgatgaaatgattaaagatgactagaaccatggaagctatgacttcatctctgttgatgcgtacaatgacaactacctcaactaccacaagaggttgatcgaacttgt

SEQ ID NO: 22123 - DNA, 202 bp, Glycine max
  Clone ID: LIB3050-026-Q1-K1-A3
tcaagtaacatagaaacaaacatgggaagcaacataacctaccaggaagaagaaagcacggttctattttcccattgccaaacacaaacagagttgttacccttcaacgagaacgacccgcaggacatggtcatataccaagtcctcaacgaagccaatgctctcaccaacacatttctccctcagaggcttcaccaacctc

SEQ ID NO: 22124 - DNA, 153 bp, Glycine max
  Clone ID: LIB3050-026-Q1-K1-A4
tcaagatgcgaagatacaaacatgggaagcgtcataacctaccactaagaagaaagcacggatctattttatcattggcaaacgctaacagagttagtacacttcatcgagaacgtatccgcaggacattgtcatataccaagtacttaacga

SEQ ID NO: 22125 - DNA, 380 bp, Glycine max
  Clone ID: LIB3050-026-Q1-K1-A5
tcgacagaaggtgatggaatataagatagagtggctgtgtagaactcgagactattcacggctgatatatatcttctgcatagtctacgtgtctatatcactgattcggtaccgcatgagggtgctctagattgcctattgatccagcttaagcatcttctggctgaaagcatcccaaagctagagatctgtgtgttgacattgggtgatcaagatcagcatatgcattgctatgagctgacccttctcattgcctgctgatccatgagtaaagatggtatgcatgctcatgttcactaggtgatagggagcatttagagcattgtggctaagatacttctatgagtcggcttatgctcccgaatatccttcgatgagca

SEQ ID NO: 22126 - DNA, 317 bp, Glycine max
  Clone ID: LIB3050-026-Q1-K1-A6
ggcagcgacaagatgtggaaccaaccattgggaaaaaccgatttggaaagcggttctcgcccgctgtatccgatgatgcttgagagccccgaactgcgctggtctttcatcagaaaagtatactccataatcgccatacagttgctcgtaaccatcgtcgtcggcgccgtcgtcgtcaccgtgcgcccaatcagcgtcttcttcgccaccaccggcgccggattggctctctacatcgtcctcatctttgtccccttcatcacattgtgtccactttactactactcccagaagcatactgtcaattacttgctcct

SEQ ID NO: 22127 - DNA, 380 bp, Glycine max
  Clone ID: LIB3050-026-Q1-K1-A7
taagctttggaggttctgggctcaagaaaagggtaaagaaataagggctctatatcatgattgtatacatccaatattgagccctgaagtttattaccatgataacttatgtcttattgtggccttctttattgctctaatgttagtactgaactgaggtatttcgtgatgtaagctgctactagttacttgctagtagctttattgtgtggaccttcatggggttctgataattacatgctattagtagcgctgtggatttggcatagacttgttcaagttataatgacttggcttgccaaattttatttggcaattctaatattatcctccctaatatgttggcaactgcctaacatttgactgtgattgatatgaaa

SEQ ID NO: 22128 - DNA, 378 bp, Glycine max
  Clone ID: LIB3050-026-Q1-K1-A8
gcctctttaatacatactattctctcttcgatttgagggaacagtacaagagtctgagcatcggttaacccaactgcacaggtagtctccaaataatggagcctcatgatgagactggatgccaggctcctgaacgccccattctttgcattaataattgtggcttctttggaagagcagctaccatgaacatgtgttccaagtgttacaaggacatgctgttgaagcaggagcaggacaaatttgcagcatcatccgttgaaaacattgtgaatggcagttccaatggcaatggaaagcaggctgtggctactggtgctgttgctgtacaagttgaagctgtggaggtcaagattgtctgtgctcagagttctgtgg

SEQ ID NO: 22129 - DNA, 323 bp, Glycine max
  Clone ID: LIB3050-026-Q1-K1-A9
ggagatctggtcatcgtggggatctgcatacgccggatctgctaaaatacgcttgatccatatgggcctgctggaccacttgtgggacgacaccgtctccgacccaaggccggaaaacggtctgggcaagctccgaaaacaccacacgttgactttccgacctagctcctgcaaggaaacggagggcgaaagcgtgagatcgcacggagacgaatcgtcagaggaagcgacgagagtgacgcgtagtatcatgatcgtgaaaccgcccgggtaccagagtggatcgcctccggtttgttacggcggctctactactacgattt

SEQ ID NO: 22130 - DNA, 360 bp, Glycine max
  Clone ID: LIB3050-026-Q1-K1-B1
ggagctccaaaattgattacatcagcaagggaagtgatggtgaaactcagggcacgacacataaggatatgagttctatctatcaggaacaaagacttcaaccatgtcaacttagctcatcaatccattatggtggccaggacatatgctcttgtcccaagagtacacaagattcaggatacaactctttgctgtacaagaaagatggggttgaagatgatttaggaagtaacctgtggcaagggggtccctattattaagatcacacttgccaaaggacatgctccttaaggtaaacaggaagatagtttagcattttagtgcatcttttgttgcatggacaacaagttatgaacagtg

SEQ ID NO: 22131 - DNA, 155 bp, Glycine max
  Clone ID: LIB3050-026-Q1-K1-B10
aacagacgactgaggttccagttgcgataaggcgaccgatggctggggttgctcgaggactaccgaagggtacggctcccatatgacaactgaagggtacggatgctagatgaccacagacgggtaccgacgccataagactccctatggctgcc

SEQ ID NO: 22132 - DNA, 400 bp, Glycine max
  Clone ID: LIB3050-026-Q1-K1-B12
ggagcctaatgttgtcaataaaattgcttttgtggttcctgtttttgtcgtggtaccactttgccatcccatgtgaggccaaccaacaaggggaatatctctataagtttattcaaacaaagagggctcagaaacgctcttatggagaagcttcttctatggctacaaatcttggtggtgatgaacatttttcgaaggtttatgttgttaaggaacaatccgggttgatggaaggtgacaaagtgaaggctttgccgggacaaccatctcaaggggtggattttgatcaatatgctggctatgttacggtcgatgccaaggcagggagagcactgttctactactttgtggagtcacctcacaatgcttccaacaagccctttgttctatggttaaatgg

SEQ ID NO: 22133 - DNA, 358 bp, Glycine max
  Clone ID: LIB3050-026-Q1-K1-B2
gattccattgtgtagtaaccaatcatctttagttcttcagtaatttatcgtgggattctattctaagattttgagaatgtctagctgtgggtgtggaagcagctgcaactgtggcagcaactgcggttgcaacaagtactcttttgacttgagttacgttgagaagacaaccacagagactctagttttgggtgttgggcctgtgaaggcccaattggagggtgctgaaatgggtgttgcatcttagaactgtggctgcaactgtggatcaagctgcacctgtgacccgtgcaactgcaaggtatgtcaagatgtataaccttgaagcagagatagctgtaatatatgtatcaacaaa

SEQ ID NO: 22134 - DNA, 403 bp, Glycine max
  unsure (1)..(403): unsure at all n locations
  Clone ID: LIB3050-026-Q1-K1-B3
acgacgacagaaggggcggagattgttgcctgaagagaaggttgaggctgtgaaaggtctttcactcactgctgatggaaatggcgttgcttttgatgtaccagctaaagatttagacatatatcttaatggtcacgaaaatgcctccaatgtatgtttagaggtagtgaaaacactgccacagttgcaacagaaagagccacaatcaagaggtggcagatttggtgataatggtggtcgtggtgggaactacaggtttggtggaagatgttgaagacgcaggaatggtaagttcttcaatggtggtgggcgttgcggcaactggggtggaaagagatggtgaagctganaagggactttgggagttgagtgttttcactctgctcggtgtgggatcataact

SEQ ID NO: 22135 - DNA, 379 bp, Glycine max
  Clone ID: LIB3050-026-Q1-K1-B4
gaaaggtgttaggttataaaaaaaaaaaatcttagccacagacgcagaggaggagatggagacgatgatgatgatgagctgcgtttcgatttcgagttcagtgacaagaggcgctattagcgtgggttcctcctcatctttgtgtttcggcacacccaagttgttcaattcagcaagggtagcggtgaatggtcggcgaagaaacaaaggtttgagttgcaacgccatgttcggtctgggggtgcccgaactggtcgttattgccggcgtggccgccctggtttttgggcccaagaaattgcctgaagtcagccgtagcatcggcaagactgtaaagagctttcaacaggctgcaaaggagtttgagtcggagcttaag

SEQ ID NO: 22136 - DNA, 384 bp, Glycine max
  Clone ID: LIB3050-026-Q1-K1-B5
ggcgacaccagatgatggagacgacggcgaagcgaaacgctgtcgttgcgccaatcgcggcgttgttgttggtggtgctactcgcggcgagtgtggtggtggaggctcaggagaactcggacgtgaagacgctggtgaagcacatgcacgggaagaagtactgcgacaaaggatgggaatgtaagggctggtcaatttactgttgtaacctcattattactgattatttccagacctaccagttcgagaatctcttctccaagcggaactcgccggtggcgcacgccgtcggattttgggactaccactcgctcatcgccgctgccgcgcttttcgagccgcaagggttcggcaccaccgggaacaagacgatgcagatgatgg

SEQ ID NO: 22137 - DNA, 341 bp, Glycine max
  Clone ID: LIB3050-026-Q1-K1-B6
tgtatgggttcgacaccagatgatggagacgacggcgaggcgaaacgctgtcgttgcgccaatcgcggcgatgttgatggtggtgctactcgcggcgagtgtggtggtggaggctcacgagaactcggacgtgaagacgctggtgaagcacatgcacggcaagaagtactgcgaccaaggatgccaatgtaatggctggtcaatctactgatgtaacctcattatgactgattatttccagacctaccagttcgcgaatctcttatccaagcggaactcgtcggtggctcacgccgtcagattttgggactaccactcgctcatcgccgctgccgtgcttt

SEQ ID NO: 22138 - DNA, 403 bp, Glycine max
  Clone ID: LIB3050-026-Q1-K1-B9
cgagaggcggcacgacggagagcgcgaatgacaatggaggaagcccttgcggaactggagcgagtccaaacccagcttctgcaacgcatatcgcaactggagcgttcgcatcttacatcaccctcttcccaaaacgacaccgtcgaagacactgccactgacaccgtggctcgactatactccattctgcgcagcaacgagctacccgatttctccttcaagagagtaccttacaattactacgactggaccatcgaagccacgtcacgacgccctctacgacgactcaatgcaccatctctgcataagcatcgttctcgttaacacgcaagcccacgacaacgtcgtcgattgcagcgaccgcaagaattccaaatactatgtcgttgtcgttcagtacacc

SEQ ID NO: 22139 - DNA, 377 bp, Glycine max
  Clone ID: LIB3050-026-Q1-K1-C1
gaatctagtggaagagtgaataagagatatcaatatattatgataatggagggatacaataagaaggttatgattgtggggatggtgttgggcatggccatgattgggatggccaatggccaatactcgttttgtcgcatgcccagcgatgggttggcggcatgcaagccgagtgtgagtggggactatcctgctgatccctccactgcttgatgctcagccattgccaaggctgatcttaaatgcttctgccgcttcaaggattcgggccttctctctatgtatggtgttgatcccaacaagtgcatggaactccctgttaagtgcaaggttgccgactctttccactgctagattcattagagggggcactaatc

SEQ ID NO: 22140 - DNA, 370 bp, Glycine max
  Clone ID: LIB3050-026-Q1-K1-C11
gagagtggagtaaaaaaaaagagcagtgtaagaaattagaaagggcgaaaggcgcactttatctgaaagcaaaaaccctacctagggtcaaccgtgacgccacaatcgccttcggcatctttgcaacgggatcaggtgctcctcgtccttcacgatggcgggaactgaagccaaaaaaactgaatccaaaaaacctgccgctaagcaatccggtgcgaagaagaaggaggtgaagaaggaaactggcttaggtctcacgcatcggaaggcggagaacttcggagagtggtattccgaggtggttgttaatgcggaaatgattgagtactatgatatttccggttgctatattctgaggccttggtcaatg

SEQ ID NO: 22141 - DNA, 354 bp, Glycine max
  Clone ID: LIB3050-026-Q1-K1-C12
ggtcacttttctcagctgctgttcctgcgcgtgaacaagcctcaggtaagccaaagccatggttaagcataacaatgttatccccaacggacacttccgtaagcactggcagaactatgtgaagacctggttcaatcagccagcacggaagacaagaagacggttggctcgtcagaagaaagctgtgaagattttccccagacctacagctggacctcttagacccattgtacatggtcaaactttgaaatacaacatgaaagtgagagctggaaggggattttcccttgaagaactcaaggcagcatggattcccaaaaagcttgcaccaacaattggtatttgctgtgatca

SEQ ID NO: 22142 - DNA, 366 bp, Glycine max
  Clone ID: LIB3050-026-Q1-K1-C2
ggcgtgttttcatcattgtcgttctgaacggaaaagcactggcgcagctaccctgaggcttctcttctcttctcttctttgtcgtgagtcaccatggtgagggttagtgtgctgaacgatgctctgaagagcatgtacaatgctgagaaaaggggaaagcgccaagtcatgattaggccatcctgcaaaggtcttatcaaattccttttggtgatgcaaaagcccgggtacctcggaaagtttgagtatgttgatgaccacagggctggtaaaatcgcggttgaattgaacggtagactgaacaagtgtggggttattagtccccgttttgatgtgggcgtcaaagagattgaaggttggactgct

SEQ ID NO: 22143 - DNA, 383 bp, Glycine max
  Clone ID: LIB3050-026-Q1-K1-C3
gtagatttgtatcttatccactggcctgctccgatgaagaaaggatcagctggctttaagcctgaaaatcttgtgcaaccaaacatacctaacacctggaaggcgatggaagcactctatgactctggcaaggctcggaccatcggtgtaagcaatttttccaccaagaagctctcggatttgctgctaattgctcgtgttcctcccgctgtcaaccaggtggagtgtcatccttcctggcagcaagacaagctgcaagctttctgcaattccaaaggtgtccacctctctggatattcacctttgggttcccctggaacaacctggcttaaaagtgatgtcctcaagcatcaagttataaatatgattgcggagaaactagg

SEQ ID NO: 22144 - DNA, 378 bp, Glycine max
  unsure (1)..(378): unsure at all n locations
  Clone ID: LIB3050-026-Q1-K1-C4
tggagccggtggagaaatgtttgaggggtgctaagatggacaaaagaagtgttgatgatgttgtccttgttggtggttctaccagaattcccaaggttcaacaactgctgcagggcttctttaatggaaaagagctttgcaagagcattaatcccgatgaggctgttgcatatggtgcggctgttcatgctgcaatcttaagtggtgagggcaatgagaaggttcaagatcttctcctcctggatgtcacccctctgtctcttggtttggagactgccggtggtgtgatgactgtcctgatccctaggaacactacaattccaacanagaaggaacatgttttctcaacatactctgacaaccagcctggtgtgctta

SEQ ID NO: 22145 - DNA, 385 bp, Glycine max
  Clone ID: LIB3050-026-Q1-K1-C5
ggagtagcgatggagaagaagaagggtgagctaaagtcaattttccttcctttcctttccactagtcacataatcccgctagtggacatggccagactcttcgccttgcacgacgtctacgtcaccatcatcaccaccgcacataacgccaccgttttaccaaaagtccatcgatttagatgcgagtcgcggtcgccccatcagaacgcacgttgtcaacttccgcgccgcacaagtgggtctccccgttgggatcgaagccttcaacgtcgatacgcctcgggaaatgactcccagaatctacatgggcctatcccttctccaacaagtcttcgaaaaactcttccatgacttgcaaccggatttcatcgtcaccgacatgttc

SEQ ID NO: 22146 - DNA, 366 bp, Glycine max
  Clone ID: LIB3050-026-Q1-K1-C6
ggcattgtgaaatcaacagagaaacatttcactaatagagagacataagcataatattgagaaataatggagggttgtacttattgtgtgaagttgctatgccttgttgggtttgtggtgcttgtgagtactattgcaggggtggagagtgctggtgaatgtgggaaatctaccaccccagataatgaggcttataagcttgcaccatgtgcctcagcagcacaagatgagaatgctagtgtttctcagagttgctgtgctcaggtgaagaaaattgggcagaacccaagctgcctctgtgcagttctgctctccaacacagccaaaatggctggtgtcaaccctcaagttgctgtcaccatcccc

SEQ ID NO: 22147 - DNA, 365 bp, Glycine max
  Clone ID: LIB3050-026-Q1-K1-C7
tataagatttgattgaaaggactttgtgaatttcatattactggagtcatattacaggaaattttaaaagatgtgaatttaaatacattgaagaggcatgttattggagtgtggtcaattggaaagatgaatctagtttcgtatatgggagcgggttgagcaagtatagcagcgattttgacatctgcaatgcaagcattagtgatattagggggcgtgggttatccttttaccctaccatgttcaggcacttattgtgcttagaattgtgtacaaacgggaaattattaagtagtggacatgattgtgaatgtctatattgtctgtacagatagagaaaaaatatgggaaaaaagaaagtccaa

SEQ ID NO: 22148 - DNA, 367 bp, Glycine max
  unsure (1)..(367): unsure at all n locations
  Clone ID: LIB3050-026-Q1-K1-C8
gataccaaaaacaaaacacaagccaagtgaaagtgagaaaaaataaaaatcaaagagcataatgtcagggatcattcacaagattggggagacccttcatgtgggagggcacaagaaggaggaggagcataagggtgagcaccatgctggagaatacaaaggggagcaccatggtgaacacagtagtgagtacaaaggagagcatcatggtgaacacaaagctggagagtaccatggtgagcacaagccagagcacaaagaggggttcctagacaaagtcaaggacaagatccatggtgagggcggcgccgncgaaggcgagaagaagaagaaggagaagaagaagaatgagcatggccatgagcat

SEQ ID NO: 22149 - DNA, 372 bp, Glycine max
  Clone ID: LIB3050-026-Q1-K1-C9
gaatgatgaggatgatgacgaggaaggcagtggcgaggaggaggatgacgattagagaatggactgatgataatagcatttatgtaggttctgatgattttgatcatccgtgtaggtggtctggtcatttccttataaacatatttctctttccaaaaaatatttccctgctcctccttccgtaaattgctcgtctttccaaaacgtgaatagtttaaagaagggagttctctttatttgtatttctaaatccaactgtttagttaagggatggttatctcttgtagagcttttagtttgatttagagttttcttgttgaaatctggttaagtttgtatcaatataattgacttatcatcccctttctgctc

SEQ ID NO: 22150 - DNA, 399 bp, Glycine max
  unsure (1)..(399): unsure at all n locations
  Clone ID: LIB3050-026-Q1-K1-D10
gtacaagaagctacgtaccacttaccacaggaagactctcgtacatcttgctgccaaaacatcaacagtatgagcactgacatgaaatattaagaaattaaaactggttttggcaagtatgtatttgatttttggttcattattgtcaatagttatcattggtcaaagatacttgccaccaaattacatagagtcacagtcgttgggatagaaccatctactacaaattagattgttcatatatgtgcagcctgagattgttcattgtggtgacattgtcgagtggtttcatgccacttggaatgaggtatggacttgcatttacttttctagtttgccatcggctatcttcaactntatttgtatgaactctgaagtgtgctgtancttatgagatca

SEQ ID NO: 22151 - DNA, 372 bp, Glycine max
  Clone ID: LIB3050-026-Q1-K1-D12
aatgcaggtggtgaatgtttgagcaactgggcattgtcccaaccggcctcactgcagtgtagtaagcttttagtttgtttttgttattattatatgcttaataatttgcaatgatgggactcaatgattaattaattaacaaacgaattttgttggagtctttttatttaacatttttttgttgccttgttttcttcattaacacggggatgtggaagagactacagcttcatattaagtttgattcagaatagaagacaaaaagggtctgcacatagctaggggcattggggaacacgaatgacatgatcgatatcacagcgctcaatgctcatacagcactacttttctttatcaccattcttgttcacg

SEQ ID NO: 22152 - DNA, 145 bp, Glycine max
  Clone ID: LIB3050-026-Q1-K1-D2
cccacgcgtgcgcacaggtgcgagcgtccacagagggggactcacgagttaacataattacttgccttgaggaacgttccaaaccacatacacaggtatatctagtgatcttcgatcttctgtggcgatcttgttatgtcatctt

SEQ ID NO: 22153 - DNA, 171 bp, Glycine max
  Clone ID: LIB3050-026-Q1-K1-D3
tatagacaggtccacgaaccttgtccgattcaagggttcaactatggttgctgcactagagcacattattgagcccatgaagacctttgacaagctggtacaggctgtgagttaatgatgtgtacatgattgtacgtatcttaactaggccattggaacttgtacgagacc

SEQ ID NO: 22154 - DNA, 370 bp, Glycine max
  Clone ID: LIB3050-026-Q1-K1-D4
gggtgcggagaatcccaaaaaggcaaaacttgcagccctcgtggggttatgttttagttacggtttgggtttctcggctttgtttttcgcagtttcggtgaggcacgtgtgggcttcgatgttcacaagtgacgcggagatcattgctttgacatcgatggtgttgcccatcattggactatgtgaacttggaaattgtccgcaaacaacggtttgcggcgttttgaggggaaccgcaaggcccaagttgggagcgaatataaatttgggttgcttctatctagtgggaatgcccgttgcggtgaggttgagtttctttgccggctttgatttcaaaggcttgtggcttggtttattggcagctcaagcc

SEQ ID NO: 22155 - DNA, 380 bp, Glycine max
  Clone ID: LIB3050-026-Q1-K1-D5
ggtatatcatttacaatttcaatctctctctctctctgtctctctctctctagacctagattttgtgaatggctgaagtggaagagggacaggtcatcggcgtccacaccgttgatgagtggaagctgcaactccagaatgcaaaagactccaaaaaactgattgtggtggattttactgcttcctggtgtggtccatgccgttttatggccccagttcttgcagagattgcaaagaaaactcctgaattgatcttcctcaaagtggatgtggatgaagtgaggcctgttgctgaggaatattccattgaggccatgccaaccttcctcttcttgaaagatggcgagatcgtggacaaggtggttggtgctagtaaggat

SEQ ID NO: 22156 - DNA, 363 bp, Glycine max
  Clone ID: LIB3050-026-Q1-K1-D6
ttgaggtggcattgtgaaatcaacagagaaacatttcactaatagagagacataagcataatattgagaaataatggagggttgtacttattgtgtgaagttgctatgccttgatgggtttgtggtgcttgtgagtactattgcaggggtggagagtgctggtgaatgtgggaaatctaccaccctagataatgaggcttataagcttgcaccatgtgcctcagcagcacaagatgagaatgctagtgttactcagagttgctgtgctcaggtgaagaaaattgggcagaacccaagctgcctctgtgcagttctgctcttcaacacagccaaaatggctggtgtcaacccttaagttgctgt

SEQ ID NO: 22157 - DNA, 363 bp, Glycine max
  Clone ID: LIB3050-026-Q1-K1-D8
ggagagtggttgtaagaaaaggaaatgaagaacaaggaaataatggtgatggttccgtatccggcacagggacacgttagtcccatgcaaaagctaggctgggaatttgtgaggcaggggttcgaggctgtggttgtgatccccaaatttattcacaggcagatagcagagcttcagaaaaatgatgagaatgagatgataaagtgggtggctctgccagatcatgaagaagaagaaggaagcatcccaccataagatttcttcgccatagaatcggccatggagaacagcagcatcacaactcacttggaagcactgctccatagcctggccgcagagggaggtcacgtggcctgcttggtg

SEQ ID NO: 22158 - DNA, 401 bp, Glycine max
  Clone ID: LIB3050-026-Q1-K1-D9
ggctgcaaattaaaccaattttctttgtctatgcaacctacacttcaacaaagcttctctaaacccaatagctctgatttcaagatgagttcatttagccaaaaccactatgttttagtcctgttccttgttctcactgtgtggacatcccacataatgtctcgcaggttgtttgaggcctgcacttctgagagacatgagaactggatggcacagtatggtaaggtttacaaggatgctgctgagaagaaaaaacgtttccaaatattcaaaaacaatgtgcacttcattgagtcattcaatactgctggggacaaacccttcaaccttagcattaaccaatttgctgaccttcatgatgaggaatttaaggctttactaactaatggtaacaagaaggt

SEQ ID NO: 22159 - DNA, 384 bp, Glycine max
  unsure (1)..(384): unsure at all n locations
  Clone ID: LIB3050-026-Q1-K1-E1
gagccaccggagcagctgtatgcctcccaactttcacagcttcaagagatgggattctttgattcacaagagaacattagagcccttattgccacttcaggtaatgttcatgccgcagttgaacggctattggggaactctggtcagtagcggacaatgttggcaagttctcttctgtcgatttccacggttggtcactatgaaatcagtggtgttcaagtgccttgttgaatattanataaaatcagaaatctgtccaaaattatagtggtcagagctgaaatggtgtangttatatacattggactgtgattgtttcttctaatggtccacttttcttcatgtacatacttaaattgaaactagttttagacgcagcagatc

SEQ ID NO: 22160 - DNA, 384 bp, Glycine max
  Clone ID: LIB3050-026-Q1-K1-E11
gaagagagagagagagagagagagagtcctgaaacttgggtgcgattccttcactcacaacaacaacacatcactatggctcttctgagtcgagcctcttcacgcttccctcagctggtttcccctcaaagggtagtttcactccacacaacgctcccatctctgaacgcatccccatccacagccacgcctacaccatatgccccgccaccgcctccgtccgcttcctctcccgccggcgtttcgaaggcggcggagttcgtgatctcgaaggtggacgatctgatgaactgggcccgccgcggctccatctggcccatgaccttcggcctcgcctgctgcgccgtcgaaatgatgcacaccggcgcccgccgctacgatctc

SEQ ID NO: 22161 - DNA, 381 bp, Glycine max
  Clone ID: LIB3050-026-Q1-K1-E12
accactcgtacaagccgacgcaaggagacgcccgaaggggaggatgtgccacaacaggtggatcaaaggtgccaattgggcaatgaagatgcatgagataagtgagttgaacggcattctgctaaagctaattcaagtaatagaggaacagtgcacgatgttactatgaagcagggcacatccatgctctaaactattacacgtatacactgctaggtcacaggacgatggtgatctaacacctggatctagtatatgcaactaacctagtgtgaagcagatgatggtcacggtccatgcttgtgatacatggtgcacactgagagctttacggtatgacatagaatgttgccgagacttcatggacgtaatacatgatta

SEQ ID NO: 22162 - DNA, 384 bp, Glycine max
  Clone ID: LIB3050-026-Q1-K1-E2
gaaggcatcgtgatgatagagaaacgggccgagaacgatctcgtgatcgtgaccgtgaacgatctcgagaccgtgatcgtgaccgcgaaagggattaccgtgagcgtgacaggcacaaagaagatagggacaggtatgcagatcatcacaggtacagagaccgggaagcagaacacgatgatgagtgggagaggggacgatcatcaaagcctcacagtaagtcacagttatcgcaagaggaggaacaccattctaggccaagagatgctgattatgggaagaggcggcggcttacttctgaataactttgtatgctgcccgttatttctctgaatgctttccactttggaaggaaaaaacagtaactgaaaatcacgatttgtc

SEQ ID NO: 22163 - DNA, 383 bp, Glycine max
  Clone ID: LIB3050-026-Q1-K1-E3
ggtagcgacccatcagagaagatcgcgatcttctgaaacatgtctggggaagaggaagaaaacgccgcagagctcaaaattggagacgagtttttgaaggcaaagtgcttaatgaactgtgaagttgcattgattcttgagcacaagtatgagcagcttcaacagacatccgatgatcccatgaatcaagtttctcacgtatttgaaaagtcactgcagtatgtgaagcgcttcagccgctataaaaatcccgatgctgttagacaagttcgagaaattctcgccagatatgaattggctgagtttgagttgtgtgtccttggcaacctttgcccagaaactgtggaggaagctattgctatggttccatctatcaagtcaag

SEQ ID NO: 22164 - DNA, 273 bp, Glycine max
  Clone ID: LIB3050-026-Q1-K1-E4
ggagggtcaaagaagccaagagattagaaggaatgccaataaatggaagaagttggctagggaagcagttggtgaaggaggcagctctgataagcacattaatcaatttgtggatcatttgatgaatgcagataaaaatggaagtttgaatgtatactgagtgcctatgctcatcataagttgttatttgttagtggaagcatgtattctgggtgcatttgtgttcattttttcaacatgaaaatttatgtgaatgtatgacatcctttttct

SEQ ID NO: 22165 - DNA, 381 bp, Glycine max
  Clone ID: LIB3050-026-Q1-K1-E5
ggctcgcatagattttgctccaaagggtttgaacgctccccacactcaccctcgcggcactgagatccttatagtccttgagggtactctttatgttggatttgtgacttccaatcaagatggaaatcgcctcttcaccaaagtgctgaacaagggtgatgtgtttgtgttcccaattggtctcattcatttccaattgaatgtgggatatggcaatgctgttgccattgctggtcttagcagtcaaaatccaggagctatcactattgcaaatgctttgtttaaagctaatccacctatttcttctgaggttctcaccaaagctttccaggtggacaagagcataattgattatcttcaaaagcaatcttggtacgacaa

SEQ ID NO: 22166 - DNA, 377 bp, Glycine max
  Clone ID: LIB3050-026-Q1-K1-E6
gattgtgaaatcaacagagaaacatttcactaatagagagacataagcataatattgagaaataatggagggttgtacttattgtgtgaagttgctatgccttgttgggtttgtggtgcttgtgagtactattgcaggggtggagagtgctggtgaatgtgggaaatctaccaccccagataatgaggcttataagcttgcaccatgtgcctcagcagcacaagatgagaatgctagtgtttctcagagttgctgtgctcaggtgaagaaaattgggcagaacccaagctgcctctgtgcagttctgctctccaacacagccaaaatggctggtgtcaaccctcaagttgctgtcaccatccccaagcgttgcaacc

SEQ ID NO: 22167 - DNA, 384 bp, Glycine max
  Clone ID: LIB3050-026-Q1-K1-E7
gacaccagaaagtgccagaattctaatcctttttgcctaacctttatgtgtgtgtgtggcatcattttccaaccccacaattcaaaatccattaaagaaagacttacttatagaaccctctctcactctcacccttaaggattcttctctctaagaagttctgagatatcaagcagaaaaaagaagcaaagaaagatgataatggtggtggttatgacagagatattaggagagtacacagcagtgctcacaagggtcacagaacgcctccttccgcgccacggcataagttttggtggtctaaggaggaaccttcgttttgcttcttccacaacctattcttcagattcaacttcttttctggtttacttttaaatttttaat

SEQ ID NO: 22168 - DNA, 369 bp, Glycine max
  Clone ID: LIB3050-026-Q1-K1-E8
gagatagatctgcttcttgttgttggaaagaaaccctagcaagcggaacaatggcagacgttgaggtcgatgtggcggctgcagcagcagcagggcagccgaagaagagaacgttcaagaagttcagtttcaggggcgtggatctcgatgcgcttctggacatgtccaccgatgaactcgtgaagatgttcagtgctcgcgcacgtagaaggttccagagaggcctcaccagaaagcccatggccttgatcaagaagcttcgcaaagcgaaaagagaagctccaccaggtgagaagccagaacctgtccgcacccaccttcgcaacatgattattgtgcctgagatgattggtagcattattggagtgt

SEQ ID NO: 22169 - DNA, 390 bp, Glycine max
  Clone ID: LIB3050-026-Q1-K1-E9
tatggagactgcttttgaaactaaaaattatgatcttccctccagtcaggttcgaatatataaaatgttttctgcccactaagatacactatcagtaaaaatgtccggtactgtatgagaaagcttctccagaaatacttttaagagaagaaataagaagaaaaaaatgcaataaacttctttacaagataaagttagatcagttagccattatttaatttgtagatgccttctcatcttttagaaaagttatatgagagaacttctacaaatcaattaatgattaatcaatgaaaagataattttagcttatctaaatttcatttcatttttttaaaaaaaaaattgtctcttaaaagtatttctaaaaaaatttacccaaatagatga

SEQ ID NO: 22170 - DNA, 387 bp, Glycine max
  Clone ID: LIB3050-026-Q1-K1-F1
gattcaatcccaagagaaattcctgacccaaatgctaaagagcctgaaaactgggatgaagaggaagatgggaaatggaaaccaccaaagataccaaatccagcatacaaaggaccatggaaaagaaagaaaatcaagaaccctaactacaaagggaaatggaaaactccatggatagataatccagagtttgaagacgaccctgatctttatgtgcttaagcctatcaagtatgtaggcattgaagtttggcaggttaaaggcggttcagtttttgacaacgttttgatttgtgacgaccctgattatgcaaaacaagttgttgaggaggtgtttgccaacagggagattgaaaaggaaggttttgaggaagcagagaaagtgaga

SEQ ID NO: 22171 - DNA, 392 bp, Glycine max
  Clone ID: LIB3050-026-Q1-K1-F10
gactccgagtgtaaggtggatcttcgaatcaagatctggaagttctccttttaataataattaatgtcttttttgattgattgattgattgttataatcattgcgaaaattcgttattatctatcgacatcaatttcaataatcaatccaataatccatcgatcccttttctctctttttttttttttagtttttgttttcataattgccttgggggatggattgattatggttacttacttttcatgaaacgtgcacaaggtcaaatttgtatggggaaatgaattttgagcttgtaatatgagatttagggcagaaagaaagccctgaatgtagtttttgtattttttaaaaaaaattaaatttgtcattgtagtttggtgatgtaattt

SEQ ID NO: 22172 - DNA, 397 bp, Glycine max
  unsure (1)..(397): unsure at all n locations
  Clone ID: LIB3050-026-Q1-K1-F11
ggaagtcgagtcgaagagttttgggagccaaatgggtcttctgagtatcataaggaaaatcaagcggaaagagaaggaaatgcgaattctaatggtcggattggacaattctgggaaaaccacaatcgttttaaagataaacggagaggactccagcgtcatcagtcccacgctcggcttcaacatcaaaaccataacttaccaaaagtatactctaaatatatgggatgttggggggcagaaaacaataagatcttactggagaaactactttgagcaaacagatggtttggtttgggtggttgacagttcagatctgagaaggttggatgattgcaaattcgagctcgataaccttctcaaggaagagaggctatctggagcatctntactgata

SEQ ID NO: 22173 - DNA, 395 bp, Glycine max
  Clone ID: LIB3050-026-Q1-K1-F12
gggatcaaggagaattgttgagaactaaagctaaactacggattgcacaaggaaaattaaagaatgcagtggagacatatacttttcttcttgctgttcttcaggttcaaaataaaagtttaggcacagcaagtaaggttgtgaagaataagggaaaccgtgacagaagactggaaatggaaatatggcttgatttagccaatgtgtacacggccttatcacagtggcaggatgctgaagtttgtctcgcaaaatctgaagctattaatccctattctgcttctagatggcacacaaaaggtttgctttctgaggccagaggttttcatcaagaagctttgaaatcatttaggaaagcattagatattgagccaaaccatgtaccaagtttgata

SEQ ID NO: 22174 - DNA, 379 bp, Glycine max
  unsure (1)..(379): unsure at all n locations
  Clone ID: LIB3050-026-Q1-K1-F2
tacgcgcccggggacgaggattctgctgccaacctagattacgacgacgtcaacgacagcgacgaggacgatgttggaacctctgggagttcctcttccaccggattcacaaaacgatgtgcatcattgaataccatgatttcattactttggtggatggtgggcttttactggggtggctcttggggggatattcttctggaagatgctccacgtttatactggttgactgttgtctttctagcatttgatgtcttctttgctatcttttgtgttgttttggcatgcttgattggaattgccctctgttgttgtttgccctgtattattgctattctctatgctgttgcaggacangagggtgcatcaaaatcggatc

SEQ ID NO: 22175 - DNA, 374 bp, Glycine max
  Clone ID: LIB3050-026-Q1-K1-F3
gctgtcgtgagctggacctggaccaaccactggatctactgggccggccctctcatcggaggtggaattgctgggcttatctacgaggttgtcttcatcagccacacccacgagcagcttcccagcactgactactagaggggaaaaatgaaataataaaaaaaaaaaaaatgtgtattattgaatttctccggaatcttcttctgtgtatggttttccttcctttgtgttttctttcctgttgaatcggtggccgctgatctttggtcggatggttgatgatcctgaagttttcttttaagttaatttaattatcattttgtgcatgctctcgctctcacctggtccacaattgaattgaatgtatgtatcat

SEQ ID NO: 22176 - DNA, 366 bp, Glycine max
  unsure (1)..(366): unsure at all n locations
  Clone ID: LIB3050-026-Q1-K1-F4
gatagaattttataaataaaattaggatcaatcccataataaataaggtctaaaataaaatttgataaagttatatgttggccttttttacctacatatgtggtcatattatttttgttgatgatagacttaaaatttaagctttaattactttattcttcgttgagaataaaatttatgttatagcttacaattgngacgtgttagcaattttcatattgttgaaagaacgataactaccgaatcataaaaagaaataatgtctaatctatgaagaatctatnntatagatgatgattgtgtcttncttagagtttccactttgatcatctatntttctaatgattccactcttcttttataatt

SEQ ID NO: 22177 - DNA, 358 bp, Glycine max
  Clone ID: LIB3050-026-Q1-K1-F5
gaggagatgaaaactgaagatgaagaccaaattggttggcagacttacagcaaccttgcttctatttatgttaagtttaaggactttgagaaagctgagatgatgcttaagatgctggaaaaacaagtgaagccgaaacagcgtgatgcttaccattgcttgcttggcctttatgcagggaccggtaatcttggggaggttcatagagtgtggaattccctcaagtctgtctcccctgtcaccaacttcagctatcttgttatgcttagtaccctccgaaagcttaatgatatagaggggttaacaaaatgctttaaggagtgggaagctagttgtgttagctatgatgtgaggttgg

SEQ ID NO: 22178 - DNA, 375 bp, Glycine max
  unsure (1)..(375): unsure at all n locations
  Clone ID: LIB3050-026-Q1-K1-F6
gctttcggaaaacggtcaaggaagaagaattactcatccaaaaaggagcagaagatagtgatggtaaccagaaagggtatcataaacacaaccacaggattactatatctgatgttgtgttcaagcacaggtggagcaacgtgagttcttcagaccttatgtttctgaattcggagatgctcaatgatacatcaagcaacagattcagcagcaacctggaatcaattacaagaggggtagtggtggaaaatgagcaaattatgaacatcaaggaggagatggagaggaagatttcctttgagaacaaagttgttggtgcactaaacaacatcgtttcagatcataaggaagatcctncttttacatcagattctg

SEQ ID NO: 22179 - DNA, 303 bp, Glycine max
  Clone ID: LIB3050-024-Q1-K1-G5
acggaggtggcattgtgaattaaccgaagaaccattcaattattgagaggccttaaccttattatgggaaattatggaagggtgacctaatggtgaaaattctatatcctttgtgggttttggggcctttgagagctctattaaaggtggagagactctgaaagtggaaatatccaccccccaatatgaggcgtataagcttgtaccatgtgcctcatcagcacaagatgagaatgctagtgtttctcagagttgctgtgctcatgtgaagaaaattgtgcaaaacccaagctggctctgtac

SEQ ID NO: 22180 - DNA, 392 bp, Glycine max
  Clone ID: LIB3050-022-Q1-K1-G9
gaacaacaaaacaacaacaattagttaagagagttgagtaagatcagaatggcagacttgatgaaaagaatcctgcaaatgattgaggctgaacaagcaagcaaagggtccaaccatggttcttcaaactcacataacagctatggcagcggaagccagaatggatcaaccatcaacagtggcaatcatcttaacaacggcaacaggtatgacgactcataccactacggtgaacgccctatttataacagtggcactttcaatggtaatggcaacgggtcacatatcaagggtggctttgactcctcaacaaggaactactatggtcgtcgttatgattattaattatctgtatttgatacagtatatgctagctagttggacaaaatata

SEQ ID NO: 22181 - DNA, 333 bp, Glycine max
  unsure (1)..(333): unsure at all n locations
  Clone ID: LIB3050-022-Q1-K1-H1
gaacgcagccaagaaaagaaaatcctcacccattttcttcgcagccaaacactctgaaattctcagttatgtcgtggcaagcgtatgtggatgatcacctactgggggaaatcgaaagtaaccacctcactcacgccgctatcatcggccaagacggaagcgtttgggctcagagcaccaacttccctcagttcaaacctgaggaaataactgccatcaataatgactttaatgagcctggatcacttgctccaactggattgtatatcggtggcaccaaatacatggtcatncagggtgnagcttggtgctgtcattcgagggaagaagggt

SEQ ID NO: 22182 - DNA, 396 bp, Glycine max
  Clone ID: LIB3050-022-Q1-K1-H11
agaaaaaattggttgatgatgttaggaaggctctttatgcagccaaaatctgtagttatgcacagggaatgaatttgatccgtgcaaagagtattgaaaagggttgggatttgaagttgggtgaactggcccggatttggaaaggtggttgcatcattagagcaatattcttagacagaatcaagcaagcgtatgatagaaaccctaatctggcaaaccttcttgtggatccagagtttgcaaaggaaataatcgatcgccaatctgcctggaggagagttgtttgccttgctatcaattctggtatcagcactccaggtatgtctgctagtcttgcttattttgacacttacagaagggaaaggttgccagctaatttggtgcaagctcaacgag

SEQ ID NO: 22183 - DNA, 397 bp, Glycine max
  Clone ID: LIB3050-022-Q1-K1-H12
gacagaaaagaaaaaggaaaccctagctggataggtcaaacatcatcatgtcggacgaagagcaccatttcgagtccaaggcagacgccggtgcctccaaaacctaccctcagcaagccggtaccattcgcaagaacggctacatcgtcatcaaaggacgcccctgcaaggttgtggaagtttcgacttccaaaactggaaagcacggtcacgccaagtgccactttgttggaattgatattttcactgccaagaaacttgaggatattgtgccctcttctcacaactgtgatgttcctcatgtgaatcgtactgattaccagctcattgatattgctgaggatggatttttgagtctgcttactgaaaatgggaacaccaaggatgacctcaagct

SEQ ID NO: 22184 - DNA, 377 bp, Glycine max
  Clone ID: LIB3050-022-Q1-K1-H2
ggaccaaacaggaaaagtcaaaatgagacaccgcggcgacgcagagccaccgtcgcaaccccaatcttcaccgtcaaattcccttcctcatcggaagaagaaccgcaagcgcagagccaccacttccgtttcctccgaaaccagctaccccaatggccctgaccagctcaacactcacattcatcacgctactgttgtgtgccaggacaaacctaaaccggaagagagtaaatccgctgtcgtcggcgaaggtttccgtttcggtgagctaaggcagagaagcgtgaacggtcgcgatagtttcggagaatcggcggttacagcccgtggtgacggctacgtgacggaaggtaagtcggttgcaacggcaacgtcag

SEQ ID NO: 22185 - DNA, 360 bp, Glycine max
  Clone ID: LIB3050-022-Q1-K1-H3
gattctgattctgtccatccaaatcttaaaaatattcagtgaagatcaacctcaatggcatctcttggcgtgcgaccagttcttccccctccattaacttccatctccgacccacctcctcttttcgatggcaccaccaggttgtacatcagttattcttgcccctatgcacaacgtgtgtggatcgctaggaactacaaggggctacaagataagatcaatttggtccctattaaccttcaagacaggccagcttggtataaggagaaagtctaccctgaaaataaggtgccatccttggagcacaatggcaaggtgttgggagaaagtcttgatttgatcaaatatgtagatgcaaac

SEQ ID NO: 22186 - DNA, 334 bp, Glycine max
  Clone ID: LIB3050-022-Q1-K1-H4
ggattagggtgggagaggtactatgatggagacccaaacctctaccaatttcacaagcactcttcaattgacctaatttccctcgccaaaagatttctccaagttcaactccatcaatatgtatgatatattcatcaagaaccccaatgtcttccatgtccgagataagtgagtcttcatttgttgatgtgccactatagtagctcctctccattcaccttaaatccttcatttgttggtggaactgcttttaccattggtgttaatatcggcttttattggcctctacttcctcatgttggtgtgctctgctatatagctagctatagtttga

SEQ ID NO: 22187 - DNA, 409 bp, Glycine max
  unsure (1)..(409): unsure at all n locations
  Clone ID: LIB3050-022-Q1-K1-H5
gccgattgaaggcatctaaggagagaaaaatgcacgatttctgcttcacgatcccctacggattgatgttagtgggtggtggactgttcgcctacataagcaaagggagcatcgcttctctcgccggaggcgccggctccggtttgcttctcatcgtcgccggctatctcagtctcaatgctttcggcaaacgaaaaaactcttacctcgctctctttctcgagaccgtttgtgcagccatactaacttgggtcatggggcagcgatatttggaaacatctaagattatgcctgctggtcttgttgctggaatcagtgctctcatgactctgtnttatctctacaaattagcaactggtggcaaccatcttcccaccaaggctgagtgatgatataatgatatatcata

SEQ ID NO: 22188 - DNA, 334 bp, Glycine max
  unsure (1)..(334): unsure at all n locations
  Clone ID: LIB3050-022-Q1-K1-H7
gaagacttgagctcacagctacaaactcaggcagcagagcaattcaaggctcctaatgtgagcaatgatggatcgaagcctgaaacctctgctgctgctgctcaagacgacgaggatgtcgacgagactggtgtagatcccaaggatatagagctggtgatgactcaagctggtgtgttgagatcaagagctgttaaggctctcaaagctgccaatggcgacattgttgctgccattatggagctaactaattgatgatggtcagatttgggataattntagaatttgcaatgtggagctattnttctgttagtcaaaatttttgctctccttt

SEQ ID NO: 22189 - DNA, 318 bp, Glycine max
  Clone ID: LIB3050-022-Q1-K1-H8
gatagcagcatcatacaaagcattgaattcaaaaacttaagttcattccttgtgttttgctttcttcctcaaaaccaaacatgtcgaacacatgcggcaactgcgactgcgctgacaagactagctgcaccaagggaaacagctatggtgttattgtagagactgagaagagttacatcgagactgttgtcatggatgttccagcagctgagcatgatgggaagtgcaagtgtggcgctaactgcacttgcacggactgcacctgtggccattaaggaatatgtatgaaaatgtaattgccatgtgtatggcaataca

SEQ ID NO: 22190 - DNA, 104 bp, Glycine max
  Clone ID: LIB3050-022-Q1-K1-H9
cagcacctgtgcaagaagactactgaaagttacgagttatataagacaacataacgtatcagttcagtgatgacgacagagatattctgatgcgagaagactac

SEQ ID NO: 22191 - DNA, 405 bp, Glycine max
  Clone ID: LIB3050-023-Q1-K1-A1
caagcaaaattgtgtacaagtcatggaaaatggaggtaacttatgtgatgggaaagaagttgatcagttttatcaaccctctggtggtattgaggttgtcgttgctaatgaggatggtctttcgtgcggatcagatctgaaagagattgacaaagtaaaaattatacaagaaagtgatttgtttaggggggatgcttcagaaggtgctctctgggatatttttcggagacaggatgtacctaaattgcaggaatatctgaagaagcacttcagagagtttaggcatattcattgctgtcctttaaagcaggttattcaccccatccatgaccagaccttctatctgactatggagtataagaagaagcttaaggaggagtatggaattgagccctggacttttac

SEQ ID NO: 22192 - DNA, 405 bp, Glycine max
  Clone ID: LIB3050-023-Q1-K1-A11
aaggggaaggcagcgaaagaccctaacaagccaaagaggcctccaagtgctttcttcgttttcatggaggagttcaggaaggtattcaacaaagaacatcctgaaaacaaagcagtgtctgctgtgggcaaagctgctggagcaaaatggaagaccatgtctgatgctgaaaaagcaccttatgtggcaaagtctgagaaaaggaaagtggagtacgagaagaacatgagagcctataacaagaaacaggcggaaggtcctactggtggggatgaagaagaatctgagaagtctgtatctgaggtgaatgatgaagatgatgatgaggaaggcagtggcgaggaagaggatgacgattagagaatggactgataattgcatttatgtaagttctgatgattttga

SEQ ID NO: 22193 - DNA, 372 bp, Glycine max
  Clone ID: LIB3050-023-Q1-K1-A12
gtctcaaatgatgtgggactggatgccgacaactgcaaggtcctcgtcaacattgagcagcagagccctgatattgctcagggtgtacacggccaccttaccaaaaaacctgaagaaattggtgctggtgaccagggtcacatgtttggctatgccactgatgaaacccctgaattgatgccattgagccatgttcttgcaacaaaactcggtgctcgtctcaccgaggttcgcaagaacggtacctgcccttggctgaggcctgatgggaagacccaagtgaccgttgagtattacaatgacaatggtgccagggttcctattcgtgtacacaccgtgctaatctccacccaacacgacgagactgtcacc

SEQ ID NO: 22194 - DNA, 363 bp, Glycine max
  Clone ID: LIB3050-023-Q1-K1-A3
aacagaatactgactaaacttgacgacaacacagcggattatattcgtaccggtttaagtcctaggtggagtgatctagatatcaatcagcatgtcaacaatgtgaagtacattggctggattctggagagtgctccacagccaatcttggagagtcatgagctttcttccatgactttagagtataggagagagtgtggtagggacagtgtgctggattccctgactgctgtatctggggccgacatgggcaatctagctcacagcgggcatgttgagtgcaagcatttgcttcgactggaaaatggtgctgagattgtgaggggcaagactgagtggaagcccaaacctgtgaacaacttt

SEQ ID NO: 22195 - DNA, 364 bp, Glycine max
  Clone ID: LIB3050-023-Q1-K1-A4
gggcacagagcaaaaccaaaaacatggcgtggcgctgcggatctctctctcggtcggtgctctcggccgcgagaaccattccaactcgttcctccatttctccactctcgccttcccttcgctctcatcttctccactctcgccgtcccctcaatacactccctaggactgtgggaattctcgtgtgcacgcattcgctgatgcctctgcacagcgctgacgcctccgctcgtctcacttctcacatttccgtcgaatcgcgcgcttgctgcgaattgtctcagggtacttgaatagactttacaatcagcatcagttgtgattacgtttggcatgatgtgaaaatggtggctaatgctttgta

SEQ ID NO: 22196 - DNA, 369 bp, Glycine max
  Clone ID: LIB3050-023-Q1-K1-A5
gaaccaaaatatgagaaaagctggggaggacatagagatgagcaggaaaacagtgtgggacatgggtgctgggattgatgatactgaagctcaaataaacaatgaacgtgtgactataaaggatggtgaattgtctccagaaattaggacaacagtagatgactcggaccgtgctggaatgcatcctaggcgatctagctggggaagaaagagtggaagctgggaaatgtcccctgaagttctggctttggcagccagggtgggggaaccaaaccgtgtcggtggaggtggcagcagtagtagtttggcacacgagaaccgtcatgtatagccattatgcttcaaacagcatggtcaaaggggctttga

SEQ ID NO: 22197 - DNA, 370 bp, Glycine max
  Clone ID: LIB3050-023-Q1-K1-A7
gacccacaaaacaaaccatccatcatcaaatctcccattattcttcaaattctctccaacgttataaaccaccttcaatcaacgttatatatatatcggttattattaattttattttcacgtaatgggcaactacgtttcatgcactttggcgcctcctttgacgaagaactccaaggccacgagggtcatcattcccaccggtgaagtgaagcaattcagagagatcgtgaaggctgcggagctcatactcgaacaccccagctatttcctcgttaattctcgttctttgcatataggaagaagattctctgctctcggtgctgatgaagagttggagtctggcaacgtgtatattttcttcccaatg

SEQ ID NO: 22198 - DNA, 405 bp, Glycine max
  Clone ID: LIB3050-023-Q1-K1-A8
gatccagcatttgtttgacaatgagacatcagtgcctccttctggtctccctggtgttggtctcctacgctgcccggtcggaatcagcgctgggcggctggagccccatcaaggacgtaaacgacagccacgtggcggagatcgccaactacgcgctgagcgagtacgacaagcgttctggggccaagctcacccttgtcaaggtcgtcaagggcgagactcaggtcgtttccggcaccaactaccgtctcgtcctcaaagccaaggatggatccgccacggccagttacgaagccatcgtctgggagaagccttggctccatttcatgaatctcacttccttcaaaccccttcattaatcttagacccatacttttcttcactttctctcttatcatatttcat

SEQ ID NO: 22199 - DNA, 402 bp, Glycine max
  Clone ID: LIB3050-023-Q1-K1-A9
ggttccaatttgcgtgagaacgaaaaaagaaaaaaaaaaccctaacgcactcgagaccctgagatttttcatcttcgtttcgcattctctttttgatcatggacgtcgaggtgcggcagatcttcaacaagttcgacaagaacggcgacggaaaaatctcggtaacggagctgaaggacatgctcgcggccctcggatccaaaacgacggacgaggagttgaaacgcatgatggaggagctcgaccagaacggcgacggtttcatcgacctcaaggagttcgcggattttcactgcaatggcggtgccggaaaggacgactcgaaggagctccgcgacgcgttcgatctctacgacgtcgacaagaacggcctcatctccgcgaaggagttgcacgacgtgc

SEQ ID NO: 22200 - DNA, 307 bp, Glycine max
  Clone ID: LIB3050-023-Q1-K1-B1
ggtgctcaccatgtttctcatggctcccatggctcctatggccaatatgctgcacatggtgctcacatgccccatggaaaattcaagcagcatggaaagcacggcaagttcaagcatggaaagcatggcaagtttggcaagcatggaaagcatggcaaattcggcaagcatggtggtgggttcaagaagtggaagtgaagaatgtgtatctaactatgattctaaaatgcagctctgtgtagagcttaaatctttataataaaccatactttggatgatgaaatcaatcgatctatgagattatggc

SEQ ID NO: 22201 - DNA, 405 bp, Glycine max
  Clone ID: LIB3050-023-Q1-K1-B10
ggaccaagatcacgatcatattcatattctctagctcccacaaactccttttccatttgccttttggcttatccaaaataaaaaaccaatcgtgggttccgtcaattctcaccccatgtcagaaaagtattgttgcatggtcatgagaatcaacgtcgactgcaattcttgttgcagaaaattaaggaggatcattctaaggatgaaagcgatagagaaccatatgatagagaagcagcagcgcagggtatttgtgtttggcagatttgaaccaggggatgttgcaataaagataaagaaaaagatgaaccgaagagttgagatccttgaagttcaagaaatggagggtgaagctcaaaatgaaggagaatagaaactagatagaagagagaagagagaatcatg

SEQ ID NO: 22202 - DNA, 391 bp, Glycine max
  Clone ID: LIB3050-023-Q1-K1-B11
gaagcgaagaaagaagaacttgttcgatgtggctcagttcttacctaactggggaatcggctaccacatggccaagactcactggaatgaagtttcttacgaaatcactaaaatcaatctctacaaggatggaagacatggaaaagcatggggggttgcttttaaaaatggcttgccattagcagatgctccaaaaaaaattagtggagttcacaagcgctgttggagatacctaccaaatgtagtaaaagaattagaaagttcaacaaacttaatgagttccgcagacagtgactttgggtttttaggtcatcgacattagcccgtccatgtcttttcaatttggcttagttgttttcgataatggtatcgtttcttagtagatcatgta

SEQ ID NO: 22203 - DNA, 414 bp, Glycine max
  Clone ID: LIB3050-023-Q1-K1-B2
gggcctgtgaacttgttcacccttcttccctgtctcacttatcactctcccccttctttccaaaacactccctttccctttctattcacttcccctacccttccgtgatgatgtagatagagaataaaaagagaccagtgtgcagtgagaaagagattgctcacttcttgcgtgggtttgttttgttctttgtgttggaatttgttcatgggtgaagaaggagaagaggtgtcaagagagaaggaacaatacatgggagtttatggaaatgagtggttgtattgtggttgctctgcaaattggcgccgtttaagacaccagaattcctgttccatgccttttttcaagtgaaaaaaaaacaattacttggtatctctcagcttttcttcctgagatcttaatatacattgacct

SEQ ID NO: 22204 - DNA, 344 bp, Glycine max
  unsure (1)..(344): unsure at all n locations
  Clone ID: LIB3050-023-Q1-K1-B3
gagaagaagaagaagaaaaatcggcacaattgttgtaattgaacgatgtctgctgcggtgtgcggaagcaagagatctttgttcgaagagcttcccccttctccgccagtatccaagaggctccgctgttcctcctcccctattcgcctctctctcccttccctcatcgaccaccttcgctctctcttccctcatatggatgaccaggtcctcgagagagcgctccaagaatgtggcaatgacctagatgctgccatcaagagccttcacggcctctgtttgggatctgctgatgataattctcaaattgctccacagcctgacctncctaatgtcgtccacac

SEQ ID NO: 22205 - DNA, 389 bp, Glycine max
  Clone ID: LIB3050-023-Q1-K1-B4
ggagtgatgatactatttgttataagtgcttcaatgttttcgatgagcatggccaacaaggactggtcctttggtttcaactacactgattggtggtctagattcgggaatcatgctcagaacaaaacacaacaaccacccaggcagatacttgtgggtggttctgagcattggcactacggtttcaactacaccgattgggccttcaagaatgcaccattttacctcaatgatactctagttttcaaatatgatgctccaaatgccaccagtttcccacacagtgtgtacatgatcaaaagttttgggagcttcatgaagtgtgacattgaaaaggctaaaatgttagcaaatcccacgcaaggtacaggagagagcttcaagtttgt

SEQ ID NO: 22206 - DNA, 414 bp, Glycine max
  unsure (1)..(414): unsure at all n locations
  Clone ID: LIB3050-023-Q1-K1-B5
gtatcgagtctagtctctacaatcactccttcctctcatcctctataaagaaagtgcttaatttgtgttgttacttagttcagtttccatggattgggggcttgctatatcttctcatcctaaaccttattcagtcacaactggtggaaatctctggcggagtaaacacaccaccaagaatatttactttgcaagttcttggatatcaaaagcttcacgacacaaaagggaaactcaaatagaacataatgttttgaggttccaacaaccaagtttggatcatcattacaaatgcatcagaggagggtctacatatcaagaatgcaatagaaaatttgttgtgaaggcaatctctaaacaacctcttggttttgaagctcatgcttncaatcctaagaacattttggactctgt

SEQ ID NO: 22207 - DNA, 392 bp, Glycine max
  Clone ID: LIB3050-023-Q1-K1-B6
ggaatcaatctacaaacagaaacaaagaaacagaatgtgaatcaaccccaatacaatgcaggtagtccaagttcagatgtggagaccgaattgatcattggacttccggatacaagaacaaggcgcatcgttcatcaggtttagtagaagattatttattccctggctatggaaaataaaataagggtaaaaataatgatagaataattccaaatcctcttacaatatcttcctgataatccttctaattattaataaaatgaagaaggtattaatttttttctctgtttccaaagtgttaaaatgtttttacaattttcctttaatactttctttatgaagtattaagaagagtattgggaagatgcatgttataagaggatatattatta

SEQ ID NO: 22208 - DNA, 356 bp, Glycine max
  Clone ID: LIB3050-023-Q1-K1-B7
ggaatcgagtgcgtgagggtttgcagtgtgcagtgtgcagtgtgcagtgcacttggatgcatcaataacccccgattcaatttgggaccaagatcctggttcgcgatgaagaggtcatttccatgggaaaatcaaattgatgtctcttcttcttcttctccaaactcccttcgtcctaaccccctaactatccctaactcccccatagataccaagtcccaagatgcactcatcaggcgggcagaaatgcatcaggattacatgaagcagatcccaatcccaaatcatcgaggcactatgatcccatttacctcatggatgggattaggcagatccatgaagcagatatacggaca

SEQ ID NO: 22209 - DNA, 135 bp, Glycine max
  Clone ID: LIB3050-023-Q1-K1-B8
tcgactgatggggagagaaggagagagaaggatgtctaaccgtgttcgtggtggttcggcggggaacaagttccgcatgtcgttgggtcttccattggcggcgacggtaaactgcgcagacaacacgggggcaaa

SEQ ID NO: 22210 - DNA, 403 bp, Glycine max
  Clone ID: LIB3050-023-Q1-K1-B9
gggcgttacggtttgcgacgctgggtgcggtaccggttctctctctattcctcttgccaaagagtgcgctgttgtgttcgccagtgatatctccgccgctatggttgccgaggctgagaaacaggcaaaagaacagcttgcaaccagtgaagatggatctgtgcccgtgatgcctaagtttgtagtgaaggatttagagagcttggatggcaagtatgatacggtggtctgcctcgatgtcttgattcattacccacaacataaagccgatgggatgattgcacaccttgcatcattggccaacaaccgattgattctgagttttgccccaaagacgttttattatgatctgctaaagagggttggagagttgttccctggtccttcaaaggcaacaagagca

SEQ ID NO: 22211 - DNA, 403 bp, Glycine max
  Clone ID: LIB3050-023-Q1-K1-C11
gatcgaatgggaggaagaataattgtgaggcgagggtaaggtcgcgttgtgttgcgtcgtgtcgtgcgctgttcctctgtttctcgtttttgtgttcagaccgaaccctagctccgcatcgcaaccatgtcgaccaagcaaggtggaaaagctaagcctttgaagaaacccaagtctgataagaaggattacgacgagattgatgtggctaacattcagaagaaaagggaagaggagaaggcgctaaaggagttgaaagccaaggcgcaacagaagggaagctttggaggttctgggctcaagaaaagtggaaagaaataagggctctttatcatgattgtatgcattcaatattgagccctgtaattacagttgctaccatgataacttctcttattattgg

SEQ ID NO: 22212 - DNA, 401 bp, Glycine max
  Clone ID: LIB3050-023-Q1-K1-C12
atcgaatgggaggaagaataattgtgaggcgagggtaaggtcgcgttgtgttgcgtcgtgtcgtgcgctgttcctctgtttctcgtttttgtgttcagaccgaaccctagctccgcatcgcaaccatgtcgaccaagcaaggtggaaaagctaagcctttgaagaaacccaagtctgataagaaggattacgacgagattgatgtggctaacattcagaagaaaagggaagaggagaaggcgctaaaggagttgaaagccaaggcgcaacagaagggaagctttggaggttctgggctcaagaaaagtggaaagaaataagggctctttatcatgattgtatgcattcaatattgagccctgtaattacagttgctaccatgataacttctcttattattg

SEQ ID NO: 22213 - DNA, 301 bp, Glycine max
  Clone ID: LIB3050-023-Q1-K1-C2
cttcatcgagggcaaataataagatacaaaaaaaagatcgataaaggagaaagacagagaaaaaagtagaaaagagaaagaaaaaatttgaaaaaagtaaagggtgagcagagataaacgaatagaatgataaaaaaaaaaataaatatgaaaaaaaaagaaaaaatcgaaaagagaatatatggcctgatagaaaaaaaaaagaagtcatagataagaaagaaagtaataacaaaattagtagcacttaaaaaaataagaactgaaaaagaataaataaatgaaaacaaaaatagcattg

SEQ ID NO: 22214 - DNA, 381 bp, Glycine max
  Clone ID: LIB3050-023-Q1-K1-C3
aggcgttagtacacgtccgagaggacagctgtaggtggtagtacactagatccacacgcatgatgagcttctcaaatacagccgtgctcactggaacgttccaatcatactgctcattgatcaccacgtagcaaagcacctagtaagcgtctaatacccagatctgaccttgagtatcaaccaactactacctgtgtgtacttaccacatagccatggctcggttaccgttgctattcatgggatgatgaaatagccagtgcattctcgaactctgatcacaaagctgacgatacagagcctgagacgaaggattgctaaacacatgaagactgatatgcgcttgcaaatgcactctatgactggattgcatgaagctgat

SEQ ID NO: 22215 - DNA, 313 bp, Glycine max
  Clone ID: LIB3050-023-Q1-K1-C4
ggacaacataaccctcttctcaataataacggttatgtcattcttgttatcagtacctgtaactttgttgatggagggtgtcaaatttacccctgcttacctgcaatctgctggattaaatgttaacgaagtgtacatcagatcacttcttgctgcactatgtttccatgcatatcagcaagtttcttatatgatactgcagaaggtgtcacctgttacccactctgtaggaaattgtgtgaaaagggttgtgatcatcgtgagctctgtcatcttctttcaaacaccagtatcaccaattaacgcactgggg

SEQ ID NO: 22216 - DNA, 384 bp, Glycine max
  Clone ID: LIB3050-023-Q1-K1-C5
gaggttagcaaccagcgatctgggacttttctttctcccccacaccacacccagattcaaaaactcgctctgctctgctctgcaattccccttccgtttcgtttcgatctcaaaacatgttcttcttcgattggttctatggcattctagcttccctcggtctctggcagaaagaagccaaaattctcttccttggtctcgataatgcagggaagaccacacttcttcacatgctcaaagacgagagattagttcagcaccagccgacccaacaccccacttcggaggaattgagcattgggaagatcaagtttaaggcttttgatttggggggtcatcaagttgcccgcagagtctggaaagactattacgcgaaggtggatg

SEQ ID NO: 22217 - DNA, 366 bp, Glycine max
  Clone ID: LIB3050-023-Q1-K1-C6
gaaaaagaaacacttaaaaggagaagaaaataggaaggaaaaatgcattgaatttttcccacaagctaaaattaacttgtatgataatggaatgttggtagacacaataactagaaatattgtcaccactctaaactgttttgggtacaatatattggtgaaggttgtgaaatgttagaaaaccaacccatgtgtaggaaataaggaaacttttagtgagtggtgacacatttgaactagaatttgggtattttgtatccggtccagaaaatcgttttgtttaaagacaataacaacacattaacttcgtgggattgcaaggaaaaaaatgttgggagaaattgtagttgtattggattggtaaaa

SEQ ID NO: 22218 - DNA, 381 bp, Glycine max
  Clone ID: LIB3050-023-Q1-K1-C7
ggaaaaacgaagcatctcatgtgtcaacaccaccatcctagttaacgcagcaacattattgctcaaacagcatacataaaaagcctatgcgcaaagtccaaacttgctcctaacatatacttgccggaattctatcatgaagtttctatttggaagagtgaagtcttcgttgtcataaagtgcaaccccatgtcctcattctacatattcgattatatttcctttcttccttgcctcgtttcattctttgcacaagggagaaaaggggtcaagaattttgtacaaaccttgggagtcgtgagatcttatctgttatagatgatgtttttgtaccacgagaaggtttcaactgaaagagaaatatgatagtggaatatcaca

SEQ ID NO: 22219 - DNA, 376 bp, Glycine max
  Clone ID: LIB3050-023-Q1-K1-C8
gctctctcactctttctccgagaacaaaaaaaaaaaaaaaaatccgcgattcgctcttctcttggaaaagtgaaaaccagaagtacgaacgaaagagaagagcgatttagaagtgagagaagatggggttgtcgttcacgaagctgttcagcaggttgtttgcgaagaaggaaatgaggattctgatggtaggtctcgatgctgctggtaagacaaccatcttgtacaagctcaagcttggagaaatcgtcaccactatccccaccatcggatttaatgttgagactgtggagtacaagaacatcagcttcactgtgtgggatgttggtggtcaggacaagatccgtccactgtggaggcattatttccagaacac

SEQ ID NO: 22220 - DNA, 401 bp, Glycine max
  unsure (1)..(401): unsure at all n locations
  Clone ID: LIB3050-023-Q1-K1-C9
ggagctgaaggcaaaaaggacacaccgtttcatagtttttaagattgaggagcagcagaagcaggtcattgtggagaagcttggtgagcctgcccagggctatgaagatttcactgccagccttcctgctgacgagtgccgttatgctgtttatgattttgagtatctgactgaagggaatgtccctaaaagcagaatttttttcattgcgtggtcccctgacacatcaagggtgaggagcaagatgatttatgcaagctccaaagacagattcaagagggagctggatggaattcaagtagagttgcaagcaactgatcctactgagatgggtcttgatgtgttcaaaagccgtgccaactaanatgattatataaaatagtaggctttctggtgggagc

SEQ ID NO: 22221 - DNA, 391 bp, Glycine max
  Clone ID: LIB3050-023-Q1-K1-D1
gagaccaaacaatactcagaacctgattaaggagagtatggcacagtttagtggcaaaactttggtgcagtggttggtagcaacactgctgattgccttgttgggtggtgcacaagctgttgtgttatgtaacatcgactcaagtcaactaaacttgtgtcgtgctgcagttactggtcaaaacccttcaccaccagatgagaaatgttgtgcagttattcgccaagccaatttaccttgcctctgcagatacaagtctattcttcctttaattggaataaaacccgaaaaggctttggccttgcctggtaaatgtggtctccaatcccctcctaattgttgagtgtagtgaagcaattaatgaaggtcttgttcattacaagcacttaat

SEQ ID NO: 22222 - DNA, 411 bp, Glycine max
  Clone ID: LIB3050-023-Q1-K1-D10
ggaaactggaatggtggaggatctgaaaaagatgccgctgccttgttttctccaacttcaaggggtgctgttagtgttagtgttagtgctgccaagtctctcactctcactgcaacagactgcaccaaccaaccaactgctttgggtgcttctgttctcaaggaaactgttccacactctccaaaaccattacatgagaataggccccagatttctgctccagctgcaaaggcgcaagttgtgggatggccaccaatccgttcattcaggaagaactcaatggcttctcagcctcagaagaatgatgctgctgctgatgcagaagccaagtctggatgcctttatgttaaagtcagcatggaaggcgccccatatttgaggaaagtggatctgaatagttttaccacttac

SEQ ID NO: 22223 - DNA, 388 bp, Glycine max
  Clone ID: LIB3050-023-Q1-K1-D11
ggagacacaaactcacacactttgtactctccgtccttccttcttcgatccagatctctctccttctccctcaaatggcttcccttctgcaatgttccatgcccctcgtctctctttccaatcgagctctggtacccggtaccaggatctccaacccaagttcagtttccctttcaattaagggaagaagtttcccatccgttacattgcagcccagagggcgtcggtttcagcttagatgtgcggcaaaaccggagacagtgaagaaggtgtgtgacatagtcaagaagcaattggcactgccagatgaatcagctgttactggagagtctaaatttgctgcgcttggagctgattctcttgacacggttgagattgtgatgggact

SEQ ID NO: 22224 - DNA, 390 bp, Glycine max
  Clone ID: LIB3050-023-Q1-K1-D12
ggttagatgtgttgagatccactgctgcagaatccaatttgtgacactaaatctaagttactatgactgcgcagacccaagaggagcttcttgcgcaacacctcgaacagcaaaagatccatgatgatgaacctgtcgtcgaggatgatgatgacgaggaagtggatgatgatgatgacgatgaggatgatgaccatgacgaaggactggaaggtgatgcatctggtaggtcgaagcagaccagaagtgaaaagaagagtcgcaaggcaatgcttaaacttggaatgaaacctgtcacaggtgtcagtcgagtgacagtcaagaagagcaagaatatcctgttcgtaatctcaaaaccagacgttttcaagagtccaacatctgacacgt

SEQ ID NO: 22225 - DNA, 366 bp, Glycine max
  Clone ID: LIB3050-023-Q1-K1-D2
gaatcccatttcaacctctctttcttttcttctcgcagagcgaaatcccaatcccacacaaatggcatgctcagccacctctgcttctctcttctccgcaaaccccacacctctcttctctcccaaatcctccctctccctccctaacaactctctccacctcaaccctctccccacgcgcccttctctctccctcacgcgcccctcgcacactcgccgctccttcgtcgtcaaagccttctccagcgagcttccgctagttggaaacaccgcaccggatttcgaagcagaggctgtgtttgaccaggagtttatcaacgtgaaactatctgattacgttgggaaagaaatatgttgtgctcttct

SEQ ID NO: 22226 - DNA, 387 bp, Glycine max
  Clone ID: LIB3050-023-Q1-K1-D3
gacaaaacaagtgtttcgaatagattatcctaagtctttgggaatagtgctgcaatggcttcaagtcaagaggaggtgacccttttgggagctactggaagcccatttgtgtgcagggttcatattgccctcaagttgaagggagttcaatacaaatatgtcgaagaaaatttgaggaacaagagtgaactgcttctcaaatccaacccagttcacaagaaggttccagtgtttattcacaatgagaagcccatagcagagtctcttgtgattgttgaatacattgatgagacatggaagaacaaccccatcttgccttctgatccttaccaaagagccttggctcgtttctggtccaaattcattgatgataaggtttttggtgct

SEQ ID NO: 22227 - DNA, 380 bp, Glycine max
  unsure (1)..(380): unsure at all n locations
  Clone ID: LIB3050-023-Q1-K1-D4
gatatttgaaagcacatccaaggagcagttgagcagagtaggctcataagaggctcatctcactccataccaagaatgtgtatactttatttcccttggggaaatatattacaatttatacccagttgtattctggaagtttggatttcatacaattccaatcatgtggatgttgcatcaataatttgggttgattaatttcaaaaaaaataattaactcaaacacaaacataaaataatcgtaagggatttgtctagcagcacaatatagagtctcagattttacatgcaagttcgagattctcccttgtcttcttgcagtgagataaatataagtgcatttgtaagtgttttttagtcacataaaanaataatatttt

SEQ ID NO: 22228 - DNA, 347 bp, Glycine max
  Clone ID: LIB3050-023-Q1-K1-D5
ggcatcacaaactatatactaatctccatctaatagtgttaatttgtctttctctatctctatcggtcatgggtgcttttgcttttgatgaggaaaactcctccaccgtggctccggcaacactctacaaagctctgacaaaagatgctgacactatcatcccaaagattattggggccatccaaactattgaaatcgttgaaggaaatggaggacccggaaccgtcaagaagataacagctagtgaaggtgaccaaaccagtttcgtgctgcaaaaagtggatgcaattgacgaggctaacttggtatacgactacagcatagtgggagggacggggttgcatgaa

SEQ ID NO: 22229 - DNA, 406 bp, Glycine max
  Clone ID: LIB3050-023-Q1-K1-D6
ggaccaaacacacttaagctcatatatgacagaggcctcattggaactactcatgactggtgtgaagcattttcgacatacccccggacatacgatttacttcatgcatggactgtcctctctgacatagaacagaaaggttgcagtccagaggatctattaattgagatggatcgcatgcttcgacctactggtttcgtgatcatccgagataaacagccagtgattgattttataaagaagtacctaagtgctttgcactgggaagcaattgattccagttctgactctgtccaagatggtgacgaagttgtttttatcatccagaagaaaatgtggctgactagtgaaagctttagggacacagaataggataaccattgcattttcattttcttataaatta

SEQ ID NO: 22230 - DNA, 393 bp, Glycine max
  Clone ID: LIB3050-023-Q1-K1-D7
tgggaggttctcgtgaaaacttcttctttgctggaataggcaaagtgcggtttcgtaagcctgtgatagctggggacaccttagttatgagaatgacacttactaagccgcataagcgatttggaatagcaaagatggaagggaaggcatatgttggaggtgaagttgtgtgtgagggtgaatttttgatggcaatggggagtgaataagtagacacattccttccaactggaatagagttgattttctagcatcttttaatttaatgcttctgccttttaatgcagaacatcgtgaacatttaatttaatgtatgcattttcaatgaaatttatctaagcattctgtgctatttctatatggcttcgctttggctattcagtgcgaaaatta

SEQ ID NO: 22231 - DNA, 376 bp, Glycine max
  Clone ID: LIB3050-023-Q1-K1-D8
gcaacaacttaaaataaagccttcttcaaaatcttatggctctcactcttatccaaggaaggaccaagcccatggaattttgggggctgcaccttcaaaacccaaggaagataagggtaagaccatagataaatacacccctaagactagttcccaagaaaggactagcaatattgaatgcttcaaatgtcttaggtgaggtcacattgcctctcaatgccccataaagaaaaccatgatcatgaggggtcaagatatttacagtagtcaagaggagactacttcttcccattcctctagtggaagtgaagatgaagtaaggggtgaagagtctagtgaggaagtctacccccatgaagaaggtgacctcttaatg

SEQ ID NO: 22232 - DNA, 408 bp, Glycine max
  Clone ID: LIB3050-023-Q1-K1-D9
cgaggggttgctcgaaggttggatgctcggtttcaagccccttcccgttgaagcagaaaaggttgttgatccccagctagaaactgtaaataaaaaccttgaagcttactatgatgcatgggacaaatacataaagtcttggatagtcatcaagattaaggacccaaactgtgtcttccaatggcgcttacaggctgagattgccatgagggaggcacgcaaccctggaatgacagatgatgaggtgagagattctgtttcacgctacctaccggcatactatgcataccttcctacactttactcggagggaccaaatggatcagatcctcaacatctgctaaccattgaaatacatgaagggagaaaccccatccttgctacctatgttaattgtatgatagagca

SEQ ID NO: 22233 - DNA, 240 bp, Glycine max
  Clone ID: LIB3050-023-Q1-K1-E1
gtacaccatgccgaacaactatcctatctcggtcagaccgtaccggtctgttaatacatggattcaattctcatccacatgattcgggatacgcttcatttatgttggcccgaaccggaggctgagcgtaatgtttcgccccctgcttcacaattcttaagcagacttccttgtacatacaccgttcattgcactggaacgctttctgggacactctgaactattcagttccaatgctat

SEQ ID NO: 22234 - DNA, 350 bp, Glycine max
  Clone ID: LIB3050-023-Q1-K1-E10
gaccaccgaaggggaactgaaacaacaaatattagacatcgatcggttaggttacttgctcgaattgcctcgaatcgctaaattggaattagattaggtaaaccgcaacgagtaatctatcgcctcgaactggatagctctcaggcaagaggttcagacgctgattacagcaacaagcggttggtgctcacactgcatgactcactacactccggcgactcatacgccgtcgtaaacatcgtcgccggcgacctcaagtggtggatacatggtccgacctcacaccagtgtctgatgggcatgctcaccgtcaactgcgctgtcgacaactgcttccacttccttacgga

SEQ ID NO: 22235 - DNA, 406 bp, Glycine max
  Clone ID: LIB3050-023-Q1-K1-E11
ggctacacacacattccacttagttaaacatggagaaatcaggctctaacagtcctaaatctgctttgaagtttgtgaagaccacatctcagtctgcagctcaatggagcagtactaattcaagaggaacgacaaaagatgtactcaaagacaagttctatgacaagactaaagcttcacgaaggtctccacccaaagaaagttacatggcttcaagaaggtctccacccaaagaaagtaacatggctccaccaaggtctccaccaaaagaaaatactaagccacaagaattcaaactccacacccaagaaagagctgtcaagcgtgcaatgttcaattatgctgtgacaacaaaattctatatcatggagctgcaaaagaaacaaggggagaagctgcaaaagtt

SEQ ID NO: 22236 - DNA, 70 bp, Glycine max
  Clone ID: LIB3050-023-Q1-K1-E12
gggtacggctgaagagacgacgagggtacgtggagaagacaagagggacggctggagaagacaagaaggt

SEQ ID NO: 22237 - DNA, 406 bp, Glycine max
  Clone ID: LIB3050-023-Q1-K1-E2
caggcaaaagttgatgaagcataccgtgataggaaaagatggctaaaaatgtccatcctaagcactgcagggagtggaaaattcagcagtgaccggacaattgctcaatatgccaaggaaatttggaacatagaagagtgccgcgtgccataatttctgctggatgtgtgtctcttgcactcaagttactgtatatagcaccaacagaatgataagtaaaaagaagtgaataataaaaattaaaaataatttctgaaaagagaaagtgaaggagattttagctttctataatatttagcttgtcatataagatttcagctgtattcttatattaattgctttctcaaccatctgcttctggcagatagagctttctatatgcaaataaatctatagtttcatatct

SEQ ID NO: 22238 - DNA, 360 bp, Glycine max
  unsure (1)..(360): unsure at all n locations
  Clone ID: LIB3050-023-Q1-K1-E3
gacgacagagagagaaaaatggaagaagacctggacggcgtcgctccgtgctcctccctcgccgtcgaggctatgattcgtgtcggagcggccggtgcaatctggggcttgtgtgctggtccttacgacgctcgtcaacagggtcttagaggctctgctaaagcttcttttgtggcaaagtcggttggcaggtttgggactcgatgcgggttcgtagctggcgttttcagtattacgcgatgcggggttcagaggtaccgagggcggaatgattgggtcaatggtttgattggnggtgctgtagcaggtgcagctgctgctgctgctgctgggacacgaagttgtcacaggtgataggga

SEQ ID NO: 22239 - DNA, 355 bp, Glycine max
  Clone ID: LIB3050-023-Q1-K1-E5
gtctgctcttatcgcagaatgattcagatcgaagaatgagcgcgtcatgaagattgtctgaagagggtcacgggatctgcggtcacagcgtatatgatttgaacgtacatttatcgagtggtgaagagtgcgagttgtaggtagggtgggatttgctgttatatctttcaatgcctgtcacattatgggatgcatgcttgcttagtccgttaagatgcatctgcctgtgatcgtgcttaccgtggatgcacctgaattatatactgccttgattgatctgctactagatgctctgtgaaccgacctgttattggaatgaagcgtgctgatggccttggatgcggctgccaacaat

SEQ ID NO: 22240 - DNA, 368 bp, Glycine max
  Clone ID: LIB3050-023-Q1-K1-E6
ggagacatcgaagaacagcactctggttgccgtgccaccatcttctccaaagttatcatattcgaagagaaaaaaggagtgactgtccaggttgggcaattagggacggaaaaggagaaacacgaaaatgtttttccacatagtactggagcgaaatatgcagcttcatccacgctactttggtcgtaaccttcgcgataatctcgtttccaagcttatgtaagacgtggaaggcacttgcagtggccgacatggatttgtggtggcagttacagggatagagaacatagggaaagggctaattcgtgatggaacagggtttgtgacatttccagttaagtaccaatgtgttgtcttcagaccgttta

SEQ ID NO: 22241 - DNA, 331 bp, Glycine max
  Clone ID: LIB3050-023-Q1-K1-E7
gaagtcacactcatagcacattaatcaaacatggctagggttagtgctttgtttcactctttgctcttgatttcttcccttgtattggcttctcaaatccatgtttcctctgggaaactagtccctggactatcatggaattactatttgttgacatgtcccaagcttgagaggattataaggaagcatcttgaggatgtcttcgagaaggacagtggagtagctcctggcatacttcgactcttcttccatgactgctttcctaatggatgcgatgcgtctatattgttgaatggagacggtgacgagaagcaacaccgtgctaactttg

SEQ ID NO: 22242 - DNA, 387 bp, Glycine max
  Clone ID: LIB3050-023-Q1-K1-E8
gaagtcacactcatagcagattaatcaaacatggctagggttagtgctttgtttcactctttgctcttgatttcttcccttgtattggcttctcaaatccatgtttcctctgggaaactagtccctggactatcatggaattactatttgttgacatgtcccaagcttgagaggattataaggaagcatcttgaggatgtcttcgagaaggacagtggagtagctcctggcatacttcgactcttcttccatgactgctttcctaatggatgcgatgcgtctatattgttgaatggagactgtgacgagaagcaacaccgtgctaactttggtttaaggcaagaggccattgacgccattgaaaaccttcaggttctcatttacaag

SEQ ID NO: 22243 - DNA, 367 bp, Glycine max
  Clone ID: LIB3050-023-Q1-K1-F1
gcactcatacatccgcgatcatacatcgttagggctggttacttgctcgaatttcctcgaatcgattaatctgtatttgactagttaaaccgtaacgcggaatctcttttctcgaactggctaactctgaggcaagtggttctgacgctgattccagcaacaagcggctggtgctcgcactgtatgacgccctaaactgcggcgactccgacgccgtcgtcaagatcgtctgcgccgacctcgagtggcggttccatggtccgtcctcacaccagtttttgatgggcatgctcaccggcgaatccgctgtcgacaactccttccgctttctttcgcagtccatcgccgccttctgctccaccgtgat

SEQ ID NO: 22244 - DNA, 380 bp, Glycine max
  unsure (1)..(380): unsure at all n locations
  Clone ID: LIB3050-023-Q1-K1-F10
aggcgtgcagagacgagtgagggcacaccgaacaagaaagcatacgctcggttgtgagaagtacctcggcaggcgtgatcgagagggatgcataacagttggcatgtgggagaagagagngaaatacgctattgaggagcattggaagcacgtggctcctagctaactcactgggatacttgattggagaccgcattgtgaagatcatcgtggactatgccagatctggacatgatgatccgacccatgacgcgattccatctgtgcatggtatgtaagagctgcgaacatggatcaagagctgactcatagaattagaataagcgctgagacagtgcagatggcggtggcgagtatgatgctaatagtgtatatgttaa

SEQ ID NO: 22245 - DNA, 400 bp, Glycine max
  Clone ID: LIB3050-023-Q1-K1-F11
ggaggagaagactgaaagaagaagaggaagacaattgagggaggatgtggctcgagattatcttcggtttggtcatttacagattgttccggcgcttcttctacgacgacgacgttttggacatcgaaggatcggattcttctgctcttttctccgtcgcggataggtctctgtctttcccctatttttcctttccgattatggcactaatcgatttcaatttcttttcaggcttaaaatactctacggagcaaatgtgtatgtgcgtcttcggattcccgatgccgatactgcttctcgacagagcattgatatggatcttctcactaaacaagagctatgggtgatatctgtgaaaaaaacttcttggaattttgacaattggtggcgatggttgttg

SEQ ID NO: 22246 - DNA, 401 bp, Glycine max
  Clone ID: LIB3050-023-Q1-K1-F12
gaaggaaggaagaaataaaccgaatgagagcattaacctcttcttcttccactttcattccaaagcgttattccttcttcttcttcctctccattctcttcgctcttcgatcctcgtccgggggctgctccgaataccaccaccaccacgcgccgatggccacgataggaggcttacgcgactcccaaggctctcagaacagcgtccaaaccgaggccctcgctcggttcgccgtcgatgaacacaacaagaagcagaattcacttctggagttttctagggtggtgaggacacaggaacaggttgttgcgggaaccctgcatcaccttactctcgaggctattgaggcaggtgagaagaagctctatgaagccaaggtgtgggtgaaaccatggttgaat

SEQ ID NO: 22247 - DNA, 388 bp, Glycine max
  Clone ID: LIB3050-023-Q1-K1-F2
ggatgatagtgatgaagatcaaagactcccccaccacaaagaacccaaggagtttgtctcgttggaccaacttgctgaacttggagtccttagctggaaactagatgctgataaccatgaaaatgatccagagctgaagaagattcgtgaagagcgtggttacacctacatggatgtttgtgaggtctgcccagaaaagttgccaaattatgaacagaaaatcaaaagcttctttgaagagcatcttcacactgatgaggagatccgcttttgtgctgctggaagtggctattttgatgttagggatcgcaatgaagcttggattcgtgtgttggtcaagaaaggaggaatgatcatcttacctgccggaatttatcatcgctttacg

SEQ ID NO: 22248 - DNA, 420 bp, Glycine max
  Clone ID: LIB3050-023-Q1-K1-F3
cagaaccaaacacattgttacgtgttttgtgctatagaaatgatgaatcagcttctaagtttctgaagaaggcatatgatctgcctaagaaactttaacaaccttgagaaccagttaatggaatggcaaactgtgatgtactgggagtgggagatgcattctgtttaatttgtctggttctgctggtatatagtacaacgttgtccagcaggtaatttatgtgaattgttgagcaagatttacgtcaggatgcgaccatcctgtaagacatcgggaatattggccagaggcttagtgctaccgccgtgttctccaagtccgaagttaggcagcataaatcttggccatgattatggctgacttatttgcgaaggtagttgaatattctttctgattcattaattattggatgattagaga

SEQ ID NO: 22249 - DNA, 340 bp, Glycine max
  Clone ID: LIB3050-023-Q1-K1-F4
tgcaggcgaacaaaacaagtgttccgaatagattatcctaagtctttgggaatagtgctgcaatggcttcaagtcaagatgaggtgacccttttgggagctactggaagcccatttgtgtgcaaggttcatattgccctcaagttgaacggagttcaatacatatatgtactaagaaaatttgaggaacaagagtgaactgcttctcaaatgcatcccagttcacaagaaggttccagtgtttattcacattgagaagcccatatcagagtctctggtgattgccgaatacattgatgagacatggaagaacaaccccatctagccttctgatccttacc

SEQ ID NO: 22250 - DNA, 378 bp, Glycine max
  unsure (1)..(378): unsure at all n locations
  Clone ID: LIB3050-023-Q1-K1-F5
gaagtgaaaccatcaatcccctgtatatataaccactcttcctctcctccaaattaaaacacttatcatggatgttaagaaaggtgggtctgtagtacaagcacaagtgaagttgcagaagcataacgaaaaggagatgggcatgagaaaaggtccatgggcggttgaggaggacaccattctggtcaattacatcgccacacacggtgaaggccactggaattccgtggcacgatgtgcaggcatgcatgcatcttaattataatttaatttctgcatgtgccaagtaataatggtatatatgttaattatgagatttatcaattacaggtctaaagaggagtgngaagagttgcagattaaggtggctaaactact

SEQ ID NO: 22251 - DNA, 387 bp, Glycine max
  Clone ID: LIB3050-023-Q1-K1-F6
gacagacaaacaaacaatttaccagctatacttgttccttttgaaggttagaagtgctacaatacaaacaatggcagctactcaggaagatgtgaagcttttgggtattgtgggaagcccatttgtgtgcagggtccagattgcccttaagttgaagggagttgaatacaaatttttggaagaaaatttgggcaacaagagtgatttgcttctcaaatacaaccctgttcacaagaaggttccagtgtttgttcacaatgagcagcccatagcagagtctcttgtgattgttgaatacattgatgagacatggaagaacaaccccatcttaccttctgatccttaccaaagagccttggctcgtttctggtccaaattcattgatga

SEQ ID NO: 22252 - DNA, 384 bp, Glycine max
  Clone ID: LIB3050-023-Q1-K1-F7
tatgaggggttcacacaagcaaacgtgataccagctattcgcggtccttatgaaggctagaagtgctacactacagacaacggctgctactgatgatgatatgaagctttcgggtattgtgggaagcccatttgtgtgcaagcttcacattaggcttaagttcaagggagttgaatacagatctgttgaagaagattcgagccacatgagtgacatcggtcctcaaatacgaacgctgatcacaagaacgttccactatgtgctcacattgatccatccatagcacagtctcttgtgagagttgcatacattgatgagacatggtagaacatccgcatcttacctactgatccttaccaagaagccttggatcgtttctggttc

SEQ ID NO: 22253 - DNA, 377 bp, Glycine max
  Clone ID: LIB3050-023-Q1-K1-F8
cgcgtacgcacacgaccgagaggacgactgatagggaacgatagcgtgcgagcagcgccactcgcgtattgatgtatattggtatcagacatcacattgtagatagagttgaccacaaatctgatatgaggcacacgctgccacacactcatgactatgaccttcttcgtacgcgacgcagcgatacgcacagaggcaattaacctatatactgattacgagagtaagctgctgatcaaacaccagcccatgcaactgacgtctacgtgcaaccgcatgtgttgaagtcaactgtactatgagattgctgaggtacacaaagtgccatgactactatagatgctgctatcagatatgcacggatcataatatgtcta

SEQ ID NO: 22254 - DNA, 403 bp, Glycine max
  Clone ID: LIB3050-023-Q1-K1-F9
aaaaaaccaccgaaggggccaaacaacaaccttttatgggttttttttttaaatcaagtttgggtccttagccatttcctaccggggggaaaaatattaaattgccaaattcaatttgcacttgatggatatgggagaaaggaaaaaaccctgtaggacaataaataacccgttccaattacaatgtgaccccggcgttacaactttccgtcgactttctggaaccctcgcctcaatccaagctcgccatcgactttgattgcgagggcgttgacctgtgtcgcaaaggcactctctgcgtaatgcagcttgcattttcggatgctgtgtacttggttgatgcgattgaagggggagaggagcttagcatagcgtgtaagcttgcacttgagtctaattacat

SEQ ID NO: 22255 - DNA, 389 bp, Glycine max
  Clone ID: LIB3050-023-Q1-K1-G10
gacaggacacttgacagcaatgagtgatgtgtacagttttggagtcgtgctcttggagcttctaacaggacgaaggtcagtggacaaagggcgcccacaaagagaacagaacctcgtggaatgggccaggtctgctttgaatgattcccggaaacttagcagaataatggatccaaggcttgagggtcagtattctgaggttggggcaagaaaagcagctgcattggcttaccaatgccttagccacaggccaaggagtagacccttgatgagcactgtggttaatgttctcgagccacttcaggactttgatgatgttccaattggaccctttgtttacactgttccagctgaacaacaacaatacaatgaagtcgcaaaagagagtg

SEQ ID NO: 22256 - DNA, 387 bp, Glycine max
  Clone ID: LIB3050-023-Q1-K1-G11
catggaagtgaagaaagaactcttgctgaatttacacgaagcttctacagatccagctgaggcctgggaaggggtacagccggatcagcttttattgcagttggcatcagcctgggaaattgatctacaacagcatgacaaatagcttgtagagaacaaattatgctgctattgaatcttgaattggatggtattgagtgcaatttgaaatataatgctgttcatgtttttggcctccacacaacaactacattgccacaaatttatgctcctttttctcctgtatcttggtgaacttaggctaatcctataccggtcagagcaatgttcgaccgttgatgtcattgttttttttaccaaatgtctacagatattgtcattactaag

SEQ ID NO: 22257 - DNA, 385 bp, Glycine max
  Clone ID: LIB3050-023-Q1-K1-G12
ggctgagcaaaccttcatcatgatcaagcctgatggcgtccaaagaggccttattggcgagatcattagcagatttgagaagaaaggtttctacttgaaaggtttgaaacttgttactgtggaccgtctttttgctgagaagcactatgctgatttgtctgccaagcctttctttagtggtttggtggattacattatctctggccctgttgttgccatgacctgggagggcaagaatgttgttacaactggccgaaagattatcggagccacaaacccagctcaatctgagcctggaactatccgtggtgactttgccattgacattggaaggaatgttatccatggaagtgatgcagttgaaagtgctaacacggaaattgca

SEQ ID NO: 22258 - DNA, 361 bp, Glycine max
  Clone ID: LIB3050-023-Q1-K1-G2
ggaggaggagatggagacgatgatgatgatgagctgcgtttcgatttcgagttcagtgacaagaggcgctattagcgtgggttcctcttcatctttgtgtttcggcacacccaagttgttcaattcagcaagggtagcggtgaatggtcggcgaagaaacaaaggtttgagttgcaacgccatgttcggtctgggggtgcccgaactggtcgttattgccggcgtggccgccctggtttttgggcccaagaaattgcctgaagtcggccgtagcatcggcaagactgtaaagagcttccaacaggctgcaaaggagtttgagtcggagcttaagaaggaacctgattccacccaaggggac

SEQ ID NO: 22259 - DNA, 363 bp, Glycine max
  Clone ID: LIB3050-023-Q1-K1-G3
gtgctatatgcattctatcagcaacggggacaatttcaaatgttacacttcgtcaaccgtcttcttgtggtggtactttaacatatgagggacggtttgagattctttccttgtctggttcctttatgccaattaagaatggagttaccagaagcagatctggagggatgagtgtctctttggctggtccagatggtcgagtaatggggggcggacttgctggtttgttggtagctgctggtccagtgcaggttgtggtggccagttttcttcctggtcaccagttggagcataaaaccaagaagcaaagggtggggcatgtatcaactattagcccttcacctgttaatcttatcactagtg

SEQ ID NO: 22260 - DNA, 344 bp, Glycine max
  Clone ID: LIB3050-023-Q1-K1-G4
gagggtggagaggcatgaacttttgggaaagtggaggtcaagactttccatggctggatttaaacagtgtcaattgagttcttcagtgatggttgctatacaaaatctcctaaaggagttcagtcaaaattatagacttgaacatagagatggtgctctttatcttggttggatgaacagacatatggccacctcttctgcttggaggtgaaactcactgattcgagagtttgcctcctttttgacctttaattgagcataattcaccatatatccgtagtagtctctccataggacttgagatttacctctgttctaaaatgctttctgtagaatctcaaagc

SEQ ID NO: 22261 - DNA, 353 bp, Glycine max
  Clone ID: LIB3050-023-Q1-K1-G5
gacactaaacaagttaaaagaagagcatcgctgaactaacaaagcaaccctatgtcgaaggtggtttgtgtcaccggagccagcggcgccatcggatcatgggtggtcctactcctcctccagcgtggttacaccgtccatgccaccgtccaagatatcaaggatgaaaatgagacgaaacatttggaggaaatggaaggagcaaagagtcatctccatttttttgaaatggatcttcttgacatcgactccattgccgctgccataaagggttgttccggcgtaatccaccttgcatgtcctaacatcattggtcaagtcgaagatcccgagaaacagatattggaaccggc

SEQ ID NO: 22262 - DNA, 401 bp, Glycine max
  Clone ID: LIB3050-023-Q1-K1-G6
tgggaggttctcgtgaaaacttcttctttgctggaataggcaaagtgcggtttcgtaagcctgtgatagctggggacaccttagttatgagaatgacacttactaagccgcaaaagcgatttggaatagcaaagatggaagggaaggcatatgttggaggtgaagttgtgtgtgagggtgaatttttgatggcaatggggagtgaataagtagacacattccttccaactggaatagagttgattttctagcatcttttaatttaatgcttctgccttttaatgcagaacatcgtgaacatttaatttaatgtatgcattttcaatgaaatttatctaagcattctgttctatttctatatggcttcgctttggctattcagtgccaaaattatctttgat

SEQ ID NO: 22263 - DNA, 350 bp, Glycine max
  Clone ID: LIB3050-023-Q1-K1-G8
ggttacagtgggagtatcagctctaacttggagactacaaaagcagagagatctgtgtggctgatgaagtgccctttggtggtggctaagtcatggcagacccatcctccttctcaacctctcgccaaggttgtgctctcccttgatcctctccaccctgaagaagacgatccctctgctgtccagtttacaatggagatggcaggcacagaagctgtgaatatgtccaaaacttattcattgaacatgtttaaagacttcgttcctatgtgtgtcttctctgagactagccaatgtggcaaggttgcaatggaagggaaagtagaacataagtttgatatgaagcccca

SEQ ID NO: 22264 - DNA, 404 bp, Glycine max
  Clone ID: LIB3050-023-Q1-K1-G9
gagacatatctctaattaacactaataacagcaaactaaaggtgaagtttgccagaaacaagatgggaaggaaccattttcagcagcaacactgtgctgatgggagcatgtggatggagagtcagggtcagcaacagagctatgccttccaagaagagtcttggagccctgataacaactatggccacaaccacaagcaattcccaggcatgcacatgaacatgaacaacaacaacaacaacaaaaggcttggtgcttttgctgctgtggactctgacttctcaatgcaaaaacatcatcatgggcatggcaacggcgtaggagccatgcagatgaacatgaacaggcatggtggcaagttaggaggcatgtttcaagaaggcatgcacagtgaccaccatggt

SEQ ID NO: 22265 - DNA, 384 bp, Glycine max
  Clone ID: LIB3050-023-Q1-K1-H1
gatggctcaagtgggttctctatcttccgaaatggagacactgaatcatgtcctagccctagtggaggcattccgagcatttgacgcggacaacgatggccgaatcacgcaggcagagctaggaggaatcttggggtcactcgggtacaaccctagcgagcaagaagttagggcaatgattgaacacggcggcaagaacaaagacgggttgttgagcatccacgagttcttggagatgaacaccaaggatttggagggtggaaatctcgccaacaccctcagcaccgcgtttgaggctttggatgaagacgggaacgagattttaaccggggaagagcttcatgaggtcatgcaaaacttgggtttggacttgtctcttgagaa

SEQ ID NO: 22266 - DNA, 383 bp, Glycine max
  Clone ID: LIB3050-023-Q1-K1-H10
ggcagcgcttgatttgaggccaggcaagccccactcaaccaccacacctctcctcgttcacgctacccctttctgctcttcttctacctttcaagttttaaaagtataaagatggcagagacattcctatttacctcagagtcggtgaacgagggacaccctgacaagctctgcgaccaaatctccgatgctgtcctcgacgcttgcctcgagcaggacccagacagcaaagttgcctgcgaaacatgcaccaaaaccaacttggtcatggtcttcggagaaatcacgaccaaggccaacgttgactacgagaagatagtgcgtgacacctgcaggaacatcggcttcgtctcaaatgatgtgggactgggatgccgacaact

SEQ ID NO: 22267 - DNA, 398 bp, Glycine max
  Clone ID: LIB3050-023-Q1-K1-H11
gagagtgagaaagagaaagagagaattcgtaaaccctaatttcggaaagatcggcgatgactgcctccaaggatcgcgagaacttcgtctacatcgccaaactcgccgagcaggccgagcgttacgaagagatggtggaatcaatgaagaacgttgcgaatctcgacgttgaactgacggtggaggagcggaatttgctttctgttgggtacaagaatgtgattggtgctcgcagagcgtcctggaggatcctgtcttccattgagcagaaggaagaaacaaaagggaacgagttgaatgcgaagcggattaaggagtacagacagaaggttgaattggagctatcgaacatctgtaatgatgttatgagagtgattgatgagcaccttatcccttcg

SEQ ID NO: 22268 - DNA, 341 bp, Glycine max
  Clone ID: LIB3050-023-Q1-K1-H12
gacaaagcgattactctatttcccctgggaggcaagctgagcaccccagatcaccaagaggtcctcccagggagaaggatggtgatcaaaagcgtaggtcttattctcctgcttatggcaatggtatcgaacagaatcaaagcaatggatatgctgagaaatttatgtacaagtctgaggctgatcgtagccagtggaagtcatcgagatcaccccctggatctagatcaagatctgctgaattgtcaccaaggcgtggaagatgaggttgcaggtagctggcaatgtgctgctggggcttctgtacatttcctgcaacttatcgcaacatttgcaaaatc

SEQ ID NO: 22269 - DNA, 402 bp, Glycine max
  Clone ID: LIB3050-023-Q1-K1-H2
gttcaatttattttgtcctaattaatctactcctctcttggaagagtttttcccctcaaaaggttaaagccttttcatggagattgatgatcgacaaattgccctctaaacttggtctctcaaaagacaagttttttccgacctcggggatacactttgctccttttgtcacaatcaacaagaatatgccaatcatttgttctttaaatgtttagtaaattctcaggcacggtatctgatatatgtttggtctggatttcatagggttatttctttttctagagaggctcactttcatcaacagtattatgctcttcttataaaaggaagaaatacaaagaatgcttggtatattgtgtgacatagtgacaataagagttttgtacctcaaaaagcctttat

SEQ ID NO: 22270 - DNA, 333 bp, Glycine max
  Clone ID: LIB3050-023-Q1-K1-H3
ggagagagagagaaggcaagatgtcgaagagaggacgcggtggttcggcggggaacaagttccggatgtcgctgggtctgccggtggcggcgacggtgaactgcgccgacaatacgggggcgaagaacctctacatcatatcggtgaaagggatcaaagggcgtttgaaccgtctaccctcggcttgcgttggcgacatggtgatggccaccgtgaagaaggggaaacccgatctgaggaagaaggttttgccagctgtcattgatcgccagcgcatgccatggcgcctaaaggactgcgtctacatgtatttcgaagatcatgctggtgtta

SEQ ID NO: 22271 - DNA, 387 bp, Glycine max
  Clone ID: LIB3050-023-Q1-K1-H4
gaacgataaacttgctgaaattgccatggccgatcctaagcgtgctaaaaggattttggctaatcgtctatcagctgctcgctcaaaagagaggaagatgcggtacatttctgaattagagctcaaagtacaaacacttcagacagagacaaccacattgtctactcagtttaccaaattacagatggataattcagagctgaaaagtgagaataatgagtacaaattgaggattcaagccttggaacagcagtcccaactaaaagacgctctgaatgagaccttggatgctgaagtgcggcgtttaagacgcacagttgcagaacttggtggagagtctcttctctcaagtcgcatggctcaacagcttgctattagccaacaagt

SEQ ID NO: 22272 - DNA, 318 bp, Glycine max
  Clone ID: LIB3050-023-Q1-K1-H5
gacagacagacacacactcggttctgccttcacaaaaaaattatcgagatccccttttcctcctaagaaaagccatggctaagggtcccggtctctactctgacatcggcaagaaagccagggatctgctgttcaaggactaccacagtgaccagaagttcaccatcaccacctactcacccactggagttgctataacagcatcaggaaccaggaaaagtgaactgtttgtggctgatgtcaacacccagttgaagaacataaacatcactactgatatcaaagttgatacagattctaatctcttcacaactatca

SEQ ID NO: 22273 - DNA, 399 bp, Glycine max
  unsure (1)..(399): unsure at all n locations
  Clone ID: LIB3050-023-Q1-K1-H7
ggtcttcaggaacctcgaagaggcaatggtccaaaacctgggtcagacatgaagatgaacgcgattaggtcagggatagtggtgctgggagctcttgcattcgggtgcttgagcatagaaattggcttcaagccttatctggagaaagctcagaaccagaacgcgctctaccaatctgacccttctcaggaagaatcatcttcagctttctcagaacgcccttcataaccacacacactctgttcggcttaggagaaatggaaggaaattttgttgccccagttgtgtgttggtaattaactagttntgtattgttcaactntatttatctatttgtatttgctcacataataatatcatgcatctaccttgaagcctggnttgttggtgatgatatca

SEQ ID NO: 22274 - DNA, 301 bp, Glycine max
  Clone ID: LIB3050-023-Q1-K1-H8
gtttcaggctctgtggatcaggcagatcaatcctttcttgatgaccatcaaattgaaaagggttaccttctgacatgtgtctcatacccgaaatcagattgtgtgattcacacccacaaggaggaagatctcgtttaggtggggttgtgtgtcttttgttagtttctctaagcttgaatattgtcacggtagctagacatattgtgaaactttgatggtgttggttcaacttttttgaaccgttctaaataagagaaatggaaggaaattatgatgccccaattgtgtgatggtaattaac

SEQ ID NO: 22275 - DNA, 375 bp, Glycine max
  Clone ID: LIB3050-023-Q1-K1-H9
gggactctactcttccctgctattaatgtcaatgactctgttaccaagagcaagtttgacaacttgtacgggtgctgtcactctctccctgatggtctgatgagggctactgatgtgatgattgctggaaaggtggctgttgtggctggatatggtgatgttggcaagggttgtgctgctgcattgaagcaggctggtgctcgtgtcatcgtgactgagattgaccccatttgtgcccttcaggctctcatggaaggccttcaggttctgaccttggaggatgttgtttctgaggctgatatctttgtcaccaccacgggtaacaaggacatcatcatggttgaccacatgaagaaaatgaagaacaatgccatt

SEQ ID NO: 22276 - DNA, 316 bp, Glycine max
  Clone ID: LIB3050-024-Q1-K1-A1
gaagaagaagaagaagatggcattgggtgttcctgctcttcccctgacatacgtggctcacgttctggcacttgttgccagcatcttggtcgtgctctgggtcctcaattttaggggtggcttggcttgggattctgataacaaggccctcatcttcaatcttcatccagttcttattgtcattggcttactagtccttgggggtgaagctattataagctacaaagcattacccctgaagaaggaagtgaagaaattgatacaccttgttttccatgccatcgcattaatacttgggatagttggaatttatact

SEQ ID NO: 22277 - DNA, 165 bp, Glycine max
  Clone ID: LIB3050-024-Q1-K1-A10
agggtcggcatttgaaagagatcaagcagcttgcattgaagatctctgtctcttgcaggttgcatgcactactcctactggagtggtagtatcacaagctacgattccgggtccagctttaattgcatatctactctctatgcactatagccactccattcacta

SEQ ID NO: 22278 - DNA, 406 bp, Glycine max
  Clone ID: LIB3050-024-Q1-K1-A12
gaatattttcatgaatagaaatgttgtcatctaaaggatttcttacttttccgctgagcatgacgcaggttacatctagttcttaaatactctgaaggtagggcctcggttgaaagctatagacatcttgaacagaggggcgcttggaatggaaagagaacttggggctatgcatgcatggttgatgttgattgctattcattgtgtattttctgtcgcaacccaagtcatgagtgaaaaagagccttgcttgctttcatctcacacctaacatctatgcaacatcgctcgcacatctaacatttctattccttgacaacttcagtcaccggtgaagagccatgcgttcatctcttaacgtgttttcgggttgtatattcctgtagcttctggtcaatgttcaatt

SEQ ID NO: 22279 - DNA, 380 bp, Glycine max
  Clone ID: LIB3050-024-Q1-K1-A2
gggaccaacgattggaagtttccttttgattaaacttaaagatcaagcgggccggcccagacatgccttaattgattatggtaaaaggaaagggaaagaggatgtgctttctctctctttgaattggcattggaattcaactcttctctttctctgtcgaagaacaagtagtttcagaaagatgctagagaatcttcaggctcctccgtcaacaacggaatcggccccagtggtgaagcgctatgctccacccaaccagaggaaccgttctgctaacaggcgcaaatcatctgatcggcttgatcggacaaacagtgtcgggaatgacttataaaagaatcaagttgcttcttcaagaagtgttcacattccagatcatg

SEQ ID NO: 22280 - DNA, 361 bp, Glycine max
  Clone ID: LIB3050-024-Q1-K1-A3
gttgcagcagctcccactaaaaatcaggttcggagagcggttcagtgcggtgtgtggtgcaagaagaaggagatacacccgcaattctacgaggaatcgaaggtgtactgcaacggggagctggtgctgacgacaggtgggacccagaaggaatacgtggtggacgtgtggtcggggaaccaccccttctacctcggaagccggtcggcgtctatggtcagcgacgaccaggtcgagaagttccgcaagaagttcggggagctcaaagagatcatggagattcctgttctcaagggagagattgttatcccctcaaggcgcaagggtgtttccaaaggaagcaagaaaaaataatctattc

SEQ ID NO: 22281 - DNA, 371 bp, Glycine max
  Clone ID: LIB3050-024-Q1-K1-A4
cccacgcgttcggcgagaagacgacatatgggtaaagaacgtgagtatgatcttagtggctgtgcagcttgcattgtgaataaagattctgtaatcaacgggtcaaacattgttgctggtgatgttattattggtctttcatctagtggagttcactctaatggtggctctcttgtaagaagagtgcttgctcaaagtggtctgtcactgaaagatcaacttactggcagtgatgttacaattgcagaggcattgatggccccaactgttatctatgttcaacaggtgcttgacttaattagtaagggacgcgtgaaaagaattgcccacatcatcggtggtggtttcacagataacataccccgagtttt

SEQ ID NO: 22282 - DNA, 377 bp, Glycine max
  Clone ID: LIB3050-024-Q1-K1-A5
gaaggcactgaagctgcagcggccaccgctgcaactatacaatttgggtgtgcgatgtttccaactgaaatagactttgtagctgaccaccctttcttgttcctgatcagagaagatttaactggaacagtactctttatcggacaggtgttgaatcctcaggctgaataatattaacattggtagcaaaacttatgctcctattctgttgtcttgatttacctatggttggatgatccaaaatttctggcagtttcacatgtggcttaagaaggtaaaaaggtacatatggatcaccgttttaagttttgaacacttacgagtatggcgttgtctaactaatttcgtcttccaagggtgatatgcgaatagccaaa

SEQ ID NO: 22283 - DNA, 379 bp, Glycine max
  Clone ID: LIB3050-024-Q1-K1-A6
gacacacataaacaatagaattgacccttgtgtgttgtctctctgagattgtggtgagtagcataatggaggcaccgaagctgaaggtagtgacactgaaagccatcgaagcaactccgtcaaccttcaaagagttcggtcaggtcgtggaggcttcgcgagacggccaggaattcggtccccacgatgctcaactcgacctttcccaaggaactccaaggttctacattatcaagcttgaaaaatgcccgcttaagttttctagtattacacatcatgcaatcgtgactcagtgcctcgggtctatcggtggtcatgtttgatatcttggagtggccaagtcatctgttgttgattcaaatgagatcaaagatgacac

SEQ ID NO: 22284 - DNA, 344 bp, Glycine max
  Clone ID: LIB3050-024-Q1-K1-A7
agaacagataaatcaactccgaatgagtttaatacttacaggaaggtgctgcgaagcataagagacaacatcaccgaggaagacttgttgaatgaaataagtgagataattcgccttcccatgtatgctgaccggatcagaattgatagtaaagcgaatcagcatgctaatgtcgcaaggcgaaggtgatttggtggtggttagatcagatctgggacttttatgccttcaatcttttcattggtggtagtgggtgacatcaagttaaaacaaaatgtagtgtatccgttgatatttgtctctgggatttcaatgaaattgtattggatttggctatgtatttt

SEQ ID NO: 22285 - DNA, 409 bp, Glycine max
  unsure (1)..(409): unsure at all n locations
  Clone ID: LIB3050-024-Q1-K1-A8
ggggttgtttctaatggtgtctaagctctactgtgtttgaaggaggcggtccaatacacctcagtggcatatattggtgttcttagaagtatatttatcagtaatttggtaccgcccggatttgatctgtcttgccttctcttgcagtctgaagatagtgtgattggttgcctagtgaagataaagatctgtatattgagattggctgggcggagttagttcatagaatgctagcaccaatcccttctcattgggttttgtttacagtggttagctcctaacagggtttactcctctagggttttggggttttttagggttttctgcctaagatgcttatatcttttggtttttgttcgggtttatccttctctaagcctttntttttctctctttttaatttacctgg

SEQ ID NO: 22286 - DNA, 346 bp, Glycine max
  unsure (1)..(346): unsure at all n locations
  Clone ID: LIB3050-024-Q1-K1-A9
gggagctgagctgagaaaacccccaaccccaacctcaaccttaacctctcctcactttcttttcaaccagaactatgattaagctttttaaagtaaaggaaaaacagagagaactggcagaaaatgcgagtggcggaccacccgttaagaagcaaagtgccggcgagttgcgtcttcacaaagatataagcgagctgaatctaccaaaatcatgtaccatgcaattccccaatggcaaagatgacctgatgaactttgaagtttcaattcgacctgatgatggatattacttaggtggcacattttntgtttcctttcaagtgtctcccatctatccacatgaagc

SEQ ID NO: 22287 - DNA, 417 bp, Glycine max
  Clone ID: LIB3050-024-Q1-K1-B1
cccacgcgtccggacgacagaaggggattgtgtatattaatagagagacataaaaaataaacatatattgagaatggagggttgtgtgaagaagttgctatgccttgaaggttttgtggagctagttatttttttttatttaacattaacatttgcgcaaaaaactacacccttccaaccgacattgccaagttattacaatcacacttaccaattttgaccaagcttcatgctgtgtttttgttttttttgtttttttttttattatttaattttatttttttttttttttttattttatattttattatgtttttttttttgttatttttatttttttttattttttttgtatttcgttgatattttgtctttgggatttcaatgaaattgtattggttttggctatgtattttg

SEQ ID NO: 22288 - DNA, 379 bp, Glycine max
  Clone ID: LIB3050-024-Q1-K1-B10
tgcacattggggactggatctgtaactgtggcttccacaattactcatcccgctctcagagcaaaaagtgcaatgcatctgctcctgcacttgggacacagcgattagcttcacaagagtcgtgttatgattgggacaacaggagattgaatataggaactacaaatgatcagcatcaaatatatacaagtgtagagcaagtggcagggacaggtgcagatccaaaacctggactcttaccctcttatcccagcatgaactcaactacagctccaagtttgccattggccacatggcttccacctcaagcttctgcacctgccctactagcaaaaggagcaaggcactggctaaatggacattggatgtgctcaaattg

SEQ ID NO: 22289 - DNA, 366 bp, Glycine max
  unsure (1)..(366): unsure at all n locations
  Clone ID: LIB3050-024-Q1-K1-B2
gcattcgaacaaaaccctttttagttttttcctcctctgtttctctctctgctctgcattttggtggcatcatcagagatagagacttgagtgtgagagccacaacttctccaattcttcaaaagggtgaaactttgaaggaaaagaaatggttggtgctataaaagcagcgattggagacgcggtgttgactttcatgtgggtgttctgttcctctgtgttgggaattgcttcanggtacataaccaatgcacttaaccttcaacacataacctacaacgggttcccttacccttcttttcttgtcaccaccaccctcgttnttgttctcgtttttcttttcaccgtcattggcaatgttcttgg

SEQ ID NO: 22290 - DNA, 288 bp, Glycine max
  Clone ID: LIB3050-024-Q1-K1-B3
ctacatgatgaagctgcacagatgagaaaagcataggcagattccgagagagtttgccagctgagcctaacgttgataggacggtcattgcatttaaacaatgaaacaatacggtgatactactttagaaatgccaattttactttgaaaggaaaattcgataagaagtctatttttaattaactctcttcattgtaattcttttctctaataccccatttttgggtgaaaaaagataggatattggccccagcagtgttgtctgtgatttgaagtatgtcttttttt

SEQ ID NO: 22291 - DNA, 351 bp, Glycine max
  Clone ID: LIB3050-024-Q1-K1-B4
gtaggagaagaaaaagtttgtgccaaatccttgggaacagtaattgggtttgccattttaaagcttggaaagaacattcaagtactttcaaagttctttgtcaataagcaagaccaatacactgtggaaggagttgcagaatctttggagacaaagcagtgatgtgtcataggctaaaatttcagaactgcagtattttactgccatgaagtccgtgaaacaacagctttcatgggtccattggtggctggtgatggaaccaaaactcaggcacttgctatttgccactcaaatacttttggaatgaatcatcaaatgcttcatcaacttatgggaattgatcctggaact

SEQ ID NO: 22292 - DNA, 403 bp, Glycine max
  Clone ID: LIB3050-024-Q1-K1-B5
ggagtgtgacaatatcacacataatataattccaaaatcactcctattgctatagcaatatgatgggtgacactgagatcaaaccatcagttgaagtagtcatatgtgcttccatgaacaataacaatagcgcaaacaaccacaccctcccaaccgacatcgccaagtcatcacaatcacacttaccaatcttgaccaagctccatgctggttgctttttcatatgcctttcctttggtgcacaagctttgctctggaagagtttgagtaaacacaacaaggactcacaaactctctggcatggattcaatttgatgcctcccattgcgtttctactactttggtgtgtggcactgctcactgccactactttgtctttactttacgtgctcaagtgcatttt

SEQ ID NO: 22293 - DNA, 385 bp, Glycine max
  Clone ID: LIB3050-024-Q1-K1-B6
tgggttggaagtgagtgaaaaaacaacaacgagaatagcacacacagttcgagcatggattgaagaaggaataaggtggttgttccttgtgggcgcagagaaagagtggcccgtgtttgtgggggctgtggctggattgttatcactatcttatttaggaagttgcatggacctcctaacactagtttatatgggtacgttagtgggaatggcagttccattaacttatgtgaagaacgaggacaagattaagaggtttgtggagtggttgagggagaaacacaagagatattatcagattattgacgagaagaccattcagaagattaaaagcagaatcgtaaaggagaagaaaacagagtaattagctttttaagagaaatgt

SEQ ID NO: 22294 - DNA, 373 bp, Glycine max
  Clone ID: LIB3050-024-Q1-K1-B7
tgaggcaaggaaaaaggaagaggaagatgcagcaattaaacagttgagaaagaacctggtcgttaaggcaaaaccagtaccaagcttctattatgaggggccaccccccaagactgaactcaagaagctgccactgactcgccccaagtcaccaaaactgtcccggagaaggagctgtggtgatgctgccggcatatccccagaaatttctactcgaggacgtcacagtgttggcaataacccaaaacatggtagccttgtccctcccaaaaacaaggacctggtcactggacgtaacagcaatggctctagcaaaaccaaagaacgaccaaaactggataaggaaacaaaaacagcttcttctaaaatcact

SEQ ID NO: 22295 - DNA, 353 bp, Glycine max
  Clone ID: LIB3050-024-Q1-K1-B8
ttaaggttaggcaaggaaaaaggaagaggaagatgcggcaattaaacagtttagaaagaacctggtcgataatgcaataccagtaccaagcttctattatgaggggccaccccttaagactgaactcaagaagctgccactgactcgcccaaagtcaccaaaactgtcctggagaaggagctgtggtgatgctgccggcatatccccagaaatttctactcgaggacgtcacagtgttggcaataacccaaaacatggtagccttgtccctcccaaaaacagtgacctggtcactggacgtaacagctatggctctagcaaatccaaagaacgaccaaaactggataatgaaa

SEQ ID NO: 22296 - DNA, 328 bp, Glycine max
  Clone ID: LIB3050-024-Q1-K1-C1
tgaagtgaagtgggaaagagactgaaccgaaaatggttgcgactttgagtcttccgatcatagacctctcttctccccatcgtctttccacagccaattccattcgtcaggcatgcgtggaatatggtttcttttaccttgtgaaccatggggtggacaccgattttgtgagcaaagtcttcgaccaaagttgcaagttcttctcgctttcggtccaacgcaaaatggacctggcccgcagggaatatagaggctacactcctctctatcctgagacacttgatcctacttcactctccaaaggtgacccaaaagagacctattacat

SEQ ID NO: 22297 - DNA, 396 bp, Glycine max
  Clone ID: LIB3050-024-Q1-K1-C10
taagccaacataatcaaataccctttctacttcttcttcaacgctctttagtacagcggaagaacgaagcctcctcgttcttcttcttctgcgctttctctctccctctctagaaccgtaaccgtcgtttctttctttctctctcctcaaccagagataaagagtcaccttcttatttttctgaatctcgcggcgttgttctttctgctgctgcggctgtggttccggcggcgatgggacagcaatcgttgatctacagcttcgtcgctcgaggcaccgttatcctcgcggagtacaccgagttcaccggaaacttcaccggcgtggcggcgcagtgccttcagaaactcccttccttcaacaacaagttcacctacaactgcgatggccacacct

SEQ ID NO: 22298 - DNA, 345 bp, Glycine max
  Clone ID: LIB3050-024-Q1-K1-C11
gggttccaggtgctatgacagatgaagagctttttgccgtggaggatggagaaagcatgatgaatggggaaaacaatgatgagtatgatgatgtattgactgcagaggaaagaatgcaattagattctgcactgcatatggggaactctgatggtacttatgaggatgaggaacatggagcctttgatggtcaagaaaatggttctgcagcttcccgtgagaattctgaagccaatggtgtggttaaagaaaagaagagctggtttggttggaacaagaaaagtttgaagagtagcagtgatgatcctgaggattccaaagctgtgaagaataattccaggtttg

SEQ ID NO: 22299 - DNA, 395 bp, Glycine max
  Clone ID: LIB3050-024-Q1-K1-C12
tgttgctgatctctctctcttccaccgcacactctctgctcctagggtttctccttcgagtgagggaaatggctcccaaaccgcctagtacgggtctgtttgttggactgaacaagggtcacgtcgtcaccaagaaggaattgcccccacgcccctcagatcgtaaggggaaaacaagcaagagggtgcactttgtgaggaacctcataagagaggttgctggttttgcaccctatgaaaagcgtataactgagttgctgaaggttgggaaggataagagggcactgaaagttgcaaagagaaagcttggagcccacaaacgtgcaaagaataagcgtgaggaaatgtccagtgttctcaggaagatgagggctggtggtgctggagacaagaag

SEQ ID NO: 22300 - DNA, 348 bp, Glycine max
  Clone ID: LIB3050-024-Q1-K1-C2
tggatccgaaacatttctactccaaattgcttagtttccaaatggcagaaatccgagcacaaggatgaaactcgcaacagttacttgaccaagagaggaattgggcttgtcgctgtgtcaccctctgcgcgtgtcgtcgtcggcgccggcgccgatgccttacccaaacgacaagatctactgattcacggcctctgtggccagatctgtggtcttcacggccagatctgcgacccttagatatcagatctgcgacccaacaaccttcgcattctcgcttcactcacctcatgtggtgaaggtggattcgtgaatttgaggtaacggattgtcggttgtcaaagtagc

SEQ ID NO: 22301 - DNA, 286 bp, Glycine max
  Clone ID: LIB3050-024-Q1-K1-C3
ttttctctcttttggtaataaatgaatctattctttgttgttttttagtgtgaaaaaatatcattttgcaccccaaagatacatacagttaggataattatatttaaactcactctttctgttaatctattttttcatctaatttttctttttaatttaatccctttacttgtcatgttttcacattctttctctttctctttcttttctttgcttttttctgaatcctttactctacacctatatatccactccaaatttagatggacattaacctttaaccttc

SEQ ID NO: 22302 - DNA, 328 bp, Glycine max
  Clone ID: LIB3050-024-Q1-K1-C4
ggagaactgagaaacgcaatgagttcgtcgaacctcagagatctttaacgcgaattggagaacaaagccaatgatctcagcaagcttcaaaaggaaattgcgaagaatcaccaaatgagaaagaatacacggtccagcttggtgagaacgagctcgtccttaaggaactggatttattgaaagacgacgcaaatgtttataagttgattgggccagtacttgttaagcaagatttggccgaagccaatgcaaatgtccgcaagagaatcgaatacatctcagctgaattgtagcgtctggatgccactgttcaagatttggaagagaa

SEQ ID NO: 22303 - DNA, 353 bp, Glycine max
  Clone ID: LIB3050-024-Q1-K1-C5
tagggtgttgctgatctctctctcttccaccgcacgctctctgctcctagggtttctccttcgagtgagggaaatggctcccaaaccgactagtacgggtctgtttgttggactgaacaagggtcacgtcgtcaccaagaaggaattgcccccacgcccctcagatcgtaaggggaaaacaagcaagagggtgcactttgagaggaacctcataagagaggttgctggttttgcaccctatgaaaagcgtataactgagttgctgaaggttgggaaggataagagggcactgaaggttgcaaagagaaagcttggagcccacaaacgtgcatagaagaagcgtgaggaaatgt

SEQ ID NO: 22304 - DNA, 368 bp, Glycine max
  Clone ID: LIB3050-024-Q1-K1-C6
ggtgttaaggggggattgactgaggcgccagtacctttcacatccactgatgcctagtgggtctgatccaatccgaaaacccactcgcctttgttgcccgaaaaacctttctttctgcttctcccatccatccatggcttctggaatctcctcatagttctttcagctgcctataccctcgctctttgcctctcacacactaaaagaaaccatgaaggttcggtcatctgtgaagaagatgtgcgaattttgtcagatagttaagcgccggggacgaatctatgtgatttgctctgggaaccctaagcacaagcaacgacagggcatggcaacatttgcaagtgaaggcccatctcaaccagtgtcct

SEQ ID NO: 22305 - DNA, 342 bp, Glycine max
  Clone ID: LIB3050-024-Q1-K1-C7
gagacacagagcgagagagaatcgtaacaaaagcggcaaccggaataagttgtctctacgatttgagccatggcaacaacaacaccctcaaaccgatcatcagaggcgtttgctctcatggcaatcctcagcactctgctttgcacggcggtggcggcgaaggagagcgtgtacgagatactccccaagtacggcctcccgagcggtctgttaccggacaccgtcaccgactacacgctcgacgaggacgggcaattcgtcgtcgttttggcgaagccctgctacatacagttcgattacttagtttactacgagaccaagatctccggcaagctcagctat

SEQ ID NO: 22306 - DNA, 387 bp, Glycine max
  Clone ID: LIB3050-024-Q1-K1-C8
gtatcaagggataaataatcggaccggtccttagatttttttaaggctttaagggagccgtatgaggtgaaaatctcatgtacggttctgtaatagagatggtaacagtaatgtcatcaccgattaggattatctaacagtttaagtacagttgatatagttgatgcacaatcaaaatatggtttttggggatggaatttgtggcgtcaacctatgggtttcattgtttttctaatctcgtccctagcagaatgtgaaagattaccttttgatttaccggaagcggaagaagaactagtagcgggttatcaaaccgaatactcgggtatcaaatttggtttattttatgttgcttcctatttaaacctattcatttcttccttattt

SEQ ID NO: 22307 - DNA, 377 bp, Glycine max
  Clone ID: LIB3050-024-Q1-K1-C9
tatgttcaactgtggctgcagttgccactgtagaccatgctgactaaatattcactataggtgctgtgatggcaggctgaatagtgttatgagagctcactatttagcatatatatgtatatgatcaactttcaacactaagtgctctttatcctttttgggtgtgtgtcaacataaaattaaactaggtagagaatctgtggtgcatgcacatctaaaacatatagattattgactaaacttaccttaataatgtctggtggtattatatacggtccaatggaagataaagctgccgttacttgagcacgtttggtaccgaatacagttattgctgggttgattatcatactgtgattcctgacctagtgtaagca

SEQ ID NO: 22308 - DNA, 334 bp, Glycine max
  Clone ID: LIB3050-024-Q1-K1-D1
ggagagagagaatggagaaaaaggaggaaaaggtggtggtgggcgtgccagtgccagtgtattacggtggagaaaatgaataccaaaggggaatcatccctcccaacgccgtgtttggagatccaaagggcattcccatccagcaaaccatttacagggacactcctgctcctttcaactgcccttactgcgctcataccgctctcactaccgtcagatcaaagcccagtctggcagcatttgttggatgcttgatgccaatgatgcttggagtttgctttctttgcccttcaatggattgcctttggcataaatatcactactgtcctaaatg

SEQ ID NO: 22309 - DNA, 406 bp, Glycine max
  Clone ID: LIB3050-024-Q1-K1-D10
tttacataacccagcatgactgggccttaccaaattttgagcagcgtgctgaagctgtgttgaggaaagttgctagttaaccatgttatggagtaggaagcttcattgctagcattagcaggatacacttactttctattgttgcggtaggaggtgtacctttttgcagaaaagatatcaaagatcttgttgagactgtagtcttgagactgaacattttgcaactatcagaaaacattgttcggttttgttgaagctagaactgaaactattcattcttgcttatttttctgaatgaccattgccataaaaagcatgaaggcttcccaggaaacgttgagtcccggtaatgtgtttcaaggcctattcaactattctatctgtatcccacattccactcctagaa

SEQ ID NO: 22310 - DNA, 399 bp, Glycine max
  unsure (1)..(399): unsure at all n locations
  Clone ID: LIB3050-024-Q1-K1-D12
tgaggaccaagaagtgaattcaaaacaggccacgaggttgtaacatatgaaagtccgcgaccgatgatggggattcatcgtttagtgtttgtgttatttcgtcaactgggtagggaaacagtgtatgcaccaggatggcgccagaatttcaacactagagaatttgctgaactctacaaccttggattgccagttgctgctgtctatttcaacattcagagggaatctggctctggtggaagaaggttataccattgagggttctagaaatatttctcccacactctttagtagtaaatgagtgcttttcaacttaatattaaactgagcatatagtgaaataaattgcttgctagatcagntggtagcaacaagtcctctacatatacacataaatga

SEQ ID NO: 22311 - DNA, 314 bp, Glycine max
  Clone ID: LIB3050-024-Q1-K1-D2
gaaggatactgatgcacaggaagatctcaaagaggctttcaaggtgtttgacaaggatcaaaatggctacatttcagcaagtgagttgaggcacgttatgatcaatctgggtgaaaaactaactgatgaagaggtggagcagatgattaaagaagctgatttggatggtgatggtcaagttggctgtgatgaatatgtcaagatgatgatgattattggatgaaaatttagaccaacaaatttattgttcgaattcgcttttgcgccccactcttatttactcccaagaaatttataaggcttccaattaatgt

SEQ ID NO: 22312 - DNA, 370 bp, Glycine max
  Clone ID: LIB3050-024-Q1-K1-D3
tttatgacagtgattgatgagcaccttatcccttcggctgcagctggtgaatccactgtgttttactataagatgaaaggagattattatcgttatcttgccgaatttaaggcaggcaatgagaagaaggaagctgctgatcagtctatgaaagcatatgagtctgctaccactgcagcagaagctgatttacctccaacacatcccatccgattgggtctagctttaaatttctcagttttctattacgagatcttgaactcttcagaaagagcctgtcatcttgcaaaacaagcttttgatgaagctatttctgagcttgacaccttgaatgaggagtcatacaaagacaggaccttaatcatgcaac

SEQ ID NO: 22313 - DNA, 221 bp, Glycine max
  Clone ID: LIB3050-024-Q1-K1-D4
ggactctttcttttctttctaacaagcaccggcttcactaatggctatgagatcgtgggtgagtcgaggatccgtgactcgtttgatggactcagcaaatcgaggggctttcagtcgcttcttcagcgacaagggccgcgttctcagcgaggaggaacaggcccaagaaaacgtgtacattcagaaatgggagagggagaagttggagaaacagaagcaac

SEQ ID NO: 22314 - DNA, 347 bp, Glycine max
  Clone ID: LIB3050-024-Q1-K1-D5
ggagagagagaacccttttggctctttcattctttgcttaattcctatggaggagtttcaaagatcaaggtcttatgcaaatgggcaaatgatgcagatagagagctactatggagctcctaggccttatgatcttagtctcagaacttatagtgcttcttatgcacaaactcaaataggtcctcctagggacttgaagttgaagaaaggaaaaggcatttctgcagggccttctttctccaagtcttggagctttgctgatcctgagcttcagaggaagaagagggttgctagctataaaatgtattctgtggaaagaaagatcaaagggtccttcaggaagagct

SEQ ID NO: 22315 - DNA, 400 bp, Glycine max
  unsure (1)..(400): unsure at all n locations
  Clone ID: LIB3050-024-Q1-K1-D6
tggcagacacgaataacacacaaatcattaatcaaccaccaccttaacacaacaacacgatgatgtccatcttcagccacttcgagatcgcgcaggcccagaactggagcttttctttgctcccagtaaaaagcacgaattcgaagcccaacacagaagccacttcctcctccgctgagtccaaaaccgccagaaaagtttccaatctatcacaacccggtggatccaagcaaaacccgccccgtttgaggcccagatttgcgccggagttggacgggttacactgctttgaatccattgtaccctgctagatggatttcttcagtctccaatctcaattcagatggcataaaaatcatacgcgattcaattcaatttatttntactgaatagnttaata

SEQ ID NO: 22316 - DNA, 367 bp, Glycine max
  Clone ID: LIB3050-024-Q1-K1-D7
gggcgaagatacataatgaccggttcaagctatggtacgtggtggaaatcgcaaaggaagggtggaaatacagtgtagggttcatcacagagagtatcacgagggagcaccttccaaaagcgtcgagggattccttggctttgacatgtgggccaccacccatgattcagtttgcagtgcagcctaatttggagaaaatgggatatgatatcaagaacgatttgcttgtgttttagggcatggagaagtagctagattgctagattgtgttgtgtattgtatttgtttgtgtatcgggtgttattggagtattaatgtttgtttcattctttataagggtaaaaaaagaagtgaaaaattgtatatg

SEQ ID NO: 22317 - DNA, 243 bp, Glycine max
  Clone ID: LIB3050-024-Q1-K1-D8
ggtgcctcattattatattataacaacaactaaggtggctaggcctaggctctagctatattgtacttgtcaaatctagatacaaaggttgcatattcttgattgctagctcaagctccaattccaatatattgatattatcccctaagaaattaagaatgagacagagaatggaaaggcttgtcattcttcctttctctgctggttgcatctctgaggccagtgttgcttgtggtggtccat

SEQ ID NO: 22318 - DNA, 345 bp, Glycine max
  Clone ID: LIB3050-024-Q1-K1-D9
gatcacaaaccaaacaacttctaacacatacactactctctctctctcttattgtatggccgccaattccagtagccgagggatcaccgccttagggaagcgagtcgccaaccggatctggacttccaacgcacctcctctcacttcaaggaggggagcatacagtagcggctcagtgtacgacaagaaccctgatgatgagatccagtctgggcaggtcccagacgatgtgatccaggcggcaacacaatccggcaaatactgggccccacatccacagactggggtatttgggccccccggaggaggtgaccaaactgcttctgccattcactctgatgcgct

SEQ ID NO: 22319 - DNA, 377 bp, Glycine max
  Clone ID: LIB3050-024-Q1-K1-E1
ttgcctcaaagattggaacaacaggaacatgtgtactctcacaactgttcctgtgctcccttctaagcttaacaagcctccgctttctccgcaccacaattctctttttccctactgtggaagacgggtcgggaagaagaacaaagcaatggttcctgttgcaaggttgttcgggccagccatatttgaagcctcaaaactgaaggttttgttcttaggagtggacgaaaataaacacccaggaaatctcccaaggacttatacgctaacccatagtgatataaccgctaagctcaccttggcaatctctcaaaccataaataattctcagctgcaggggtggtacaacagatttcaaagggacgaaatggtggcac

SEQ ID NO: 22320 - DNA, 396 bp, Glycine max
  Clone ID: LIB3050-024-Q1-K1-E10
ggcgacactgaatacagaacatcatcttcaactccagctcctgcgggtgttgattactttaaatttgatgttatcctaaggtttgtgttatttgcagcatcactggtagctgttgtggtgatcgtcactggtaatcaaacagaggttattcttgtgccacagcctgtgccatggccagccaagttcagatacacaccagcctttgtgtattttgtagctgcattgtccgttactggcctctacagtatcattacaacacttgcatcactctttgccagtaacaagccagccctcaaaaccaagttgctcctctactttatcttatgggatgcgctgatattggggataatagcctcagcaacaggcacagctgggggtgtagcatatttgggtttg

SEQ ID NO: 22321 - DNA, 408 bp, Glycine max
  Clone ID: LIB3050-024-Q1-K1-E11
tgagagagaaaatagagatcaagcgcagacatgggaacttaacaaaggaagaaacgcgaattgatgatggaggtcaccaaagacgaagctgcaaccccaggagcaggaggtgctcaacctcgcaatccaaatccaaatccaaatccaactccaaatccaaaccctaaccctaaccctcctcacaccaccagaggatctaaaggaaaatcgtgtaagggatgcacctactactcatcgcttcataaagccaagtccaaaaaccccacatgcgttggtttctccagaacacttcagcaagtacccccctttgttgtcggagaatctgagttggaagcttccaaagagggccgcagccttaccaatttcaagtatgcatgtgttggatactctgtctacttagacaacaaa

SEQ ID NO: 22322 - DNA, 404 bp, Glycine max
  Clone ID: LIB3050-024-Q1-K1-E2
gaaaaaaagaggcttgaggcagttgaaatgaatggcccattaaagggttctttgtccatgagtgccctttggttggtcccacaatttatgatcattggatttggtgatgggtttgctcttgtgggcttgcaagagtatttctatgaccaagtgcctgactcaatgagaagccttggaatagcactttaccttagcgtcattggggctgcaagttttcttagtagtttattaataacaattgtggatcatgtcactggtaagattgtgaagagttggattggtaaggatttgaatagtagccgcttggacaaattttactggcttcttgcagccatcaccacattgaacttgttcatgtttgtgatctttgctcgcaagtataactacaagaatgtgcaaaaggt

SEQ ID NO: 22323 - DNA, 272 bp, Glycine max
  Clone ID: LIB3050-024-Q1-K1-E3
ttcctttagatcggaacaacaggaacatgggtaggctcacaactgttcctgtgctcccttctaagcttaacaagcctccgctttctccgcaccacaattctctttttacctactgtggaagaccgatcgggaacaataacaatgctctggctcctgatacaaggatgtgtcacccagccatatttgaagcctatcaactgaaggtgatgttcttaggagtggactaaaataaacacccatgaaatctcccatagacttatacgctaacccat

SEQ ID NO: 22324 - DNA, 377 bp, Glycine max
  Clone ID: LIB3050-024-Q1-K1-E5
tgaagcaagcggagatctgatggcgctagagtgggttgtgctagggtacgtcgtcggccgcagaggccataatggttattctcctcaccatcccgggcctggaagctctccgaaagggtctgatcgcggtgacccggagccttctgaagccgttcctctcggtggtgcctttctgcctgttccttttcatggacatatattggaagtacgaaaccaggcctagctgtgagggagattcctgcaccccttccgagcaccttcgccaccagaaatctatcatgaagagccaacgcaacgccctcctcatcgccgccgcactcctcttctactggctcctctactccgtcaccaacctcgtcgtcaggatcgaccacttg

SEQ ID NO: 22325 - DNA, 395 bp, Glycine max
  Clone ID: LIB3050-024-Q1-K1-E6
atacttgagatgtacaaggaggcagggctgtttgatccggttgctagttctgttcaagtgacagagtttacgataaaagatgcttacatcctaaatttttttgagaacaattccactcgcttgccaaaatggtgcaatgatggagacacggtgaagcttccttattgtcaaattaaaggcaagtatcgaatggatttacctggatacaacaccatgcaaccatatcctcatatgaatgaaagatgtccatctcttcctccaaagtactccagaccccagaattgctagcagtcttcaatttttttcctccaatcggagggctgattgcgcgtgaccagattttttggtcttctagatttggattgcttaggagattccaaatgaattattggttg

SEQ ID NO: 22326 - DNA, 351 bp, Glycine max
  Clone ID: LIB3050-024-Q1-K1-E7
catcacggagctgaagtccaagcttcagaccctcgaatcagataaagatggaatgcagaagcagctggaaggtgtgaagaaggagctcgagaaaacaaccgagaacgtttcttctaatcacgcgggtaatagtagtagttgtaacaacaacaacaagttgtcgaatcagaagttaattgacgtgttggagatggacgtgaagatacttgggtgggacgcgatgataaggatccattgcagcaagaagaaccaccccggggcgaggttgttgacggcattgatggagttggacttggacgtgcaccacgccaacgtaaatttggtcaatgatatgaccatgctacaagcaac

SEQ ID NO: 22327 - DNA, 367 bp, Glycine max
  unsure (1)..(367): unsure at all n locations
  Clone ID: LIB3050-024-Q1-K1-E8
gttcgtggtctctgcattgctatttgtgcccttaccttttggatctgtgatatcattgtcacctacacactcccagttatgctcaattctgtaggcctcgctggtgtttttggtatttatgctgtcgtgtgcttcatagcatgggtgtttgtctttttgaaagttccagaaaccaagggcatgccactggaagtgatcattgagttcttctctgtcggagcaaaacagtttgacgatgccaagcacaactgacccaaggacatgataaattcaaagttttgacggtaccttctaattattttcaatctacggctgtttgaaattttcccctcttttaaaattntattntctatttattctctctttt

SEQ ID NO: 22328 - DNA, 384 bp, Glycine max
  unsure (1)..(384): unsure at all n locations
  Clone ID: LIB3050-024-Q1-K1-F1
gagggtgaagattgaaatggataaacattcttacaggaaaaagtgatggagaagcaatctaaatctgaggtcattccgacttgaccagagtcagagttctgcaactaaagtgcattatccaaaccctgattttntgggaccttaaatttcctgtcttggatgttaccaatctagaggaactatctcgcttgaatatttccactgatatgaacaagtctaatgcaataacacctgaaggaagaggtcaaaacctggatagcttcatcgataattatcttgttccctgctcagtcaataagactgaaagaaatgatgagtcttctgttatgatggccagataccaagttctcaaagcccggattgatcagtcatncactgttacta

SEQ ID NO: 22329 - DNA, 357 bp, Glycine max
  Clone ID: LIB3050-024-Q1-K1-F10
ggcagttcaattccaatgtattccattctctctgtgtatttccctacctctcccttcaagatgcagatcttcgtcaagaccctcaccggcaagaccatcacccttgaggtggaaagctctgacaccatcgacaacgtcaaggccaagatccaggacaaggaaggaatccccccggaccagcaacgtctcattttcgccggaaagcaacttgaggacggccgtacccttgctgactacaacattcagaaggagagtactcttcacctcgtcctccgtctccgtggtggcatgcagatcttcgttaagacactcaccggcaagaccataaccctagaggttgaaagctccgacaccatc

SEQ ID NO: 22330 - DNA, 393 bp, Glycine max
  Clone ID: LIB3050-024-Q1-K1-F11
gggtcttgagcctaataatggattgacatgggagatgacaaaaagaaggggtgacaaagaagttcacatggtgacagaagagaaaccaggctggtgtagtgatccacatttgcctccttgtgctgcatttgtggaaattatggcacctgtcttttctcgtgaagcttggcgttgtgtgtggcacatgattcagaatgatctagtgcatggatggggattgggctttgctctcagaagatgtgtagagccagcacatgaaaaaattggtgtaattgattcacaatggattgttcatcaagtaatttcttctcttgggaaccagggagagtctgacaaaggaaaaatgccatgggattcggtccgagccagatgcaaaagtgaatgggcccagtt

SEQ ID NO: 22331 - DNA, 361 bp, Glycine max
  Clone ID: LIB3050-024-Q1-K1-F12
gcctcctgatgagaatggggaccacaggcttttggagtcctgtcagcaagatgacattgccactgaaaatgaagaggccggggaaacctttgtttacgagaaaactgaattagactgttcccctgaatctctccaaagcaaatattcaactgaaggagaatgtggcagtttgataggctctcctgagaatctggtttgtgaagaggacttgtattgtgagtttccacccaaaggaaacattgagaagagtaagagtggacaatcaagtaattccagtgctaaaaaggggtccaaaagaaccagaggcctgctccaacctgtgatccatgcaacagtggctgttgataaaaaaggtattagc

SEQ ID NO: 22332 - DNA, 138 bp, Glycine max
  Clone ID: LIB3050-024-Q1-K1-F3
tcgacaaaagtttatgtttgacacggataaacattcttacaggtaagaagtgattgaaaagcaatctaaatcttaagtcattcctactttgagccacagtcatagatttgtaactaaatagcattattcaaacccatt

SEQ ID NO: 22333 - DNA, 404 bp, Glycine max
  unsure (1)..(404): unsure at all n locations
  Clone ID: LIB3050-024-Q1-K1-F4
gaatcaattcagattcaacttaagggtgaagatttaaccaaacaatgggagaagtggagcttgatgctacacatcaaagctttccttgtgccagggtagaatgggctntaaggataaaaagtgttgaatatgagtacttaaaagaagacttagcaaataagagttctttgcttcttcaatctaaccctgtccacaagaaagttccagtgctcctacataataacaagcctatagctgaatcacttgtcatcctggagtacatagatgagacatggaagaagaaccctttgctaccacttgatccatatgagagagcacaggctcgcttctgggctaggtttattgatgagaagtgtgtgttagctgtatggggagctaccgtggcgcaaggagaagagaaagag

SEQ ID NO: 22334 - DNA, 380 bp, Glycine max
  Clone ID: LIB3050-024-Q1-K1-F5
gacccattgtggatggaactccactttggaaagtgtgtgtgcgggagtgcctatgattacgtggcctctctcggccgagcaattttcgaatgagaagttgataactgaggttttgaagattggtgttcaagtgggaagcagagagtggttgtcgtgggattcagaatggaaagatttggtgggaagagagaaggtggaatccgcagtgaggaagttgatggtggagagtgaagaggcagaggaaatgacaacaagagtcaaagacattgcagagaaagctaaaagagccgtggaagaaggtggaacatcttacgctgatgctgaggcgttgattgaggagcttaaagctcgcagattggcaagacaagattagattttta

SEQ ID NO: 22335 - DNA, 186 bp, Glycine max
  Clone ID: LIB3050-024-Q1-K1-F6
gactttggtgacccattgtggatggaactccacggtgggaagtgtgtgtgcgggagtgcctattattacgtggcctatctcggtcgagcaattttcgaatgagaagtttataactgatgttttgaatatagatgttcaagtgtgaagcatagagtgtatgtcgtgggatttagaatgtaatgattt

SEQ ID NO: 22336 - DNA, 379 bp, Glycine max
  Clone ID: LIB3050-024-Q1-K1-F7
ggctgtggaaagaacgaagacacgggaaagaaaaatggtgctagaacaagcagtatcatcatcaagcaccttgaggaacgttttcaccaatcccaaaaccctaatttcaaaaccccaattccaagtcgccgcttccccttcatggaaaccacagcagccgcgctgggaagggtggctggggataaacttgaagtgctccatgacaacaacaacaacgccatcatcataccctaagccctcggagattccgtggcagaaggaactctgcaactccgtcaacctcatcggcaacgtcgccgcccccgtcgaaatcaaatacctcccctccggcaaggtcgtcgcctggacccgcctctacgtcaagaaaagcgccacacaa

SEQ ID NO: 22337 - DNA, 278 bp, Glycine max
  Clone ID: LIB3050-024-Q1-K1-F8
gggctataggggggatggttctaacagcaggcttgatgtttataagcaaaaggaaaagccataaccaacgccagaaactagcagctataaagcgaactgcaaggaagcttgaaagcaggatgatggaacaacggccttctaatgctcaagaaaatagaagagtttctagataagtgttaccttgtatgtgatgttaagaacataattagttttactaatttgtaggtgaatctcgagttgtacgtactcttgctttcacgatctatcttctttttgcc

SEQ ID NO: 22338 - DNA, 291 bp, Glycine max
  Clone ID: LIB3050-024-Q1-K1-F9
gaggcatagggagagggacacgtgtttcatttgttgaatccagattgtggcaatgctgtttccttgctcgatcgagttgcttcctttatcaaccatagttatggatacagttatgagtttctatgtgatatgtctgtttgcacttgttacttgttacttgttagtaacatccttcctttacttgaggttatttatgagaatctgcactttctgtttgatgtagcgtatgtcactcacactgactatgtatgttgagcaattctagcatctgcttgaaaatatgttctattg

SEQ ID NO: 22339 - DNA, 409 bp, Glycine max
  Clone ID: LIB3050-024-Q1-K1-G1
gaattttattttttttaaatgaaataaaaaaaactaacataatgttatttaatattttttaatatttgttttattttaaatacttaaattttaaaaaactaaaattttaaaataaatattaaaatattttattattaatattaacttataatttatgaaataatattatttattttatataaaaaattactattaacaacatttaataatttaataataaaagtaattattaaattaaaaaacataatatattaatataaaatcaacaatacaaattaaaaaaattaaaaaaatagaaattatattaaccgtctacttatcaataattactaggattatattagaaaatatattaattttacttaaatgtcttaaatttttgaattaaaggcttttaaaaatttctttt

SEQ ID NO: 22340 - DNA, 336 bp, Glycine max
  Clone ID: LIB3050-024-Q1-K1-G10
tctagtgtgtgattgattgatggtgtaactcgatcttcttcttttgttgttctgtgtttgtgtctgacttttctctcacctgaaaatgtcttgctgcggaggtaactgcggttgcggaagctcctgcaagtgcggcaacggctgcagaggctgcaagatgtacccagacttgagctacactgagtcaaccaccaccgagaccttggtcatgggagtggcacctgttaaggctcaatttgagggtgctgaaatgggtgtgcccgctgagaaccatggctgcaaatgtggaccaaactggtcctagcacccctgcacttgcaagtgaggtgttgggag

SEQ ID NO: 22341 - DNA, 373 bp, Glycine max
  Clone ID: LIB3050-024-Q1-K1-G11
gttcgtggtcagtttgatccaacatctaaggtaactgttggagcttcttttttgtcacaaacaatagctctgcaagactctacaacagtcaagtttgaaatatgggatactgctggtcaagagaggtacgctgcgttagcaccactctattaccgtggtgcagcagttgcagttattgtttatgatataacaagcccggaatctttcagcaaagcacagtactgggttaaggagctacaaaaacatggaagccctgatatagtgatggcactggtcggtaataaagctgatcttctcgagaagcgggaagttgctgtccaggatggcactgactatgcagagaagaatgatatgtttttcatagagacatctg

SEQ ID NO: 22342 - DNA, 392 bp, Glycine max
  Clone ID: LIB3050-024-Q1-K1-G12
cacagaagtggagagactgaggataccttcattgctgacctttctgttggtttggcaacgggtcaaattaagactggagctccatgcaggtcagagcgtcttgctaaatataaccagctcttgagaattgaggaggagcttggtgcggaagcagtgtatgctggagctaacttccgtacccctgttgagccctactaaagttttcaagtggaaaaaacctggagatccccacgagtttgagcaatgagatttggatgcgcggttttagtcgtgatcaataagtcgatagttagaacaatagtcttggtataaggaccttgccaataattttttagttctgattcacagagctaagacagttccgtcttagactttaaaagttttgatattta

SEQ ID NO: 22343 - DNA, 215 bp, Glycine max
  Clone ID: LIB3050-024-Q1-K1-G4
ataggaccacttttgctctcacttcattgctgtgtaggtgtagtggcaatccaagtgcatcctttattgaggaaaatgcatgtgggaattgtcattcaattgcaggcaggccgaaccacatccacgagaaaaacgggttatcacgttgatgtggtgtctagggtaacgttgagacatcaattgtacagttgaggatgaccagtgtgggaaaccac

SEQ ID NO: 22344 - DNA, 399 bp, Glycine max
  Clone ID: LIB3050-022-Q1-K1-G8
ggaagagccagaggaaggaaagaggttcaaaccaacccacaagtttatgggatgccaagtccacccccaggtgcagttgcttcaaacaccttcttaccttcacctactgcaccccactcccactccaagcctgacaacactgataatgtttgatttcaacccaaacaccattcacatatatacatatcacattatcctaatcgctcacctcaggttggctgttgtgttgcatatttactttaggtatattggtgtaattatttggtccttgtagtaattcactccaataagatttagacccctgccccattttattcattaatttgtataacctctgttattttaattttgtctgttattctatgtatcccttgtttacaggttgaaagttcaatccac

SEQ ID NO: 22345 - DNA, 242 bp, Glycine max
  Clone ID: LIB3050-020-Q1-K1-G3
aggttaaactaacaacaactataaaagaccatgtgagtgaatgaatgctagcgccgcaaagcgaataatatgaagatcttccggcaaatgttctggtgcttaatggtgttccttctcatcatacttgtcacaattcttttgatatgggcatttcttttaccctcctaacccaccttcactctccattacttcaccttttacaccttcaacgccaccttggctaacttcctcacttctaattt

SEQ ID NO: 22346 - DNA, 317 bp, Glycine max
  Clone ID: LIB3050-020-Q1-K1-G4
ggaagagaagagtgaagattgagagttagggtgtaggctaaatcagatcagagaagagaggcatcatcatgtttccaggaatgttcatgcgcaagccagacaaagctgcagcactgaagcagctgaaatctcacgcggccatgttcggggcatgggttgttgttattcgagtcaccccttacgttcttcactttctcatcaccgaaaaagaggaacttatactcgagctttagcttctcactcttcctcggcagattggattttgatgattaggatgtgttcttgtgttcaggacattaatggagttatgtttttta

SEQ ID NO: 22347 - DNA, 328 bp, Glycine max
  Clone ID: LIB3050-020-Q1-K1-G5
aaaagggcgcctaagcaaaatctgaggcatcagagtagcatgaacttcttgcctgcaggttgagaggagcacatagatctccggagcgagagcttggctaacagaagatccaagctttccagtgcaactcaacaagcatccacagcataaatctgctttcagacagatgaagtttaatcttcgctctagtacttgataagtctcatttcatgatccctttcttttggtattctggtattctaattcttttataaagtatcactttaatgctttgctctacagtttaatggaatttatgtttttattctttgttgttattttatgtact

SEQ ID NO: 22348 - DNA, 317 bp, Glycine max
  Clone ID: LIB3050-020-Q1-K1-G6
catcttgaatgcaagaaagtttttgtgttatgtttgggggggcagatgacagatttatatctaagtgccaattactagaacttttttattttgacatgacttgctgatgataggttctattctgcaattaatttgtttttaatctgagttttattagtgataaatgtagatttgggaaaaaaaatcataatttcgtatcatgtgttattggatttgagttccctaacataagcattgcatgtttaatcaagatctatagtgcattgatgtcatgatttcaaattatgtattatgattttgatttatcatttatatta

SEQ ID NO: 22349 - DNA, 269 bp, Glycine max
  Clone ID: LIB3050-020-Q1-K1-G7
gagcttttgctgcagccttgatcaatgatgccttgtgggtcatgaatgtggtctcatcttatggtcccaacacactccctgtggtttatgatcgtggccttattggaaccttccatgattggtgtgaagctttttcaacatatcctctaacctatgacctccttcatcttgattgactcttcactgctgaaagccacatatgttaaatgaagtatgtgttactggaaatggatcataattataatgcctgatttgcatactatcattct

SEQ ID NO: 22350 - DNA, 239 bp, Glycine max
  Clone ID: LIB3050-020-Q1-K1-G8
ccactcatcctacgcttccaaaagcacaccgaatgggtattcaattccaatacattccattctggctcgatatttccctacctctgccggcaacatacacatcttcgtcaagaccctcacctgcaataccatcacccttaatgtgtaaatctctcacaccatcaacaacttctaagccaaaatccattacaatgaatcaattcctccttaccatctacattatcattttctccttaaaa

SEQ ID NO: 22351 - DNA, 224 bp, Glycine max
  unsure (1)..(224): unsure at all n locations
  Clone ID: LIB3050-020-Q1-K1-H1
acttgaagcatgtcttaagaattcgtcgatcgantgtagaagactggatggagcaatgtcagtcactgcaagagataaagctgttaaagattttaacactctccctgaggtttcagttatgattatgtctttaaaggctgctagtcttggtctgaatatggttgctgcctgccatgttcttatgctagatctatggtggaatcctactactgaagatcatgctt

SEQ ID NO: 22352 - DNA, 189 bp, Glycine max
  Clone ID: LIB3050-020-Q1-K1-H10
gtacacgaacgtgtgtacgatgaatttatttgtaaagcaaaggcacgtgctttgaagcgtgctgttggtgatccattcaaggggggaatagagcaaggtcctcagattgattcagaacaacttcagaaaatactgaagtatattaagtccggtgtttaaagtggatctactcttgaaactggaggagat

SEQ ID NO: 22353 - DNA, 133 bp, Glycine max
  Clone ID: LIB3050-020-Q1-K1-H11
gagagtcggaattgagaacaatcgttggtgtggaacgtgacaatggtggcgacgaacgtgaaggcagaaaccatgtctctgatggacaagcgcagcgccttggaggctgatatgaactccatcatcgtccgcc

SEQ ID NO: 22354 - DNA, 354 bp, Glycine max
  Clone ID: LIB3050-020-Q1-K1-H12
gagaagaaaaaaaaaacattttcatcatcttgctcttctttttcatcaatcatcaccagtggttcttttccttctgagaagatcgaattgtgttttgcaaaaatgggagttccagagaaagaccctctttcccaattgagtttgcctcctggttttcggttttaccccaccgacgaggagcttctcgttcagtatctgtgccgcaaggtcgctggccaccatttctctcttccaattcattgccgaaattgacttgttcaagttctacccttgggttcttccaagtaaagcgattttcggtgaaaaaagagtggtacttttttaacctcagagtactggatattcccgaacggg

SEQ ID NO: 22355 - DNA, 315 bp, Glycine max
  Clone ID: LIB3050-020-Q1-K1-H2
gctacgagtaacacaacgcaacgagaagactacacactggtgcctaccataaactacaagatgcgtgaacatttgctaggggtggtgacgcaatgatctatgactagaatatacttaatcaatacattcatgatgataatgataatgagacccgattttcaatattagcacgagaacctatgattcctggcactgattggcgatttcatactaccatagtattctatttaaaagaaggtcctctgatacttatcagagcccttgctgatcatgctttgttccacattaaccttacacagattgaaaatcttatct

SEQ ID NO: 22356 - DNA, 355 bp, Glycine max
  Clone ID: LIB3050-020-Q1-K1-H3
cgccatggagagcgttcacgcttctctagccagatacagcctggacaaaaacattaaaatctcctcacccatcgcactctcggctctccaaaactcgttccccgcctcatccggttccttcaaaaccgaactcctcgaaccggttatcaagcccatgctcgacttcctccgccaaaccggttcctacctaatggtgaatgcctatccgttcttcgcttacgctgcaaactctgataaaatctctttagactacgcgctgttcaatgaaaaccctggcgtggttgattcaggtaatgagttaaaatacaccaacttgttctaagcttaaatctacaccttatttgcttgccatatt

SEQ ID NO: 22357 - DNA, 261 bp, Glycine max
  Clone ID: LIB3050-020-Q1-K1-H4
agggatgttcgcggaggatcaagccaaggactaggcaagcctaatatgagcgaacgcgagaattcagaaatatgaaaaagaagagaagtaaaactgaactcgataatctcgttgaactcaggacaaattgaatacttaatttctcttctctctagaaacgtacatactaaacaatttctatgactatttctgcttctgcttcatatgcaaccttttagtttttgcagttgccacttcatgtcttcataccttcttctaatt

SEQ ID NO: 22358 - DNA, 243 bp, Glycine max
  Clone ID: LIB3050-020-Q1-K1-H5
ggtctcgtggaagtgtaagcaagcagagcccgagcggcgcctgctttctgtggtcgtgttttgcatcaggatggagtctcatgtgaagcacgcacttgttgtcaaagttatgggtcgtactggatccagaggacaagtgacccaggttagagtgaagtttttggatgatcagaaccgtcacatcatgatgaatgttaaatgacctgtgagagaaggagacattctcaccctactctagtctga

SEQ ID NO: 22359 - DNA, 180 bp, Glycine max
  Clone ID: LIB3050-020-Q1-K1-H6
gtgaggagcagatgatgcgcgccatggctgtctctgtgggtgaagctcgagccatgtcaagtggacagagtgcttcttggcagtagtttttggttgaggtgctggtttaatctttcttaaattggtgatgcttgccttggctatttgactagccaagtccaaggttgataatatgaggga

SEQ ID NO: 22360 - DNA, 80 bp, Glycine max
  Clone ID: LIB3050-020-Q1-K1-H8
tgggaaacctggtggtctgatcgagattactgtagggaagtaagtctgtcgtatttactttcaaagacttttgcttatga

SEQ ID NO: 22361 - DNA, 215 bp, Glycine max
  Clone ID: LIB3050-020-Q1-K1-H9
ttaaccaaacaacaaatattcatggctttcttgattcgctccttcctcttcctgcttcttgtatcatctgccactgcttgtgatcgctgcttgtatcaatccaaggcttcctatttctccaaagcttctgctctttcatctggggcatgtgggtatagctcttttgcactaaacataaattgtggacactcttcatctggtatggattctttctt

SEQ ID NO: 22362 - DNA, 214 bp, Glycine max
  unsure (1)..(214): unsure at all n locations
  Clone ID: LIB3050-021-Q1-K1-A1
actcacaaaacaatataacttaattgccttagggaacgttcnagaccacagaggtttctctaatcttcttctgtggatatcttgttttctcttgttcattcatctcacttccaattaatgaacatgctttccaccaatttgaatcaccaatggctcgctctttctccaacctcaaagttctctctgctcttgtcgccgacggattctccaacac

SEQ ID NO: 22363 - DNA, 168 bp, Glycine max
  Clone ID: LIB3050-021-Q1-K1-A10
tgggaaagcaaaaaacaggtaacgctgcctataagagagaatggagtactctaatggattccctataaaaagagatgttactcttcaggaacttaccaaaaggctcgctgagtttgctgaaataatatgattgtatcattattacaatccctttaatcatattatacc

SEQ ID NO: 22364 - DNA, 213 bp, Glycine max
  Clone ID: LIB3050-021-Q1-K1-A11
tatagggcagcagaggacgacaggggagatggttccctcaatacaagtggcgtggcagtggaacatgaatacaactatcatgatgtatgagggtcactctcagcagtaccacgtgagctgttggattctgtggactatgccattgtcttcaagcccttgaatttctatctccttcgccggaatttctcgtcatccatcgcaaagaggttctcc

SEQ ID NO: 22365 - DNA, 119 bp, Glycine max
  Clone ID: LIB3050-021-Q1-K1-A12
ctatatgggtaacaaaacaagtgtttctaatacagtatcctaaaacattttgcgatagtgctgcaatgacttcaagtcatgacgaggtgaccctttaaggagctactagatacccattt

SEQ ID NO: 22366 - DNA, 380 bp, Glycine max
  Clone ID: LIB3050-021-Q1-K1-A2
agggatcagcaacaaacaaactaattaagcaacacaggcttgaatttatcagtatggggtccggtcagtgccacaaaacctactaagtgagctgccaacaggaaaaccagcacgcctcgtttgggcagaaagtttctgacttgttcaaagggcatcaacataatgaccacagctccaattatgccacccaaaccaaagtgctttcccagtcagggtcagggttaggccccttcaccaccaaaactcaaacacaatgcggttgcccccaaacacatctcaataccactcatggctgcgacacagaaggccatggccatggccaagggaaaattaagaaggaacacaggaaaaggattctgcagaacatcaaggatcgctta

SEQ ID NO: 22367 - DNA, 173 bp, Glycine max
  Clone ID: LIB3050-021-Q1-K1-A3
tgggttgtgagtacaacattttattcagaaagtacaagggcaagggtttgtttattgagagttgagacatatccagcagacagaacccatctgcgaatgacggttgcttcaagggacccaacactaacatttgagatgaaggatttcatcatggaccaatttgtcaacattcc

SEQ ID NO: 22368 - DNA, 101 bp, Glycine max
  Clone ID: LIB3050-021-Q1-K1-A4
ggctcgcgcacttgtttgtaggcacgagtgacgggagagggtgtctccggagaagacaagttaggttctatggctgctgtgaaagtggagaacatgtgtgc

SEQ ID NO: 22369 - DNA, 109 bp, Glycine max
  Clone ID: LIB3050-021-Q1-K1-A5
tctcgtcagaaccagtcgtcaaacacaggcgtcaaacagagtcgtcaaaacacagtcgtcaaaacacagcgtcagaaacgaggtcgtcaaaacacaggtcgtcaaacac

SEQ ID NO: 22370 - DNA, 204 bp, Glycine max
  Clone ID: LIB3050-021-Q1-K1-A6
taggggataataatgattcgttacttgacgggtattggggaagtgataggacggcattgtctaaatataaagcttatgctaggatatctctcggtgaaattagtattcaccaagcatggcttttgggacaagatgcgacttctccttatgggctttacaatggtcacagatgtggcatgtgtatgagatctgattctcatttac

SEQ ID NO: 22371 - DNA, 85 bp, Glycine max
  Clone ID: LIB3050-021-Q1-K1-A7
taggggatgaaggaagagtgagcgtgaaagatgccttgggcaatgctttggggggctagaatgctcgacgttgctattgatatgg

SEQ ID NO: 22372 - DNA, 194 bp, Glycine max
  Clone ID: LIB3050-021-Q1-K1-A9
gcagatagatctggttcttgttgttggaaagagaccgtagcgagcggaacaatggcagacgttgaggtcgatgtggcggctgcagcagcagcagggcagccgaagaagagaacgttcaagaagttcagtttcaggggcgtggatctcgacgcgcttctggacatgtccaccgatgaactcatgaagatgttctg

SEQ ID NO: 22373 - DNA, 157 bp, Glycine max
  Clone ID: LIB3050-021-Q1-K1-B1
aaaaaacaacataagggataaacattgattatcaatgggttgctccaaaattaagcatggtcaaaacccaattattttccttccttggaacttaattattattagcttacatatattaaggaatgcactaaataacacattattatattacattatc

SEQ ID NO: 22374 - DNA, 339 bp, Glycine max
  Clone ID: LIB3050-021-Q1-K1-B10
gaagacagattacgttggtaccgtggaaaggaatggagctacctcaggggtggtctaactactcttgatcgtgattatggatggatcaataacattcaccatgacattggcactcatgtcattcatcacctatttcctcaaattccacactatcacttatttgaggctactgaagctgctaagccagtgtttggaaaatattatagagaaccatagaaatcatcagcacctcttccttttcaccttattggggaaataataaggagcttcaagactgaccattttgttagtgacacaggggatgttgtgtactattaatcttactctaatattaatggc

SEQ ID NO: 22375 - DNA, 297 bp, Glycine max
  Clone ID: LIB3050-021-Q1-K1-B11
ctcgactcactcctgcttacagatgcacagaacgacagaatgcggctcctagtagacgacaaaaggagtaacagcagagtcataacaacggaagggtgcagatgcgagtaagacaaccaattgtgtacgcctgccacaagaccacagccagttaccgctccgaacataccacttaactgtactgcttccagaaaacaccgtaacctttctgatacattatgacgccccaaggatcctgctccgaacccactacctatcggggtcatccaatgttctcttatcaaatcgatatgatca

SEQ ID NO: 22376 - DNA, 326 bp, Glycine max
  Clone ID: LIB3050-021-Q1-K1-B12
gataccacaccatttcaaacaattgtgtgttgaggtgaatagctgtgcgagatagaaaatgaagaggggttataattatctttcagtggctatttatgtgatgatgtttttggccttggtctcgtactcctccatcaagattgagggaatgagaccgctgaaagctgatccatccttcataagtttgataatcaaccgggcttattctgggccaagccacagaggacgcggtcattgaacttacaaacttgccctctatttttgtccatatatatcatgatttatacatcttgagaatatatattgtgacactttcatattcaaca

SEQ ID NO: 22377 - DNA, 208 bp, Glycine max
  Clone ID: LIB3050-021-Q1-K1-B2
gaattcatagagagcgagacggcagcacgcgcaaaaatggtgaagtttctgaggggaaacaaagccgtcatcgtccttcatggactctacgccggcaaaaaagccgtgatagtgcgaaccttcgatgaaggcacgcgcgagcgcccctactagcactgcttggtggcagggataaataagtaccctgctaatgtgatcaataatgatt

SEQ ID NO: 22378 - DNA, 273 bp, Glycine max
  Clone ID: LIB3050-021-Q1-K1-B3
ctcattgatcaattcttaaaggatgcaatcaatgatagaacagatgaatacgggggaccactataaaaccggtgcaggttcttaatggaggtagttgaagctgttgtctctgccattgtagcggaaagagttgctatcagaatttcaccagcaattgatttcaatgacgcctttgactctgacccacttgggctaggcttatcagtgattgaaagactcaacaatttgcagaatcaagtgtgctcaaaactctcttatcttcatgttactcag

SEQ ID NO: 22379 - DNA, 146 bp, Glycine max
  Clone ID: LIB3050-021-Q1-K1-B4
tagggcaactgaagaatctacacaagttctccttttggatgtgcaatgtgaatgaggcggtcaaaaatatcaccatccaattttcaaaagtgttcccaaatttggaagagatgaacatttactactgtgatattgtgtaattacca

SEQ ID NO: 22380 - DNA, 157 bp, Glycine max
  Clone ID: LIB3050-021-Q1-K1-B5
ggaacaaaacaagtgtttcgaatagattatcctgagtctgggggaatagtgctgcggtggcttcaagtcaggaggaggtgacccttttgggagctgctggaagcccatgtaggtgcatggttcatagggccctcaagttgaatggagttcaatacaa

SEQ ID NO: 22381 - DNA, 56 bp, Glycine max
  Clone ID: LIB3050-021-Q1-K1-B6
gagacctcaggtcaggcggggctaccggctgaggttaaacaaaaaggaggggaagg

SEQ ID NO: 22382 - DNA, 223 bp, Glycine max
  Clone ID: LIB3050-021-Q1-K1-B8
gatagtaagagtaccttccatttccatgtgacaggggacaattggttgtagtgagtgtgggaggagagtcacaactaccagtccttgctttgcatcgtgtgagtttgggagatgagtgaagctactcggaaagttattccttcctcagcaaaaaaaaaaccattcctttataaccataaatcgccttctttaattttcttcaccaccactgcattactctctc

SEQ ID NO: 22383 - DNA, 170 bp, Glycine max
  Clone ID: LIB3050-021-Q1-K1-B9
gacccaccgtcgcccacctccgtacgcagaaacacgaaggtatcaaactttccatggcttgatcattcaacgtgtgttgccctattgaagaaaggggggattcactgaataagggtggctatgtgtctcaacgccttttattcttaatgggaatattcactgcaattttc

SEQ ID NO: 22384 - DNA, 186 bp, Glycine max
  Clone ID: LIB3050-021-Q1-K1-C1
gccagcgcgatccgccagatgtagcggcaactcgccgtgacggctctctccgtgagcgtgtccaagacgcgctcatgcgcgtcgttcgtgaagagaatagggctccgtgaagggaatgaagcccagagagtacaacgcactgcgtgactgcgtggagaacatgggcaacaacgtggaccgtctcag

SEQ ID NO: 22385 - DNA, 171 bp, Glycine max
  Clone ID: LIB3050-021-Q1-K1-C11
tatagggtcccaaaataattttgttacgtttcgttccggctttaccaatccatcgtttaattcaccttctcccccttgtaacccaacacatattacatgcatccaattcctcagatatttcctctcccaaatttctgttgttattaattatcatattaattatcaatattc

SEQ ID NO: 22386 - DNA, 137 bp, Glycine max
  Clone ID: LIB3050-021-Q1-K1-C12
ggttattaaaacgacggggccagtgtgtgtggcagcatttaatgggcggcgtgtgatcatagtcacggccttggcctgcatagtcctctcagagaaacttcaccttggaagtattattggaggagtggtggtggtaa

SEQ ID NO: 22387 - DNA, 320 bp, Glycine max
  Clone ID: LIB3050-021-Q1-K1-C2
ggagtaactaaacattgatcaaacctcaaaagggttcgggtattagatcattatgagaccaagaagaagcaagagggtgtgaaaagcaaagtagagtagctagagagaatagaaatgactcaagtgatgagaggagaggtgattgagaaggcttatgctgggtcttggaaggctcacaagtccccagacaagccttaccttattgaaaagatcaacagagacgaccctcaagaagtgatctttggggattcaggatcaggtgctgtcagggattggttctctcagaaaaactgtggtgaagcaaaaatagatcttggtct

SEQ ID NO: 22388 - DNA, 229 bp, Glycine max
  Clone ID: LIB3050-021-Q1-K1-C3
ggcagccaaagaaaagaaaatcctcaatttttggagcagccaaacactcggtctgtgtctctcgaaaattctcagtttgcagaaaaaatctgaatcatgtcgtggcaagcatatgtcgaccatcaccttctgtgtgacatcgaatgtaaccacctctctcgcgctgctatcatcggccaagacggcagcgtttgggctcatagtaccgactttcctcatttcaaacctg

SEQ ID NO: 22389 - DNA, 207 bp, Glycine max
  Clone ID: LIB3050-021-Q1-K1-C4
tactataaggggcagctattaagcagagtttgtgtggtaatggcttaattaattagttctgagtgtttaataacaataaactctctacaacattttattttttctttagttattgatttgtttaaatttgcttattacctttagtggatagacaataataccaactaattacaagcactatgtattatggacatcaagttttggggt

SEQ ID NO: 22390 - DNA, 150 bp, Glycine max
  Clone ID: LIB3050-021-Q1-K1-C5
gggcccccaacgaaacaaaccccaaacgctaagcagtttcggcaagattcaccagtggctttctccaaagcattgatcctcgccgtcgtaatgtcagtgttcgtctccgtcatctacgcctctgaagctccggcttctaaccctacctct

SEQ ID NO: 22391 - DNA, 99 bp, Glycine max
  Clone ID: LIB3050-021-Q1-K1-C6
tggcattgcatcatggacaccttatcatgatggcttgggtttctttgatatgtgcttgcctacatattatcccagtgaaccccctatggagcatgataa

SEQ ID NO: 22392 - DNA, 225 bp, Glycine max
  unsure (1)..(225): unsure at all n locations
  Clone ID: LIB3050-021-Q1-K1-C8
tatgactacagaatgggattcatattttccttgcgtttcccttgcgttttggctcactttctcggctggccaaacacccctctctctcctccaataaccgaccagctcaccgacgaccatatcgcctaattcatagaagccttcatcctcttctacaaggacngcgatggttatattactactaaagaacattatactgtgatgctgtcactatggcaaaaccca

SEQ ID NO: 22393 - DNA, 264 bp, Glycine max
  Clone ID: LIB3050-021-Q1-K1-C9
ggacactcctgaagaggatgatgagaagagcggaggggtggttgagccgtcagaaatcatgaagggcagcaagatgtactacaggtacatgggatcactcactgcacctccttgcactgaagacatcatttggaccgttgataagaaggtaagaactgtttcaagggggcaagtgaagttgctcaaggatacggtacttaaatattatgccaaatggaatgcaaggccgctgcagcccctaaatcatcgagcgatacaacttta

SEQ ID NO: 22394 - DNA, 114 bp, Glycine max
  Clone ID: LIB3050-021-Q1-K1-D1
ggtggctggctgtagtagtgctttgctgtcctggagtagagaataagccgtgtggctcactctctaatctatttgtgaactaggttttggttgcatagacatgagataaaggat

SEQ ID NO: 22395 - DNA, 306 bp, Glycine max
  Clone ID: LIB3050-021-Q1-K1-D10
ggaactgactggaggaaagcatctaggcaatgttcaagggagagattcaagagtttgagcctaaatttgatgaaagatggctcgcttcagcttcatgatgaaattactggtcaagctgtggtggtttgagtgtaaagtaatttctttctgtagcctcatgccatgcgctcactcagttactcatttttcttgcaccacctattgtgcttgaaatatcgtttgcggaatctctccaaggaagcaagttttgggcaggtttgagttttagtggttgaagcattctaatgatcttgagtttgattatgt

SEQ ID NO: 22396 - DNA, 344 bp, Glycine max
  Clone ID: LIB3050-021-Q1-K1-D11
ctccatgtaaatgaggatggaagcctgttaagcacaatttctgatggagagtgctctctagttgattgggtccttgtagatagtgcaaagggtggcagtggtaaagcattcaattgggaccagttgaaactgccaaacattaaaagcaagtatggttggctcttagcaggagggatccatcctgagaatgtttctgaggctctatctactttcaggcctgaaggggtggatgtcatcagtggcatttgtgcatcagatggtatccctaaggatcaatctttaataacttctttcatgaatgccttgcaatcttttcagtattgattaccttaaattattattaa

SEQ ID NO: 22397 - DNA, 250 bp, Glycine max
  Clone ID: LIB3050-021-Q1-K1-D12
taaggtaacgcatccaagaaaagaaaatcctgacccgttttcttcgtaggcgggcactctgaaattctcagttatgtcgtggcaagcgtatgtggatgatcacctactgtgtgaaatctaaggtaaccacctcactcgcaccgctatcatctgccaatactgaagcttttgggctcataacaccaactaccctcatttcaaacctgaggaaataactgccatcaataatgactttaatgatcctggatca

SEQ ID NO: 22398 - DNA, 244 bp, Glycine max
  Clone ID: LIB3050-021-Q1-K1-D2
gaattaccggtcgaccactctccgacggctgccataaactacataaggggatgtgtgaattaaaatatattcaattttgctgttctcggcctaaaacgagtgggagatgggtcaatcattcagttgctaccaagtcgatcagtcaaatgtggttatcaaggatcatttgagaaaatttgatgatgtcctatatcctgtatgtcactgcctgccttggtgtctatggtaccatattgctggtaat

SEQ ID NO: 22399 - DNA, 320 bp, Glycine max
  unsure (1)..(320): unsure at all n locations
  Clone ID: LIB3050-021-Q1-K1-D3
tgggagaggctgaagcggcaaatcgcgtctaccgagttccacagcgggagcttatcttantagcttaactctttctactggcgtggcgctgctggatgcttttgatcaatagaacaggaagaggagtcagccaaaaagaaagaccaccaaaagtaatgaccaccaagatatgcatagtgattcgatcttttgatcacccatttttggaaaaccattttggggggcttaatcctttcacacagaagattggattgcctgaatcacgagtcttatatactgggttacgatcaccttatattgataaaaagttcagagaacaa

SEQ ID NO: 22400 - DNA, 284 bp, Glycine max
  Clone ID: LIB3050-021-Q1-K1-D4
ggtatcatgagggttccatgctgaccttcgaatgtcagaggatccagggcgcttggagtatcgtcgctaagctcacttccctccctttccagcagtgccaccactccatctccaccgtcgactgccagccctccggtgtcaacgctggcatgcttgtctttgtcagcggcaacctacagctcgctggctaacagcacactctcaagttcagccagatgttccatttgatacgcacgcctcatgagaaacaattaatgtgttgaatgacatattccgtttgaact

SEQ ID NO: 22401 - DNA, 268 bp, Glycine max
  unsure (1)..(268): unsure at all n locations
  Clone ID: LIB3050-021-Q1-K1-D5
gtgccaacaaggattggtcctttggtgtcaacgacactgattggtgggcganatgctgaaatcatcctcagaacaaaacacagcaacaacccaagcaaattgtcgtgagtggttctgagcattggcactactgattcaactacaccgattgggcattcaagagtgccccattttacctcaatgatactctagttttcaaatatgatgctccaaatgccaccagtttcccacacaatttggacatatcaaaaattttgggaacttcttg

SEQ ID NO: 22402 - DNA, 209 bp, Glycine max
  Clone ID: LIB3050-021-Q1-K1-D6
tatagatacgaaacgacgacacagagggcccggcacaatatgacgacagaggctgacatttgaagaaactgagatcattgggtgtgaaatatatggcagacgttgtcttgctattcgatgatgtgaaactactttctgctattcctcgctgtctaatttctcatgaataagagtctgaaagcgtacaaaccttggaagcaccttgtgct

SEQ ID NO: 22403 - DNA, 209 bp, Glycine max
  Clone ID: LIB3050-021-Q1-K1-D7
taggggagagaatagatatccagtcaaaacggtatcggtctctctctggggggtttgggctcttgctgtaagaagccagccacagtactgttgcgctcctgtggaaccatctatgggctttaacaggttccacatctgttgatctatgtgtcagatatgccaatagtgatatcctaattcttgagatatactagtgtgtatgatcatat

SEQ ID NO: 22404 - DNA, 217 bp, Glycine max
  unsure (1)..(217): unsure at all n locations
  Clone ID: LIB3050-021-Q1-K1-D8
gaaatctcaatgagagaactcaattgaatgatcagatnangacagtgattgggcgcttgatccattccacgccttccatttccaggctcaatgccacggtagtgtcaatcatcgggagaaatctctgcacagattctaacaaagttgatgggccattcaaagttgaagaagcatagactgtaaatgtgcctccactcccaacagaaaagttgcttgt

SEQ ID NO: 22405 - DNA, 277 bp, Glycine max
  Clone ID: LIB3050-021-Q1-K1-D9
tataggtaaggatcagcagggagaattaggtgtggtatgatttacaccaaggaggggcagctcccgcaacagccatggttctcaaaactgaactatgccgattcaatggtgccaagatctacccaggaaagggcatcagatttgttcgtggtgattctcatgttttcctgtttgcaaactcacaatgtaagaggtatttccacaatctcctgaagccttctaatctcacctgtactgcattgtacataaagcaacatatgatagacatttcttatta

SEQ ID NO: 22406 - DNA, 169 bp, Glycine max
  Clone ID: LIB3050-021-Q1-K1-E1
tatatcacaggttgaacaatccacacccaacggtctggcaagtcacatcgcgagggccatgtcattaattcttgcagaatattgcttagttttgtattatctgaatttggaaactactattaaattactttttcaagaattgcacttctaatattcacggtctggtatt

SEQ ID NO: 22407 - DNA, 313 bp, Glycine max
  Clone ID: LIB3050-021-Q1-K1-E10
gaatccgaagtgggaaggcacacgcgtgtttgcgcaacgcaagcgattgttagttgtattcgatggactacgatttcagaagcaggtcgggcccacaacctccgatgtaccgtccgacaccgccaccgtcaccgatgtaccgtccatcaccgtatcaacagaatcctactccttcttcaggacttggcgttagggttggtataaagccggaatatatgatcactaccgcgtctcatttatcatcacttgctggagataatccacggagcaacttttaatttgatattggattgggttagaaaaatttaatctt

SEQ ID NO: 22408 - DNA, 378 bp, Glycine max
  unsure (1)..(378): unsure at all n locations
  Clone ID: LIB3050-021-Q1-K1-E11
gaggcaatagaaaagaaaaccaagtcgagttgtcactttgaagagaaggaacgagcgtaaagatgtctgcatcaggaggcagaggaagccaagaggaagagaggaagccttctgatcaaggagcacatattaatctcaaagtcaagggccaggatggtaatgaggttttctttaggattaaaagaagcactcagctcaagaaacttatgaatgcatactgtgatcgtcaatctgtagattntaacttcattgctatcttgtttgatggaaagagactccgagctgaacagactcctgatgagctagagatgggggatggtgattagaatgatgcaatgctgctccaaattaggggtatacactaatatcttataattg

SEQ ID NO: 22409 - DNA, 208 bp, Glycine max
  Clone ID: LIB3050-021-Q1-K1-E12
tggtctaaatttcaacctttgccccaaaaggaggagtttggaacattgcttgccttggttctggaattttgctggtgaagtatattgtttctgttttggcagcaatttatatgcctcatgtgaatataaactttcatgcgttggttactcgtaccgactcatacaattttttctataagctttatataccatggttgttttgtatgta

SEQ ID NO: 22410 - DNA, 211 bp, Glycine max
  Clone ID: LIB3050-021-Q1-K1-E2
ttaaggacagaaattaacaaccatatctattcttacaaggtacatccattgagaaacatgagaggtctcccccttagcattttcaatcctttttttgtccttcaccatagaactcttcattggcattgcttcagcagcacaagaaccagtgcttgacacctcaagccataagctgagaacaagtgtcaagttctacattctaccagtcttc

SEQ ID NO: 22411 - DNA, 243 bp, Glycine max
  Clone ID: LIB3050-021-Q1-K1-E3
caagaagaaaaacattctctcaccctcttcaccgtccggtccatcttctctatgggcaacctcagatcattcttccaaagtagttccaatggggaagcatggaataaggcgctttctaaactttggttcatcttttgactttagatgatatgatgaagaagagagtgctagtgctagtactactactacttcaactacttcaaaactttgctttggcattactcattctacaaacactttgac

SEQ ID NO: 22412 - DNA, 206 bp, Glycine max
  Clone ID: LIB3050-021-Q1-K1-E6
gataccacaccatttcaaacaattgtgtgttggggtgaatagctgtgctggatagaaaatgaagaggggttataattatctttcagtggctatttatgtgatgatgtttttggtgttggtctcgtactcctccatcaagtttgagggaatgagaccgctgaaagctgatccatgcttcataagtttgatgatcaaccgggcttatt

SEQ ID NO: 22413 - DNA, 364 bp, Glycine max
  Clone ID: LIB3050-021-Q1-K1-E7
taccttaggggtggtctaactactctggatcgggattatggattgatcagtaacattcaccatgacattggaactcatgtcattcatcacctatttcctcaaattccacactatcacttagttgaggctactgaggcagctaagccagtgtttggaaaatattatagagaaccaaagaaatcatctcctcttccttttcaccttattggggaattaataaagagcttcaagactgaccattatgttagtgacaagggggatgttgtgtactatcaaactgactctgagattaatggctcgtgcaaatcagagtgaagattaaaaatgcattttatataggacaagatagactgatacacaattc

SEQ ID NO: 22414 - DNA, 177 bp, Glycine max
  Clone ID: LIB3050-021-Q1-K1-E8
acagcagcaaacatcttcacaaactaggtaaagagtaatattattcttcgaatcgcattttattattcataatgggtgttttcacatttgatgatgaaaccacctcctctgtagcaactgctaccctttacaaagctctaattgcagatgccgacaacgtcattccaaaagctgtag

SEQ ID NO: 22415 - DNA, 358 bp, Glycine max
  Clone ID: LIB3050-021-Q1-K1-F1
tatagggtacttcatccaccataaccctcttaccctttaggtcagcaaactcatttctgtggaaaaccctcaaactcaacacctcttccccacactctcacctttcactacccctcaacaagtctttcacttgtagaagccaggctgaaccatcttctgactcatccaaagtccaagaactgaatgtgtatgagatcaatgagagagatcgtggaagccctgcttatcttagattgagccagaaaactaacaattcccttggtgacctaatccccttcagcaacaagttgtactctagatgtttgcaaaagagggtagggataacagctggaatttatgtgttgatccaaaacaaatc

SEQ ID NO: 22416 - DNA, 324 bp, Glycine max
  Clone ID: LIB3050-021-Q1-K1-F12
ggtgtattcaaaggtgaacataatagtggcagagatacaagtaccacgggccgtttgaaggaacagcatggtcttggaatgcaacaaggtaagaaaacagtagtagatatcaatgacactttcactgagtacattgaacgtgctaggcacagaatcagaaccgtgtcaaatgttggtagggggcagagccactctgtgtcagatgaaactagtgggaataagaataacaagatggaaaaccatacagaccaattttctgattttattcaatattctaagaagaatatgagaactactacatcaaatgttggaaagactaataca

SEQ ID NO: 22417 - DNA, 166 bp, Glycine max
  Clone ID: LIB3050-021-Q1-K1-F5
gaccaatgaatgcaattgcagagtgattttgttcggggaacagcgacatggagagttgcctgaatccggaggagttcagactgagtcacatagatcgttccatcgaaacgttggagaaatggagatccgcatcgtggttggtcagtaacccttaaagacggttcca

SEQ ID NO: 22418 - DNA, 196 bp, Glycine max
  Clone ID: LIB3050-021-Q1-K1-F6
gaccaaactcaattatacaggaccctgaagaaagacacagccgttgtttacttttcattgattgagccaaagctttgtattttctgcgataattttccattgggtggaagaaagtctcaacctttattcgaaagagcaaggatctgagttgggttgagtgatcatgtgtggtggtgcgattatctccgacttcata

SEQ ID NO: 22419 - DNA, 98 bp, Glycine max
  Clone ID: LIB3050-021-Q1-K1-F7
taggggtgtccgtgtagcttccttaatttctgcttcggcttattatcatggagggttctgagattgagctcatgttgggtgtatgtgagaaaggactc

SEQ ID NO: 22420 - DNA, 53 bp, Glycine max
  Clone ID: LIB3050-021-Q1-K1-G1
tactgctgctataatactacagaagggtactgctgctataagactacataatg

SEQ ID NO: 22421 - DNA, 207 bp, Glycine max
  Clone ID: LIB3050-021-Q1-K1-G10
gaagagatagagttatcgatcccttgggggagataagaaaatgtggcgtggtgcagctctcaaccccatttctgaacggccatggccatggctccagccttctctggaaacccagttcggcggtgactcagacccactgggccccgccgagtttgctgcctcaaatcaatgctatgaagacgatgcatggaaaagtggtgttctcct

SEQ ID NO: 22422 - DNA, 272 bp, Glycine max
  Clone ID: LIB3050-021-Q1-K1-G11
atcccaataaccctttatttttctcggtttggtttatttttttatgaggaaggagaaaaaagaaacatattcttgcaatttcgttgtacaaacaaaattcccctattttcggcacgcctttgttgaatttccaatctctatttttctttctttctatttatacttaataattccaaaaagcctaactctagatattcatcaatttttcaattatacctcaaatttttaaagaatcatacaaactcttgaaatattctttatttacaacaacc

SEQ ID NO: 22423 - DNA, 246 bp, Glycine max
  Clone ID: LIB3050-021-Q1-K1-G12
gggatcgcgcattcacaaataaggtggaagagggccctgccggaagaggatgaataccgtctttcattttccggcgatctcttttttcttccatcaccgttttccggctatccctaatccttaacagaaatgacgacatcaaggcgccttgcggacaggaaggtggagaattttgagaaaaacatcaccaaaagatgatttgtgccatacacaaccactataaatgggaaagactaccctgttggc

SEQ ID NO: 22424 - DNA, 301 bp, Glycine max
  Clone ID: LIB3050-021-Q1-K1-G2
gggataagtgtgaatgtgacgctgatattctggcttgcaagatatgaagctggggtagatgcttacttggatggtcttgaggcatctgggttaaatgacctctctagagttacaagtgttgcctctttctttgtcagtagagtggacactctcattgacaaggcccttgagaaaattggcaccccagaggctcttaatctacgtgggaaggcagcagtggcccaagcagcattggcttaccagcgtctccgaaggaaatgttctggtccaaggtgggaagctctagttaaaaatggggcca

SEQ ID NO: 22425 - DNA, 227 bp, Glycine max
  Clone ID: LIB3050-021-Q1-K1-G3
gaacgtaaaaaaaaaaaagaataataaatagagggaggagcatgttgattatatagaaagtaaagggcaacaatcatttttgtttaccatgggtaaggacaccatcgctgacataataacctatataagaaatgctgacatgaataaaaaaggaatggttcaaataccatttactaacataacagaaaacattgtaaaaatacttttacgcgagggttttgttgaaa

SEQ ID NO: 22426 - DNA, 55 bp, Glycine max
  Clone ID: LIB3050-021-Q1-K1-G6
gatggttaataataataagagcagaaattcatacaggcttttaaattgatgttat

SEQ ID NO: 22427 - DNA, 150 bp, Glycine max
  Clone ID: LIB3050-021-Q1-K1-H1
tgggctcacacatcacaacaacaacgacaacgaaaaaagacaagaacgacttgcttctctcctttgctgtgttttctttctcaaaaataggtcgtacctatgttcttatgatggttgctgcattgttgttgagctccaccatggctcaat

SEQ ID NO: 22428 - DNA, 76 bp, Glycine max
  Clone ID: LIB3050-021-Q1-K1-H10
gatagaagagaagctaggaacagcagatcctgatgtggatgatgagagacgtgggttggaagagttgttataagaa

SEQ ID NO: 22429 - DNA, 235 bp, Glycine max
  Clone ID: LIB3050-021-Q1-K1-H11
gcactagaaaatattgaagagggaatgtaaggagttgacaatgagaaagcatgattaatgtctcaatcgaagtttgagaagaagtttgggcaatcatctgttttcatagcttcaacactcttggaagatgggggtgttccaaaatcatcatgttcctcatcactcttgaaagatgtccattctgtaattattttttgttattaatatatgtcctatttatgataaagatgtttat

SEQ ID NO: 22430 - DNA, 130 bp, Glycine max
  Clone ID: LIB3050-021-Q1-K1-H12
gacccacaaactccaggagtgggacaagtcataactcggtagggagagtttgtgtgtgttttataagtgtatcataatatatctcttttatttggattgattatataaataatatatcttattatttttt

SEQ ID NO: 22431 - DNA, 211 bp, Glycine max
  Clone ID: LIB3050-021-Q1-K1-H2
gaagtatataacttcttctatgtgtccggaaagcattggtatcatcactgtgtcagatctcgaaccctctcgttcgtgccgatcactaggtcacactacatcaatagcgggtataagcaagaccctatgatccagcgccgcttataaggccacctcaatgagcagcaaagccggcctgcaattccccgtcggtcgtatcgccaggttcctc

SEQ ID NO: 22432 - DNA, 103 bp, Glycine max
  Clone ID: LIB3050-021-Q1-K1-H5
gagaataaggttgaataaattctcgtaggatcgggttgtttcccatcgggcgctggtgctctccctctgtgcagacatgttgttcttctcatacttcagggat

SEQ ID NO: 22433 - DNA, 291 bp, Glycine max
  Clone ID: LIB3050-021-Q1-K1-H6
tataggggaagcttgatgaaaaacgtgatcaggggctgggaagaaactcaagttgtggtgcaaaaagaaaaggaagaaaaagacccatggccatgagcatcctcctcactattgctacaactgctattgttcctcatccatccaaccatcatctccacccttaccttcatcctcatgccttgattttgaatacagcaactatggaacattcttaccaaccccggagccggagccggaatcctaaccatgactccaagatattgccagcctaaactcatcgtatgatcaata

SEQ ID NO: 22434 - DNA, 337 bp, Glycine max
  Clone ID: LIB3050-022-Q1-K1-A1
gattgggaaatccacagagaaacatttcactaattgagagacctaagcataatattgggaaataatggagggttgaacttattgggtgaagttgctatgccttgttgggtttgtggtgcttgtgagtactattgcaagggtggagagtgcttgataatgtcggaaatctaccaccccagataatgaggcttataagcttgcaccatgtgccttaacagcacaagatgagaatgctagtggtactcagagttgctgtgctcaagtcaagaacattgggcagaacccaagctgcctatgtgcagctctgctgttcaacacaggcaaaatggctggtgtc

SEQ ID NO: 22435 - DNA, 401 bp, Glycine max
  Clone ID: LIB3050-022-Q1-K1-A10
ggattagatgaatcaggagctcacctctattacaactgtcccagtggaaactattttgaatatcaggcttttgctattgggtctcgctctcaagctgcaaagacatatttggaacgcaggtttgagaattttgtgggctcttcacgagaagatctgatcaaagatgcacttattgtaactagggagtccttgcaaggtgaaaaactcaggagttctgtgtgcacaattgctgtggttggtgttggtgagccattccacattttggatcaggaaactgttcaacagttgattgatacttttgagattgtgagggaggaagaagctgctccagctgaagaagaagctcagccagcagccggacaggatgctcccacagatccaggtgctgctgctggtgctgc

SEQ ID NO: 22436 - DNA, 359 bp, Glycine max
  Clone ID: LIB3050-022-Q1-K1-A11
ggaggtaaatgtactcagcaatccaatccagagatttgcagtttggtttggaggatcagtgcttgcatcaacacctgaattttttacggcttgtcatacaaaggcagaatatgaggagtatggagcaagcatttgccggacaaatcctgttttcaagggaatgtattaaatcaacgacaaattagttgattatcgatgcagttatttgataagactgttgaatgaatgtctggctggttatcgttatccttaattcacttcttggtctttcttcccacctaaattcagagggcgacggaagtgagtgtaaaatatgtatattaagtgaaaatatgcattttgtttttatccgggcaatc

SEQ ID NO: 22437 - DNA, 388 bp, Glycine max
  Clone ID: LIB3050-022-Q1-K1-A12
ggcagttcaattccaatatactccattctctctgtgtatttccctacctctcccttcaagatgcagatcttcgtcaagaccctcaccggcaagaccatcacccttgaggtggaaagctctgacaccatcgacaacgtcaaggccaagatccaggacaaggaaggaatccccccggaccagcaacgtctcattttcgccggaaagcaacttgaggacggccgtacccttgttgactacaacattcagaaggagagtactcttcacctcgtcctccgtctccgtggtggcatgcagatcttcgttaagacactcaccggcaagaccataaccctagaggttgaaagctccgacaccatcgataacgtcaaggccaagatccaggacaagg

SEQ ID NO: 22438 - DNA, 352 bp, Glycine max
  Clone ID: LIB3050-022-Q1-K1-A2
gtatgatgatggtgatgaagaaacattaaatcttgtgaaggaaaaatggaaggtcattgaagctgactcagatgcagatgaggaagaacgaagtgattgtgcagatcttgatgtttccactgatatgccactgaagaagaaagggaaaacaagtgctggtgaatcaaccaagcaaggaaagatggatgtttcttccaaaagcagtggagcagcagcatccaatagatcaaagggtgcatccacaaagtctagccagaagtccaaggatggcaacaaatccaaagattccaaggctaatagcaaatctgaggatggagttaatagaaaatctaaggacagcacttctaaaaat

SEQ ID NO: 22439 - DNA, 392 bp, Glycine max
  Clone ID: LIB3050-022-Q1-K1-A3
gcagcaaaagacatttgaagcgccgtcgtttcaatctccatcgtcgccttgaaaagaaaaaccctaattacaagaagttgcaaaactaagtggaataagagctgaaaaaccctaataacaatgggaggaaaatgtccgcacaggaacgtgaagaagagaagatattctcacaagaccgcgcggcgaaccaaatttgagctgaaaggggacgacatggtttatgcgcagctcaacaaacccgatcaagagagaccccctttacccgtcgacgaagatttgcctgggatgggccagtactattgccttcactgcgatcggtactttgccaatataactgtgagggatgagcactttaagaccaaacgacacaagaagcgtataaaacaaatgat

SEQ ID NO: 22440 - DNA, 368 bp, Glycine max
  Clone ID: LIB3050-022-Q1-K1-A4
gaccaaagctgatttggtgaacaacttgggtacaattgctagatccggtaccaaggaattcatggaagccttggctgctggtgctgatgttagtatgattggacagtttggtgtggggttctactctgcatatcttgttgctgagaaggtcattgttacagccaaacacaatgatgatgaacagtatgtttgggagtctcaagctggaggttctttcactgtcaccagggataacactggtgaagttcttggcaggggtactaagatcactctctacctcaaggaagatcagcttgagtaccttgaggagcgtcgcttgagggatctgatcaagaagcattctgagttcattagctacccaatttctc

SEQ ID NO: 22441 - DNA, 388 bp, Glycine max
  Clone ID: LIB3050-022-Q1-K1-A5
ggagaacaagggaaagatttcactgttctccagttaatgatctattgtgtctttggtgttctggctggtgtagttggtggcatgttgggactaggaggaggattcgttatgggtccactttttctggagttgggagtcccacctcaggtgtcaagcgcaacagccacctttgcaatgaccttctcctcatctatgtctgtcatagaatactacctgttgaaacgttttccagttccttatgctctttacttcattcttgtggctactattgctgcctttgttggacagcacattgcgagaaaactaattatcctattcgggagagcatctcttataatcttcattctagcctctacaatatttgtcagtgccgtcttgttaggtggag

SEQ ID NO: 22442 - DNA, 254 bp, Glycine max
  Clone ID: LIB3050-022-Q1-K1-A6
gctgatcgcatgagcaaggaaattagtgctcttgcacccagtagcatgaaaatcaaggtggttgcacctcctgagagaaagtacagtgtctggattggtggttctatcttggcattacttggcaccttccaacagatgtggatctgcaagggtgaatatgatgaatctgggccagccatcgttcatcggaagtgcttctaaagttgggtcaagtcgagctggatggtgatcaagttcttcatgcacccagtcct

SEQ ID NO: 22443 - DNA, 404 bp, Glycine max
  Clone ID: LIB3050-022-Q1-K1-A7
gacagacacacacttttctaagattttctcagcttccttctcatttgttaaatttttccaccattttctggcttcaaaaatcgttcggaaatgaggactgtgaacattttcgccctcccacttctggctttgttcatcatggcaatctctcgtctggcccaagctcaggacttgcctctttctccggcacctcctcctaccagtgatggaaccgcaattgatcaaggaattgcttacattcttatgctggtggctctcggaatcacatacatgattcattaactttttcttgttcttcttcttattatcatcatcatggcgattagagaatatttcaggatttttttgtactgtaattattattgatgaaatttattattatttattctgatacattttcttcg

SEQ ID NO: 22444 - DNA, 285 bp, Glycine max
  Clone ID: LIB3050-022-Q1-K1-A8
gcatcttttgtgcattttgcttcaaattgttcataatggtctaactccagccaaagattttgctgattttaggcatactcactaatggatcggtctccttgtttggtagttgcgatcttcatctttatttcataaatttgagtagcatcaccaaccttggatagttttgtttacagctatcccatacatccttgtggtcttcatgaacatgcaagcatcgctcacctctggtaccatggaattccacaaccacgacatcactactgcatctgcttcatcccatgc

SEQ ID NO: 22445 - DNA, 412 bp, Glycine max
  Clone ID: LIB3050-022-Q1-K1-A9
gatcgagaaaggggtgttcggaagggatgcaatcaatgtgatagcatgtgagggggcagagagggttgaaaggccagaaacctacaagcagtggcaagttaggaaccagagagcagggttcaagcaacttccattggccccagagcatgtgaatagagtgaaggaaatggtgaagaaggaacatcataaagattttgtggttgatgaggatggcaagtgggttttgcaaggatggaaagggcgaattctttttgctgattcctcttgggttcctgcttgaggaatgaccaactcctaacccactcattggcaaggaaaattgttttaggtgtaaagtgcactaagggtatatttatccttgaatagaagggaatcatgatcatattttgtttctatttgaatagtgaaaata

SEQ ID NO: 22446 - DNA, 370 bp, Glycine max
  Clone ID: LIB3050-022-Q1-K1-B1
gaagaaaatcgtcatcgactaagaaagacattggagaattaagtgtggcttagttactaagtttgttacggtaaagaaaaaaaattcagcaacaaatacaatgggttctcttatggcaggatgggactctctgatcttagatcctgaatcagctacaattgagaggaatcgatcactcaccaaagaagaaattgatgcttactggcgagcaaagaaggagacagagttagaacacctcagagctatttccaaactatctgagactattcagacccgaaaatgcgaggattcagagaattctcataagtcaagtactgtgactttggccagcataaaggagtccttaggcatggacgttgaccagaaaagt

SEQ ID NO: 22447 - DNA, 403 bp, Glycine max
  Clone ID: LIB3050-022-Q1-K1-B10
ggggacaaggaggcacgccttaaaccaacttgtgtggctgcacttattgattccaattttcataaaattgcttgtgggcacagtttgacagcaggcctgacaaaatctggacgtgttttcactatgggaagtactgtttatggtcagcttgggaatcctcaatctgacggaaaggttccatgcttggtcggagacaagattgccagggaatcgattgaagaaattgcttgtggagcatatcatgtagctgtattaacatccaaaaatgaagtttatacttgggggaaaggtgcaaatgggagactgggtcatggagatattgaagatcgtaaaacaccggctttggttgaagcattaaaggatagacatgtgaaatatattgcatgtggttcaaattactctg

SEQ ID NO: 22448 - DNA, 398 bp, Glycine max
  Clone ID: LIB3050-022-Q1-K1-B11
gatcaaacagatggtggtgatggctatgtttctgttgaagtatctcccaggctcgctgatgacactgagggaaccatagaagctgcaaaatggcttcataaagtggttgatcgccccaatgtgtatattaagattcctgctacagaggcatgtgtgccttcaattaaggaagttattgctaatgggataagtgtgaatgtgacgctgatattctctcttgcaagatatgaagctgtaatagatgcttacttggatggtcttgaggcatctgggttaaatgacctctctagagttacaagtgttgcctctttctttgtcagtagagtggacactctcattgacaaggcccttgagaaaattggcaccccagaggctcttaatctacgtgggaaggcagc

SEQ ID NO: 22449 - DNA, 402 bp, Glycine max
  unsure (1)..(402): unsure at all n locations
  Clone ID: LIB3050-022-Q1-K1-B12
gacagacaaacgaacaatttaccagctatacttgttccttttgaaggttagaagtgctacaattacaaacaatggcagcttactcaggaaggatgtgaagcttttgggtattggggaaagcccattgtgtgcaggtccagattgccttaagtgaaaggagtngaatacgaatttttgggagaaaatttgggcaacaagagtgatttgcttctcaaatacaaccctgtacacaagaaggttccagtgtttgttcacaatgagcagcccatagcagagtctcttgtgattgttgaatacattgatgagacatggaagaacaaccccatcttaccttctgatccttaccaaagagccttggctcgtttctggtccaaattcattgatgataagattgtgggtgct

SEQ ID NO: 22450 - DNA, 323 bp, Glycine max
  Clone ID: LIB3050-022-Q1-K1-B2
gtaggaaaattatgggcaaagcgttccttttttcttttctattgcttggagtgattaaagtttggggtttgttgatttcgtgcagtgattaagagaatggcacaagaaatcaagggaacccgtaatgaaagggagatcgtacctatttggttctctggttcgatagtggtggctgcccaatgaggactcgtggagaccaagtgtaagaaacgagtaaggaattcctaattcttctattgattcttttattatctcttttatatgtactctttctaattattgacgatgggaaaatgcgtgtaagccactgtcgtcccccatac

SEQ ID NO: 22451 - DNA, 331 bp, Glycine max
  Clone ID: LIB3050-022-Q1-K1-B3
taccaagtagctgatgatacattacttgtctattatgtcacacgccaggctacatttgagaatgctacaagatggttgaaagagttaagagatcacacagactccaacattgtggatcatgcttattggagataagtcgagatcttcgacaccttgactgctgtccacaacagaatatggaaaatttactgccgagaaggaatctctctacttcatggaaacttctgcattagacgcatccaatgttgaaaatgcatttacagaggtgatctatcagatataccgaatagtgagcatgagaactgttcaagacctcaagaatgccaaactt

SEQ ID NO: 22452 - DNA, 393 bp, Glycine max
  unsure (1)..(393): unsure at all n locations
  Clone ID: LIB3050-022-Q1-K1-B4
tgaatcctaaaatcacaatacccgaccacaaggtctttttttttctctgtggcggtatcattggcaatggttaaaagttaaaacttcaacacacagaatccagattcgtcgagaaagagaaaagagaaaagaagaatgggcgattaccatttcgtgtacaaggatttagaaggggcttctactcaatgggacgatattcaaagaaagctcggaaatttgcctccaaaggcacccgctttcaagcccccacctttcacccctgcctctgatgatcaacccaaagacaaaacatggatcgattccaaaaccttcgaggaactcgaagacctcgaagacaacctcgatgatgatcgcttnctccaagaatacaggaagaagaggctggctgagatg

SEQ ID NO: 22453 - DNA, 373 bp, Glycine max
  Clone ID: LIB3050-022-Q1-K1-B5
gacaacatatccattttatttacaacaacaatggcttctgtgcctcaaccaaaaatctcccttctaaccttattcttcttctcgtccttcaccatcattgcgcatgcaattgttcctcaaaacgaaaccttcaaatttgagaactcaggtgaacttggaccctacatcgttgagtacggtgcagattacagaatgataagcatcttcaactctccattccaagttggtttctacaacaccaccccaaatgccttcactctagctttgcgtgtagggctccaacgctcggagcagctatttcgttgggtttgggaggccaatagggccaacccagttggagaaaatgccactttttcacttggcactgatggga

SEQ ID NO: 22454 - DNA, 384 bp, Glycine max
  Clone ID: LIB3050-022-Q1-K1-B6
gataaatcccaaggcaggtctgaaaacgtcaccgacagcaaaagaacaaatcttaagaccaagcgtacttttaaaaacgcgagtcctgatattatgtcggagggtgaccctcttgattgtctttttggttatgctcctccggtggaagagatccatcattcaaatttcccaaataaaccatcaggaatacataatcgggctcgtagaaaatctcaccgtaggcgtcggatgcataatcatgaggacctttcaaactctgagtctgcagcagctgtttgactatcatttaacatttgcagacgttgatgttaggattatgcaaattgtggttttcttaataacgtaggattatgtaaattggggtttttttaataacgttctgat

SEQ ID NO: 22455 - DNA, 257 bp, Glycine max
  Clone ID: LIB3050-022-Q1-K1-B7
gagagagacagttgtcgcttcgtgaactgaatggaatgaatgtgaacgggacctgtatgcttcaacgacttcacattgtcttcacctaacactgctttgactgcaatttggccatgtaattttacatcatatcacactacgggaacgaggcgcctttgaacctcgagtgattctgccagcaatgcacctatgaggttatcagcaccagaatcggaagatcaaaactgagcattaaaggctggtgaactatactcgac

SEQ ID NO: 22456 - DNA, 380 bp, Glycine max
  Clone ID: LIB3050-022-Q1-K1-B8
gatcacttaagcaaaacaatgatggctggtgttagtggcagtagcactactcccttattgtgctctttgttctttatttcttccttactttttgcttcctgcacccatgcctcctcccaggcacctcctccaattgtggatggactttcatgggatttctataggacgagctgtcccatgcttgaagggatagtgagcaagcatctccagaaggtgttcaagaaggacaatggtcaagctcctgccttactcaggatcttcttccatgactgctttgttcagggttgcgatgggtcgatattgttggatggaagtccaaatgaaaaggatcaaccggcaaacatagggatgaagccagaggctttgcagaccattgaaaa

SEQ ID NO: 22457 - DNA, 427 bp, Glycine max
  Clone ID: LIB3050-022-Q1-K1-B9
agaagacgacagagggggcagcgcttgatttgaggccaggcaagccccactcaaccaccacacctctcctcgttcacgctacccctttctgctcttcttctacctttcaagttttaaaagtataaagatggcagagacattcctatttacctcagagtcggtgaacgagggacaccctgacaagctctgcgaccaaatctccgatgctgtcctcgacgcttgcctcgagcaggacccagacagcaaagttgcctgcgaaacatgcaccaaaaccaacttggtcatggtcttcggagaaatcacgaccaaggccaacgttgactacgagaagatagtgcgtgacacctgcaggaacatcggcttcgtctcaaatgatgtgggactggatgccgacaactgcaaggtcctcgtcaacattgagcagcag

SEQ ID NO: 22458 - DNA, 400 bp, Glycine max
  Clone ID: LIB3050-022-Q1-K1-C1
agaaggggaatacacaagcactatcaacaccaccaccaaattaccattatatcaatagccttgttgagaaagagttattgccactttcaaccccttcaattccctaagctttctacaacacaaaacaaactccggagacactatatactaattttagttcttttgcggcttcctgactcgaaattcagagactaatctcttgaagttggaagtatgtggcgccttgtggctgcgttgaccaagaaacttcaaaacacaaagaaaggttcaagggtggccgatgagaacatgtttgaagctgcaaatggggtcgagctagccatgtttcgacacgatagaggaagaagagaccatggttggagtggaatctcacttatatatggcattcttcatgccccca

SEQ ID NO: 22459 - DNA, 396 bp, Glycine max
  Clone ID: LIB3050-022-Q1-K1-C10
tagcgtctttgatattataccaaattacaatgtttgggtactttgggacgcagaaattctactatacaccacttgtgcttcctcttcccatattgtcattgatctttggttttgtctgtgcaaagaaattttaccccgcctttcaacatccagcacttgaggttgcagctaatgcacttaaggaagttcccaatatggaattgattttcagagcttacattccaccaagcttgaggtctgagaagatagatgatgatcgggttgaagatgcattgtctcaatgttcgagaacagcacctgtttgatgtaattatctgaatttcagcttgtttttacgtgttagatgtagtcttgtagagatacttttagatattttattaattgttcagaatacgt

SEQ ID NO: 22460 - DNA, 394 bp, Glycine max
  Clone ID: LIB3050-022-Q1-K1-C11
ggcaaacaaaaacaaaaacgcagtcctttctctgtcctctctctctctctctatctgcgaatttaaactccaatttccatttccattgataggaaggaggaaggaacgaagcggaagcggaagcgaaatcgctttgtctctatattgagccactttgaatctgtcgccgcaacggtagatcaaatcgagtttcacctgaatgctctttctggatgcgatttacgttgttgaaggaaacaacaagtgaaaacatgattcttctcaaagacattgtgcctgcagctcagaacactatagacaccaaatttatcattttggacaaaggcaagaccacagtagaaggcaaaacaagatatgcctggctcttgtggcagatgcgactgcagctattcac

SEQ ID NO: 22461 - DNA, 408 bp, Glycine max
  Clone ID: LIB3050-022-Q1-K1-C12
ggcggcacaaagcattcactgtgtcggaaaaagaagaagagaaaaaagatgagcgacggaggaaaacgacaaggtggaagagcgttgccgccgccgccaagaggccctccgcctcctcccccctctcgccctcgcctcgaacccgtcgatcgcgaaaagacatgtccgttactgctgcgagtgttcactaagattgggagtcaccattccatggaagactttgccgtcagaggcaaagagcccaaagacgaggttcagatttacacctggaaggacgctactctccgagaactcaccgatcttgtcaaagaagttgctccggctgcaaggagaagaaacgccaaactctccttcgcctttgtattccccgacaaaaacggccgtttcaaagttcaagaggtgggcaag

SEQ ID NO: 22462 - DNA, 409 bp, Glycine max
  Clone ID: LIB3050-022-Q1-K1-C2
gaagacgacagaaggggaaaccgaatgttagcattaacctcttcttcttccactttcattccaaagcgttattccttcttcttcttcctctccattctcttcgctcttcgatcctcgtccgggggctgctccgaataccaccaccaccacgcgccgatggccacgataggaggcttacgcgactcccaaggctctcagaacagcgtccaaaccgaggccctcgctcggttcgccgtcgatgaacacaacaagaagcagaattcacttctggagttttctagggtggtgaggacacaggaacaggttgttgcgggaaccctgcatcaccttactctcgaggctattgaggcaagtgagaagaagctctatgaagccaaggtgtgggtgaaaccatggttgaatttcaaag

SEQ ID NO: 22463 - DNA, 374 bp, Glycine max
  unsure (1)..(374): unsure at all n locations
  Clone ID: LIB3050-022-Q1-K1-C3
ggttacgggtgattctatctaagttgacgttttagcagtcgtcgctgccagcctagtctaccataacgtaatcgagattttcgctattcacacaatcccttcacactcttaatttacgctttctgttcagcttcgttgtgcggtacattttctttgtcccttcccttctcctctcgacgcaggacactatggccgtcaccgtcaagctaatggctctcattgtttcctttttcggcctcttgtctttcattttgggagtcatagccgagaacaaaaagcctnctgctggaatgcccgtgcccgtcaaggatggtgtgacatgcaagttctcagccgatctaacacttgcattggggtattcttctgtaattttt

SEQ ID NO: 22464 - DNA, 335 bp, Glycine max
  Clone ID: LIB3050-022-Q1-K1-C4
ggagttgggagagtgcctccgcacgagtttctggcgaggacgagaatcgcttcgttctcggtgcacgaaggagctgggaggactctcaaaggacgcgatctcagtagggttcgaaacgcgatttgggctaaaacgggattccaggactagacccttaccataggatgataggatcataacataagttaattaccgtattaatttactactgtattaccaattgaaacgacttttgttgagaggtcatttttagatttttcattttttcgatcagcatctatgtgtatcagatcggaatttgagattttaatttgcaccgagagctttttgtttat

SEQ ID NO: 22465 - DNA, 335 bp, Glycine max
  Clone ID: LIB3050-022-Q1-K1-C5
aggcgtgcgaagacgtgtgagaggtaccagagcagggcattcactgtgtcggaaaaggaagacgagatatgagatgagtgtctgacgataacgacaaggtggaagagcgttgtcgatgtcgatagatagcactgaggctggtacgaactttgaacctgaactgaaacccgtcgatcgctatatgacatgtccgttactgttgcgagtgatcactaaaattgatagtcaccattctatgtaatactttggcgtgcgatgcaagtagctgaaggacgcggctcatatttacacctgtatggacactaatattcgagaactaactgatatcgtcatag

SEQ ID NO: 22466 - DNA, 231 bp, Glycine max
  Clone ID: LIB3050-022-Q1-K1-C6
tttgacagtgtcctcaacagggcatacactgtgggggcatggcaacaggtgatatgcgatcagcgtctgacgatatcgacgcggtggaacatcgtggacctaggcataagaggccatgagtgtagctcgagtatgaacattacacgaaacctatgagtctctataaggaatgaccgtgactgttacaacgactcactaagactgagagagactatgccgactgctactttt

SEQ ID NO: 22467 - DNA, 378 bp, Glycine max
  Clone ID: LIB3050-022-Q1-K1-C7
ggaaaaacggtaaacgatggtagtgtcgcaggcgtgtcttggctatggaagaatggatctggctgtggagcatgttatcaggttaggtgcaaaataccacaattctgcgatgagaatggagcatacgtggtggttacagattatggcgagggagacagaacagactttattatgagtccacgtgcctactcaagattggggagaaatgcagatgcatctgcagaactattcaaatacggtgtgatggatgtagaatacagaagggtaccctgtagatacggtggctataacctcttggttaaggtccatgaacacagcagaaaccctcactacttagccattgtcattctctatcttggtggaacttacgacgtaact

SEQ ID NO: 22468 - DNA, 409 bp, Glycine max
  unsure (1)..(409): unsure at all n locations
  Clone ID: LIB3050-022-Q1-K1-C8
ggaaaatattatagagaaccaaagaaatcagcagcacctcttccttttcaccttattggggaaataataaggagcttcaagactgaccattttgttagtgacacgggggatgttgtgtactatcaaaccgactctaagattaatggctcttccaaattagagtgaatattaaaattcttttctatatagacaagagaggcttatacacaattcttattgctttaaagattgtcttgagtttctccgaaagttactgcacttacttggagttgaatccttcattaataaagggatggatggatcatataatttcaattgtaactgcatgatagaatgtttaggttatatgtagttttatctntcttgaatagtgaattcctcaatataaattgattatattgaagtgata

SEQ ID NO: 22469 - DNA, 398 bp, Glycine max
  Clone ID: LIB3050-022-Q1-K1-C9
ggaacctgtgcgttctattcatacaggattcagcaagtgcgtactggaagcagagaccgaaatacttcgagatggcccgtacaaagcaaactgctcgtaagtcaactggaggaaaagctcccaggaagcagcttgcaaccaacgctgcacgtaagtctgcaccaacaactggtggtgtgaagaagcctcatcgttatcgccctggaactgttgctcttcgagagattaggaaataccagaagagcactgagctcctaatcaggaagcttactttacagaggttggttcgtgaaattgcccaggatttcaagactgatctgcgattccagagccatgctgtgcttgcattgcaagaggctgctgaagcataccttgttgggctctttgaggacactaac

SEQ ID NO: 22470 - DNA, 338 bp, Glycine max
  Clone ID: LIB3050-022-Q1-K1-D1
gtgaagagtgatgtttatagctttggggtattgctcctcgaagcaattactggaagagacccagtggattatagccgaccagcaactgaggtaaatttggttgactggctcaagatgatggttgggaataggcgcgcagaagaggtggtagaccctaacattgagaccaggccatcaacaagttcccttaaacgtgcccttttgactgctttgaggtgtgttgatccagattctgagaaaagaccaaagatgagtcaagttgtccgcatgcttgaatcagaagaatatcccataccacgcgaggatcgaagacgccgaaagagccaggcaggaaatat

SEQ ID NO: 22471 - DNA, 404 bp, Glycine max
  Clone ID: LIB3050-022-Q1-K1-D10
ggaagaagagagtagcatactacaagaccctggactatcagctagcagagcgtgggagataccgtaatttgcttgatatgaatgcttgcttgggaggctttgcagctgcactgattgatgatcctgtgtgggtgatgaacactgttcctgttgaggctgaggtcaacacacttggtgccatatatgaacgtggattgattggaacctatatgaattggtgtgaagccatgtccacttaccctcgaacttatgacttcatacatggtgactcagtttttagcctctaccagaacaggtgtaaagtggaggacattcttcttgagatggatcgaattttgaggccagaaggaagtgtaatcttgcgagatgatgtggatgtgttgttgaaggtgaagagtttcaca

SEQ ID NO: 22472 - DNA, 396 bp, Glycine max
  Clone ID: LIB3050-022-Q1-K1-D11
ggaaaaagcttgatcaagaattgaagcatattgatcttcagccatggctacacccttggcctaccaagagcaccttccggcggcacccgaatggctgaacaaaggtgacaacgcatggcagctaacagcagccaccctcgtcggtcttcaaagcatgccgggtctcgtgatcctctacgccagcatagtgaagaaaaaatgggcagtgaactcagctttcatggctctctacgcctttgcggcggttctaatatgttgggtgcttgtgtgttaccgaatggcctttggagaagaacttttccccttctggggaaagggtgctccagcactaggccagaagttcctcacgaaaagagccatagtcattgaaaccatccaccactttgataatggcac

SEQ ID NO: 22473 - DNA, 399 bp, Glycine max
  Clone ID: LIB3050-022-Q1-K1-D12
ggaggaaaagttcttgttcagtttgaagattttgcgaaccacaatgcttttgagttgcttgcaaaatatggcacaactcatcttgttttcaacgatgatattcaggggactgcatctgttgttcttgctggggttgtggcagccttgaagctcattggaggtactctggctgaccacacattcttgtttcttggtgctggagaggcaggaactggaatagcagaactaatagctcttgagatgtcaaagcagacaaagacacctatagaggagactcgcaagaagatatggcttgtagactcaaagggtttgattgttggttcaagaaaggcttcacttcaacacttcaagcagccttgggctcatgagcatgagcctgtaggcagtctcttagaagct

SEQ ID NO: 22474 - DNA, 313 bp, Glycine max
  Clone ID: LIB3050-022-Q1-K1-D2
atggttatagctttggggtatggctcggggaatcaattactggaagagacccattggattatagccgaccagcaactgaggtaaatttggttgactggctcaagatgatggttgggaatatgcgcgcagaagaggtggtagaccctaacattgagaccaggccatcaacaagttcccttaaacgtgcccttatgactgctttgaggtgtgttgatccagattctgagaaaagaccaaagatgagtcaagcttgctcgcattgcttgaatcataagaaatttccattccactctaggatcgaaaatacctaaag

SEQ ID NO: 22475 - DNA, 416 bp, Glycine max
  unsure (1)..(416): unsure at all n locations
  Clone ID: LIB3050-022-Q1-K1-D3
gatgggactcatggtgttgatgtggggatcaagagcgttgtagatgagaatgaaagaaaatcattgggtggtcatcatggtgctgcttgtcctgcatgtgagatggcggttgtttggatgcagaaccagctgagccgaaatcagacacaagatcagatactaagttacatcaaccagctttgcgataaaatgcctagcccgatgggagaatcagctgttgactgtgggaatatctcttcattacctgtagtgtcctttactattggtggaagaactttcgaccttagcccagaggagtacgtactcagggtgggtgaaggtcctgtggctcagtgtattagtggctntactgctatagatattccaccttcacgtggccctctctggatccttggtgatgtcttcatggggcggta

SEQ ID NO: 22476 - DNA, 331 bp, Glycine max
  Clone ID: LIB3050-022-Q1-K1-D5
ggtagagaaagagagagaaagatgtcgaagcgtggccgtggtggttcggcggggaacaagttccgcatgtcgctgggtcttccagtggcggcgacggcaaactgcgccgacaacacgggggcgaagaacctttccatcatttcggtgaaggggatcaaaggccgttggaaccgtcttccttgggcctgcgttgccaacatggtgatggccaccgtgaaaaagggaaaccccgacctgaggaaaaaggccttgccagctgacatcgttcgccagcacaggccatggcgccaaagggacggtgtatacatgcacttcaaagataacgctggtg

SEQ ID NO: 22477 - DNA, 412 bp, Glycine max
  unsure (1)..(412): unsure at all n locations
  Clone ID: LIB3050-022-Q1-K1-D6
ggcctcagggttctcaattcatactgggtgaatgaggactcgacttacaaatattttgaggtcattctggtggatgttgcccacagcgctgttagaaatgatccaagaatcaactggctctgcaacccagtccataaacacagggaactgcgtggcctcacttctgctgggaaaagtaacaggggtttacggggcagaggacatctctaccacaaaaatcgtccatcccgcagggcaacctggaagagaaacaacactctctcccttcgtcgctaccgttgattttgttgcagttatcgtatgttgcttcattttccaagtatttggagtgcattatatgtagactntaggaaaatcgtcagttttgaacgcctgaatcatgctttttccccccaaatcttgtcttagtact

SEQ ID NO: 22478 - DNA, 365 bp, Glycine max
  Clone ID: LIB3050-022-Q1-K1-D7
tgtcacccctctgtctcttggtttggagactgccggtggtgtgatgactgtcctgatccctaggaacactacaattccaacaaagaagaaacaagttttctcaacatactctgacaaccagcctggtgtgcttatccaggtctttgagggtgaaagagcaaggaccggagataacaatttgttgggcaaatttgagctatctggcattcctcctgcacccaggggtgttcctcagattacagtgtgctttgacattgatgccaatggtatcttgaatgtctctgccgaagataaaaccactggccagaaaaataagatcactatcaccaatgacaagggtagattgtcaaaagaagatattgaga

SEQ ID NO: 22479 - DNA, 414 bp, Glycine max
  Clone ID: LIB3050-022-Q1-K1-D8
gacgtaaatacaacacaagaaacagacagagagaaattcacacataaaaatcatcacttcaaattaagctagagctagaaagattcagaggtagctatagagagagaaacagaggtcatggatggtttgcaaagatctgaggtgtctttcaggagacagggttcatcagggcttgtttgggacgacaagttattgtcaggggaattgaacaaagtgaacaacaactaagaccaaaagggtggtggttctggtggtgaccttaaccttaaagttagaactacaccacccaacaccaccatccagagaagccgctccaacggctgctaccgcaccggaaaagtctcgccggcgatcgagccttcctatcccaagctctctgcttgcggcttttgcagcgctttctggaaaacaagg

SEQ ID NO: 22480 - DNA, 403 bp, Glycine max
  Clone ID: LIB3050-022-Q1-K1-D9
ggagaaaaacgagccaattcatcattttctctcttctctgcttcttcttgttcaaatcttaggagctgaggagaatcaatcgagagaaatatgtctggtatcgcccgtggacgccttgctgaggaacgaaagtcatggcgcaaaaaccatccacacggtttcgttgccaagcccgagactctacctgatggcaccgtaaatttgatggtctggcattgcactattcctggcaagaccgggactgattgggagggtggatatttcccactgacaatgcacttcagtgaagattaccctagcaagcctcccaagtgcaaattccctcaaggtttctttcaccctaatgtgtatccatctggaactgtttgcttgtctatacttaatgaagatagtgggtggagac

SEQ ID NO: 22481 - DNA, 400 bp, Glycine max
  Clone ID: LIB3050-022-Q1-K1-E1
gtcattaagatgccatctaacggcgacgttcccttcactcacgccaacgtcagcttggccttcagggatttcgcctacaaacccaccaccgatctctccaccggtctcagcaagttcgtcaagtggtacctcggttattacggccttcagccaagcctgaaaaaggataatcaccttcacaatattgaatgaccatttctataattatctctcctctattttgttctttttacggcaagaaaaaaaaacaaaaaaaccttccccttgctcatggatcatttttcttggttttggtgaatcattattattattattattggtattggttgtgtggtgtagcaattatacatcatataaatatctggtatagatgaaagacatgcatatatataaatgtcat

SEQ ID NO: 22482 - DNA, 407 bp, Glycine max
  Clone ID: LIB3050-022-Q1-K1-E10
gggatagattattatcattctggtgccatccttcctacacctagagatctcattgacactgtacgaggtcttgttatttcgcgtggtcttagtctcatcattgaaccagggagatctctgatcgcaaacacatgctgcttagttaaccgggtgacaggtgttaaaagtaatggatctaaaaattttattgttattgatggaagtatggctgaactgatccgccctagtctctatgatgcttaccagcatatagagctggtttcccctgccccatcaaatgctgagacaacaacttttgatgtggttggccctgtctgtgagtctgcagatttcttaggaaaaggaagagaactacctactccagccaagggtactggtttggttgttcatgatgctggtgcttattg

SEQ ID NO: 22483 - DNA, 434 bp, Glycine max
  Clone ID: LIB3050-022-Q1-K1-E11
aagacgacagaaggggccttagagcacgatgttttggaagcgttctcgtccattttgcctccagtttattccataggtcctttgaatttacacgtgaagcatattgatgacaaagagttgaatgctattgggtctaatctttggaaggaggagtccaagtgcgtggagtggctcgacactaaacaacccagtagtgttgtttacgtgaattttgggagcatcgcggttatgacaagtgagcaattgattgagtttgcatggggacttgctaatagcaacaaaaactttttgtgggccataagggcagatcttgtggcgggtgaaaatgctgttttacctccagagtttgtgaaacaaaccgaaaatagaggcctattgtctagttggtgctcccaggagcaagtgttggctcacccttcagttgggggattttt

SEQ ID NO: 22484 - DNA, 404 bp, Glycine max
  Clone ID: LIB3050-022-Q1-K1-E12
taatgaaggttgcctatctttcccaggcatcaatgctgatgtaaagcgaccagaatctgtgaagattgatgcacgtgatatcaatggaacaaggttttcagtcaacttgtctgaccttcctgcacgaatatttcagcatgaatttgaccatctacaaggaattcttttctttgagagaatgactgaagaagttcttgatggtatttgtggacagttacaggccctagaaacaaagtacgagggaatgactggactctcaagccctgaaaagatagaaaaccgcaggaggagaaaggtcgctgttggttttgggaaacgatgatcttcaaggtcaatattaggcataatactgaatgcacacttgacagacatttcaagtttgaacttcataaaaagatgaagca

SEQ ID NO: 22485 - DNA, 336 bp, Glycine max
  Clone ID: LIB3050-022-Q1-K1-E2
gaggcgagggtaaggtcgcgttgtgttgcgtcgtgtcgtgcgctgttcctctgtttctcgtttttgtgttcagaccgaaccctagctccgcatcgcaaccatgtcgaccaagcaaggtggaaaagctaagcctttgaagaaacccaagtctgataagaaggattacgacgagattgatgtggctaacattcagaagaaaaaggaagaggagaaggcgctaaaggagttgaaagccaaggcgcaacagaagggaagctttggaggttctgggctcaagaaaagtggaaagaaataagggctctttatcatgattgtatgcattcaatattgagccct

SEQ ID NO: 22486 - DNA, 312 bp, Glycine max
  Clone ID: LIB3050-022-Q1-K1-E3
gcttgactgtactgctgctgatttgccaatggaggcaacccttaagccttggataaagcacttcaagttggaagtgtgccatttgatcagtacttgaggagcgtgaaggccctgtccaaggagcaattctttcaccgcgccactgtcaccaaagttagggctgctcaactgcaagctcaggttgccaatatggctgctcggagtcagcattatggttgctgaagctcgcaacaacgccatctggtttggtttgtgggtggttcaaatgatgaaatctgccattgtgagtacagaactacggaatggattttt

SEQ ID NO: 22487 - DNA, 121 bp, Glycine max
  Clone ID: LIB3050-022-Q1-K1-E4
gcagacgacagaaggcggcagacacagttgatgacgaagttgcgcgagatcaaagctgaatgatctttgatggagtcatgtgatagctcgcacgtaggcagtgttagttgatgctgatgta

SEQ ID NO: 22488 - DNA, 372 bp, Glycine max
  Clone ID: LIB3050-022-Q1-K1-E5
ggaagtggaactggctatggaatcaacactgggggtgcgcacactgaagcagggtatgggaaggagcatcgtcagcatgagcaatctcatggtggtcagcacgagaagaaagggatactggacaagattaaggagaagcttcctggaggacacagtgacaagtagatgcatcgtgcatgcatgcatatagtatatatataatattgttgtctttgaataaatttgctgcatatgtacttggaggatatagcatatggttatagtatattatatagaggaataaaaaatgtatgcctgtaatgtaagggttctcatatacatggctgaaatataaagcataataaaggcattgaatgtgtgcccaatcatatg

SEQ ID NO: 22489 - DNA, 410 bp, Glycine max
  Clone ID: LIB3050-022-Q1-K1-E6
gattgggtgctgatcggaacaaacagggaatataagagagaaaaagatgggtttcataatggaattcgcggagaacttggtattgaagttgatggaggatccgaaggaaagggatcggaggttccgggagcacgtttatagagtgaaggacaggtgcgagaagacgaaggagatgtggagctaccctatgcgaccctatgggttttggactttcgaacgccacaattctcagcttgcttgggatgcacagattagccaagtggctgggaggagggacccttatgatgatatcctccaacatttctctaccccacctaagtgagtgttgctgaacttgccacaaacattgtaggtgaaaaaggatatgaacttggcgtaatttccccttgtaatatcctgtcttgttgcat

SEQ ID NO: 22490 - DNA, 363 bp, Glycine max
  Clone ID: LIB3050-022-Q1-K1-E7
aggcgtgcaagcacgacgcaaggagacagcgtaagatgcacgcgcattgctacaactaacagctgcagctgcatcaggattggctcccagactatgaggaaaggctccaacatctacgtcgctataagcaaccctgagaaggtcccaatgcagtgcatgagaatcgttctatgcatgtccgaatctttagggacgaagccttcgtatagagacttgattctgcacttagaagagaccaaagaatgctgaaattcaaagtaggagaaggatactaaatcacatgcagaagggacatcaaagtcatacccagcttaccagagctgtagacgaaggactaccgtcgactctgttgaagttgcttat

SEQ ID NO: 22491 - DNA, 389 bp, Glycine max
  Clone ID: LIB3050-022-Q1-K1-E8
ggtgtctctcttgtgcgcctattccatctgcgacaaaggttgttctatacccattgggttcgattaggttttccctttttccgaaactttgctttctttttcgttgtttctttcatcttctttcatttttgtatatcgatcatgtgatgagaaaaaaactgcaacaatatgattggattcgttccctgattcctagtatttaagtctctgatgattaactctgctctgtacgttgttttaaattaattttcgagttctttctcagttttctaaatttccaattatttctcagcgttcgattagagcaaccatcaaagagagatgatgatgtttacattggtccgtgtttctgaatcaccgagaccgacaacccttaccaatttctgatc

SEQ ID NO: 22492 - DNA, 405 bp, Glycine max
  Clone ID: LIB3050-022-Q1-K1-E9
gacaggatctgtgctttgcggtcctctgctttgtcagggttgactgctctgcagctcgataacttcatggaaccatcaacttgttatggtgttttttctcctatcgacaggtccaagaacgagcggtctggctgtttcattcgctgtcgcaagacggcttgagtgttgtggccagcaccgaggcgttatattccgaaccccttgtccgaggccgttggtcggtgaggttggggcaaaccatggcagcctacatatcgcattcgcacgctagaatgctttcgcgtgtgggattgtctacttgtcggcacgatgcaggagaaaggagaggtgatgcgctgggttgaacagtaaacgatttgagaagtcggcgtgcttcagatgcagtgtttcgggccttctttgggt

SEQ ID NO: 22493 - DNA, 385 bp, Glycine max
  unsure (1)..(385): unsure at all n locations
  Clone ID: LIB3050-022-Q1-K1-F1
gagagcgaaagagatgtcgttggtttcaagcatgttcgggtgtggagtggtgatggcggcgtcgcaagcaatgggaattggaaggagaagcgatggtggattgacgatagtgtgttcgtctaggccgcagaagaaagcgacggcgcatcacatgaagactcggcctcggaagacgcaggcatgggatagaaaccgcaagcccaccgtctacgatccactcccttctcttcctcctgattggaccctcgttattcccgctgacgcttcttctgctcccgttacgccttcgncttcaactncctctgcctagtcactctctcggtactctctctcgttttcatgtaatcttatctttaattccagcagcttttctttcatgttttca

SEQ ID NO: 22494 - DNA, 396 bp, Glycine max
  Clone ID: LIB3050-022-Q1-K1-F10
ggagtgtagtgttgttgaggttttttgtagcagaattcagtgcggtgtgttgtagcagcgattagaaagaaggaggaaagatgaacacagacatcactgcatcgacgaagccagagtacccagtcattgatcgcaaccctcctttcaccaaagtcgtcggcaacttcaacaccctcgactatctccgattcgtcacaatcaccggcgtttccgtcaccgtcggctacctctccgggattaagcctggaattaggggtccttcgatggtgacagggggtttgatcggtgtgatgggtgggttcatgtatgcttaccagaactccgctgggagactcatgggtttcttccccaacgatgatgaggtagctcgctacaacaaaaaataattcctttttt

SEQ ID NO: 22495 - DNA, 407 bp, Glycine max
  Clone ID: LIB3050-022-Q1-K1-F11
gccaacggaaacaacagcagcggcgccactacctccgacggcggcgctgcctcctcctcccacacgctccgtgggtttgacctgaaccttccggcgccgctgacggagttctggtcgccgatggggtttgatttcgggaagaagaaggtaggcggtgaacaagaggtggaaagcccgttgccggtaaccgccaagaggccgcgtttgtttacaggggaagatgatgaaaccgcgtagatttgtttgcagaattttattttaaattgattgaaattgaatttgttgctggtatatcgcgaatatgattatgaattcaaaccagttagtttaattttcattttatgtttttttttagtatataggtgggattgggattttgtttctgctactctgtacagacaaatttt

SEQ ID NO: 22496 - DNA, 220 bp, Glycine max
  Clone ID: LIB3050-022-Q1-K1-F2
cacgtaggggttatagagagactacatagtgatcctgacttttaagcgcaacaatggaggtcgcaaccaacacggccgaagccacctcaagttcattcgatgctacgactggcgcaaatgctgtgctaaggaccaagctatcaagaggtattttgtgaggaacattggtgaacaggcttcagatagagatattcacgaggcttcgatctatgaacaatta

SEQ ID NO: 22497 - DNA, 389 bp, Glycine max
  Clone ID: LIB3050-022-Q1-K1-F3
gaatctcagcttgagaaattgaagaagtatgcaactgtcattcgtgttctggctcatactcagataaggaagttgaagggtctaaaacagaagaaagcacatttgatggagatccaagctaatggtgggacagttgaccagaaggtggactatgcatatagcttcttcgagaagcaaatcccagtggatgctgttttccaaaaagatgagatgatagatatcgttggagtgactaagggtaaaggttatgaaggtgtcgtaactcggtggggcgtcactcgccttcctcgaaagactcacaggggtctaaggaaggttgcttgtattggtgcctggcaccctgctcgtgtttctttcactgttgccagggccggtcagaatggatatca

SEQ ID NO: 22498 - DNA, 408 bp, Glycine max
  Clone ID: LIB3050-022-Q1-K1-F4
gggtcttctacccattcaatgggcctggaacagccaaagtatggctcatagatattccactagggaaaataggagaacatattggagactgggagcatgtgacactaagagtaagcaatttcgatggagaactaaaaaaggtgtatctctcacaacatagcaatggtcaatgggttgaagcttctcagctcgagttccaaagtgggaacaaatcaatgtgctattcctccttgaatggccatgccatttattcaaaagcaggacttgtcatgcaaggccttgatgggattggaaataagaatgaaacttagaagagtgagaaagtgattgacatgggtgttggttttgaagttggttctggtgagtatttggggtcagcaattgtagaaccaccttggttaaaccttt

SEQ ID NO: 22499 - DNA, 415 bp, Glycine max
  Clone ID: LIB3050-022-Q1-K1-F5
ggaaccgaaacgaacctcaacaacgctgagcgcagaaaggggaaaaggggattagggtttaggaagcagcgacaacaatggatttcacagtggagaagaaggaatcagagaacaacgccgaaaatgctcacccaacaacgttagattcttcttctcaattggcatcggcacttgattccaacaacaaagaaatcgaagaacgacaagctcgtgaactcaaagccggacttcaccccctaaagcacaagtttgtcttctggtacactcgtcgaacacctggagttcggaatcaaacatcatatgaggacaacataaagaaaattgttgaatttaagtacggtggaaggattttgggtctgctactgccatcttggctcgtcctgcttctttacctagtccaacagatttgcacctt

SEQ ID NO: 22500 - DNA, 363 bp, Glycine max
  unsure (1)..(363): unsure at all n locations
  Clone ID: LIB3050-022-Q1-K1-F6
gtttgaaggtcatcgacgacccgtgaagtgtttggctatggctgttgactccaacagtggtggtcctcgtgaggatgatcataatagtagctcttatctggtttacagtgcaggtttagattgtgagattaaagtgtggcaaatacgcgttccttcgctgtcgttgtgatcctttttttgttactacaattttttgctcccttcattggatttgtaaataggatcagaattttttttgttattttgatgtgtaacttggcttctttttttcggtgtagtggtatttttactactaatttgactganaaaataaagaagatttggagatggattcataccaccaagtttggattgggtttttct

SEQ ID NO: 22501 - DNA, 411 bp, Glycine max
  Clone ID: LIB3050-022-Q1-K1-F7
gatctgaacgaaggagagagtgaaagatccttttgtggatcgaacatcttgcgttttattgtggtgttgaggatcgaaaatggatcagatattcaacaaggtcggatcctattggttcaaccagaaagcctccagccagctcaattccgttggtgatgacatcaattcgatgacaaacagtattgaagggggaaccaaatggttggtcaacaaaataaaaggaaagatgcaaaaggcattgccagagttgctaaaggagtacgatctaccaataggaatctttcctcgtgatgcaacaaactatgaattcaatgaagaaacaggaaagcttgttgtttacattcctcaagtatgtgaagttggctacaaggattcatcagtcttgcgtttcttcaccaccgtgactggtta

SEQ ID NO: 22502 - DNA, 391 bp, Glycine max
  unsure (1)..(391): unsure at all n locations
  Clone ID: LIB3050-022-Q1-K1-F8
gggtctccactacgcattcggacaaaccctaacttctttttgctgttgttgggcaccaagatgaaagtgaacatcttgcaatggcatgctgttgcttcatggacttgggatgcccaggatgaaacctgtgggatttgtaggatggcctttgatggatgttgtcctgactgcaaacttcctggagatgactgcccactgatttggggtgtatgcaatcacgcatttcatctgcactgtatcctgaaatgggtgaattctcagacatcacaagcgcattgccccatgtgccgtanggagtggcagtttaaaggatgagagctcaggttttcattttctttttcgagtgtgaccagagagcaatgtaaaatggtatgggtaattcgaagatgta

SEQ ID NO: 22503 - DNA, 356 bp, Glycine max
  Clone ID: LIB3050-022-Q1-K1-F9
ggcgtaaaaacaaaaggcttgactagagaaagagagagagagagcttcgaatcgaaactcagaagtagaaagaaacacagatcacaatcgctatggctaggtacgaccgagcaatcaccgtgttctcccctgacggccatctcttccaggtcgagtacgccctcgaagccgtccgcaagggcaacgccgccgtcggcgtacgcggcaccgacaatgttgtactcggcgtcgagaagaaatccaccgccgaactccaagactccaggtcggtgaggaagatagtgaatctggacgaccacattgcgctggcctgcgcggtgctgaaggccgacgcacgcgtgctcataaacagggca

SEQ ID NO: 22504 - DNA, 416 bp, Glycine max
  unsure (1)..(416): unsure at all n locations
  Clone ID: LIB3050-022-Q1-K1-G1
gactgtggtggcgaaccctaggcagttcaagatcccagactggtttttgaacagaaagaaggactacaaggatggcaaatactctcaagttgtgtctaatgctcttgatatgaagctcagggatgatcttgagagactcaagaaaatcagaaaccaccgtggtttgaggcattactggggccttcgtgtccgtggtcagcacaccgagactactggccgtaggggaaagactgttggtgtctctaagaagcgttaagctattatgtttggcttggagattagattttgttgagaaggaaagtttgaagtacactagacatgttttgcatcataccaactttgtatccgtcgttaaatggcttgacaatttcaattntggttgttatttgcatcaagattcagtttagttaaatgat

SEQ ID NO: 22505 - DNA, 397 bp, Glycine max
  unsure (1)..(397): unsure at all n locations
  Clone ID: LIB3050-022-Q1-K1-G10
gtcttaggaagatgaaggaaaggtatgcaataacagacatgaggaagttagccaataggatgcaatttggagtcccagaagagagttcattaggagatggtctgggtgagggctatggaatgcttggtcaggctggcagtggcaagcttcgtgtgtctgttggtcaaagcaaacttgcagcaaaagttgctaaaaaatttaaggaaaagaattatggtagtagtggtgctacctctggtttgacatcaagtcttgcattcacaccagtgcagggtattgagctgacaaatccacaggctcatgcacaccaacttggtagtggaactcaaagcacttatttctctgaaacaggaacattttcaaagatcaagaggacatganaccatgcatgaatgca

SEQ ID NO: 22506 - DNA, 399 bp, Glycine max
  unsure (1)..(399): unsure at all n locations
  Clone ID: LIB3050-022-Q1-K1-G11
agaaggggactcaaaattaaccacaagcataagcacaagcacaagcacaagcacttctctaattccctttcacactctattacagatttcacaagtgcttacacttcaaatggctttggaagctcttcaatcacccaccacagccactccatcgtttagtccctttgaagaaaccagtctcagttacttagagacaccgtggacgaaaggaaagcgttctaagcgtagccgcacggagcaacaactgcaacacccttcatgcaccgaggaagagtacctcgctctttgtctcatcatgctcgctcgcggcggcgccggcagtgtctccaccgccaaacccgctgtctccgacaacaattctgcgccgctatccgncgtcaaactgagctacaaatgttc

SEQ ID NO: 22507 - DNA, 409 bp, Glycine max
  Clone ID: LIB3050-022-Q1-K1-G12
gggagggacggggttgcatgaaagtttggagaaggttacattccaaacaaaggtggttcctggcactgatggtaatggctctatcgccaaggccactctcacattccacaccaaagacgatgcaccactctcagatgcagtgcgtgatgaaacaaaggccaggggtgctggaattttcaaggccattgagggctacgttttggcaaatcctgctcaatgattatccttcaaaccacttgcatgcatgcaataataattatataagcttatgatctggttgttggagttaatttgtatcatgtggctttgtttggtttaattaatttcctttgtgagcaagtgtcggttttatttatgtaacatttttaaagtgttactattataattcggtgaatttggttgagtatac

SEQ ID NO: 22508 - DNA, 377 bp, Glycine max
  Clone ID: LIB3050-022-Q1-K1-G2
ttggggcagagcaatatttccgtacgctctttgtttttcctttcatcggtttccttctccatttatttgtacgtattccaccactgctccccaaaacgcgcgagacttcactcgctggcctctttgaaaaatcaacacctctttttctcctccttctgattccgattccaattccattgaatatggagaaaactctcctcaaggatttcgagctccagcacaaaaatccctccgtcgaagccctccgccgatggagatccgccgtcactctcgtcaaaaaccaccgccgccgcttccgcatggtcgccgatctcgacaagcgcgtccaagccgagcagattaagcaggggatcaaggtttttttctttcactttcct

SEQ ID NO: 22509 - DNA, 403 bp, Glycine max
  Clone ID: LIB3050-022-Q1-K1-G3
ggaagcataaaacaaagaaccctgcctagaaaaaaaaatggagtactctaatggattccctagaaaaagagatgtttctcttcaggaacttagcaaaaggcttgctgagtttgctgaagtaagaggatgggatcaatatcacagtcccagaaatcttcttttagctcttgtgggagaggtgggagagctttctgagatcttccagtggaaaggagaggttgcaaagggattgcccaattggagttctgatgataaggagcacttagaggaagagctttcagatgttttgctttatttagtgcgtcttgctgatgtttgtgggctagatcttggacaggctgctctgactaaaatagtgaagaatgctcagaaatacccagttactagtactaattaatcacac

SEQ ID NO: 22510 - DNA, 395 bp, Glycine max
  unsure (1)..(395): unsure at all n locations
  Clone ID: LIB3050-022-Q1-K1-G4
ggaattgaaattgaagacaactgggataaggttaagactgcatttgtttcaactggaatgtctcttacgtcagaaatcgttgccccacttgttgcaacccttcccttggagatcaagggagaaattgaggaatttctcaaagtggttttcactctgtttcaagacctgnattttactttcttagagatgaatcctttcacattggttgatggaaagccttatcctttggatatgagaggcgagctagatgacactgctgctttcaagaacttcaagaagtggggagacattgaatttccgctgccatttggaaaggttatgagtgccaccgagtctttcattcatggattagatgaaaagacaagtgcatccttaaaattcacagtgttgaaccc

SEQ ID NO: 22511 - DNA, 395 bp, Glycine max
  unsure (1)..(395): unsure at all n locations
  Clone ID: LIB3050-022-Q1-K1-G5
agaagggggtctttggttttgtctgtgcaaagaaattttaccccgcctttcaacatccagcacttgaggttgcagctaatacgcttaaggaagttcccaatatggaattgatttttggagcttacattccaccaagcttgaggtctgagaagatagatggtgaccgggttgaagatgcattgtctcaagcttcaagaacaacacctgtttgatgtaattatctgaatttcaactttttttttacgtgttagatgtagtcttgtagagatacttttagacattctattaattgttcataatacgtcttaggaactagaggtgttgagtgttgactgtcgtgaatgtgattgtgtaatgttgggtggtcttgtaatnatttcatgtaatgtgatgtt

SEQ ID NO: 22512 - DNA, 315 bp, Glycine max
  Clone ID: LIB3050-022-Q1-K1-G6
tgatcagcaactacaacgtgagaaacatggcttccttaagctccttagtgctgctccttgcagctctaattctatcccctcaagttcttgcaaactatgagaatcccccagtgtacaagccttccactgagaaaccaccagtttataagcccccaattgggaagccctcttgttaccaaccttcaagtggaaacccccccatttataaaccctccattgagaaaccacccatgtacaagccccccagtgggaaacccccaatggtccaacccccaattgaaaaacccccaatgtgcaagccccccatttagaaac

SEQ ID NO: 22513 - DNA, 390 bp, Glycine max
  Clone ID: LIB3050-022-Q1-K1-G7
gaagcaacaaaccaaaaactcaagtagcaactatattgataaaatctgttccaacaactccaacatttatggcacctcctcaggcagacctatggaagattggcgcagaaggctttgctctgatagacaagttctatggtccatcaagggggaacagtgccaatgatgcattccatgggccaaggggagaacattgttgggtggtttataatgtgtccaatgatgtgatggaagaatctgctgtagacccatgaaattctaagctttttggcttatgcatgttaattattaggtatcttcaaatgggtctttgctgtttcatgttaggttactctcttgtatgatttatgtatagaaaaaaactcggggaccctgcactatatttgaatc

SEQ ID NO: 22514 - DNA, 293 bp, Glycine max
  Clone ID: LIB3050-020-Q1-K1-G2
ccctttatgcagaacttaagtgtagcctatggtctgcgagaaatcaaacctggtgaacctgttctggactggcctacaagaagacaggtggctctgggaacagcccgtggcttagaatatctccatgagcattgcaatcctaagattattcatcgggatgttaaggcagctaatgtattactagatgaagattttgaagctgttgttggtgattttggcttggcaaagttagtcgatgttcgaaaaactaacgtgacaactcaagttcgtgggacaatgggccacatagctcc

SEQ ID NO: 22515 - DNA, 341 bp, Glycine max
  Clone ID: LIB3050-018-Q1-E1-E11
ggcgagatagaagagaaagccgtcgctatcctagtctcttcttcccctctacccatttcagtttcaggatggaatctcaggtgaagcacgcccttgttgtcaaagttatgggtcgtactgggtctagggggcaggtgactcaggttagagtgaagtttttggatgatcaaaaccgacacatcatgaggaacgtgaagggacccgtgagagaaggagacattctcaccctacttgagtctgaaagagaagcaagaaggttgcgctagaggatctcttcatggtttggctcaggacttaaacaaaacatcattgtttttgttgtagttaaaggatgtcaaatg

SEQ ID NO: 22516 - DNA, 344 bp, Glycine max
  Clone ID: LIB3050-018-Q1-E1-E12
gacggtttggccaacctgtccatccatccaaaattccccatcccgcaactaatttaattagttacttttccgttaattatcttccttccctggctcgagcatccaaaaaggttggttttttttttttttagaagaagaacaagataaggaagatgattatgatgactatggatgggatgatggacgaaggggtgttggatcatttgataagaaagcttctggaaaggaaaggaaggaaacaagtgcaactctctgagtccgagatacgttaactccaagtcaacgcccaagaaatcttcctctctcagccaattcttctcgacctacgtgctctcatccgcaac

SEQ ID NO: 22517 - DNA, 376 bp, Glycine max
  Clone ID: LIB3050-018-Q1-E1-E2
aggcagttggcaagtgataataatagcagacgaattagacgtttcttttcttcgccgtctcaactcaattccattctcttctctgagtctcaacctaattcaccattcatccatctttacgtgtctgttggattccatggccaaaagctccttcaagcttgaacatcccatggaaagaagacaggctgagtctgctcgcattagagacaagtatcctgatagaatacctgtgattgttgagaaagcggaaagaagtgacatcccagacatcgataagaacaagtaccttgtcccagccgatttgactgttggtcagtctgttgatgttgtccgtagaacgactaacgtcaatgcggacaaggctatttttgttttt

SEQ ID NO: 22518 - DNA, 297 bp, Glycine max
  Clone ID: LIB3050-018-Q1-E1-E3
gattccattgtgtagtaaccagtcagcgttagttcttcagtaacttattgtgggattcgattctaagattttgagattgtccagctgtgggtgtggaaacagctgcagctgtggcagcaactgcggttgcaacaagtactcatttgacctgagtgacgttgagtcgacaaccagagagactcgagttttgggtgttgggcctgtgaacgctcagttggaaggtgctgatatgggtgttgcatctgagaacggtggctgcaactgtggatgaagctgcacctgtgactcatgcatctg

SEQ ID NO: 22519 - DNA, 57 bp, Glycine max
  Clone ID: LIB3050-018-Q1-E1-E4
tgggggtgaccaaatgcaaagacggcattgaaattgaacacaatccatgactaacac

SEQ ID NO: 22520 - DNA, 352 bp, Glycine max
  Clone ID: LIB3050-018-Q1-E1-E5
gaagacagttagcatgcaaaagagggatccagataaacaaattataccctaaggagttgctaaacccaagctgtgggttttgcagtttctttgggttgaagcacttccgtcttcgagttgaggcattgagcagagcaacgaagctcctcccaaaccaatgactttggtcgacagcgcttccttctgaatttcctagacccttttggcttcacgatgggccctcgacagtgccaagtctgcaaccaaactcactccaaatacaagtgcccttcatgttacttaccttattgttctctggtctgtttcaagacacacacagaatctccatgcgtcaagccacagccttcagaga

SEQ ID NO: 22521 - DNA, 322 bp, Glycine max
  Clone ID: LIB3050-018-Q1-E1-E6
ggcagcgaaaagaagacaatagggggtttcagatatgaatacacgagctcagggtatcgatgcaagatggctatatactgttatagcttcatcgaatgatcatggggttacgtgcagatattcaacacagattactcatgatgtcacataccttatcactggtatagttgatatcgtagaatatatggatctcgttgctacttacaaagatatttacgtcttcatctagagatttgagagtgtgacacttcgtctatggaaccctctcgcaatagatataaccttgagatgtcgcattttatagcattctcgtcaaggtcta

SEQ ID NO: 22522 - DNA, 263 bp, Glycine max
  unsure (1)..(263): unsure at all n locations
  Clone ID: LIB3050-018-Q1-E1-E7
gaatatgattatattttcctttgggatgaggacctangagttgagcatttccatccagataagtatgtttctattatcaaacgtgaagggctggagatatcacaaccagcactggatcctaaaaaaatcagaagtgcatcatcagattactgcacgtgggaggatgtcatcagtgcacagaacgacatataaagctagtaatgatggtaaagggtgtgataaaagcagcactgccccaccttgtacanggtggatagaaatga

SEQ ID NO: 22523 - DNA, 307 bp, Glycine max
  Clone ID: LIB3050-018-Q1-E1-E8
ggagacacatggcgagagagaagcgtaacagaagcggtaaccggaataagttgtctctacgatttgagccatggcaacaacaagaccctcaaaccgatcatcacaggcgtttgcgcacatggcaatcctcagcactctgcattgcacggcggtggcggcgaaggatatcgtgtacgagatactccccaagtacggcctcccgagcggtctgttaccggacaccgtcaacgactacacgctcgacgaggacgggcaattcgtcgtcggtttggcgaagccctgcgacatacagttcgagtaattagtt

SEQ ID NO: 22524 - DNA, 257 bp, Glycine max
  Clone ID: LIB3050-018-Q1-E1-E9
aacacctaaagggggccgcaaaaatacgagtgcagtgggatacaggcaccgatctactggtgtttggtactgatgagcaagaactactctccgctgaattttcaccatgatcattatgagcccgtgagtacattgggcatcagactttgcacgtgagtcacggctcaacactcggattgtctctgtggcttactccaaagatatgctctcttacatatttcacatgttcagattctctgagcatactctcatccgct

SEQ ID NO: 22525 - DNA, 348 bp, Glycine max
  unsure (1)..(348): unsure at all n locations
  Clone ID: LIB3050-018-Q1-E1-F1
agggaaggaaggaagaaattaaccgaatgagagcattaacctcttcttcttccactttcattccaaagcgttatttcttcttcttcttcctctccattctcttcgctcttcgatcctcgtccgggggctgctccgaataccaccaccaccacgcgccgatggccacgataggaggcttacgcgactcccaaagctctcagagcagcgtccaaaccgaggccctcgctcggttcgccgtcgatgaacacaacaagaagcagaattcacttctggagttttctanggtggtgaggacacatgaacaggttgttgcgggaaccctgcatcaccttactctcgaggctattg

SEQ ID NO: 22526 - DNA, 326 bp, Glycine max
  Clone ID: LIB3050-018-Q1-E1-F10
gtccactccaatccaccagaacatttgttcaatggacagcatcctcgtggtaaatgccgtctcgccagatcaaccatcatctcagggcatataatgggatgtcataagcgtccatcccgtataattgattttcgaccgaatgagaaaaacatatatagtagaatcgtagccatagaatatcaccctaatctagatgcatacctttgtctcatatactatgtggatggtgagccaaaatatattttacacctcacacgggctataattggatatcccagtgtttctggtacagaagttccgatgagtctgggaaatgccctaccatt

SEQ ID NO: 22527 - DNA, 136 bp, Glycine max
  Clone ID: LIB3050-018-Q1-E1-F11
gaccggagcgataagacggcagtcaggttcagtttcgcgtactctcatgtaaggtaatgtttcgatagatcgactctcaggtaaggctatcacatgatgatcacacaggttgtggcgcaaggatgactacatagcg

SEQ ID NO: 22528 - DNA, 372 bp, Glycine max
  Clone ID: LIB3050-018-Q1-E1-F12
gacaagagaactgatgctgctttgaagaatccgaacaaagagtgggatggagcatcacgtagaaacaatgcatgtctctgtaattctttactcactgtcacacgtccatctgttcctctggcacaatatgttcgctatgttgagcaatagtgggacaaccttaatgctcttggacgtactgatggaagtagactccgcctgctgacttataacattgttctgatattagctcggtttgcatcaggaccatcattcaatgcagattgccgacgtggtggacgagaaagtaattcctcgttcctcccaattatgatccaaatggcatgccagctccttgatcaaggaagaccctcacagtgtcgaaccatggcc

SEQ ID NO: 22529 - DNA, 297 bp, Glycine max
  Clone ID: LIB3050-018-Q1-E1-F2
gaacgaacttggagttgaataccgtgttggcaagttcccattcctggctaatagcatagctaaagcaattgacaatgctgaaggactggtgaagatattggctgaaaaggagacagacatgatattgggagtgcacattatggcgcccaatgcaggagagcttattcatgaagctgcaatagcactacagtatgatgcatcaagtgaggacattgcacgtgtgtgccatgcacatccaacaatgagcgatgctgtgaaagatgccgcaatggccacttatgacatgcccattcacat

SEQ ID NO: 22530 - DNA, 228 bp, Glycine max
  Clone ID: LIB3050-018-Q1-E1-F4
ggcccctcttaaagatgaaagtgtattgatcatgggttctgggaatgctgttcacaacttgagagcacttgagcctcaatccactgttgctccctgcgctctagagtttgataattggttgaaagatgctcttcttgaatgaacatatgaagatgtaaatcattatgagcataaagcaccacatgcaaaaaacgctcatccctggccggattacttttaaccgctgca

SEQ ID NO: 22531 - DNA, 342 bp, Glycine max
  Clone ID: LIB3050-018-Q1-E1-F5
ggccgaaccaaagagccgaacccggcctttagggaaaaaaagaagaactaaaggtatcgcttctctttttgtttccctctcttctctcttccatggaaaaaatggcggcagcttcaataaaaccaagaagcgcagtaattggatccctttcttcaacccctatgttctgcaactctcactctacatcattatcgtcgtcatcatcagctttcgcttcttccagctccagcttcacctctcgctcctcctccttctttcaccgctcttgcactccaacacgtgtcaagctctacggttccaccgctccctccgtcaggttcatccctcgagcgttcggtctct

SEQ ID NO: 22532 - DNA, 351 bp, Glycine max
  Clone ID: LIB3050-018-Q1-E1-F7
ggttggagttgttcgcaagaaaccggagcgttgattttcttctatttctcgatcgtcgtcacgaggaagaatggcagagagttacttcaggcaagagcatgatcttgagaagagaagagctgatgctgctaggattagagagaaatacccagaccgtatcccggtgattgtggagaaggcagaaagaagtgatatcccatgtattgacaagaagaagtaccttgtccctgctgatctgacagttggacagtttgtctatgttatccgcaaaaggattaaattaagtgcagaaaaggcaatctttatctttgtggacaacgtccttccacctacaggagcaattaagtcttc

SEQ ID NO: 22533 - DNA, 334 bp, Glycine max
  Clone ID: LIB3050-018-Q1-E1-F8
gaatctaaagataaataaaattcaggaaaaaaaaaaaaaaacatggtggtgaaggtgtatggtccaacctatggatcccccaagagggtcctggtgtgtctgattgagaaggaaattgagtttgacacagtgcatgttgatctcttcaagggagagaatacggaacctgagttccttaagctgcagccatttggatcccttcctgttattcaagacggtgattatactctctatgaatctcgtgcaataatcagatacttagctgagaagtatagagactaagggactgacttattgggaaagacaatacaggaaaacggtctagtggaacaat

SEQ ID NO: 22534 - DNA, 329 bp, Glycine max
  Clone ID: LIB3050-018-Q1-E1-F9
gactcacaaataaacataattacttgccttgaggaacgttccagaccacatacagaggtttctctagtgatcttcgttcttctgtggagatcttgttttttcatctcacttttcttctaattaaggaacaagctttccgcagttgaaaaccctagctagctagcttccaccaatttgaatcaccaatggctcgctctttctctaacgtcaaggttctctctgctcttgtggccgacggattctccaacactctcaccaggcgtgggtacgcagcagcgacacaaagcgcaacaagatgaggagctgcctccatcagcagcaagatagct

SEQ ID NO: 22535 - DNA, 346 bp, Glycine max
  Clone ID: LIB3050-018-Q1-E1-G1
ggaaggtgaaggtgaaggtgatgatggaattggaagtcgacgagaacgacttgaaagccgccggtgctgagctcttcgtcgacggtggtcggcgcggcattcgcatcaatggctgggtgatcgagactcggaggcactccatactcaactcttccacactccaagagtgggaacagaatctcgatacgtctcatttaccagaaatggtttttggggaaaacactttgattctaaaacacttgagcagtggcaccaacattcattttaatgcatttgatgctctacgtggctggaaacatgaagcattgccgccagttgaagttcctgcggcggctaaatggaaatt

SEQ ID NO: 22536 - DNA, 298 bp, Glycine max
  Clone ID: LIB3050-018-Q1-E1-G10
gatcagactgtgaccaatgaacacgttgttgctgaccttcaacatcatgttaacaggcctgtcgatcgatcgaagttcctgtaatggaataacatcttccaacgtaagccttctggccgttttggcactggtggcccgcatgatgaaactggactcactggaagagcgatcatcattgacacctatggtgggttgggtgcccatggtggaagtgccctttcaaggaaggaccctacgaaggttgacagatctgatggctaaaacgtgaggcacggcgcaaagaatgttgtgacattgg

SEQ ID NO: 22537 - DNA, 329 bp, Glycine max
  Clone ID: LIB3050-018-Q1-E1-G11
gtttgtagtcatgtagaatagctcccatagtctcatgctgttttgtcttatattccgtgaaattttgagattctgctttctgtcaccacaccacatttggaacctgttacttctttgcagttgaacttgtgtcgaatccaagggaaccaaattaactactaataacagatatttgcataatcctgaaatcaaatctgttaggaagagagaatgaattaatagcttttcagctcttactattgcagccaaggaggagaaatttttgcattgttatgttatgttgttatttctttagcctgttctctcacttttatgtttctggaagatag

SEQ ID NO: 22538 - DNA, 362 bp, Glycine max
  Clone ID: LIB3050-018-Q1-E1-G12
gtttgtattcatgtagaatagctcgcatagtctcatgctgttttgtcttatattccttgaaattttgagattctgctttctgtcactacaccagaattggaacctgttacttctttgcagttgaacttgtgtcgaatccaagggaaccaaattaaatactaagatcagatatttgcataatcctgaaatcaaatctgttaggaagagagaatgaattaatagcttttcagctcttactattgcagccaaggaggagaaatttttgcattgttatgttatgttgttatttctttatcctgttctctcacttttatgtttctggatgatagatgaaggacattgggagtagataagaagccttt

SEQ ID NO: 22539 - DNA, 77 bp, Glycine max
  Clone ID: LIB3050-018-Q1-E1-G2
caaaaaaccacacaaaggggcacgtttaagggaatgtgatcaaagaatttgacctctaggataacgactttaaatcc

SEQ ID NO: 22540 - DNA, 219 bp, Glycine max
  Clone ID: LIB3050-018-Q1-E1-G3
tactcatatcacttataccattctctctcgcacgcacacgcacctcgataaccacatggttttacccatggcatccaatcagatcgtgaacgaacttaaggatcgtcatacggcatctcctacctcatgcatcgccagtcctgttgctgatcacatgtatcactggcaagcaacaattatgggtcatctagacaatccttatgcttcaagtgttttcct

SEQ ID NO: 22541 - DNA, 106 bp, Glycine max
  Clone ID: LIB3050-018-Q1-E1-G4
aagccttaagccaagccttcggacaagccttcattggggtgccaaaaaagcaactaaaggggaaaccaaagccaaattgtacccttaagccattaaccccaaaaag

SEQ ID NO: 22542 - DNA, 362 bp, Glycine max
  Clone ID: LIB3050-018-Q1-E1-G5
ggagttgccattgaagaagaagctcagatcggaaaaattcacctctccaatcccaatcccatcgttgcaaatgatccgattcattctgttgcagaacatgcagggcaagacccgtcttgccaaatactacgttcctctcgaggactccgagaagcacaaggtcgaatacgaggttcatcggctcgtcgtaaacagagaccctaaatacacaaatttcgtcgagtttcgtacgcacaagataatatacaggcgatatgctgggttatttttctcactctgtgttgatatcactgataatgagttggcgtatttagagtgcatccatttgtttgtggaaatattggatcacttcctcagcaatg

SEQ ID NO: 22543 - DNA, 325 bp, Glycine max
  Clone ID: LIB3050-018-Q1-E1-G6
gtcgttcgtgaagagaatgggctccgtgaagggaatgaagcccagagagtacaacgcactgcgtgactgcgtggagaacatgaacgacagcgtggaccgtctcagccagtcggtgaaggagctcgggctcgtcatgggtaagggcaagggtaagaaggactttacgtggcatgtgagtaatgttcagacttgggttagcgctgccatcactgatcaggacacgtgtcttgatgggtttgatgggccccacgtggacgccaacttgagggcttccgttaggcccagggtcgtggatgcatctcaggtcactagtaacggccttgca

SEQ ID NO: 22544 - DNA, 336 bp, Glycine max
  Clone ID: LIB3050-018-Q1-E1-G7
tacaaaggggaaagaggataaaattgctgtaataatggggactgtaactgatgatatcagagtatatgaaattccaacattgaaaattacagcactcaagtttaacgagaaaacaagttccagaataaaaaaagctggtggtgaaatgctgacatttgaaggggcttgcccttagggtccctttgggacaaaatacagtccttcttaaaagccccaagaatgctcgggaagctgtgaaacactttggtcctgctcctggtgtgccacacagccataccaagccctatgtacgagcaaagggaagaaagttccatagggctataagaaagaggaaca

SEQ ID NO: 22545 - DNA, 324 bp, Glycine max
  Clone ID: LIB3050-018-Q1-E1-G8
ggcccacttccaaatcttctcctctcgctatgggttgcggctcctcacttccagatacgggctcaatgcagttgggtcgacccaaatcacataatggttcaaggcaagacgccaagaaacttagggtcaagcttgttctcttacgtgattctggtgttggtaaaatctgtattgttctacgatctgttcgtggtcagtttgatacaacatctaacgtaactgttggagcttcttttttgtcgcaaacaatagctctgcaagactctacatcagtcaagttctaaatatgggatactgctggtcacgagaggtatgctgctttag

SEQ ID NO: 22546 - DNA, 332 bp, Glycine max
  Clone ID: LIB3050-018-Q1-E1-G9
ggtcacagtgatactcatctacttgccctgagggatgtggcacatcacatacagaggcgtggctaatgatcttcgttcctctgtggtcatagtattttatcaggcaagaattctacaaacttagggtcaagcttgtcgcattaagtgactctgagcgtagcgaacgatctgtaatgttccaacgacaagtgcgtcgtcagtctcataaatcaacgttcgtctctgctcgtatggccaaaggagtctccaacactctcaccacgcgtcactacgcagctgcgatttaaaatgtaagatgatgatgagcttcatacataagcagcatcatagct

SEQ ID NO: 22547 - DNA, 357 bp, Glycine max
  Clone ID: LIB3050-018-Q1-E1-H1
gactgatcgagcgagcagcgtttgtttgttccttcctcagtcgttgtgacagtgtgtgtgagtgagtgagtgagagcgacgatgggcgcgagcagcgaccccacccaagacggttccgacgagcagcagaagcgttcggagatctacacctacgaggccccctggcacatctacgccatgaactggagcgtccgccgcgacaagaagtatcgcctcgccatcgcctccctcttagagcagtaccctaaccgcgtggagattgtccagctcgacgactccaacggcgagatccgttccgacccctccctctccttcgagcacccttaccctcccaccaaggccatcttcatccccgac

SEQ ID NO: 22548 - DNA, 364 bp, Glycine max
  Clone ID: LIB3050-018-Q1-E1-H12
gaagagacatggatgcaggagttgaatgctaacagaccaccaacaccaactagaggccgtcctcaagtaacaaatgaccgaggttctcttgcttggatatagttatttattagtaagaatggccttattgtttatgccttgacggcttgtgctatcgcctgaatttccggtgttacgaatatgacatgatgccgtttacggggtattcaagttcgtgatataatacccgcagaaagcttgagggaccaagctttcatttgtcctggttctcatcactcgatcatctggcctgtagaagatccaagtccgagaagcgaagcaaagttggtagccactgctaagttggttcaccttgacaaaagct

SEQ ID NO: 22549 - DNA, 119 bp, Glycine max
  Clone ID: LIB3050-018-Q1-E1-H3
ggctcgggcacgcgtcagtccaagctgtcagagcacgagtccggggaataggaataacaggtcatggtgcgagaatactacagaatgggacgatacgcatgtttctgaaattgctgggt

SEQ ID NO: 22550 - DNA, 384 bp, Glycine max
  unsure (1)..(384): unsure at all n locations
  Clone ID: LIB3050-018-Q1-E1-H4
agagtcccggctagacgtacgcataggtgcgagaggacgacagcaagggacagacagacaaacaatttaccagctatacttgttccttttgaaggttagaagtgctacaatacaaacaatggcagctactcaggaagatgtgaagcttttgggtattgtgggaagcccatttgtgtgcanggtccagattgcccttaagttgaagggagttgaatacaaatttttggaagaaaatttgggcaacaagagtgatttgcttctcaaatacaaccctgttcacaagaaggttccagtgtttgttcacaatgagaagcccatagcagagtctcttgtgattgttgaatacattgatgagacatggaagaacaaccccatcttaccttc

SEQ ID NO: 22551 - DNA, 343 bp, Glycine max
  Clone ID: LIB3050-018-Q1-E1-H6
gatctaaaagaatgttttttctttcctaattagaggtgacaatcttattgatgaatttgcagatgaaactcatcaaagtttcacatctatattgaggacatctaccacatagagacctaataggtgaactcaggaggaagttctcctcgtaggaaaaatgagatcatggttagggctctctgcggttggtaacttggaaccatgtgcccagctcctcttacagtgattagtgtgagccctttgtacccaaccaagtatcctcgaacctacatattgtaagcagtatattacttacgtgttgcttgtaaattcagaatagtaaataataaagcttaattaatta

SEQ ID NO: 22552 - DNA, 303 bp, Glycine max
  Clone ID: LIB3050-018-Q1-E1-H7
aaggggcgtatcaatcggagtagcagtgcaaggcatctgagtactgaggagcagcagcagactaacaacaatgaagaaggggaagacgattcgttgaagccgttggagatcgagaacggtcgtcgcctactcacgcgcgtgaagctcaacctcacggtgtacccttccacgcccctcagactctcccatccagtccaccaatggaagattaatcgctcactcatcgacttcctcgactcctcctagtccctcacgctcgtcgaggacgatgaccttgacctcacgcgcctcaatgacctcaag

SEQ ID NO: 22553 - DNA, 367 bp, Glycine max
  Clone ID: LIB3050-018-Q1-E1-H8
ggtccaagtccttatcatctcctctctctaacggttgcggatcctcacttccagacacggggccaaggcacttcggtcgacccatttcatagaatggtggatggcaggacgccaacatacgtatggtcaagcttgtgctcttaggtgattctggtgttagtaacagctgtattgttctactatttgtgcgtggtcagtttgatatagcatcgattgtacctgttggaccctctttattgtctcggacaatcacactgcaatattctacatcagtgacgtctgaaatttgggatactgctggtcttgagaggtatgctgcgttagcacagcgatattaccgtagtgcaacagttgcagtttactgttt

SEQ ID NO: 22554 - DNA, 317 bp, Glycine max
  Clone ID: LIB3050-019-Q1-K1-A1
cccacgcgttcgcgcactcgtccgctgcagaatacgactgaagggagagcttgatattgatgttcttggtcatggagaaccagagagaggtgatgtggttgagtacttcggtgagcaattgtcaggctttgccttcactgttaatgggtgggtgcaatcctatggttcccgttgtgtgaatccaccaatcatctatggtgatgtgagcctcccaaagccaatgactgtcttctggtcatctctggctcaaaactttaccaagcgcccaatgaagggtatgcttaccgggcctgttaccattctcaacttgggccttt

SEQ ID NO: 22555 - DNA, 103 bp, Glycine max
  Clone ID: LIB3050-019-Q1-K1-A10
tggcctaagcaatgcgggacttttttattggattaagtttaatagtatgtttggaggagccatctttttaatcttaattcaaactatatccattcattattca

SEQ ID NO: 22556 - DNA, 280 bp, Glycine max
  Clone ID: LIB3050-019-Q1-K1-A12
gactagatggcgaggcaattgaaagagatgggaggagtgaagagtggtgaagaagagcttggaattggaactcttgtttttgtgttatgtgtgaccctctctcttattgcaactatcatcttcttctgtgcagatgaagtgcccaagaactccaagaaagccttccaagacaacaactacggtggttctgcctgcgccaccgggtgtggggcagcatgtggtggaagcttctgttgttaatggttcaggcacgttctgtacaccttttaattgttacctg

SEQ ID NO: 22557 - DNA, 235 bp, Glycine max
  Clone ID: LIB3050-019-Q1-K1-A3
tggggaagacagagacatcaagatgatcaatcgcgtgctttgtacgacctctggtctgtcgttctcaacctccttcgctcgcctctgacgttctccgacgaggttcctccagcgtcacggcgtccgggccatgctcagatatccccggcgggattctcgtcgttgctgctgggaatatccctggcgttgatgctgtgtggatctgtgaccttcttcatccggttcgtgtttattc

SEQ ID NO: 22558 - DNA, 150 bp, Glycine max
  Clone ID: LIB3050-019-Q1-K1-A5
ttaatggggcattgtgaaatcaacagataagcatttcactaatagagagacagaaggataatattgagaaataatggagggttgtacttattgtgtgaagttgctatgccttgttgggtttgtggtgcttgtgagtactattgctggggt

SEQ ID NO: 22559 - DNA, 295 bp, Glycine max
  Clone ID: LIB3050-019-Q1-K1-A6
ggttttgaatgtactttggacagagttgtagaggatcttaaaaattacagtgacttctgtattcaccggcttttacttcattatggtgtcaatgatagaaaggggatccttccagataagcatgttatgctttctgcaaaatgtcgggccttatcagaacttcttccttcactaaaggagggtggtcatcgagccttgatctttaatcaatggacttcaatgcttgacatattggagtggactttggatgtcattggattgacctataaacggcttgattgaagttcacatgttg

SEQ ID NO: 22560 - DNA, 245 bp, Glycine max
  Clone ID: LIB3050-019-Q1-K1-A7
tcgtctattctatcccgcgggagcatactacctgtcttcatctccaaacaacctcaaaaacattcatcaactttcactattaatccatccatcattaactcataaaataaagttctatttttttatctttgatttgcttctaatccatcatttaagtacctagttccttagattcccttctcaaacaagctaaaaaactttaaacttaatttgaataactaattaattcttttcctaaatttttt

SEQ ID NO: 22561 - DNA, 152 bp, Glycine max
  Clone ID: LIB3050-019-Q1-K1-A9
tggttatgagggtcagtgagcagttcactggtatggaccggctcaaagcctggttggattggtacactggggagggtatggacgagatggagttcactgatgcatatagtaatatgaatgatttggtatcatagtaccagcatgtaccagta

SEQ ID NO: 22562 - DNA, 139 bp, Glycine max
  Clone ID: LIB3050-019-Q1-K1-B1
gaaaaaaggaagaggaactaatcaatcgcaaggcgtctgttctgtcccgcgggagcagactacctgtcttcatcgccaaacaacctcaaaaacattcatcaacgttcactattaatccatccatcattaagtaagaaaa

SEQ ID NO: 22563 - DNA, 382 bp, Glycine max
  unsure (1)..(382): unsure at all n locations
  Clone ID: LIB3050-019-Q1-K1-B10
tgggaccactgaagcgaagaaaggggcgtacggttcggttgtggttggagatgcgaagtgtgattatcgaatcgcaaaattctgaatcaatcaatcaatcaatcantaatcagagccatcaacgactgcaatggtctgcgagaagtgtgagaagaaattatcgaaggtgatagtaccagacaagtggaaagaatgggccagcaatactaccgaaggtggtggccgcaagatcaacgagaacaagcttctctccaagaaaaacagattgaccccttactgaaacactaagtgcaccatttgcaagcaacaaatgcaccataatgctaagtactgccacacccgttcttactctaaatgaatttttgcaatgtttgtcaatcaa

SEQ ID NO: 22564 - DNA, 386 bp, Glycine max
  Clone ID: LIB3050-019-Q1-K1-B11
gatagcagcatcatacaaagcattgaaggcaagaacttaagttcattccttgtgtgttgctttcttcctcaaaaccaaacatgtcgaacacatgcggcaactgcgactgcgctgacaagactagctgcaccaagggaaacagctatggtgttattgtagagactgagaagagttacatcgagactgttgtcatggatgttccagcagctgagcatgatgggaagtgcaagtgtggcactaactgcacttgcacggactgcacctgtggccattaaggaatatgtatgaaaatgtaattgccatgtgtttggcaatacaaatatccaaataatgtaatcttcgtatggataaatgtgtgtgctgttatcctacttcaagtctgtgta

SEQ ID NO: 22565 - DNA, 288 bp, Glycine max
  Clone ID: LIB3050-019-Q1-K1-B12
aggacagtgagtatagtaaatattaaacaagttgagtgctagctgagttaggacagatgaggcgatctttggccctcaccgaaaaaactctgggcaattttttttcattctccgccattatgggatagaagtttgagtttcagagagcacagaaaggcccactataatgaattccgcaaagtcaaagagctgcaacaaaaggcttctctggaggatggaagtgatgaggataatcatgctgaggttgccaacgggggagaagataaatgactcatcttcttcaacgaa

SEQ ID NO: 22566 - DNA, 71 bp, Glycine max
  Clone ID: LIB3050-019-Q1-K1-B3
acatcagataaatactcctggctctctctttacagctatcaatccacactctccaagcttgatcttcaatg

SEQ ID NO: 22567 - DNA, 272 bp, Glycine max
  Clone ID: LIB3050-019-Q1-K1-B4
taggggaaactgaactgtgtaagaaggtaaatatgactcatcggggcggaatcagagtttcaattcaattcaatagctatttacagtttccagaaaagaaattgattttcagtcaatatcagatggatcattttgcatcacatgaagagcaacttgcttcacagataatgatgcataaacttgaagaagtaaatgttgctgctcaaactaatcttgcccctgtccaagactatgtcaattatacactccataaatcatattttaagtgtgca

SEQ ID NO: 22568 - DNA, 278 bp, Glycine max
  unsure (1)..(278): unsure at all n locations
  Clone ID: LIB3050-019-Q1-K1-B5
taatgttgggtttctgaaatcangcttcccggtatgcgttaacgaatatggcgagggtcttatgactctcctgaaaaggcatcactatccttcgatgctgccctttactgtctacattgcctccatgccaatttcaatttccccaacacaccttgcaacattgacactgctaccaatgctcctcctaaccaatctcttaccccaccatagattcaagatgttgctgctaaattctcaaatcatgtgtcccctcttctaccaaaaccttaagaacaacc

SEQ ID NO: 22569 - DNA, 297 bp, Glycine max
  Clone ID: LIB3050-019-Q1-K1-B6
tgtgattggcaaaattattatttacctgatacgctcaatcctagagaaaagcagttggtggaaatagtgaagcatcatgcctacaaaaatgtgtacgatttgaaattgattgaatagactaagttgagctatttaaatctatctgcatgtctaaaagcaaggcagtctgacactcaagatcaaggtctgcaacatgttaatatctcaactgcacaaggtcaatcagtaacatttccagattatagtcaaccatctatctctccttcatatactgatgaaagaattcattaccaccaa

SEQ ID NO: 22570 - DNA, 239 bp, Glycine max
  Clone ID: LIB3050-019-Q1-K1-B7
taagctggaacactgggatacacatcacctgaatgtgcaatgcaaggtcaatgatcagagaaagccgatacctacaattatggtattgtggtcctagaaatcttaagtggtcaaaagagtaccaatgtaaaggttgatgacgagggtcgcgagtaccttcttcaacgagcatggaaactgtatgagagaggcatgcaatttgagcttgtggacaatgacatagaccccaatgaatatga

SEQ ID NO: 22571 - DNA, 327 bp, Glycine max
  Clone ID: LIB3050-019-Q1-K1-B8
ttacatcacaaaccaaacaacttctagcacagacactactctctctctgtctgttattgtatggccgccaattccagtatccgatggatcaccgccttatggaagcgagtcgccaaccggatctggacttccaactcacctcctctcacttcaaggatgggagcatacagtatcggctcattgtacgacaagaaccctgatgatgagatccagtctgggcaagtcccagactatgtgatccatgcggcaacacaatccggcaaatactgggccccacatccacagactggggtattttggccccccggaagaagtgaccaaactgct

SEQ ID NO: 22572 - DNA, 193 bp, Glycine max
  Clone ID: LIB3050-019-Q1-K1-C1
atattggaaattgttcaattaacttcaacctgaatttgtggtggcatggttcatagcacaacacttccattataatctattttttgcttcatcgcttccaagtcctttctcgtttatatttgaaactcaatctattggcaaaacagattatcaaaatcaaaaaatggaaagttgtttttttttcacctttgaa

SEQ ID NO: 22573 - DNA, 255 bp, Glycine max
  Clone ID: LIB3050-019-Q1-K1-C11
ggccctaactccttcaacgaccgtcttcgccaagcgcctgcgtctctctgtgaagtgacaagcttaaagacaaagtcttaaatggctggtccaaggattgcccatgctaccttgaaaggtccgagtgtggttaatgagataataattggaataacacttggcttaactgctggtagcatgtggaagatgcaccactggaatgaacagaggaaaaccaggaccttctactatttactggaaaaaggtgatatcaat

SEQ ID NO: 22574 - DNA, 85 bp, Glycine max
  Clone ID: LIB3050-019-Q1-K1-C12
tagggggatgatgggggcagcacttgtctcttctgctgagtcaactggtggtttctttgctgcatccatactttctggtgcaaca

SEQ ID NO: 22575 - DNA, 277 bp, Glycine max
  Clone ID: LIB3050-019-Q1-K1-C2
tgtgaaacatggaacaagtatccattgttaccgcacagttcttatcaaagagcgcttgctcgattttgggcaacctgtgttgaacaaaatctttggaaggctcgatgggtagcaatgtctaccatctgcgatcaacaagaatatgctatgaaagaagccaaataaatgattgacaaaataaaagaagagattaatggaaagaattttattggatgagacattatttggtaccttgatattgcaattggatggattgcttactttgttccttttttgg

SEQ ID NO: 22576 - DNA, 284 bp, Glycine max
  Clone ID: LIB3050-019-Q1-K1-C3
tggcatggagatagcatcaaaacataaacttggcgtgcatgactttgtggtgcgcaatgacatgggttgtggttcaaccattggtcctattcttgctagtggcatatgtattcgcactgttgatgtaggtgcaccgcagttgtcaatgcatatcatacgagaaatttgtgctgttgatgatgtgaagcattcatatgttcatttcaaggcattttactaataattttcttcatgtctatggtaatattgacatggatatttaattatttcccttggggcgaaat

SEQ ID NO: 22577 - DNA, 211 bp, Glycine max
  Clone ID: LIB3050-019-Q1-K1-C4
cgtggaaaaagttggtctgacgcagagaaaggtcaggatcaagatttgtatttcaagaatgctgtaaaatatgtggaagagccaatgatccgtttggaatcaattgcttcctctgcggttcgggcagctatcaaagttaatgcctttgttattatttgcttcacttcatctggaatagcttgcatattgattgctgagttcataccaacca

SEQ ID NO: 22578 - DNA, 243 bp, Glycine max
  Clone ID: LIB3050-019-Q1-K1-C5
ttaaggggttgagggattggataaggctgcgggctgataaataaacagaatcggatggacttgttaaacagaaattgaagttggacgaatcacttatagaatctgaggataaagtgactggtttggagtccactattcttcaattgcctgaggaatctaaggaatcctacagggtgatcatatcactgaatgaaaaggcagttgacactgttttacacaatctacatatgtttttatggtgta

SEQ ID NO: 22579 - DNA, 88 bp, Glycine max
  Clone ID: LIB3050-019-Q1-K1-D10
tggtacagctgctataatactacagaatgggataaaaagtgggttgaattcagatcctttccttaaactcactagaaatggagtttat

SEQ ID NO: 22580 - DNA, 231 bp, Glycine max
  unsure (1)..(231): unsure at all n locations
  Clone ID: LIB3050-019-Q1-K1-D11
gtgacgcaaagtccacagcaaattacgtttggaaanaatgtgatggttttgagttaaaacaatcatctaatgcgctcgatttaaggtttattccagacaacatggaattcaaacacccgcctcgggatgttgctactgatgtgcctgcaaattatgagtgcaaagatttctattctcgagcacttcatcacattgaggttaatcttacttgggatgatgattaacctcttc

SEQ ID NO: 22581 - DNA, 213 bp, Glycine max
  Clone ID: LIB3050-019-Q1-K1-D12
tggggggaattgacttagcatctgagcatgagagaggcctaacagaggtgaaggttgagaagcccgtcattgtatataactatccaaaagatatcaaagcattctacatgcggcttaatgatgacttaaagacagtggctgctatggatgtgcttgtacccaaggttggagagctaattggtggaagccaaaaggaataacgttatgatgtca

SEQ ID NO: 22582 - DNA, 134 bp, Glycine max
  Clone ID: LIB3050-019-Q1-K1-D3
gaatataaaattaatgttaatatagaaaaacaaataatgtgtattactgtattatatactatactataatcaacaattcataacacaattaattcttcctattttggcttggggaatgaaatttcttctattac

SEQ ID NO: 22583 - DNA, 239 bp, Glycine max
  Clone ID: LIB3050-019-Q1-K1-D5
acacaaaatggtatctaaatgacagaacgtttcatattatggatcgataaccatagaaaggacctgttcatgatctatactatgatcttattggttctttttctttttcttcttcttcaacatcatcttctgtctcttgaatttcaagtgtgtcataattggaatctaactctttttattaaatttcattctctgcctcctcttcttcattattaacttcattttatcaacttttattt

SEQ ID NO: 22584 - DNA, 306 bp, Glycine max
  Clone ID: LIB3050-019-Q1-K1-D6
taattggatgacagaaatgaaatgaactgagttagcaccaactctgttttctgctgtctttccttcgaatttgttctctgtttctcgcgattgaatttgagggaaccatcctcgattttctctttctgggcacccctgaattgctctgaaagtggttcagttcgaacaacgaaaacgatgtctgctctattgatgaagaaagttctgaacgaacagcatcaccttccgcaacacgtgagcggataagattaagaataagaataagaatactattctgaacccatcactcgttccttcatcaacccc

SEQ ID NO: 22585 - DNA, 218 bp, Glycine max
  Clone ID: LIB3050-019-Q1-K1-D7
ctacccactcgtccgcgagaatactacataacgggacacttatttgttattctttcttaatgttgtggattgttagcttctgaaggtgggagcactataagaagaagaagatcgaatacggtatacgattactaatacagaatatagaatgtgaaagtggatgaggaacaataatctaggaggaaattcagatgagttatacataagcctttggggaa

SEQ ID NO: 22586 - DNA, 271 bp, Glycine max
  Clone ID: LIB3050-019-Q1-K1-D8
taatgtgtgttgaaagaatgacaggcattaaagtatgactaaattttccttgcgagtgctcttggttggtgtattgaatggcttcaggcatattttcttgttcttgatgacattatggataactctcacacactccgcggccagccatgctggtttagagtgcccaatgttggaatgattgcatccaatgatggagttctactaataaaccatattccacggatccttatgaatcactttatgggaaatccatattacattgatcttcttg

SEQ ID NO: 22587 - DNA, 278 bp, Glycine max
  Clone ID: LIB3050-019-Q1-K1-E1
gatttaagtaaatttccttccttgcttctgtaggggaaatctagatgctggtttctctgaattttttgagagtagagacatggttctgagtgggaaagtggagactgaagtagagattcaagcacctgcagctaagttctaccacgtctttagaaagcaaattcatcatgttcctaacatgtctacagaaagagtacatggagctaaagtgcatgaaggtgactgggaaaatattggttcagtcaaacactgggactttaccatagaatgtagaaaaa

SEQ ID NO: 22588 - DNA, 338 bp, Glycine max
  Clone ID: LIB3050-019-Q1-K1-E11
gaacgacgtgtaagagaaatgagaggatgggcaccaccttgatgagatgctcccacgcaaacgctctcttcatagctctcaaacccaaaccccgcaattcttcactgccactttcttcaatggccatcaacaaaggtaatagtaataaggcatatgatgcattgctgttggatgctgtgggcaccctattgctattgtcaaagccaattgatgagattatgccacttttggatccatatatggttttacttttgatccatctattataaagcttattattttataattcttttatcagttccttgctctttattattctcctctttcattgatattat

SEQ ID NO: 22589 - DNA, 290 bp, Glycine max
  Clone ID: LIB3050-019-Q1-K1-E12
tgggacttcaattgcaatcaaattagttcagtctcgttgcgcagttccctagggctggtttcaagatgcagatcttcgtcaagaccctcaccggaaagaccatcacccttgaggtggaaagctctgacaccatcgacaacgtcaaggccaagatccaggacaaggaatgaattcccccggatcagcaacgtcttatcttcaccggaaaacatctctatgacagccgtactctctccgactacaacatccagaatgagtcaacccttcaccttgtccttcgtctccgttgt

SEQ ID NO: 22590 - DNA, 292 bp, Glycine max
  Clone ID: LIB3050-019-Q1-K1-E2
tatcacgtttttatcccataatgtaggaactcatcgaaagagtgagcaaaaatgaattatcaaaactggactatccttgtctaaatgacccaagtccaactttccacggtacaccttatgctggaccagtaactcaaaatcctcctgctcattcaatgagatcaatgcgtacaccaacttgggctcgacctataagctctgattatggatattcaatctattcggtgctaaaacacgcatccattgatttcaagaaaattgggcaaagaatatttatattcattgttattgg

SEQ ID NO: 22591 - DNA, 140 bp, Glycine max
  Clone ID: LIB3050-019-Q1-K1-E3
tgtcggcagtgatgatgttgaaacaacactctgttcgatttactcactagggagagcttcctcatattggctactcaaatacatgttgtcaagtaacctgtatacaatatttccaactgctacactttaatatggaccaa

SEQ ID NO: 22592 - DNA, 295 bp, Glycine max
  Clone ID: LIB3050-019-Q1-K1-E4
taaaacacctactacccatactaacgctcgcttcatctatcacgcgacaaactttaaactggttttcttttaccgttcgcaaccttctactaaaatcctccttcacttcaatctttttccactttccacctaatccaattcaagtctataatttccaactaacctaacaaaggaaaatcccctcttatatccaatccaaattaatatttgttcatctagtcaatacccaattccaactcattgtctatctaatttctcatttagtgttctctttattatttattatcaactcatt

SEQ ID NO: 22593 - DNA, 174 bp, Glycine max
  Clone ID: LIB3050-019-Q1-K1-E5
ttggtgatgctgatacgaagaagtgaagagggaagatataagggatttggggctgaaaagacaagatggggggaggaatggaatctaacattaacaagttcataaaggattggggcactgccatagaaaatctggagttcaattatccgttggacttctcctaaccttgctctt

SEQ ID NO: 22594 - DNA, 230 bp, Glycine max
  unsure (1)..(230): unsure at all n locations
  Clone ID: LIB3050-019-Q1-K1-E6
nagggggggaaaacagaggtcgaaacttaatttgaaaaggaaggctcaagttttaataagagacatggatctctctgtggttgcaagaaacatggaagaagttgtgttgctggttgatgatttgagatcactttctgggatttctcgctgtataatattgtcatgaataataattttagagcttcataaccttttaaactccttgttcttgttcttggacaattaaattt

SEQ ID NO: 22595 - DNA, 184 bp, Glycine max
  Clone ID: LIB3050-019-Q1-K1-E8
tactgctgctatgatagacagaagggactggtggaggaattaattctgtggaggagaatctacttaaagagcttggggagatgggttttaaacaggttgatttgaacaaggagatcttgatgaataatgagtacgatctggaccaatccctatactctctctgtggtgttgatgtctgaggtgt

SEQ ID NO: 22596 - DNA, 298 bp, Glycine max
  Clone ID: LIB3050-019-Q1-K1-F11
gatggttgaagaaaataataattagtaggataagaattaagccaaagtgtgcataggtatggagggtcttctgcctcttgtttataaagcaatcaagagaaacaaaacacgaaggcaatacgagtgtctttcatcaggaacttctctagggtacaacatcagcatggccgagatgtaccctcaaactcaggaacatgtccttcagaaccagacacatgcccagaaagtgtttcaccaccaccataatgaaagtcacaaaattggtcacaggaaatataactctgttggtgatcatttc

SEQ ID NO: 22597 - DNA, 114 bp, Glycine max
  Clone ID: LIB3050-019-Q1-K1-F12
tggggtctcgtggaagtgtaatcaatcaaagccctagctgcacctgctttctgtgttggtgttatacatcaagatggattctcatgttaaacactcacttattttcaaaattat

SEQ ID NO: 22598 - DNA, 198 bp, Glycine max
  unsure (1)..(198): unsure at all n locations
  Clone ID: LIB3050-019-Q1-K1-F2
acacaaataacgaatcatatttagagtttggacattcacctgaggtgcagagttctntatcacattgcagagaaaatgtctttgattccaagtttctttggtggcagaaggagcaatgttttggatcctttctccctctatgtttgggacccttttaaggattttccttttcccacttctatttctgctgaaaattca

SEQ ID NO: 22599 - DNA, 291 bp, Glycine max
  Clone ID: LIB3050-019-Q1-K1-F4
tggctcatattcatacataccctttgcacagtctggttcttcttcttgttcgctgtctctctctgaagcaagtgcagagcaattaataactcaagttttgggtcactccgtgaccgtgatgatcgtaaagttattgtcttttgagtgatgggtttgtgctcttctgtccccatgaaacgctaacgaagacatgaagctcaaactctttttctgttcaaaatcagaaaatcttgggaattctacaacattcattaatggacaacaacagggggggcgcctaaatagggtttg

SEQ ID NO: 22600 - DNA, 268 bp, Glycine max
  Clone ID: LIB3050-019-Q1-K1-F6
ggatgaaatgatttctaaaactagttctgatgggtgtacaactgctcttggttggaatctctcttgccttgaagaagccaagcctatgattggcgtgactcaagctgtccagttcctaatccagcttcttcaatctgactctgatgttcaatgcaagcaagattctctccatgctctctataatctttctactgtgccctccaatattccatgccttctttcatttggcatcattagtggcttacaatcccttcttgtatgccaaggg

SEQ ID NO: 22601 - DNA, 194 bp, Glycine max
  Clone ID: LIB3050-019-Q1-K1-F9
tgggctatgacggaagcgtcgcatttgatgggttcggaccctttgccacatgggggggcccacaagtccgggtctgttgggaaacccgtgggtcatgaaatgggcattttagacgaatcgggtctggtccaaaaggctggtatcagtggaaaagtttgcattcttagattcaatgttacgaatggatataaaaa

SEQ ID NO: 22602 - DNA, 231 bp, Glycine max
  Clone ID: LIB3050-019-Q1-K1-G10
acaaaacggggcatcattcttattgggtagctacataattcagcgggaaaggaaaacctaatcaacaaaacaatggcacttaaaaccctatccactttattatcacctatatctctaaccaacaccaaattcccgcaattccataacaccaaacattacctcattctctgctatttccctcactctcataaatctcattttctctcacactattcaaaatgcaccatcacc

SEQ ID NO: 22603 - DNA, 173 bp, Glycine max
  Clone ID: LIB3050-019-Q1-K1-G11
ggcattgtgaaatcaacagagaaacattgcactgatagagagacataagcgtaagattgagaaataatggagggttgtacttattgtgtgaagttactatgccttgttgggtttgtggtgcttgtgagtactattgcaggggtggagagtgctagataataatgtgttatatt

SEQ ID NO: 22604 - DNA, 220 bp, Glycine max
  Clone ID: LIB3050-019-Q1-K1-G2
atcatgagtgtgatccggaagatcgtggagcatgtgagtcgggttgtaacggtgggttgatgaccactgcatttgagtacacactcaaggctggtggactaatgcgagaagaggattatccctacactggaagagaccgtggcccctgcaaatttgacaagatcaaaatcgctgcttccgtggctaatttcaatgtggttttccttgatgaagaacaaat

SEQ ID NO: 22605 - DNA, 162 bp, Glycine max
  Clone ID: LIB3050-019-Q1-K1-G3
gagtacaactcactgcgtggagaacatgaacgacagcgtggaccgtctcatccagtcagtgaatgagctcgggctcgtcatgggtaaaggcaagggtaataaggactttacgtggcatgtgagtaatgttcagacttgggttagcgcttccatcacttatca

SEQ ID NO: 22606 - DNA, 148 bp, Glycine max
  Clone ID: LIB3050-019-Q1-K1-H1
gaccgagcgcgttcttgcagcatgctacaaggctctaaatgatcaccatgttctgcttgagggcactctgttgaagcccaacatggtcacccctggttcaaagtctaagaaggtcaccccagatgtgattgctcaatacactgttaca

SEQ ID NO: 22607 - DNA, 253 bp, Glycine max
  Clone ID: LIB3050-019-Q1-K1-H11
tgacgtttatatgctacaataaatccaaacactcagtccccacctgtgtctgattaagttttcccatgtatacatttatgctattctcatataataattaaactccttcactgcgcctatacattttactctcattttaaccaatataataaaaatccaacatgccatcaaggctttatgcacaacgccgcatcaccaaacccataaacctaagagatatagaaatgtaacagctttattaaccatatccctt

SEQ ID NO: 22608 - DNA, 332 bp, Glycine max
  Clone ID: LIB3050-019-Q1-K1-H12
atataaaccttggattactacttggcaatgtttgagtccattgatatgtctcttgcgagaaagagcaaggtgcagattaatatggagcaacattgtttggctcgggatattgtcaacattattgcttgtgaagggaaggaaagggtagagagacatgagctgttaggcaagtggaagtctaggttaacaatggctggctttcgtcaatatcctttgagttcttatatgaattctgtcataagaagcctgctgaagtgctattcaaaacattataatcttgtggaaaaggatggggccatgctactgggatggaatgacagaaatttgatttc

SEQ ID NO: 22609 - DNA, 271 bp, Glycine max
  Clone ID: LIB3050-019-Q1-K1-H6
tactataagggattcacacaaacggaacaagatagatatgtagaagagtcttccatatatagcctcccaaaaaaatgaagagtactacctctttggctctctttctactttgtgccctaacttcatcatatcagccttcagccaccgctgatattgtattcgacgccgaatgcaatcctattcgaaacggcggcacatactatgtgttgccagttataagaagaaagggctgctgaatagaatttgccaaaaccgaaacagaaacacgccc

SEQ ID NO: 22610 - DNA, 278 bp, Glycine max
  Clone ID: LIB3050-019-Q1-K1-H7
tactataaggggtgataaacacaagcactatcaacgccggcaccaaattaccattatatcgatatccttgttgagaaagagttattgccacttccaaccccttcaattccctaagctttctacaacacaaaacaaactccggagacactatatactaattttaattcttttgcggcttcctgactctaaattcatatactaatctcttgaagttggaagtatgtggctccttgttgctgcatttaccaatatacttcaaaacacatataatggttcaa

SEQ ID NO: 22611 - DNA, 188 bp, Glycine max
  unsure (1)..(188): unsure at all n locations
  Clone ID: LIB3050-019-Q1-K1-H8
taatggggagcaaaaccctaatccctatttggctggctcantagtgtcatttacgcgtctcttctctgcagcgactatgcctaaccctaaggtcttcttcgacatgaccatcggcggtcaatctgctggccgcatcgtgatggatctctactccgacgtcactctccgcaccgcctagaacttccgct

SEQ ID NO: 22612 - DNA, 334 bp, Glycine max
  Clone ID: LIB3050-019-Q1-K1-H9
gaaagaaagggagaattctcatatttcaggtgtcaggatattgagtttctccaccttctagtagtctttctgttttgttcaagtgaatctggaatcttaggagaatcatcctgattttccactaaatgtgttgtccttccaagtttgctgagtttcttccacccactgctccacgcagaagtatgcttctgctttatcatcttatcaaattgtttctgctaactagcctgatcattttgaatctccatgtacttggctttcacactctcaagctcaaactttagtgtgtagatgtcttttatagcatctgtccttccttcttgtaattattgtt

SEQ ID NO: 22613 - DNA, 352 bp, Glycine max
  Clone ID: LIB3050-020-Q1-K1-A1
attcataagtgtgacagaaatggaggatttaaaggaaaaggtcgatgaaggggaaccaacgcaaattaagtatagaggagtacgtaggagaccatggggaaaatttgctgcagaaattagagattcagctagacatggtgctcgtgtgtggctcgggacatttaacactgctgaggaggccgcaagagcttatgatcgtgctgcctttgagatgagaggtgctacggccattctcaacttcccagatgaacaccctccttgcaatgtgacttctcttagcaagaagtcctcatcatctaacacctgagattggtaaacaagttgtggtatttgagtgcttggatgacaaatt

SEQ ID NO: 22614 - DNA, 270 bp, Glycine max
  Clone ID: LIB3050-020-Q1-K1-A10
acacaccgtttgttctattcttaactcaacttgtgctacccactctcttggcgaagtccaaccacgcttttctctacagtcatgggcaaggtcaagatcggaatcaacggatttggaagaattggccgtttggttgccagagtcgctctgcaaagagacgatgtggagctcgttgccgttaacgaccctttcattaccaccgattacatgacatacatgtttaaatacgacattgttcacggacactggatacatcacgatgtcaccgtt

SEQ ID NO: 22615 - DNA, 99 bp, Glycine max
  unsure (1)..(99): unsure at all n locations
  Clone ID: LIB3050-020-Q1-K1-A11
gatgacgaaattgagtttaagatctgattgggcngcgacgatggagaacggcgacggtgtcatatcgcgggagaagatcgaccaggcggccgtgtggct

SEQ ID NO: 22616 - DNA, 251 bp, Glycine max
  Clone ID: LIB3050-020-Q1-K1-A12
gggccgacataacacagttatcctctctcgtggttttggttagagaatggggaagagtagcggaagagaccgaagacgaagaaggtcagatgactctgaatccgaatcaccttcggattctgactccgacagacgccgcggtagcagtagtcgccgctcgcggcgggactccgacggcgacaggaataagaagtccacgaagtctgaatccaattcacatttcgattccgacttctactccacactcgcct

SEQ ID NO: 22617 - DNA, 389 bp, Glycine max
  Clone ID: LIB3050-020-Q1-K1-A2
ggcgcattcttcatttattacagtctgttgtgaaagccactaaaaccaaccccccctctctctctggtttcattaattttcttcttctgtgatgcccttttgatcaatccatcattccagggcagccagtagttgcttttactagcatggcatcaagcaatctattctttgatgatatacggagcaaagtcgatgttgatcctcctcaaaatgaatagtcaacagatgttggtgaattattaaatgatcctgcccaaactgctcttaaacctaatgggactgtttcaagcattgttcgtgagcttttatagtgccctatatgcctgaatgccatgttcccttcaatccatcagtgttcaaatggtcacactatatgctcatgttgcaaa

SEQ ID NO: 22618 - DNA, 367 bp, Glycine max
  unsure (1)..(367): unsure at all n locations
  Clone ID: LIB3050-020-Q1-K1-A3
gggatccaatcgcgttagggtttttgagagcggcagtgtgcatacttgtgtaggatggtctcttagcantgatcgattgagatggcagacgaagctaacagaactgctttccttgaaattcaaagtcgcatgatcgatactactggaaaaataaaacaggtgcaaacccagatgcgttccaaagaagcagaaaagaagcgtgcttttctgaccatggaggagctgaagcaagttcctgatgatactaatgtttacaaatccattgggagaatgtttgtattggagaccaaggcaacattaatgaatgatcgggagaacaagtttaaggattgtgaagcttcaattacaactttacagagctcaaaat

SEQ ID NO: 22619 - DNA, 276 bp, Glycine max
  Clone ID: LIB3050-020-Q1-K1-A5
gtagcaagctatttgcaaagccaccttttacagaacgctggcaacagcatgacttttggactgagacagaaagcgcagtgaaaaaagcttacgttgaaacagatgagaaaatattggaacaagaacttgtgttggggcgaggagggtcaacagctgtgactgcaatacttattgatggtcataagcttgtagtatcaaatgttggtgactcaagagctattatctgtgataatggaaaggcaatacaactatcagtggatcatgaaccaatcaatg

SEQ ID NO: 22620 - DNA, 273 bp, Glycine max
  Clone ID: LIB3050-020-Q1-K1-A6
ggagagaaaaaatggccaaatcaatcaagttcgttgagttgaacacaggggccgggattccttctcttgggttagggacttggcaagctgaacctggtgttgtagctgaagctctcaccacagccattcaggttggatacaggcatattgactgtgctagtgcgtataagaatcaagcagagattggttctgctcttaagaagctttttgatgatggtgtggtgaagcgtgaggacttatggatcacttccaaactctggtgttctaatcatg

SEQ ID NO: 22621 - DNA, 334 bp, Glycine max
  unsure (1)..(334): unsure at all n locations
  Clone ID: LIB3050-020-Q1-K1-A7
ggtgtcgggcaaacttgatgccatctttccagctggtactcgtgaataggcggcagtggattgangaattatggaatgatgctgccattaaggctacatacgaaaggagaagcgaattagaaatgctgcctagtgttgccagttatttcttagagcgggctgttaaaatattaaggacagattatgaaccctcagatttagacatcctttatgctgagggagttacttcatctaatggggtggcttgtgtggagttttcatttccccaatcagcttctgacgaaactgttgacactactgatctacatgattcctttgtcaggtatcatactaa

SEQ ID NO: 22622 - DNA, 120 bp, Glycine max
  Clone ID: LIB3050-020-Q1-K1-A8
gatgcaatggcggaggctagagttgcatcctagcgcggtgatttgtctagtgcggtttcagtcctggatagctgtcacacggcattgtctgaaactgtttctgctaaagccggggatcgg

SEQ ID NO: 22623 - DNA, 73 bp, Glycine max
  Clone ID: LIB3050-020-Q1-K1-B1
ccagaacacgactgcagggtacagatgatagaagacaaccaaaagtttcagctacaaggaggggacaaaagga

SEQ ID NO: 22624 - DNA, 361 bp, Glycine max
  Clone ID: LIB3050-020-Q1-K1-B10
ggtgatagactcctgaagcggtatgttgttgctgatcgagagatccaggaagaaaaggttgatagctctcttgagtttcttatattggctagtgatgggctatgggatgttgtctcaaatgaggaagctgttgctatgattaaaccaattgaggatgccgaggaggcagcaaagaggctaatgcaagaagcatatcagcgaagtagttctgacaacattacgtgcgttgtcgttcgttttttgtcaaaaccaagtgcatcttctcatagtaactctggctaaatgtccttcacttcgaatgctaatgtatatctggtgatggattaaaaaaatactggatgttggcaaaatcagtttatta

SEQ ID NO: 22625 - DNA, 117 bp, Glycine max
  Clone ID: LIB3050-020-Q1-K1-B11
cggtaccgctgctacaagaccaccgaagggtcctgctgcgataatactacttatagggtacatcatagtacatctttcaaaatgataatatccagccgttcttaataatccaacctt

SEQ ID NO: 22626 - DNA, 196 bp, Glycine max
  unsure (1)..(196): unsure at all n locations
  Clone ID: LIB3050-020-Q1-K1-B12
gactctcggcaacggatatggcngcgcctgcatcgatgaggagcgtagcgaaatgcgatacttggtgtgaattgcagaatcccgtgaaccatcgagtctttgaacgcaagttgcgcccgaagccattaggccgagggcacgcctgcctgggtgtcacacatcgtttccccaacgcaaacatgtaacaatgttgctg

SEQ ID NO: 22627 - DNA, 298 bp, Glycine max
  Clone ID: LIB3050-020-Q1-K1-B2
acaggtataatctaatcaatggatgacaaattgacagcatgcaagaggaattgctcggaaggaaagattagttgctcattcacttcaagtattgttctcacaaggtagcacatttgaagtccgtggagaatctgtggatattgtccatattgataattgggaattgaacctgcaaggattgccacttactggtgtgcccctgttgtcatccatttctgtctttgaaatgtttggtatgaacccatttgattattgttccaaattccttactattttaaattattcatttaccttattc

SEQ ID NO: 22628 - DNA, 231 bp, Glycine max
  Clone ID: LIB3050-020-Q1-K1-B6
gtctcactaggttcttggtttattggacttggtgtgaatcacatagatgatcgaagactctgctgtggtacaccaccagattgtgaatggaaagcacaagcaggcaacgtttgtgttgcttcatttgattggacgtgcagtggaatttgcaggtctgctgaaaggatcaaagaggttcacaagagatgtggggaaggtgagaaagcctagtagaatgcctctttctaagtg

SEQ ID NO: 22629 - DNA, 404 bp, Glycine max
  Clone ID: LIB3050-020-Q1-K1-B7
ggagaaatgaggtgcattcctaccacggcatgcgtttggaacgctgaagttagtgtttcgcctaaaaagacaattcggtgggatctaggttagcagcaaccagcgcaatctgggacttttctttctttctccccacacccagattcaaaaactcagctctgctctttcgtttggatctcaaaacatgttcttcttcgattggttctatggcattctagcttccctcggtctctggcagaaagaagccaaaattctcttcctcggtctcgataatgcagggaagaccaccctccttcacatgctcaaagactagagattagttcagcaccagccgacccaacaccccacttcggaggaattgagcattgggaagatcaaattttaaggcttttgatttagggggc

SEQ ID NO: 22630 - DNA, 389 bp, Glycine max
  Clone ID: LIB3050-020-Q1-K1-B8
ggggagagaatagagaagagagatggatccggacgcgttggcaaaggcgttggtggagcactactacagcaccttcgacaccaacaggaacggcttagcgaatctctaccaggagggttccatgctcactttcgaagggcagaagatccaaggcgcttccaacatcgttgccaagctcacctccctcccttttcagcagtgccaccactcaatctccaccgtctactgccagccctccggcgtcaacgccggcatgctcgtcttcgtcagcggaaaccttcaactcgcctgcgaacagcacactctcaagttcagccagatgttccatttgataccaacaccttcaggaagctattatgtgttgaatgacatattccgttaaaactatg

SEQ ID NO: 22631 - DNA, 348 bp, Glycine max
  Clone ID: LIB3050-020-Q1-K1-B9
ggagcagatgcatatcctttcaccgaggagaggataagagaaatagagagggaggaagaagagactgcaaaggggtggccggagaagctgaagcatgaattacatgagcatgagcttgtgttgacgcgccgcagggtgtattactgtgatgcttgcaatgaagagggacatatatggtcctactactgtggagattgtgactttgatctccatccaaaatgtgcattggaaaaggaggacaaagaatgaagcaaagatgatgccaaggaagaaaagtccaaagatgaatgggtttgtgatggagaagtctgcaaaaaagcctaaaaactgcttgtcaagggttttggt

SEQ ID NO: 22632 - DNA, 365 bp, Glycine max
  Clone ID: LIB3050-020-Q1-K1-C1
ggagcaggggaaatgacaacgtctgaatcatggcggccaggcctagttgacgagacgaacaccattgactacttgaactacttgtgttacattggacttaacataaccacggttaaagtcatctccagaactgtccctgctaatttcagttgccctaaggattcaagttctgatctcatctccaacatcaactacccttccatagcagtaaacttcaccggcaaagcagccgtgaacgtgagtagaactgtcacaaacgttggtgaagaagatgaaacagcgtactctcccgttgtggaagctcccagtggagtaaaagtcacagtgactccatataaacttcaatttacaaagagtagtaaaaa

SEQ ID NO: 22633 - DNA, 214 bp, Glycine max
  Clone ID: LIB3050-020-Q1-K1-C10
ggggagataatatagaagagagatggatccagacgcggtggcgaatgcattcgtggaggactactacagcaccttcaacaccaacaggaacggcttagcgaatctctaccatgagggttccatgctcactttcgaagggcagaagatccaaggcgctttcaacatcgttgccaatctcacctacctcccttttcatcagtgccaccactcaatc

SEQ ID NO: 22634 - DNA, 153 bp, Glycine max
  Clone ID: LIB3050-020-Q1-K1-C11
gaaatggaacgagaagaaagtttcgaagaagaagccgacagcagcgggggcgggtgcggatgcttcggcctgaagaaatggtggcaaggccatggggaagaaggtaaagggctacttgttgatcaaaagggtgagggagagtcatgggtggtg

SEQ ID NO: 22635 - DNA, 190 bp, Glycine max
  Clone ID: LIB3050-020-Q1-K1-C12
gactatgagaggcttgggaacatagcgttgagttaagcaggagtttggggagtggcagggcctctattgagtggcatagcagcggtggggacttcatttgtgggtaatggatcgtgggcggcgttagtgcctctcatggctggttcattagcttcagtagttaatgctttttaacattgtggccatatat

SEQ ID NO: 22636 - DNA, 325 bp, Glycine max
  Clone ID: LIB3050-020-Q1-K1-C2
agaggcacacaccttactcgactcaaaagatcatcatgattggatcatctcatagggaggacagttaaacatacataatacgttctcgaaacaaccgtatgcatggcaaccaaaccacaaccagtcatcgatgacgtcaaaatcgatctcatccaacacgatcatcactaataatagtttgaaatcaatgaaaattgcgatgacaatgatgaacgcatagaagtgactcagcattaagatgatcattgggatgattatgaaattagccataagtgctcaattcaatagaacaagtatctgcataacaacactaataataattaaa

SEQ ID NO: 22637 - DNA, 376 bp, Glycine max
  Clone ID: LIB3050-020-Q1-K1-C4
gtacggctgagaaaatagcgacgcagaaacacgctcgtctacacgatcctgcgggccggacgcggcgtgtccagtgattccgctctccgtcgagtctgctcatggtgaagaatcacgaggccatccgccggtgaagaatcacgaggccatccgccggtgaagaatcgcgcgattcgtctggaaatcgcgattcaaacacgattcatccccgatgcatagattcaaccacgattcaggaacaaaaaccagacaagctccgattcatattggtagctgctggaatcgtatacaatcctgcgatgcgtatggtgaatcgtacgatactaactaccatggaaggtactacttcataatcatgcagattcttaatttgcat

SEQ ID NO: 22638 - DNA, 192 bp, Glycine max
  Clone ID: LIB3050-020-Q1-K1-C5
ggcattgtgaaattaatagagagacagaaaggataaacatatattgagagtggagggttgtgtgaagaagttgctatgccttgttgggtttgtggtgcttgtgagtactattggtggggtggagagtgctggtgaatgtgggaaatatacaacccctgataatgaggcttataagcttgcatcatgtgcctt

SEQ ID NO: 22639 - DNA, 306 bp, Glycine max
  Clone ID: LIB3050-020-Q1-K1-C6
gtaataattccttgtcaacatcaaaagaggagaaaaaagaggaaaatggagtgtcaagagtcaacagcatagatgcaaatgatgattcagtaagcaataatatctcaacaaatcaatcggaggaatcagcgaatgctcggaaagacgagatgcctagttctttcaggttttgggtgatattcttgtgggcattttctggagtaggtttcttggttgttatttttgtggtgtattcatgccatagataaagaggaacaaagttaaaacacgggtgaaggagaagaatcttgcatacatgattcatgg

SEQ ID NO: 22640 - DNA, 353 bp, Glycine max
  Clone ID: LIB3050-020-Q1-K1-C7
gacagccgcagcttgaagcagagcagagcgagcttgaagagctatggctgtcggaaagaataagaggatttccaagggaaagaagggtggcaagaagaaagcgttagtgcccattcccttcttcactcttttattctctcctttaaactctgatttctttcttcttcttccgtgattccacagcgctgatccctttgccaagaaagactggtacgatatcaaggccccttccctcttccaggtcaagaatattggcaaaaccctcgtctctcgtacccagggaaccaagattgcatccgaaggactcaaacatcgggtttttgaggtctcattggctgatctccaaggggatg

SEQ ID NO: 22641 - DNA, 400 bp, Glycine max
  Clone ID: LIB3050-020-Q1-K1-C8
gaacaatatggtgctgtttgatcagggcacgtaggacaagctcctttgtggggcgtgccaaatacaatctcatcactccttccattctctctgatcgtttgaggattaatggatcacttgcaaggaaggctataagagaattgatggcaagaggttctatcaggatggtgtctgcccatgcaagtcagcaaatttataccagggcaacaaacacctaggtggtgaactgatcttagtttacggagtattggtatgaatagtgaattattgtacttttgaagtttgagatgcatctcaaatagcttctatcatatctagattgttgctgatatccgagctgatattgtatataagttttgctataatgttatatttattaagattttaatatgcaatattt

SEQ ID NO: 22642 - DNA, 288 bp, Glycine max
  Clone ID: LIB3050-020-Q1-K1-C9
ggactaaagcagaacctccaatctactatttgcctagcgaagcccttggaggaggatcctacattacttgagaagggcaaagaagaggcttttctagaatggaagaatgcaagaagagaggaagtgtccgagtatcagaaacagattggggagcagtatcttgccaatgttgagaaggaattggagagatggcagaatgcaaggaacgcaaggaaagttaacaatgaccagaatttacaggatacaatggatcattagttggatactcatatgctggaacatggtccc

SEQ ID NO: 22643 - DNA, 178 bp, Glycine max
  Clone ID: LIB3050-020-Q1-K1-D1
tgtacatacaaacaaacaatttaccagctatacgtgtgcctttaaaaagtgagaggtgctacaatacaaacaatggcagctactcaggaagatgtgaagcttttgggtattgtgggaaacccatttatgtacaaaatccagatatcccttatatttaatgtaattaaattctaatttt

SEQ ID NO: 22644 - DNA, 290 bp, Glycine max
  Clone ID: LIB3050-020-Q1-K1-D10
gtaccaacatttgaaagttatggaagaatgtggccacgcatacacaaccggatgctagcatctttgatatcataccaaattacaatgtttgggtactttgggacgcagaaattctactatacaccacttgtgcttcctcttcccacattgtcattggtctttggttttgtctgtgcaaagaaattttaccccgcctttcaacatccagcacttgaagttgcagctaatacgcttaaggaagttcccaatatggaattgatttttggagcttacattctaccaaacttgat

SEQ ID NO: 22645 - DNA, 265 bp, Glycine max
  Clone ID: LIB3050-020-Q1-K1-D11
gaacttgctcaggtaactgatgaggttgcgagtgaaagtgaaaagaattggggtgatgagaagcctgcagttgaagaagatgtagctgatggtaacaaggacagccctactaatgaaactgaagaaaaagagcctgaagataaggagatgactctggaggaatatgaaaaagtgttggaagagagaaggaaggccttccaagcactcaatactgaagatagataagtggacactaaagagtcttaatacatgcaggccttattat

SEQ ID NO: 22646 - DNA, 250 bp, Glycine max
  Clone ID: LIB3050-020-Q1-K1-D12
gacctgtgattcagcagttcagctgcggaaggccgggaaagtcactgtcagagaatcaaacttgaaaaaattaggtgctacccattttagaaccggcgtagcaaacgagcattccgaggtgacaaagtttgcacttttggagaccataaaagaagctgtaccagaaatgtggtcaccgactatgaagaatgcatggggagaagcttatgatcagctggtctatgccattaaatctgaaatggaaccaccc

SEQ ID NO: 22647 - DNA, 218 bp, Glycine max
  Clone ID: LIB3050-020-Q1-K1-D2
gataataaatacagtcgtattgctgggggtcatcaggaggtttgtagtgttcgggagaagcgtgctgacaatgtgtggttggcagccgaaggtgtctaccttccctttactgaaagcaaatgggttacttattatcgatacttattctaaactggtaaaccattgatagtgggagtgggtggctggcacctgttctgataacaaatgctagttttttt

SEQ ID NO: 22648 - DNA, 374 bp, Glycine max
  Clone ID: LIB3050-020-Q1-K1-D3
gacacatagagatctcgattcgtcggaaagcaggctggactatatcagacttggtcaatcgcaggataccttgtggcgaagctgctgcttgcagacccaagtaaagcaaacacattgatcactgaagaggattctgagcttgtgaatgccttgataagtgccaaccctagaggaaagcgagggcgcaaaaatttgaggcagacttacattgtatgagtcttcatttgcaattcatttggttccttttggtcaaattcatttttcttcttattgttagcagcatgttattctagctagatacgacagggatatgcaaaaatatatagtagtttgggttgattgtgatgaaacatatactagtatatatataaatg

SEQ ID NO: 22649 - DNA, 245 bp, Glycine max
  Clone ID: LIB3050-020-Q1-K1-D4
gggaaactcctctattctcaaaaccctaagccgacgtgcaccattcatccggtgagttcgagaggagcgaccgcggtgctatctcgtgccagcaggattcggtcgaagctgcaaacggcgctggaagccaccgttttggaggtggactacgtgtcttaccatcacgctggccacgccgccatgaatggtagttccgacaaagaaacccacttcaacctcaacatcttctcccccatattctatgg

SEQ ID NO: 22650 - DNA, 266 bp, Glycine max
  Clone ID: LIB3050-020-Q1-K1-D5
gacactaattaacagagcatgaaaacaaccttcgttgggtgggttcttgatcagtgtcaaaaccaaaagggtggttgcaaattgcaatggctaatcatggtgttgagggtggttccttcactgcaaaggactaccatgatcctcctccatcaccattgattgatgctgaagaactcacacattggtccttctacaaggcttttattgctgattacattgccacaatgctcttccttttcatcacattgctcactgtgattggttac

SEQ ID NO: 22651 - DNA, 272 bp, Glycine max
  Clone ID: LIB3050-020-Q1-K1-D6
ggctcaggtatgccggttcgatcatacaatcggtatggaggtctcatctaggcatttcctgtggaaaacaaatccttaataagctcaaggtaaaaaagaaacgggtactctgattactctcaactttcgattctgggattggggaacatgaataagattagacttgtatcatacgttgtgtgtgtgccatagttagctagagtgaaattctttttgaataattagcagaaggtgggttatgattatataaatatttatttatcaagtaaaat

SEQ ID NO: 22652 - DNA, 192 bp, Glycine max
  Clone ID: LIB3050-020-Q1-K1-D8
gagtgtaagataacacgagaggagttcataacgtgctgtgcgaattaatccagttactgttgaagatcgagaatgaagcttgtggtgattgcactactagtgttgatgctggcaagctattctatggctacaaatatgatgaaattggtgccaaaattggatgatatatcataactaggtaatgaatcttga

SEQ ID NO: 22653 - DNA, 181 bp, Glycine max
  Clone ID: LIB3050-020-Q1-K1-D9
gaattctatgattatagcagcagttatgtggatgatcaaggcaagcagcttgttgcatcttgtgatgcatctaacaatgtagaacttgttggtgggtctgagctcataatcaccacgaaatcttgtgaaagagcatcaaccataacactaagttcccgtgaaattttgcgttattattgtc

SEQ ID NO: 22654 - DNA, 315 bp, Glycine max
  Clone ID: LIB3050-020-Q1-K1-E1
gttgagtgtaaagctgctccgaaacccgggcgaccctaagtggttggtatcatggttgagaatggtggagaagcgaaggtataaaggagagtggttcacgtgagtcaccataaccttcaaagcgccttcatggctgcacatttataataaagctcctaaacctataatgagataatgaaatttgcccaaaatgccatggggaccaatgatgttagggtggatgtaatttttaacatatttttctggtaccattgtaatctgatttttccttagacgattattatttataattgctttcaaatttatttttttatt

SEQ ID NO: 22655 - DNA, 289 bp, Glycine max
  Clone ID: LIB3050-020-Q1-K1-E11
gagtgaattacattgcattgggttctagcagcgtatggcactcaccatgcgggcgtagtgataggtttaacatcaattctcagctcgagcatctccaagccaaatatgttggaactggccatgctgatttgaacagatttgagtgggcagtgaacattcaacgtgatagctatgcatcatatattgggcactaccctttactgggattctttgctattgctgaaaatgaatctattggaatagaacgctacagctttatgcataaaatgctcctgccttgtggtttgcc

SEQ ID NO: 22656 - DNA, 351 bp, Glycine max
  Clone ID: LIB3050-020-Q1-K1-E3
gagcctcagcagaagcagaacgaggagaagcgtaaggagcaaaagcaatggcgccgaagaagccgagaaccacgacaaggaaccctgatttggttagggggattggcaagtattctaggtcgcagatgtaccacaagaggggcatctgggccatcaaggccaaaaacggtggcgttatgccccgccacgatcccaatcccaagccctatgcccctgcccataatccgcccaagttctaccctgcggactatgtttataagccccttgtctacaagcacatactcaaactttctaatctcagggcttatcattactacattgactttttttttactggtagcttggtatgtt

SEQ ID NO: 22657 - DNA, 349 bp, Glycine max
  Clone ID: LIB3050-020-Q1-K1-E4
tttagatagagattggagcaaagtttgatgaggaccgttattcaatgcttgcggagtgtgatataattgttatcaacatgcctcttactgaacatacaataggattgtttgactaatacataatttctaatttctttaattgatttttgatttctttacatttctcttttgtatttctttttctattatatttttattaattttgttatattttttattattctttatttttatttatatttttattattatttttttttttttttttttattatttttttttttttttattttttttttattatttatttttttttttttttttttatttttttttttatttttatta

SEQ ID NO: 22658 - DNA, 159 bp, Glycine max
  Clone ID: LIB3050-020-Q1-K1-E5
tagttacttgtaataattcttataacacaacgcatgcccataaccaccagctgggcattcctcctccttcccctcctcctgctgctccacctcgccatctccgctcactgcatctacttcaactactgcacactcggcaacaaccttccacctcccact

SEQ ID NO: 22659 - DNA, 118 bp, Glycine max
  Clone ID: LIB3050-020-Q1-K1-E6
gtaacctgtgatgcaccggtgcctaatatagaagagccgttttcattactttatcacattgcatattctattaaaatgcccaatattccttgttttctatccaaataatcaaacgatt

SEQ ID NO: 22660 - DNA, 276 bp, Glycine max
  Clone ID: LIB3050-020-Q1-K1-E7
ttagtgagacaatatcacacataatagagatgccaaaatcactccgatggctggagcaatatgatgggtgacactgagatcaaaccatcagttgaagtagtcatatgtgcttccatgaacaataacaatagcgcaaacaaccacaccctcccaaccgacatcaccaagtcatcacaatcacacttaccaatcttgaccaagctccatgctggttactttttcatatgcctttcctttggtgcacaagctttcctctggaagagtttgagttaacac

SEQ ID NO: 22661 - DNA, 266 bp, Glycine max
  Clone ID: LIB3050-020-Q1-K1-E8
tggtgttaacgaacaaatagaaaaacaaagtgggcatcttctgtacgcgtggagatttgctgaaatgttcgtgatcgtgagcttcctcttcaaaactccggctaggaatctggtgatcttcacattggatcggctcaatctcggtctctgtcccattgtcgtctttacttttttctttactctactggttatgttttctttattttttatttattattttatttttattattattaaattctttgattatctatttttttttattt

SEQ ID NO: 22662 - DNA, 266 bp, Glycine max
  Clone ID: LIB3050-020-Q1-K1-E9
gattcacaaatcacaacatatccatggaaggagtataatgggtgaagaattggggctgctaaaagtcattgttgtgcaagggaaaaggttggtgatccgggatttcaagaccagtgatccttatgttgtgctcaagctagggaatcagactgcatagaccaaggtaattaatagctgcttgaatcctgtttggaatgatgagctgaattttactctgacagaacccttgtgagttctgaatttggaattgtatgattataatcttt

SEQ ID NO: 22663 - DNA, 187 bp, Glycine max
  Clone ID: LIB3050-020-Q1-K1-F10
gaggatggagaaagcaagtgtgtggtgcacaaaataggatgggttgatgaggcaaacttgggatacagctatagcgtagttggtggagttgggttgccagacacagtggagaagatcacattcgaatgcaaattggctgctggcgccaacggagggtctgctgggaagctaactgtcaaataccaat

SEQ ID NO: 22664 - DNA, 216 bp, Glycine max
  Clone ID: LIB3050-020-Q1-K1-F11
gtgcgccgttctgcaccgagattcattcttcaccaaaacttcgcaaagaaacactacacatccatggcaactgctggcgtgcaagaagttcgtgttccccctctaacttccacctctgagccaccttctctctttgactgaaccaccaggttgtacatcagttatatttgtccctatgcacaacatgtttggatcactcagaactataatggacta

SEQ ID NO: 22665 - DNA, 173 bp, Glycine max
  Clone ID: LIB3050-020-Q1-K1-F12
ggagttgagaggatcgtgatgcgggcagtaaccgatatgccgtgaggggcaaaaatgaagacgattctttccaccgagaccatgaacattcctgacggcgtgagcatcaaagttcatgccaaggtcatctaacttgatggcccccgctgaaaattggtgctagactttaagca

SEQ ID NO: 22666 - DNA, 240 bp, Glycine max
  Clone ID: LIB3050-020-Q1-K1-F2
tatgctgaattcagtgagactggaatcaggcgaactgggacaaccatatggggagtcacctttggtactgttaagcggacattcgcacgtttggtcattttattggtttcaatgggctatggtgttgtgagacctacccttggtgggctcacgttaaaggtggttatgcttggaggaaccttctttattgcatctgaagttcttgaattggtagagaatgttggtgcattaagtgatctt

SEQ ID NO: 22667 - DNA, 192 bp, Glycine max
  Clone ID: LIB3050-020-Q1-K1-F3
caaggatgagagttaaacccttctgcgctggtaggtgaataagagaatggcttcagatcggaaacttcacactttcgaggaggtggcaaagcacgaccagaccaaggattgctggctcatcatttctggcaaggtgtatgatgtcacccctttcatagatgatcatcccggatgtgatgaggttttgttatc

SEQ ID NO: 22668 - DNA, 246 bp, Glycine max
  Clone ID: LIB3050-020-Q1-K1-F4
gaagaaagaaaacagagagcgaagaaggagagtatgtcagaaaaatggcgtcgaaagctccaaagaaggccaatctcctcgatcaccactccatcaagcacatcctcgacgagtcagtctccgaggtggtaacgagtcgtgggtttgtggaagacgtgatattgagcaatgtgaggcttctcattggggcaatcatcatcgtcattgctctcttcgcccaattctacaataagaagttcccataaa

SEQ ID NO: 22669 - DNA, 236 bp, Glycine max
  Clone ID: LIB3050-020-Q1-K1-F5
ttacacaactgcgacttagttcatcccttctcaagccacctatacctcactttttgaaattacttgcatagatagataatcatggctattatgaaacttgctgcttcctctgcgcttcgctctcttattgcctcatcctccaccttcaccataaaccttcatgcctcatgtgattagatgaatattgttttgtgttctacatttgtatttaatattctattattaatctatatttt

SEQ ID NO: 22670 - DNA, 288 bp, Glycine max
  Clone ID: LIB3050-020-Q1-K1-F6
tgggaaagaaaagtcgcatatccattgtgcggaccggaatactacaagcgatggatggatttttccattccttataaaacccgaaaacaaaaaccactcaatggtcacgtacaacaccaacaacaccatcctcaaaatctccaaactcgctatcctcctcattttgttcgcttcagtctgcaacgtcgctatgtcagactccaccgccaaacccctctaccatcacgccaccactgtctctgaccctactgctccagctgttcacatcgtgtacacctatataccaca

SEQ ID NO: 22671 - DNA, 247 bp, Glycine max
  Clone ID: LIB3050-020-Q1-K1-F7
gagagaaaaaatggggaaagcaatcaaattctgggagtgggacacaggggccaagattccttctcttgggttagggacttggcaagctgaacctggtgttgtagctgaagctctcaccacagccattcaggttggatacaggcatattgactgtgctagtgcgtataagaatcaagcagagattggttctgctcttaagaagctttttgatgatggtgtggtgaatcttgatgacttatggatcact

SEQ ID NO: 22672 - DNA, 158 bp, Glycine max
  unsure (1)..(158): unsure at all n locations
  Clone ID: LIB3050-020-Q1-K1-F8
accgtagaaaattgtacgctaattttggtgtgctggtcgcatatngtcctgaagaactttctgtctgccaagaccttgatcaagttccttcctttattgaaaaatttcccccctatcaatccatttttgcttaaccatcctatcgatacatccctatt

SEQ ID NO: 22673 - DNA, 268 bp, Glycine max
  Clone ID: LIB3050-020-Q1-K1-F9
ggcatctaacagagagagagaatggcagcacgtggtgggaatcgtgatgtgacgtgaggccagaacagcgttgagatcgatgctctagctcgctttgctgttgaagaacacaacaaaaaacagaatgcccttttggagtttgaaaaggtggtaactgcgaaacagcaagtggtttctggtaccttgtacaccatcactttggaggcaaaagatggtgggcaaaagaaggtttatgaatccaaagtttgggataagtcatggttgaact

SEQ ID NO: 22674 - DNA, 386 bp, Glycine max
  Clone ID: LIB3050-020-Q1-K1-G1
gaattaaccggccgacgcacgcgtccggacgacagaaagggagagcactgcagcctcatcatttcaaggccaacacaaagcatatgaagcgtataaaaaagagagtgttagagagataataaagtgaaggaagaagaaagggtttgtttgtgtgaaagaaaggatgcagagtgagaaccagaacagccagctggtagtgcagaattcggggagcctgagcttcagcagccatttgtcgaatgaagatgaagagatttcacggtctgctctctccaccttcagggcaaatgatgaagagattgaaaggaagaagatggaggtcatagaaaaggttcagcttcagcttggtcgtgtctaataagaaactaatcgtctttgcaaccatt

SEQ ID NO: 22675 - DNA, 89 bp, Glycine max
  Clone ID: LIB3050-020-Q1-K1-G10
tggtataataataatggcaatggcatcattgaaggttaccggtggaattggggttgttgggatcaatgatgccgtttcatatctttata

SEQ ID NO: 22676 - DNA, 64 bp, Glycine max
  Clone ID: LIB3050-020-Q1-K1-G11
tatagggggaagtactgaatatttattgtactgtgacattgcaattgagcctggatcgttctgg

SEQ ID NO: 22677 - DNA, 221 bp, Glycine max
  Clone ID: LIB3050-020-Q1-K1-G12
ggagcagaatggattgatttttttgtcacggaggtgatggttgctactagtgtggaagatgctagagcacgtgctgccagaatgctggaggttctagagaaatcaatcagtgaaagagcaaaggctgatgcaactgatgtgcttcagaaggaaaatttgatgctgaaatagcatattgaatctttgattaaagagaaaaattctttcaaaaatgcttttat

SEQ ID NO: 22678 - DNA, 56 bp, Glycine max
  Clone ID: LIB3050-018-Q1-E1-E10
taccgcagaaaaacgacagcagtcggttacagcttccaatcgactcgcgtatggta

SEQ ID NO: 22679 - DNA, 409 bp, Glycine max
  unsure (1)..(409): unsure at all n locations
  Clone ID: LIB3050-016-Q1-E1-E7
agaacaggcagggcaagacccgtcttgccaaatactacgttcctctcgaggactccgagaagcacaaggtcgaatacgaggttcatcggctcgtcgtaaacagagaccctaaatacacaaatttcgttgagtttcgtacgcacaagataatatacaggcgatatgctgggttatttttctcactctgtgttgatatcactgataatgagttggcgtatttagagtgcatccatttgtttgtggaaatattggatcacttcttcagcaatgtctgtgagctcgatttggtttttaacttccacaaggtctatcttatacttgatgaattcattctagcgggtgaactgcaagaaacaagcaagaaggctatcattgagagaatgggggaacttganaaactagaatgaaa

SEQ ID NO: 22680 - DNA, 406 bp, Glycine max
  unsure (1)..(406): unsure at all n locations
  Clone ID: LIB3050-016-Q1-E1-E8
ggttttcatcattgtcgttctgaacggaaaagcactggcgcagctaccccgaggcttctcttctcttctcttctctgtcgtgagtcaccatggtgagggttagtgtgctgaacgatgctctgaagagcatgtacaatgctgagaaaaggggaaagcgccaagtcatgattaggccatcctccaaagtcattatcaaattccttttggtgatgcaaaagcacggatacatcggagagtttgagtatgttgatgaccacagggctggtaaaatcgtggttgaattgaacggtagactgaacaagtgtggggttattagtccccgttttgatgtggacgtcaaagagattgaaggttggactgctaggcttctcccctcaagacagtttgggtatattgtantgactac

SEQ ID NO: 22681 - DNA, 391 bp, Glycine max
  Clone ID: LIB3050-016-Q1-E1-E9
caagaatggtgatgaagaaaaccatttggtggggtggccaccagttaaatcatggaggaggaaagaactccatcagcagcatcctgcgagaggccgaattaggaacgataggattcaagctaatgaaaatcaaagtagaggaccaaactctttatatgtcaaggttaacatggaaggggtagccataggaaggaaaatcaatttgaggcttttcaattcttatcagacactcacaagcagcttgatcagcatgtttgctaaataccaaaaatttgaggaagttggagaaagttacacgctcacctttcaaaacgaacaatgggaatggctgcaagtaggacatgttccatggcaatcctttataggtactgtgcggcgtttagtgatactg

SEQ ID NO: 22682 - DNA, 325 bp, Glycine max
  Clone ID: LIB3050-016-Q1-E1-F10
gatgtttcacactcagcatcttcagagcatgtctatgccacgtggctccttacggaatgcttttgatggcacattcattgcactgtgttcccttgcttcacagaattctacacaccctatactgggtgcttccaccagatgtaactttctcattaggctcaataattcccctgctgggttattcaccactttcgcaattgcgtatgcaatgagagatgtggtacgttttacgggctgtgatgtctcaaatggtccttctactacatcctcaagtgggttgcaatgcaggtattttgacctctaccatctacgccatcctcttgct

SEQ ID NO: 22683 - DNA, 80 bp, Glycine max
  Clone ID: LIB3050-016-Q1-E1-F11
gatacttcatgctccggatcttacgcttcattatattggacgcggcacgttacgggatcctatcgttggcactgtgatgg

SEQ ID NO: 22684 - DNA, 360 bp, Glycine max
  Clone ID: LIB3050-016-Q1-E1-F12
gagaggaacaccaggtatgttgatgctgttcttaccattcccaaaggaacattgttccccatgtgtggtatgaatctggcattcgatcgtcagctgattggacctgcaatgtattttggactcatgggtgatggtcaacctatacgacgatacgatgatatgtgggctggatggtgtgttaaggttatctgtgaccatttgggcttgggagtgaagactggccttccatacatccggtacagcacagcaagcaatccttttgtgaatctcaactaggagtacaagggcattttctggcaagaagaaatcattccattcttccacagtgccaccattccaaaagaatgcacttccgtccaa

SEQ ID NO: 22685 - DNA, 407 bp, Glycine max
  Clone ID: LIB3050-016-Q1-E1-F2
ggtatgtgaaagatgaagaacaatagagataaagaaaagggtaacgacgttgaccagagttacagacagcatcacacgttgtcaatgccaatgatgttttctggtttgaacagagagaaggagatgtcagccatgatctctgctttgacacatgtggtttgtggagaagatgagcatcatggtgctgattactctcttctgaatcacaatattaataatactaatactgcagttgttggtgatgatgattttactgtgacatcaaatatggcttctggttctatgccatcttcttctacgtgttcatctcaacgtggcaactctgttctcaagagatgacgggaatatgataatacaaatgatttctcacgtggaggttcattccctgctatttcaacaactgctga

SEQ ID NO: 22686 - DNA, 385 bp, Glycine max
  Clone ID: LIB3050-016-Q1-E1-F3
ggtctcgtggaagtgtaagcaagcaaaaccctagcggcgcctgctttctttgttcgtgttttgcatcaggatggagtctcaggtgaagcacgcacttgttgtcaaggttatgggacgtactggatccagaggacaagtgacccaggttagagtgaagtttttggatgatcagaaccgtcacatcatgaggaatgtgaaaggacctgtgagagaaggagacattctcaccctactcgagtctgaaagggaagcaagaagattgcgctagatggtctctttttttttggcttgcctccaaattcgaacaaaagcaatatttttcttgatatttatggtagttagtcggtgctaaaggggttatagcaccctatcttattgttttgga

SEQ ID NO: 22687 - DNA, 60 bp, Glycine max
  Clone ID: LIB3050-016-Q1-E1-F4
aaaaaaacaacaaaaggggcaacggcaagttccaaaaaacccccaattgaaggaccggcc

SEQ ID NO: 22688 - DNA, 314 bp, Glycine max
  Clone ID: LIB3050-016-Q1-E1-F5
tctcattgactcaagaaatggacgaattcaaattgtgcttcagtggagaactccttgatgatggctggtatcagttgcattgcacgcacaaattcccagcgtacataattctttaaagcactttttcttctgataaggtttggatgaaagccttgaaacttgattctctatgacacagagaaaattaggagtattgttattctattgttaataaacagaataacacgtcagtgactcaatactgtcctacgagttacgctcacatagaatgttgtccataactccattgataatttgatcgatattcaagttac

SEQ ID NO: 22689 - DNA, 411 bp, Glycine max
  unsure (1)..(411): unsure at all n locations
  Clone ID: LIB3050-016-Q1-E1-F6
tacccaaagaatgaaaagcttttcctggtttgtttttcatttgctgaggggccattagcatgggctttgattgtttggcgttgcagcttagttttcagttcagttgacaaaattgtcagtgttcttatccatcttttacctgaattggttttctttaccattcgatggtggaatcctgcaacctttgaagccatgcgaccagcgggaatggctggaagatctacatggccttatattgaggataaatcctatctctggatgtggctgtttctggtacccttagcagtttacattctctggcaggttctatacttcctcattgtcaacgtcttgcgccaacaacggtttttaagagatcctgaagccatgacttcctacagggaactctccanaaaagctcagaaagcaaac

SEQ ID NO: 22690 - DNA, 412 bp, Glycine max
  Clone ID: LIB3050-016-Q1-E1-F7
ggaggttatctcggctgagctgaaagtcaagcctcccacactcttgaagttgaaggagaattcccatgaaagagtgatcattcttcctgttactgctctcgcgttctgcaattacctcgtcaaggaaagcatcaactgcaagaaacgtggccttcatttccggaataaggccagtcagatagtcaacccaacccaacgaagggaagaaatcaccgacgcagaaagccgagaatagtctcataatctttcttcccagttctccaaagctgcaattcacgctatcacccactgtagcatcacacttccgtccaattacacatcttgaaacaatgttgttggaagctgcaatcagcatctcactcagattcacacatggtcgatttttccctttcactacaacacatgcttcacg

SEQ ID NO: 22691 - DNA, 411 bp, Glycine max
  Clone ID: LIB3050-016-Q1-E1-F8
gaggtgaaacttaaggaaatgaagtcttctttaacagcacagttaacagacgaggctgatacatctgaagtcattgagactgtgaagctgcgagttagggatgctaaattgccggacattgaggtggtgcggatcttgtgggatgttttaatggatgctgttcagtggtctggaaaaaatcagcaacagaatgccaatgcagcccttcgtcaggtaaaaacttgggcagaattgttgaatacattctgcaccactgggaaacttgagctggaactgatgtacaaagtacagatgcaatgctatgaggatgctaaactgatgaagctgttccctgagattgttagatctctttatgaccaggatgtgctggctgaagataccattcttcattggttccgaaaaggaacaaac

SEQ ID NO: 22692 - DNA, 402 bp, Glycine max
  Clone ID: LIB3050-016-Q1-E1-F9
gatacttcaaaatccaaatctagcgattaattatagtttaggcagcaaattatggaatcccatgatggggagcatgctgccaaactacttagagctcaaacccacatatggaatcacatatttagcttcataaactccatgtcccttaaatgtgtggttgacttaggcataccagatatcatacacaactatggccaacccatgccactctcaaacctcattgcttcactaccaatccacccatccaaaacttgcttcgtccattgcttgatgcgaatcatgatccattctggcttcttctctcaacaaaaccatgacttggagaatgagctagaagccaagtatgtgctaaccgatgcatctgtactattgcttaagaaccatccgctgagtgtgacacct

SEQ ID NO: 22693 - DNA, 380 bp, Glycine max
  unsure (1)..(380): unsure at all n locations
  Clone ID: LIB3050-016-Q1-E1-G1
tacggctgccaaaaaaacaacaaaaggttacggctgcaaaaaaacaacaaaaggggaagggattaattttttcttctgtttttttttttttctgtctatgatgcatttgactgaactctgattcttttttctttttacatcaactcttggcttcttagtgtgtcacagtgacttcagtcctttctactaagggtgtgtttgacttaagagcaagcctaaattggaaaangggatttttttttctttcattttggccattcatctctctctggggacattttgttctctctgcaactatggaaaagctaggtttaactgaatctccattccccaagctctcttcagatgagattctggaattggaaagaatatacgaagac

SEQ ID NO: 22694 - DNA, 333 bp, Glycine max
  Clone ID: LIB3050-016-Q1-E1-G10
ggtaattgaagttttccaaactcgaacctacacatttggcgttagattgattcatcattctgagtttcagacataacaagagaagttctagtgcagaaagcacgcacgtgtggaagtcaacttacagttttacccttcatcaggtggtgccggagaggaacatgttcgtatgaagatcatcatccacatggcgcgttgtttcggcttacgtgccgttctggttctggcggcgctcgcggaggccatagtggtgcagcccttgaagctcccgccgctcgagctgcagcagctggtacctcactacctccccgtcgagatgatgacgactctcat

SEQ ID NO: 22695 - DNA, 316 bp, Glycine max
  Clone ID: LIB3050-016-Q1-E1-G11
acgacgggggatgggggttccatttctcaccagcttctgcttgttcggactctcatcgctcctctgctccgcatttctcatgggcacggtcaagatcgggatcaacgggtttgggctaattggccgtttggtagcgagaatggctctgctgatagacgatgttgatctcgttgccgttagctactctttcatcatcaccgattacagtgtcatacatgtttcagttcacattgttcatgggcactggcatcatcacgatgtcacggttttcgtcgagaagtcccttctcttcggtgactgccagtcactatttttg

SEQ ID NO: 22696 - DNA, 320 bp, Glycine max
  Clone ID: LIB3050-016-Q1-E1-G12
ggtaattagagttttcgaaactcaagcctaaacatttggcgttacattgattcatcagtctgagtttcagacataataggagaagttctagttcagaaaggacgcacttgtggaagtgaagttacggttttacccttcttctggtggtgccggagaggaacatgttcgtgggaagatcatgagcgacatggcgcgttgtttcggcctatgttccgttctggttctggcgccgctcgcggagtcgatggtggtaccgcccttgatgcgcccggcgctcccgctgtagcagctggttcatctcgtcggcgcagtcgggatca

SEQ ID NO: 22697 - DNA, 293 bp, Glycine max
  Clone ID: LIB3050-016-Q1-E1-G2
cggggagggattgagtttttcttctgtttttttttttttcggtctatgattcatttgactgaactctgattcttttttctttttacatcaactcttggcttcttagtgtgtcacagtgacttcagtcctttctactaagggtgtgtttgacttaagagcaagcctaaattggaaaaggggatttttttttctttcattttggccattcatctctctctggggacattttgttctctctgcaactatggaaaagctacgtttaactgaatctccattcccaagctctcttcaga

SEQ ID NO: 22698 - DNA, 233 bp, Glycine max
  Clone ID: LIB3050-016-Q1-E1-G4
ccaacgcttccaacggatgcaaaaaaacaacagaagggcaaccaaaatctggaaatgttaaatctcccagggcaactgaaaattcaccggtacaacctgaattattgattcggaaaatccgtactttaaaacaacaccgaggtggcagttccgattcagccagcatagttcagtatttcaaggaccgtattccctcgaaaaatcgtgcgctgttcaagaaccctttaaaggaa

SEQ ID NO: 22699 - DNA, 410 bp, Glycine max
  Clone ID: LIB3050-016-Q1-E1-G6
gaaggaagggagggaagaatagaatgggatctggaagtggaaaacacactggagagttcgtcaggagaagggatgcatggaggaagcatccgatgctcaccaatcagctccgccacgccacccctggccttggcatcgccgtcgtcgccttcggtatctacctcgtcggcgaacaagtctacaataggctctatgctcccgatcctcattcgatttctcacgtgaaagccggggatcaccactaaacgtttggacggacgcactccattccatcatcacttaataagcttgctagcatgttctcgcagcctttaatgtttaaatttcagaccgtgttcgcttctttggcactcactatgttgtcctgtatgcctacattttatgccttcaatttgcattcacaatgaaac

SEQ ID NO: 22700 - DNA, 409 bp, Glycine max
  Clone ID: LIB3050-016-Q1-E1-G7
ggatttagtcacgttgtaatttttatcaagtttgcttattgtacaaacgacagaataacgacttcgaagtaattgatgaagggcttctgataatttggggaaatcagatgtgatttttaagatagttggatcagattattgtggtttcattacacgtctcatttgattgatattatgttatgtcatgctaagcgagatgtatatggcagcactgcagctatatggatttgccataatatactagggacatttgaatcttgcaagccttttctggcttatctctaactgatgtcaattggggtcggatggagcggtgaaccctcatcatcaatttgaattgcactcgggtgttgctgtggaaacacatcattcattcacaggtgatggatttagtcaagtctctttgtaa

SEQ ID NO: 22701 - DNA, 412 bp, Glycine max
  Clone ID: LIB3050-016-Q1-E1-G8
gagaagaagcagaaagagaagcattagcaaaagcaagaagaactagtctaagcagaaatggcctcttcagtgatggcatctgtggccctcaaacctgcccctttcactgttgagaagtcctcagttagaggccttccctccctctcagggaactcctcttcattcagagttgtggccagtggtggcaagaagatcaagactgacaagccttatggaattaatggtggcatggctttgagggaaggagttgatgcatctggcaggaaaggaaagggaaagggcgtttaccagtttgtagacaaatacggtgctaatgtcgatggttacagtcctatctacgacaccaaggactggtctccaaccggtgatgtctacgctggcggtacgactggcttggctatctgggctgtga

SEQ ID NO: 22702 - DNA, 377 bp, Glycine max
  Clone ID: LIB3050-016-Q1-E1-G9
ggtaattaaagttttccaaactcaaacctaaacatttggcgttacattgattcatcattctgagtttcagacataacaagagaagttctagttcagaaagcacgcacttgtggaagtgaagttacggttttacccttcttctggtggtgccggagaggaacatgttcgtaggaagatcatcatcgacatggcgcgttgtttcggcttaggttccgttctggttctggcggcgctcgcggcgtcaatggtggtgctgccgttgatgcgcccgccgctcgcgccgccgccgctggttcttctcttcttccccgtcgggattatggcggcgctcatgttgcttgtgttctcgccgtcggatcagaacggggtcgtttacg

SEQ ID NO: 22703 - DNA, 408 bp, Glycine max
  Clone ID: LIB3050-016-Q1-E1-H1
cttcaaggacaagttcctccttcacttggtcaacttaccagcctgcatatgctaaatctctcatataaccatcttaatggcctcattccctcaaccttttcagggtccccattaagctcctttctgaacaatgaccacttgtgtggccctccactaacattgtgcttggaagctacgggtaaggagcgaatgcagctatcaaacgcacaagtagcagcaatcatagtagccattgtccttacttccaccctgatatgcttagtaatgttgtatataatgttgagaatctggtgcaactggataaaggtagctgtttcaagtgaagatggtggcatggttgagcagcagaagacaagaaatggagagtactggaatatgaattctcctgagtttgtttcttcaccagat

SEQ ID NO: 22704 - DNA, 69 bp, Glycine max
  Clone ID: LIB3050-016-Q1-E1-H10
gattacatacagaattatatcgaacaaaagattgtgcttctttcagagcatgcctggaatgtcttcgca

SEQ ID NO: 22705 - DNA, 213 bp, Glycine max
  Clone ID: LIB3050-016-Q1-E1-H11
gatgaactcaacacgtgtatcgaataggagattgttcttctttgtgaagattggtgcgatgtcatcatatcacgatgaagtgacgcttttgggagctactgggagattatttgtgtataaggttcataatacgcacagattgatgggagttttgttcaactatttctattataagttgatgtacaagagtctactgtctcactgatcgaattt

SEQ ID NO: 22706 - DNA, 454 bp, Glycine max
  unsure (1)..(454): unsure at all n locations
  Clone ID: LIB3050-016-Q1-E1-H2
ggtcgacgccgttatgctacaaaaacttcaacacgtccagaccgtcgtcaaaggtgccgacaatctccatctggctgtgctctttaattagccagctcagttcctgttgtgccaggaattcgtcttcaacaatgatgactttcacaatatcactccggctcaaagcaataacgtagcctgtgaggcgactggggtgcgttggttaggaatgtaaaacgcaatttccgtccccggctccaggcggcggatatgcagcccctcgccatacaataacttcacgcgatgatggacattcagcanggcaattttattgcccggcatttcattcgcttcgacncgctcaatcanctttggattcgatgcgtgcccggtatctcgcaacgcaatgcgtacccgatttccgcactctgcaacgctgatggtgacaacgcctttacctttgcaaggctgaata

SEQ ID NO: 22707 - DNA, 97 bp, Glycine max
  Clone ID: LIB3050-016-Q1-E1-H3
aaaaaacaacaaaaggttacggctccaaaaaaacaacaaaaggttacggctccaaaaaaacaacaaaaggttacggctccaaaaaaacaacagaagg

SEQ ID NO: 22708 - DNA, 343 bp, Glycine max
  Clone ID: LIB3050-016-Q1-E1-H4
ggagggagcccaaatactgtgcctgatcccagggacagtcccaactatggtggtcctgaaagtcccatgcatgaaagataccacagccagtcaccccctgcagaagaatgattgcagtctttgatgaagaagccggaagggccaactgattgtagtactgtttcatggctggactaaatttcatttcagcaatttgttttagtgtagtagtgataaagctctgaaacttgtgttgttgtgacaacttagtccttttttgtttagttagtttcatatttatttgtcagcttagtattgttgaatccttgtttacagttaaaagatggtactatatctttttgac

SEQ ID NO: 22709 - DNA, 396 bp, Glycine max
  Clone ID: LIB3050-016-Q1-E1-H5
gagttgagatttgagaattgactctgagaatcgagaaaatggccggtttaccagcgaggctccgtctccaacccaccgacgtcaaagccgccgccttgtggggcgttaccgccgccactggcgctcactacctcattcagccatggggatggttgaagaagacattcttggagaagccagaacctgagcaaaaatgagttggcttctgagaagagtggtttgaatttttggatcatgccaaggatgggtaacagtcgaatattgttaatttctgctgaggtcttctcgcacctgtgctttatgttatgaatttggatactaaattttaatgttctgcgctgatcgtttttaacggagattttgctttaaatcaacttctcgcaccgtgttgaacga

SEQ ID NO: 22710 - DNA, 412 bp, Glycine max
  Clone ID: LIB3050-016-Q1-E1-H6
ggcgtacacagcctcaacaaccctaacgcgtgtagagcagagagagacgcagccatggggcgaagacccgcgaggtgttataggcaaattaagaacaaaccataccccaagtcacggttttgccgtggtgttcctgatcccaagatcaggatttacgatgttggtatgaagaagaagggtgttgatgagtttcctttctgtgtccatctggttagttgggagaaggaaaacgtttctagtgaggccctggaagctgctcgtattgcttgcaacaagtacatggccaaatttgctggaaaggatgctttccacttgagagtcagggtgcacccattccatgttcttaggatcaacaagatgctttcgtgtgctggagctgataggctccaaactggaatgagaggtgcttttg

SEQ ID NO: 22711 - DNA, 414 bp, Glycine max
  Clone ID: LIB3050-016-Q1-E1-H7
ggagaacaaaacaagtgtttcgaatagattatcctaagtctttgggaatagtgctgcaatggcttcaagtcaggaggaggtgacccttttgggagctactggaagcccatttgtgtgcagggttcatattgccctcaagttgaagggagttcaatacaaatatgtcgaagaaaatttgaggaacaagagtgaactgcttctcaaatccaacccagttcacaagaaggttccagtgtttattcacaatgagaagcccatagcagagtctcttgtgattgttgaatacattgatgagacatggaagaacaaccccatcttgccttctgatccttaccaaagagccttggctcgtttctggtccaaattcattgatgataaggtttttggtgctgcatggaaatccgttttcacagc

SEQ ID NO: 22712 - DNA, 404 bp, Glycine max
  unsure (1)..(404): unsure at all n locations
  Clone ID: LIB3050-016-Q1-E1-H9
gatgaattaaagcgtcagaaggaagaagagcttgctcttctttatgctgatccttttgatgttgaagcacaaaagaagattgaagctgccatccgccagaaagggattgatgaaaattgggctgctgcattagaacataatcctgaagcttttgctagagtggtcatgttgtatgttgatatggaggttaatggtgtcncattgaaggcatttgtggatagtggagctcagtctaccattatatcaaaaagctgtgctgagcgtcttggattgttgagacttttagattagcgttacagaggaattgctcatggagttggccaatcagaaatattgggtcgtatacatgtagctccaatcaagattgggagtatattttacccttgctcattcctggtgctgga

SEQ ID NO: 22713 - DNA, 384 bp, Glycine max
  Clone ID: LIB3050-017-Q1-E1-A10
gattctaatcacaacaactaaccaacgtagttaatggttcctctctacacaactaagttcttgcaacctacttttggccattaaccaattcataaccacatctgcgggctcccatcaacacctccagcacctcaaatcccttcacttctctctgtttcaacacgagaccataaacaaaaccggatacatcatagtggatggtataaaaggacgagcaggggtgactcaaaccacaaccccttttggcaccttatttgcctttcaggaccctttgactgttgcagccaacatgtcctccaaactagttgggattgtagaagggactacagtcacatctagtctcgatcggcttcggagcatttccatcgccaagctaaccctgcg

SEQ ID NO: 22714 - DNA, 226 bp, Glycine max
  Clone ID: LIB3050-017-Q1-E1-A11
cggggagggcgatgaagccacatagagacacaatacagagtgagttgttgctccttcgccacaactctctgccaacatgggtatctccagagattctatgcacaataggcgtgccactggtggcaagaagaaggcctgtaggaaaaagagaaagtatgagcttggtccccagcctgctaaaactaagctgtcaagcaacaagacagtcaagaggatccgtgttaga

SEQ ID NO: 22715 - DNA, 390 bp, Glycine max
  Clone ID: LIB3050-017-Q1-E1-A12
gaggcacgcgtcagtccagactgtcagtgcgctgagagagggatagagagcggggagggtgatgaacctacagagagatacaatgcagcgtgagttgttgctccggctccacaattctctgtgaacatgggttttgctagagattcgacgcagattaggcgtggcactggtggcaagaagaaggcctgtaggaagaagagaacgtctgagcttggtcgacagccggctaacactaagctgtcaggcaacatgacagtcacagaggatccgtgttagaggtctacatgtgacatgaagggcattgtgattggatactggaaagtacgcgtgaggaagtgaagctgtacgtcgcagtactcgtgtactacatctggtttacaaaggctcaac

SEQ ID NO: 22716 - DNA, 363 bp, Glycine max
  unsure (1)..(363): unsure at all n locations
  Clone ID: LIB3050-017-Q1-E1-A2
cagctgaggaccttggtgtagtcagggaggagaggcaacttgtggactccctgtggagcacttgcttcaacgagccatcttctcttcgagagaaaggtcttcttgtgcttccaggtgaagatgcaccccctccagatgttgctagcaaattttttgagcctcctcttagatcttcgactgcgaatccatcttccaagaaagactcaaacaatgaaaagaaagagatccctttgcttttacggtcagggccttctcttgcagacactaacaaccaaggttcaaatagagaaaatgctaatagctgaaagcttggatgccttctgctctgtntttttttgccgtgctttctttctatcttatcat

SEQ ID NO: 22717 - DNA, 377 bp, Glycine max
  Clone ID: LIB3050-017-Q1-E1-A4
gaaattgaaggggtactaatttttcatgcacaaacgagggatcatctaattaaaccagctttcatcagggtgtgggtgatttattgtaagctttttcttattatcttcgattgtgtttacacgtgtgtgttaaaggtggcgaatcctaaagagaaaggaaatgaggttgatgacaataaggaattgatattattccatgaagggataatgaacaaccctacattgtcaaggctatttccgggtttgaatatggagaaggagatgtctgctatggtctcagctttgacccacgtggtctccggagaggtgccaataaccggtgattcttcttcatcttcatcattggttcttcatcatcaacctcatgatgatactgt

SEQ ID NO: 22718 - DNA, 362 bp, Glycine max
  Clone ID: LIB3050-017-Q1-E1-A5
gacgagtcactcttcttagtgatacttatcctttgctgaaccttgttgtgatctgacatggcagaagaacaacaacgacggatcctggtggccgtggatgaaggcgaggagagcatgtatgctctctcatggtgccttaagaaccttgcttttcaaaattccaaagacacccttcttcttctctacgtcaaaccccctcgagtcacttattcagccttcgatggcacaggatatttgttttcctctgacataacggctaccatggagaggtatagccaacaagtggccgattgcgtcttggagaaagccaagaaattgtgtaacaatattgaaaatgtagagacgaaggtagagaatggcga

SEQ ID NO: 22719 - DNA, 385 bp, Glycine max
  Clone ID: LIB3050-017-Q1-E1-A7
gacagcacaacttgtttatcggaacgttgctataaacgttgttgttttcagataaacacgtgactcactatctatctatcaatcgatatctccgagttcagccgaaccaaactccgaagctatggcagagctccaaaccaaggttgaacctgttacggtcccggctccggtggatcccgagccaccgctagctgaggctccgccgctcgagaagaaagcggtggccgtgccaccgcctgttccggctgcaggagaggaaaccaaagctcttgttattgtggagaatgagaaggagaatgagaagataccagaacctgtaaaacagaacgcctcaggtggattccttgatagagacattgctcttgcagaaatagagaaagagaaa

SEQ ID NO: 22720 - DNA, 135 bp, Glycine max
  Clone ID: LIB3050-017-Q1-E1-A8
gaacaaggtcagcagtgcttaagcagtttaccgaaatgtgaacgtgcatgaagagccaatgattaagtacaagggaagacgattgactacggcaccagttggatgcacttcccccttcttcacatactgctgcac

SEQ ID NO: 22721 - DNA, 228 bp, Glycine max
  Clone ID: LIB3050-017-Q1-E1-B1
gacagcataacttgtttatcggaatgttacttgaagagtcatcggcatgatagcgatgggtaagtcactatctatctagcaatcgatatctctgagttcaggcgaaccaaactccgaagctatggcatttctggagtgagagttgaacgtgttaaggtcacgagatctggtgggttggtattgacgatagctttggcgccgacgctcgacaagaagacagtggtagtg

SEQ ID NO: 22722 - DNA, 378 bp, Glycine max
  Clone ID: LIB3050-017-Q1-E1-B10
acttctgagatatctgaaatagtgcatcattatcgccaagcagctattaatgcaattcgagcaggttttgatggaatcgagattcatggagcacatgggtatctcattgatcaattcttaaaggatgcaatcaatgatataacagatgaatacggtggaccactagaaaaccggtgcaggttcttaatggatgtagttgaagctgttgtcactgccattggagcggaaagagttgctatcagaatttcaccagcaattgatttcaatgacgcctttgactctgacccacttgggctacgcttaacagtgattgaaagactcatcaatttgcagaaacaagtgggcacaaaactcgcttatcgtcatgttactcaacct

SEQ ID NO: 22723 - DNA, 376 bp, Glycine max
  Clone ID: LIB3050-017-Q1-E1-B11
ggttctggcagttcgcagaaacgtgtgttcctccgtcatggccctggcgcgtcaacattcctttcacgtcttcgcgcgtgccgtggccgaattgcgcggcggcaatgccaacgtgaagttcgcctggtacggtgcgtccagtaaggaagagataaatgacatcattcagcacggtttcggtcacgctcacagtaacggcctgcgtctctctccacaagattctccacttgaaagtgtgaagagttccgttgtggacgaagacggtttgaggcacttgttgctgtgccgcgttatcttggggaagacggaggtggttccacgtggctcctaccgatgccgttcgagttctcaagagtttgattctggggtggatgat

SEQ ID NO: 22724 - DNA, 376 bp, Glycine max
  Clone ID: LIB3050-017-Q1-E1-B12
gacagcaataataacaacaaattaacaatcagaattcgaaacagaaccatcgaataataaaaaaggaaaactaaaattccaaaaacgccactttcattcagctaagcttcgtctccaccatcatcatcatcttctttttcttctctacctttggatcctttcactttggcgtgaccgaaccattccactccctcgcaaaacggtgtcgtgtcgatcgcgttcggttcggtcaaactcgcgcgtcccgaatcctccggaacacgctctgtcccaattccctataattcacttctctctctctctcgcttaacctctcctccacggtggctcttccgcattctgctaccgcctccgccgtcgccgataatcactaatc

SEQ ID NO: 22725 - DNA, 351 bp, Glycine max
  unsure (1)..(351): unsure at all n locations
  Clone ID: LIB3050-017-Q1-E1-B2
gggagggagcaggaacactacgaggtgatttcggcctcaatggaggtctctgctttaaggtcacactgccctttatgccgccgctgcttctcaagtcccttctctcttccttcccttttaccttctcagcctctccagcgaagatccatgcaatcattccaaatttcatagactgggctccgtaacatcactgttcttagaaattttgtgcactctagatcagatttctcatgctgtctgaacggcacatctgtcgggttacataaatacaatggcgcgatgtattaacgtaattttctgtgcangagtccagtttgcatttcatccatgaaaatttcaaattcatcatct

SEQ ID NO: 22726 - DNA, 279 bp, Glycine max
  Clone ID: LIB3050-017-Q1-E1-B3
ggatgttcttgctgttaaacaagcttgcaaatttgcaaaggaacatgctttgaagaatggaccccttattcttgaaatggacacttatagataccatggacactctatgtctgatcctggcagcacataccgtacacgtgatgaaatttctggtgtgagacaggagcgtgatccaattgagagagtaagaaagctggtattgtctcatgatattgctgctgaaaaggagctaaaagacattgagaaagaagtcagaaaagaatttgacaaaccaattgc

SEQ ID NO: 22727 - DNA, 203 bp, Glycine max
  Clone ID: LIB3050-017-Q1-E1-B4
gattccattgtgtaataaccaatcatcgttagttcttcagtaatttattgtgggattctattccaagattttgagaatgtctaactgtgggtgtggaagcatctgcagctgtggcagcaactgcggttgcaacaagtactcctttgacttgagttacgttgagaagactatcacagagactccagttttgggttgtgggcctg

SEQ ID NO: 22728 - DNA, 302 bp, Glycine max
  Clone ID: LIB3050-017-Q1-E1-B5
ggccgaatgtgtctctccgcagcagccacacttcttcgccgtttcagctgaagagccatccgcaggtaagcaatggttaagcataataatgttatccccaatgggcacttccggaaacactggcaaaactatgtgaagacttggtttaatcaaccagcccgaaagaccataagacggttggctcggcagaagaaggctgtcaagattttccccaggcctactgctggatctctcaagcctattgttcatggccagactctgaaatacaacatgaaagtcagagccgggagaggattttcact

SEQ ID NO: 22729 - DNA, 153 bp, Glycine max
  Clone ID: LIB3050-017-Q1-E1-B7
agaccaccaaaaggggtaaaatggcacaatttgaatagaaaattaagctgaaaggccattcaacttaaggtgaagtcctccaattgccgtccggaaagttgaaaacaccaacagaaaagtgttttccaaagccttgtgggtttccgtccacct

SEQ ID NO: 22730 - DNA, 52 bp, Glycine max
  Clone ID: LIB3050-017-Q1-E1-B9
tacggctgccaaaaacgacaaaaaggtacggcttgcaaaagacgacaaaaag

SEQ ID NO: 22731 - DNA, 373 bp, Glycine max
  Clone ID: LIB3050-017-Q1-E1-C1
gacgtacatgcaatgcaatcacaatatagagtcctagctagggaccaaacatcatttcgatgtagaaattgctgtacttaacagtgagtaaatctagtgaagagaattattattgctgctaacgaaggtgcttataggaaatggaaatgctagtgaatccttaaattggaggctgacaacgaagttctttagggtttttgggattaaagaaaacgaaatgtcataattatcatacccttgggatgaggagacaggactattactataatagtgttacattttcttattgttttattcgacttgtcagatactggaataaaaatttaaaaattgattttattacaaaaagtataagaaaataataagaaataaa

SEQ ID NO: 22732 - DNA, 380 bp, Glycine max
  Clone ID: LIB3050-017-Q1-E1-C10
ggtgcaccagactaatgggttctaagagtagtaggtggtcggttacttgggtggttctttttatttgtttgctgttatgtttttctgccaaagcaatagcaacaagaaaccttgctggttatgcagatgaaaagggtccgagtaggagactccttggccgttctccatgcaagaggggaagaatgacttctgaagtggttcaaggagacaggaagcagcaaagggaggacagtccacgttgcaacaattatctgtgatttgcaggctggggttgtttgtatgtgttgcaattgcaaggatcaactacacgaatttttttaataaaatggacacatgagatgtcactgtttgttggtttagtttcatgaaatttgtgttca

SEQ ID NO: 22733 - DNA, 337 bp, Glycine max
  Clone ID: LIB3050-017-Q1-E1-C11
ggagataaagaaaagggtaacgacgttgaccagagttacagacagcatcacacgttgtcaatgccaatgatgttttctggtttgaacagagagaaggagatgtcagccatgatctctgctttgacacatgtggtttgtggagaagatgagcatcatggtgctgattactctcttcttaatcacaatattaataatactaatagtgcagttgttggtgatgatgattttactgtaacatcaaatatggcttctggttctatgccaccttcttctacttgttcatctcaaggtggcaactctgttctcaagagaagacgggaatatgataatacaaatg

SEQ ID NO: 22734 - DNA, 364 bp, Glycine max
  Clone ID: LIB3050-017-Q1-E1-C12
ggtaaaggcagtgatgtaaattttgaaggttaatggtgatatttttgctgcacataaattggtactagcagctcgttcacctgttttcagagcacagctttttggtcctatgaaagatcagaatacccagcgtattaaagttgaagacatggaggctccagttttcaaggcattgcttcattttatatactgggactcactaccagacatgcaagagcttactgggttgaactcaaaatgggcatcaaccttgatggctcagcatcttctagcagcagctgatcgatatggcttagagagacttaggctgatgtgtgaagcgagtctctgtgaagatgttgctactaatactgtggctaaaact

SEQ ID NO: 22735 - DNA, 397 bp, Glycine max
  Clone ID: LIB3050-017-Q1-E1-C2
cagatgccagagacgagagaaagggaaccatttttcgttttccttacattatttcatcgaagcaaacaaaagatacgatcttatgatgaggggaagaacaagacatgaatgcgatgatcaatctcgaactttgtaccagatcgccgcgctcgttctcaacctccttcgctcgcctctgtcgtccttgacattctctgatgaagttccgccgttggcggcgtcacggcatcacgggctgggtcagatatcgccggcgggattcgcctcattgctgttgggaatatcgctggcgttgatgctttgtggatcggtgacgttcttcatcgggttcgtgttgatgccatgggttctgggattggtcatgctcctctacgtcgccggaaatctctcaagcctc

SEQ ID NO: 22736 - DNA, 384 bp, Glycine max
  unsure (1)..(384): unsure at all n locations
  Clone ID: LIB3050-017-Q1-E1-C3
ggagaacaaaacaagtgtttcgaatagattatcctaagtctttgggaatagtgctgcaatggcttcaagtcaggaggaggtgacccttttgggagctactggaagcccatttgtgtgcagggttcatattgccctcaagttgaagggagttcaatacaaatatgtcgaagaaaatttgaggaacaagagtgaactgcttctcaaatccaacccagttcacaagaaggttccagtgtttattcacaatgagaagcccatagcagagtctcttgtgattgttgaatacattgatgagacatggaagaacaaccccatcttgccttctgatccttaccanagagccttggctcgtttctggtcaaattcattgatgataagtttttg

SEQ ID NO: 22737 - DNA, 54 bp, Glycine max
  Clone ID: LIB3050-017-Q1-E1-C4
gactcccccttcttaagttgttccttcaactttcttatactcagggaagttaga

SEQ ID NO: 22738 - DNA, 300 bp, Glycine max
  Clone ID: LIB3050-017-Q1-E1-C6
gagagtagagaatggaacgtgatggtggggagaggaaaagaggcgcacgtttatgctgcgtgtgcaagaaatcagaagcttcggtgaagaggccgaaaaccctagagcagatatgcagggagtgcttctacgatgcttttgagtctgagatccatcacgtaattcttgagaatcagctcttcagccctggtgaacgcgtcgcaatcggcgcttctggcggaaacgattccaccgtccttgcttacgtcctctccaagctcaaacgcctccacaattaatgcctccatctcttcctcctct

SEQ ID NO: 22739 - DNA, 243 bp, Glycine max
  Clone ID: LIB3050-017-Q1-E1-C7
aggggatcactgacaaataacaaagggacaagcctgagaaaagttaatgaacaatttgaaaaattggaaacccaatggccgaataatcctcaaaaaaaattttacacagatacaccaacttttgcgccaaaatccgagaaaattccagggtttaaaaaaaattctgtaaggccaacctcccaattttaacaaatcccaaaaccttttatgcccttcctgaaggtttaaaaaaaaggaaccaat

SEQ ID NO: 22740 - DNA, 260 bp, Glycine max
  Clone ID: LIB3050-017-Q1-E1-C8
gaagaaaggctaggattcttcgcgtttgccatgtcgacgactttttagaccaccgcagacgcgcatccagtgtttctccaagaacgctacatcttcatgatggaaactgcttataacgcctatcgcagattgtcgtatctggattcccatgcactggatgcgttacccccattatcagttctctcgccggctttctcggaactcaccttttgggccgtaggcctgtaccgtggaatatcaggctttttgttttaatttct

SEQ ID NO: 22741 - DNA, 372 bp, Glycine max
  Clone ID: LIB3050-017-Q1-E1-C9
ggtgagtcctgtgtttgagagattaagacctttttgcattgcaaatggctgctgcaactgctggagttgttggtggaaatggttcgtctgcttcttggatgcgattcataggcaaggaaaggaagcaaaccaagatgaacaagtcaaggattagttgctcttattcttcttctgtgatggatccttacaagaccttaagaatacaacgcggtgcctctgaatctgaggtcaggaaggctttcacgcagcttgctctgcagtaccatccagacgtgtgcagatggagcaattgtggggtgcagtttcacgaaatcaacgatgcttatgatactgtgatggccaacttaagaggagaatcaaatgccacagaat

SEQ ID NO: 22742 - DNA, 330 bp, Glycine max
  unsure (1)..(330): unsure at all n locations
  Clone ID: LIB3050-017-Q1-E1-D1
ggaagttggaagaaggagtgagatcagaggaagggaggaggcattaggtgtagaaagagcgaaagagagagagatggcgtcggggtggggaatcacaggaaacaaaggtcgctgctacgatttctggatggatttcagcgagtgcatgtctcgctgccgagagcccaaggactgtgctcttctccgcgaagactacctcgagtgcctccaccattccaaggagtttcaacgacgaaaccgaatttacaaggangagcagcgcaaactaagggctgcttccaggaaaggccaagangatggggttaatgaacatcatcattagcacctgaa

SEQ ID NO: 22743 - DNA, 386 bp, Glycine max
  Clone ID: LIB3050-017-Q1-E1-D10
agaaggggaacaacaaccaaatcatactttacattgtgcactctaattcccttgttttgtttacccacatttgtgagactatattatattggcgcatatatcatgggtctgaagtttacacatggagtggtgatattaattgttataagtgcttcaatgttttcagtgagcatggccaacaaggattggtcctttggtttcaactacactgattggtggtctagatttgggaatcatcctcaaaacacaacacagcaacaacccaggcaaattctcgtgggtggctcagagcattggcactacggtttcaactacaccgattgggccttcaagactgccccattttacctcaatgatactctagttttcaaatatgatgctccaaa

SEQ ID NO: 22744 - DNA, 395 bp, Glycine max
  Clone ID: LIB3050-017-Q1-E1-D11
gattgtgaaattaatagagagacataaaaaataaacatatattgagaatggagggttgtgtgaagaagttgctatgccttgttgggtttgtggtgcttgtgagtactattggtggggtggagagtgctggtgaatgtgggaaatctacaacccctgataatgaggcttataagcttgcaccatgtgcctcagcagcacaagatgagaatgctagtgtttctcagagttgctgtgctcaggtgaagaaaattgggcagaaccctagttgcctctgtgcagttcttctctctaacacagccaaaatggctggcgtcaaccctcaagttgctgtcaccatccccaagcgttgtaacctggttaatcgccctgttggttacaagtgtggaccttacact

SEQ ID NO: 22745 - DNA, 360 bp, Glycine max
  Clone ID: LIB3050-017-Q1-E1-D12
ataacagccaaagaaaagaaaagccacatgccaaattgttgaagactgaaaaccatgaaagcaaagaagatgccaatgacatgaaagtgaataatacaaaacatcaggtgacaaatagtggaagtaacatatactcacagaagatactggatgaaattaggcagtcagaagagaatgaacagagtcaagtccaagaaaactggaacaaggggcatatcaacaaagttgacaggaatgctgcgcaaacaaaatccaaggtgttacttgaagggcttgaagaattaaaggaggttttggatgtacagaagcaagagaaggattccattgacagtggctaagatgatgaggacaatgattacg

SEQ ID NO: 22746 - DNA, 109 bp, Glycine max
  Clone ID: LIB3050-017-Q1-E1-D3
ggaaccgcaaagcttgatgattgggttctatgtcgtatctataagaagaactcaagttcacaaaaggttgaggctaattttttggctatggaatgcagcaatgggtcat

SEQ ID NO: 22747 - DNA, 247 bp, Glycine max
  Clone ID: LIB3050-017-Q1-E1-D4
gaagcaacatctagagatcaagtattcataccttgatgttgtcggcagaactgtggtggttctagaaaaaagaaatgcagttcctgagcataatactcctttccaggtatactacaggtttaaccccatattcatgcttgctgagccattgatgctggtatctgcatttttcttgttttttgtggcttccgtggcatatcttcacattgatctttccatacgcaagtgatgaacacctagctagttt

SEQ ID NO: 22748 - DNA, 269 bp, Glycine max
  Clone ID: LIB3050-017-Q1-E1-D5
aagacagcggaagggggaattccaagccaaataagattccaaaccaaaaaagaaagcgttgtgaaaaatggccggagaaggaacagttattggggtccaaagcctaaaagaattgaaagaacatctcaagaagggagaagagtccaagaaattgaatgtggtggattttactgcatcatggtgcggtccatgccgtttcaatgccccaattcttgcagagtttgctaaaaagttgcccaatgtcaccttcctcaaagtggatgtggatg

SEQ ID NO: 22749 - DNA, 227 bp, Glycine max
  Clone ID: LIB3050-017-Q1-E1-D6
ggacagacaaacaaacaatttaccagctagacatggtccttttgaacgttagaagtgctacaatacaaacaatggcagctactcaagaagatgtgaagcttttgggtattgtgggaagcccatttgtgtgcggggtccagattgcccttaagttgaagggagttgaatacaaatttttggaagaaaatttgggcaacaagagtgatttgcttctcaaatacaaacct

SEQ ID NO: 22750 - DNA, 272 bp, Glycine max
  Clone ID: LIB3050-017-Q1-E1-D7
gcctccaaccaaacctccggccaagcctccgtaacggtgccaaaagaccacagaaagggaaccaattaagaattccgaagggtaaaatgggaactacaatgttaccaatagacaacctaatagaagaaatgctgcctaagagatatgataatttggaaactcaagggaacaattgatctaaggaaactgggtaaaaggttaagaagtaatgtgaaatcatacatctccaacaactaagagatacaactcaaaaaggaaatccacatatataa

SEQ ID NO: 22751 - DNA, 239 bp, Glycine max
  Clone ID: LIB3050-017-Q1-E1-D8
tggcgatgccagagatcatgtctgaggaatcaaatcccgagttggcattgtggaagcgttgggtggtagctcaggcagtcacaatctctgtcgggatgatatcttatccgttatacactgtccgtaggacgatgatgatgcaatctggcattgaacagccagtgtagaatagcactctggactgctggaggaagatctatagcacagaatggttggcttcattttaccgtggtgcagtt

SEQ ID NO: 22752 - DNA, 390 bp, Glycine max
  Clone ID: LIB3050-017-Q1-E1-D9
gaagagaaaaagctgaaaacaacaacgaaaaaaggtttttggttttggactctgaaagaaactcaaagtgatgcgtttcatcgttctttcgcccaaaccctaacctcgtcctcgtgcattcattcaccgcgatcaggtgtgtttttatccattgcaaacagcatgaattttgcagcatcattgtgcagaagattgaatatcaaggaacttgtgacatatgttcctgtgtatagaagcaccagtggtgtctctggagaaggtttgaatttggcgttcaagcgttgggcttccaaaaagactgctggttccacaaagaatggacgggattcaaaacccaagaaccttggagtgaagaaatttggtggggagacggtgatacctggaaataac

SEQ ID NO: 22753 - DNA, 318 bp, Glycine max
  Clone ID: LIB3050-017-Q1-E1-E1
gaaggcaccaagtcacagacaatttcctcacccctttcccaatacttgtctctgtttctctcttaataaccacccttccatttcgaactaggatcgatgctacaggtggaatcactggtttcagcttgcgccggcggatccagcgatcggaaaatcgcctgcgagaccctgtccgacaacgtccaccccacggatccgccggagccccacccggattccccgccggagtcgttctggctctcgagagacgaagaatacgactggtgggaccgcaacgccgtttacgagcgcaaagaatccacaaagggcagtataata

SEQ ID NO: 22754 - DNA, 333 bp, Glycine max
  Clone ID: LIB3050-017-Q1-E1-E10
gggaacaagtgggccaccatcgcgcgcttcctcaatggccgcaccgacaacgccatcaagaaccattggaattccaccctcaagaggaagtgctccgagcctctctccgagcctcggcctctgaagagatccgccaccgtttcgggtagtcaatccggatccgatttgagcgattcgggtttacccattattcttgcaagaagcgtgagcgtgacggtagctccctctaaccaccttgcggaaaccgcgtcttcttcagtaactgatcctgccacgttattgagtttgtctctaccgggattcgattcgtgcgatggggctaataatgggcct

SEQ ID NO: 22755 - DNA, 369 bp, Glycine max
  unsure (1)..(369): unsure at all n locations
  Clone ID: LIB3050-017-Q1-E1-E12
gaaggagaagaggaagttctggatcgctctctcccgtgaagagatcgaagaagacatcttcgtcatgacgggctccaggcccgctcgcaggcccaggaaacggcccaagaatgtccagaaacaaatggatagtcgctgatacacccaccaagaggtgaagagaatttaggaaggtcttgggagattggaggtacagaggcgtggaattttgtaaagaggaaaccgaaaatgttggattggaaatttggaatttagaaacgaaccatgatgatgatgctcatttccttgcttgtgttgttttgcggcacactanggttttaggtgcaaggggcagctttagttgatttttagtagtagtagtagtagttt

SEQ ID NO: 22756 - DNA, 146 bp, Glycine max
  Clone ID: LIB3050-017-Q1-E1-E2
ggccttgagtttttcataaaggagtatattgtgaaaaccaataaagatctaactcaaaagtttaagttagcaaaaagggccctcaacaatgtggaaggaattttaacgtgaaagtaaattttggattcttcccaattttgtagctg

SEQ ID NO: 22757 - DNA, 300 bp, Glycine max
  unsure (1)..(300): unsure at all n locations
  Clone ID: LIB3050-017-Q1-E1-E4
ggcactcgatcagtcacacactgagttcgagtgtagttgtttatgatcacaaagatggtgagaaccccatcttgtgacaaaagtggaatgaggaaaggaacttggactccggaggaagatatgaagttaattgcttatgtcactagatatggttgctggaattggcgccaactccccaagtttgcaggtcttgcaaggtgtgggaaaagttgtagattgagatggatgaattatctaagaacanacctcaaaagagggaacttcactcaagaagaggaagaatgcatcattagaatgcac

SEQ ID NO: 22758 - DNA, 311 bp, Glycine max
  Clone ID: LIB3050-017-Q1-E1-E5
ggttgaatgggccttgaaactgaagggtgtaaagtatgagtatattgaagaagatgtctacaacatgagcagtctagttatggagttgaacccggttcacaagaaggttccgattcttgttcatgcccagaaaccaatcgctgagtcattcaccattcttgaatacattgatgaaacatggaagcagtatccactattacctcaagatccttatcaaagagcacttgctcgcttttgggccaatttcggtgagcaaaagcttatgagagcagcacgaaaagcaatgacaaccagccgggatgaacgcgcaa

SEQ ID NO: 22759 - DNA, 226 bp, Glycine max
  Clone ID: LIB3050-017-Q1-E1-E6
ggaagacaagaaatgaaggagatcaatgaccctgcagcaccatcgcctcctacagaagccattctaatggatcagatgaaaacttttttgccagatatagcaaaaattaaagatgaactggatagtgaccctcaattatattggcattcaatttatcgtagataacaaatggacgttagcggcgacgactctgtggaaaagctcacaagcaatattttgcaatgca

SEQ ID NO: 22760 - DNA, 308 bp, Glycine max
  Clone ID: LIB3050-017-Q1-E1-E7
tgccaaaagaccacagaaagggattcaattataatttcaaatttccgccattctgaacctcaacaatggggaaaccaaaggaatccccgcctccaactcgcaagtcaacctcctccttcaagccgaatccgaatcccctcctggtcctcaacctcctcggtctcaatcccctcggtctccggaacctccccaatcccaactcctccccccggaattttgccaaacctaacgatttcgcaaccaacggtccgaacacaatccaaacattcgacaattaccaaaagggggaacaattggtttaaataatg

SEQ ID NO: 22761 - DNA, 228 bp, Glycine max
  Clone ID: LIB3050-017-Q1-E1-E8
gacatgctgattgtcacaattgtcttctgttactctgttattgctcctgtgataatcgcatttggtgctctatattttggcctaagatggcttgttttgccaaatcaggcactcaaagtctatgtgccaacatttgaaagttatggaagaatgtggccacacatacacaaccgtattctagcatccttgatattataccaaattacaatgtctgggtactttgggacg

SEQ ID NO: 22762 - DNA, 283 bp, Glycine max
  Clone ID: LIB3050-017-Q1-E1-E9
ggtagaatttgttgttaagaatacagaggccattcaagctaaggctggaagatacaaaaaccctgaagaaaacgccttcttcccagaaaatttaccaccatcaattgtgccatcttactccttcaaacagtttttgcatcctggagctgcttcaattaacattaacaagtccatctggaaaatgtatttccaagagttacttccattggttgctacttcgggggatgatggaaactatgcacaaactgcagctaatgatctttcattagtgcaggccatctct

SEQ ID NO: 22763 - DNA, 255 bp, Glycine max
  Clone ID: LIB3050-017-Q1-E1-F1
ggtagtaagtgaggtgaggtgccaaaatggtgaagataactcttggtactttcgatgactcttttggtgttgcctctcttaaggcttatttggcagagttccatgcaactctgattttcgtgttcgctggtgttggttcagccatcgcttacaacgagcttacaaaagatgcagccttggattcaacggggctggtggcagtagctgtggcccatgcatttgcactgtttgtaggtgtctccgtcgcagccaaca

SEQ ID NO: 22764 - DNA, 386 bp, Glycine max
  Clone ID: LIB3050-017-Q1-E1-F10
gatgtaccaaactcagcaaattcaaggcttgtctatgccaaatggttctttagggaatgcttttgatggctcattcagtgcagtgaattcccttgcttcacagaattccacacaacctagactgggtgcttccaccaattgcaacaatctcattaggcaaaagagttcccctgctgggtttttctccaattactcagttgataatgcaatgagagatgtggcaagttttaggggctgtgatgtctcaaatggacaagctattacatcctcaagtgggttgcatggtggtactttgaacttatcatctaggccatcctcttgctccacccgaatgccacagattgctgaaaatggaaatgaaggtgtggaaggaaattatgttgaaa

SEQ ID NO: 22765 - DNA, 63 bp, Glycine max
  Clone ID: LIB3050-017-Q1-E1-F11
ggagctggctgtggtacatgttatcaggtaaagtgcctaatgccaaaattatgcgatgtgaat

SEQ ID NO: 22766 - DNA, 386 bp, Glycine max
  Clone ID: LIB3050-017-Q1-E1-F12
gagaggaacaccaggtatgttgatgctgttcttaccattcccaaaggaacattgttccccatgtgtggtatgaatctggcattcgatcgtcagctgattggacctgcaatgtattttggactcatgggtgatggtcaacctataggacgatacgatgatatgtgggctggatggtgtgttaaggttatctgtgaccatttgggcttgggagtgaagactggccttccatacatctggcacagcaaagcaagcaatccttttgtgaatctcaaaaaggagtacaagggcattttctggcaagaagagatcattccattcttccaaagtgccaccattccaaaagaatgcacttctgtccaaaaatgctacattgaactctccaagca

SEQ ID NO: 22767 - DNA, 88 bp, Glycine max
  Clone ID: LIB3050-017-Q1-E1-F2
agacgagacaagggggcagtcagttagtcacagtctgagtccgcatataattgttcatggtcacaactatggtgcgaaccgcatcgtg

SEQ ID NO: 22768 - DNA, 210 bp, Glycine max
  Clone ID: LIB3050-017-Q1-E1-F3
ggacagagaaatgtcaaaagtgtacatagagatttccgtgatagttcatcttcttcttcgacttcgtcatcaacggtgggtctgtacaatcgtccttgcagcatcatcatggatgatcgaaattgtgttattgatgtaatgggacttccagagaatgaccctcttttccaattgaatttgcctcctggttttcagttttaacccaacgat

SEQ ID NO: 22769 - DNA, 268 bp, Glycine max
  Clone ID: LIB3050-017-Q1-E1-F4
ttaagggggagtttcgcgatatggattgcaacacggtcggtgcaagtcgtcatggggattctgtgggctggggatgtgactgtggccatgttgtaatgagcgaatgatttcttgagtaataggttggagcctggttcacactcccaggttagtcctcaggcactggttagcatcaacaggtttaacaactttaccaaactgtctgagaaagtttccaatggtttcctcactgggggtgtcaacgtctctggattcttcacaagttctg

SEQ ID NO: 22770 - DNA, 204 bp, Glycine max
  unsure (1)..(204): unsure at all n locations
  Clone ID: LIB3050-017-Q1-E1-F5
ggaactgaaaagctcactctcagaaccctaaccggaaacggcttaggtttcactggttcaaatttgcacggtaagaattttccaagagtgagttttgttgccaccactagtgctaaagttcccaactttaggagcttagtagtacccaattgtantgtccctgcttcaaggccaacctccagccaaggttcattcaccacaaaa

SEQ ID NO: 22771 - DNA, 272 bp, Glycine max
  unsure (1)..(272): unsure at all n locations
  Clone ID: LIB3050-017-Q1-E1-F6
ggagatcatcagattcaaaatcctcacagaagaaagaaatggaagaagttgaagaaaaactggatggtggacaagggaaaacttcagttcggcgcttcttttcaagattctgtacaccaatatttttggggtcttttattttaacattccttgctgactggggtgatcgtagccagatagcgacaattgcactggcaacccacaagaatgcaattggagtagcagttggggccactatangacacaccatctgtacctctctggctgtggtg

SEQ ID NO: 22772 - DNA, 368 bp, Glycine max
  Clone ID: LIB3050-017-Q1-E1-F8
gacataagggggtgatttgaaagataagccatggtggcaaaagatgcaaactcgtgaagagttggttgaagcttccgctatcctcatatggattgcttcagcccttcatgctgctgttaactttggacagtatccatatggaggtttaatcctaaacaggccaactattagcaggagattcatgcctgaaaaggggtctcctgaatatgatgcgttggctaagaaccctgagaaggagtttttgaagactattactggcaagaatgagaccctcattgaccttacagttatagaaatcttgtcaaggcactcatctgatgagttctaccttgggcagagagatggtggtgactactggacttctgatg

SEQ ID NO: 22773 - DNA, 351 bp, Glycine max
  unsure (1)..(351): unsure at all n locations
  Clone ID: LIB3050-017-Q1-E1-F9
gattgctaaacaaaagaagcatgtctaatcatcatcacgtagttcagacctcgccaccgaaactattcggtttcccactaacagagcaggaggaattgaattcagatgcagaaagaaaatacgaggttggagaggacagaaaattcagatgccactactgcaaacgagtattcggaaactctcaggccttanggggccaccaaaacgcccacaagaaagagcgtcagagggcgaggcgtttccaaatccacactcatagacgctccattgcagcaccaccttctgcttctgttctcaactcacatgcaataataagatcagtancttcagttacagttactacgctaccct

SEQ ID NO: 22774 - DNA, 316 bp, Glycine max
  Clone ID: LIB3050-017-Q1-E1-G1
gactacacgaaatttacaaaaaaaaaaaaaaaaaaaaaaaaaaaaaaaaaaaaaaaaaaaaaaaaaaaaaaaaaaaaaaaaaaaaataaaaataaataaaaaaaaaataaaaaataatttaaataaaattaaaaaaaattaaaaaaaaatcgggtctctttaaaggtttcaggtttacttccgtttcaatccaagttcaaacttcttcaatagtttccctaaatttcatttcagggtcgttctttttaaatttttgtaactggaaatccccggcttttccccattttaatccctttgaacaatatccccttttccc

SEQ ID NO: 22775 - DNA, 393 bp, Glycine max
  Clone ID: LIB3050-017-Q1-E1-G10
ggacatggagggtctcatcaacggcttcatcaacgttgctctcggagctgatggtggcgatcgggaagaacaacaacacgggagagacgaccgtactagaagctcctgggctgaagtcgtctcccaggatcaacaagtaccattccaactcccatgttttttaatatttgcttcatcacccaatctcatttcttcattcttcatttttgcaagatcaccctcttcctcatcaccaacacaaggtctcatttcttcatctctattattctcaatccccccaaaacaaacatgtgtaatcttatcatctttttcattataggaggaacagtgccaagattatagttacagacacagggcccataagctcaatctcattcacttcgcctctaactc

SEQ ID NO: 22776 - DNA, 353 bp, Glycine max
  Clone ID: LIB3050-017-Q1-E1-G11
ggagaaaatggcaagaatatcaaattggtctcttgtcttcctcctcatctctacactactctacatagagcccagcctctcaagcccaagcccaagccccagcccaagcccgttcataaaatcctcctgcagcagcacccagtacccagccctctgcgtctcatccctctccgtctacgcctccagcatccaacaggaccctcaccaactggttcagacagcactctccctctccctgaaccgcacccaagccaccaaaaccttcgtggctaactgcaacaaattcagaggcctgaaacccagagagcacgctgcactcaaggaccgcgccgaggaaatcagcgacagcgttg

SEQ ID NO: 22777 - DNA, 366 bp, Glycine max
  Clone ID: LIB3050-017-Q1-E1-G12
gagaacacaacacatggacacataacgacagtgactacatccagcattgctctgttctctgcaacattctccactctcaaccatggcttcaaagcttttactcaacactgtcttcgtgtttgatttgattgcttttggacttgccgtggctgctgagcagagaagaagcaccgctagtgttgtgacggacaatgaacagaattataattactgtgtctacaactctgatataacaactggctatggtgttggagcatttttgtttctcttggctagtcaagtcctgataatggtggcaagtcaatgcttctgttgcgggaagcctcttaacccctggtgatcaacggactgtgcagttgctcgttt

SEQ ID NO: 22778 - DNA, 380 bp, Glycine max
  unsure (1)..(380): unsure at all n locations
  Clone ID: LIB3050-017-Q1-E1-G2
ggaatcaactttggtgtatatataaaaacaagagagagctagcagtgcacgctttcaacatccaaaacaacagagagtttttggctttagaagctgaacgaatatagttatcacaatggggagagctccatgctgtgagaaaatggggttgaagagagggccatggactccagaagaagatcaaattctcatcaattacatcaacacttatggccatgctaattggcgtgcactgcccaaactagctgggctattaaggtgtggaaagagttgtagactccggtggataaattatctgagaccggacatcanacgggacaacttttacagagaagaagaggacactataatcagtttgcatgaaatgttgggaaacagat

SEQ ID NO: 22779 - DNA, 365 bp, Glycine max
  Clone ID: LIB3050-017-Q1-E1-G3
gattggaaagatatcaaagctaaggctaggtagctagctagtactaaaaagctagattgatcgatcatcttaatttccacgggaaaaaaagaggtgataatggaatcatcacttgttgaagacattgtgattgtgggagctggaattgctggtctcgcaacatccttggcacttcacaggctgggtgtcccaagtttggtgttagaatattcagatactttgagggtcactgggtttgctttaacaacatggactaacgcttggaaagctttggatgctcttggcgtaggaaccattcttcgtcaccaacatgtccagctaaaagagaatgtgactaaatctttgattttaaggcagcaaacatc

SEQ ID NO: 22780 - DNA, 395 bp, Glycine max
  Clone ID: LIB3050-017-Q1-E1-G4
gaacacactcatccaaacaaccttcttcctttttctgtgagcctttctttcaggttcttaacttgatcagtgtgcagtgtccaaatcataagggtagttgcaaattgcaatggctaagcatgatgttgagggtggttccttcgctgcaaaggactaccatgatcctcctccagcaccgttgattgatgctgaggaactcacacagtggtccttctacagggctttgattgctgagttcattgccacaatgctcttcctttacatcacagtgctcactgtgattggttacacgagccacagtgatgtaaaggctgggggtgatgtgtgtggtggagttggcattcttggcattgcatgggcctttggtggcatgatcttcagtctggtgtactgca

SEQ ID NO: 22781 - DNA, 183 bp, Glycine max
  Clone ID: LIB3050-017-Q1-E1-G5
agggaacaacgacgagcacaagattcagttacatattattccagtatacaacgcaggcacatagtatggcgggaccctttgagttggggtcatcaaagaagaaaccacaggatagagtgaatgagttacacacatttaaagcggaaaatatgcacagcaacatgtgaattatttattacagcc

SEQ ID NO: 22782 - DNA, 307 bp, Glycine max
  Clone ID: LIB3050-017-Q1-E1-G6
tgcgggtgcacgacagcgagggaacggcaacgagcacaagatccagttacatattattctactagacaacgcacgcacagagtatggctggaccttttgagttgggttcatccatgaaggtaccagcggattgcgtgaatgatttacgcacttttagggcggacaatatgcacagcagcatgacaattatttactacagccgaacatttttgtccaaaattggtgaacttgttgccggcattttggggttcacaagcttgttacggtttgtaatttacttccttctcatgatgggtacttcacttgg

SEQ ID NO: 22783 - DNA, 186 bp, Glycine max
  Clone ID: LIB3050-017-Q1-E1-G8
tcaaggggacgggagaagtgatcgagtgaacgatacatttatgatctcgctctttctcttcgcctaaagtcctcatcctcattctatttttacctttcactctcgctccataacgttgatggtgattccttctgttttagcgactgccatcgatgccgctcatgaacgaactcatggatctccaga

SEQ ID NO: 22784 - DNA, 381 bp, Glycine max
  unsure (1)..(381): unsure at all n locations
  Clone ID: LIB3050-017-Q1-E1-H1
gacaatagaaggctatgaatatgaagatgtcatactctgccttgctacttttgtgcctttcgcttaccttcttcaccccttcgacgcttgcttggttgtggccatggtattctcctttgcgacctccttcttgtcctgatggtggttgtaggataccacggctactccctacttataagcccccaccattgtatagatctacttccaaggggaaaccactccctacttataagcccccaccattgtatagatctacttccaaggggaaaccttaagatcgatcaatgtcnctatagtactctttgcagcagcagcagcataatgtgtctacctcatcttcagttagtgtgcttactagaataatttaactttctcaaatgc

SEQ ID NO: 22785 - DNA, 373 bp, Glycine max
  Clone ID: LIB3050-017-Q1-E1-H10
attttcatgcagactttcatgattccagggactgtgttcatgtcattgcttgctggagcactctttggagtctttaaaggtgtggctctggttgtgttcactgccacagcaggagcttcttcatgctatttcctgtctaaacttattggacgacctattctctcctctctgtgacctgaaaagttgaaattcttccaaacccaggtggctaaaagaagaaagggtttgttgaactacatgctttttctaagactgactccgaccctacccaacacatttattaattttgcttcaccaattgtggatgtgccttatcatattttcttcttggcaactgttattggactaatacctgctgcttatgtcactgtca

SEQ ID NO: 22786 - DNA, 340 bp, Glycine max
  Clone ID: LIB3050-017-Q1-E1-H11
gtattatctcattgtgactattggcatggtgaggatcgtgaagggtctcatttggattttcatgatttctctctgtagaagaaggccaacaacaacaacaatagaagtgggatcgattcagaacgatgacaaggtgtaattagagttgacccattttctattttccttcttttatgctgttctaattgagctacctttctccctcattttgttatttgattttctttggtcagagacgttaattacaatattttatacctttgcgaaattgtaacaaacccgcaaaacattattgaattgatggtattattgctcaacatgtcgataattagttctttac

SEQ ID NO: 22787 - DNA, 360 bp, Glycine max
  Clone ID: LIB3050-017-Q1-E1-H12
agggataagaaagaagatcaaaagaaaaaagagaaacaaatggcagcactgggtggctttaccgacatcaccggagcacagaacagcatcgatatcgaaaatctcgctcgctttgctgttgatgaacacaacaaaaaagagaatgcagttctggagtttgtgagggtgattagtgcaaagaaacaagtggtttctggcaccttgtactatatcactttggaggcaaatgatggtgtgacgaaaaaggtttatgaaactaaggtgttggagaaaccatggttgaacaccaaggaggttcaggaattcaagcccatcactgttgctgttaatcctctttcggtgacggtctagcacatagct

SEQ ID NO: 22788 - DNA, 397 bp, Glycine max
  Clone ID: LIB3050-017-Q1-E1-H2
gggggacagtttcgattgtctctctctgacaccctacgatttctgcggcagcatcattccacacgcagagtcagtgtcgttcttcttctaattcatcgctcccgatgaaacgagggtaccaggaatccccttcaagctcgttaggtccacctcattccagagctagacatgatcctcaaggtggtgcacactttgttgaggatgaaagcacaaagatttttgctcggaaagtagcagatcattatagtgcgagattcaaccagactttggaagaacgggaggctagtccgataattcatttgaagaaactcaataattggattaaaagcgtcttaattcagctttatgctcgtcgaggagatgcagtacttgacctcgcctgtggcaagggtggtga

SEQ ID NO: 22789 - DNA, 206 bp, Glycine max
  unsure (1)..(206): unsure at all n locations
  Clone ID: LIB3050-017-Q1-E1-H3
gatataacttcttctangtgtccggaaatcgttcctatcatcacttctcaaatctcgaaccctctcgttcgtgccgatcactaggtcacacttcatcaatggcgggtagaggcaaaaccctaggatccatcgccgctaagaaggccacctcaatgagcagcaaatccggcctccaattccccgtcggtcgtatcgccaggttcctc

SEQ ID NO: 22790 - DNA, 356 bp, Glycine max
  Clone ID: LIB3050-017-Q1-E1-H4
gattcccaggatttctcattctcccgttcctctccgaaccctcgatcactctcacgcgctcctatattcgctcctccagcgtcgctctctcgaacaaccacaacaccatcttcatcacatggcaaacgcagcatctggtatggcagtccatgatgactgcaagttgaggtttttggagctgaaggcacataggacacaccgtttcatagtttttaagattgaggagcagcagaagcaggtcattgtggagaagcttggtgagcctgcccagggctatgaagatttcactgccagccttcctgctgacgagtgccgttatgctgtttatgattttgagtatctgactgaagggaatg

SEQ ID NO: 22791 - DNA, 225 bp, Glycine max
  Clone ID: LIB3050-017-Q1-E1-H5
gaacgggatcggaggctaatctattaggcgctgttctctcgtcttctacaaaattttctgttcgatctcaaccaaggttgttccttccaccgccatgagtttcatcttcggaaagcgaaaaacacccgcagagcttctgcgggaaaataagaggatgctggacaaatcaatcagagaaattgagtgcgaacggcaaggcttgcaaacgcaagagaagaaattgat

SEQ ID NO: 22792 - DNA, 298 bp, Glycine max
  Clone ID: LIB3050-017-Q1-E1-H6
aaaagaccaccggaaggggatgacagtttcgactgtctcgctctgacaccctacgatttctgctgcatcatcattccacacgcagagtcagtgtcgttcttcctctaattcatcgctcccgatgaaacgagggtaccaggaatccccttcatgctcgttaggtctacctcattccagagctatacaggatccgcaaggtggtgcacactttgttgaggatgaaagcacagagatttttgctcggaaagtagcacatcactatagtgcgatatccagccagactttggaagaacgggag

SEQ ID NO: 22793 - DNA, 375 bp, Glycine max
  Clone ID: LIB3050-017-Q1-E1-H8
gagtgacataaaaagtgaggttcacaagcatctggtacacacaattagaacgcagagacgtatgcaaggtatatcgaaacgaatcaacaaaatgcacactgaggcgcataacaatacgatcaactccaacattgttgttgctgtccttattgcaacagttgctttagctgccatatttaacgtcccgggccagtatcctgagaaaccaaatgaactctcacctggaatgtctcctgtggaagcatatattgctccacatattggattcatgatattcataatctttgaatctactgccctcttcatatcattggctgttgtgattgtccaaacatcagtggatgttattgagacgaaatcaaagagacccatgat

SEQ ID NO: 22794 - DNA, 353 bp, Glycine max
  Clone ID: LIB3050-017-Q1-E1-H9
ggtcctgttagcgaagtctacgtgcctgccagcgaaggagtggaagcttatatttggttactggcaaaggcttatgttgttgtgaatgatgcatgctaccatcaaatcattagccattggctaagcactcatgcaattgttgagccatttgtcatagcaacaaacaggcaactgagtgtggttcaccctatttacaaacttctgtttcctcactaccgtgacaccatgaatattaattcacttgcccggaaagccctggtcaatgcagatggtattatagagaaaacattcttgtggggtaggtactctatggaaatgtccgctgtcatttacaaggactgggttttcactga

SEQ ID NO: 22795 - DNA, 325 bp, Glycine max
  Clone ID: LIB3050-018-Q1-E1-A1
aggcttcattgatgaatgtgttgaaggggtgctcagattgactaaatctgatttccgagagccagtaaatattggaagcgatgagatggtcagcatgaatgagatggctgagatcattcttggctttgagaacaagaatattccgattcaccacattcctggccccgagggtgtccgaggtcgtaattcagacaatacacttataaaagaaaaacttggttgggctccaactatgaggttgaaggatggactgaggatcacatacttctgggttaaggagcagatcgagaaggagaaggctcaaagtattgatatatcagtgtat

SEQ ID NO: 22796 - DNA, 373 bp, Glycine max
  unsure (1)..(373): unsure at all n locations
  Clone ID: LIB3050-018-Q1-E1-A10
ggggaacaagattgacaaacctggggttctgtctaaagaagctttgaccgaccaaatggatctgaagtcaattactgacagagaagtttgctgcttcatgatctcgtgcaaaaactcgactaacattgactctgttatcgaatggcttgtaaagcactccaaatcaaagagctaagaggctcccttaagttttgtactctaatgtaatttcagtgacatatatctggaagttgctggaggcatctgcatggctaacttggttgcagattactttagtcctgcccntttctcatttgcttcttaatgtaatatcatgtccaatgacgtgtatcaaccaagatgaaatccaggtcaagggttgtttggtcgtgct

SEQ ID NO: 22797 - DNA, 187 bp, Glycine max
  Clone ID: LIB3050-018-Q1-E1-A11
tggggcgacccacacctccgaagcgaaaagaacaaacaaagggggggggggaaccagaaaaacccccatcccgaaccttaacctaaaatcttcgccctttccttttgatcaaggttccttctttcccagagaactaaaccatttcccgaacagtttccaaatccaaaaaatttcccaaactccttta

SEQ ID NO: 22798 - DNA, 376 bp, Glycine max
  Clone ID: LIB3050-018-Q1-E1-A12
ggcattgtgaaatcaacagagaaacatttcactaatagagagacataagcataatattgagaaataatggagggttgtacttattgtgtgaagttgctatgccttgttgggtttgtggtgcttgtgagtactattgcaagggtggagagtgctggtgaatgtgggaaatctaccaccccagataatgaggcttataagcttgcaccatgtgcctcagcagcacaagatgagaatgctagtgtttctcagagttgctgtgctcaggtgaagaaaattgggcagaacccaagctgcctctgtgcagttctgctctccaacacagccaaaatggctggtgtcaaccctcaagtttgctgtcacatccccaagcgttgca

SEQ ID NO: 22799 - DNA, 338 bp, Glycine max
  Clone ID: LIB3050-018-Q1-E1-A2
acgcttcaattttccatgaatctggcttccaacaacattattctcaactaagtgatttgcattacaacggaattggtcataaaagctatgttcctcaattaccaagctatgattaccctccaatgtctgaatcctcaacttataacaattcctataataacagcaaccagaacttcagctacgcttcagttctttcaacgccttcttcaagtcccacaccgttgaattcgaactcgacgtttgtcaaggggagcagcagcactgaggatgagacagaaagctatgtcagtagcaacaacttgttgagatttgaaatctcagatatgctacgtatgaat

SEQ ID NO: 22800 - DNA, 409 bp, Glycine max
  Clone ID: LIB3050-018-Q1-E1-A3
tcccggcgctacgacgtacgcgtaagtatggctgcggctgccaaaagaacacaaaaaggggaaagaaatggcgaaaggccttgaaaatggcccggcaaccttggttggccccaaaaggggccccaaggttggtaaacaattggttgttgttgcccgtgactgaatgcaaatgctttcgatggacgttgctgtcattttttatgattttggtgttgaatattcaaggctctttgtatgttttttgcaatcattttcaattgtggtatttgtgatatcagtgtaacttaagcaactcttagttgaaacgtattcgctgagtggtatcatatggtaaagccttttgttacgtaaatttgttgtgaacatgaggatacaatttcgttacgaaaacaaaaaaattaaggtaatc

SEQ ID NO: 22801 - DNA, 383 bp, Glycine max
  Clone ID: LIB3050-018-Q1-E1-A4
agcccaagcgtccggccaggcgttcagagaccccttggcgggctgcaaaatgccgaaagacgggaaaaaagcccggctttcaaaccctagcaaccttcatcaacccccgaactccgaaccccttcatcatccaggtcaaggataaaggttagggagcccaaggaggaaaatgtcaccctttggtcaaaaccgttatagacggtgaacatgtttccggcgtggctcgcatctttgcctctttcaatgaggaccttcatccatgtcacggaatttgtctgggatgcgaaacccttgttcgcatcactggtgggatcacagttaaagctgacatagatgaatcatctccatatgctgctatgcatgcagcacaggatgttgctgcc

SEQ ID NO: 22802 - DNA, 346 bp, Glycine max
  Clone ID: LIB3050-018-Q1-E1-A5
aaagaatatattgagaaatgggagggtccagtggtagcaccatcacgccacaacctcaagctttttgctgacaaggagacatatgaatcaatggatgcattagcaaagcttcaaaacaagactgctcatcagttggccatggaagttatccgtaattatgttgcttccaaccaaaatggaaaaggcgaatgatttcatttttacttaacgaaggaagatgtatgtgatgttgctttatggttgacaggaatggtggataggcaactgaacacaactctgttgttactgtgtggtaactcgggttcgactaaactaatgtttgggtttttgtttttttatctgaaac

SEQ ID NO: 22803 - DNA, 345 bp, Glycine max
  Clone ID: LIB3050-018-Q1-E1-A6
gacttgtcacaacttcatttccaagatgaaaaccatctcctaattaatattccaacaacccaagttacctgttgaccctcctcagccaaacaattcttgtttctagctctcacaagcaagctctaagaacaatgaataaagtagtgttaaaggtggacttacatggtgatagaaccaagcaaaaagctatgaagacagcatctggcctttcaggggttgaatcagtttctgtggacatgaaagatatgaaaatgatcgtagtgggggacattgatccagtgagtgcagtgtccaagctacgacagtgttgtcgcactgaaatagtttcagttgggacagcaaaag

SEQ ID NO: 22804 - DNA, 355 bp, Glycine max
  Clone ID: LIB3050-018-Q1-E1-A7
gcacttcaattgcaatcaaattagttcattctctttgcgcagttccctacctctcctttcaagatgcagatcttcgtcaagaccctcaccggaaagaccatcatccttgaggtggaaagctctgacaccatcgacaacgtcaaggccaggatccaggacaaggaaggaattcccccggatcagcaacgtcacatcatcgccggaaagcagctcgaggacggtcgtagcctcgccgactacaacatccataatgagtcaacccttcaccttgtccttcgtctccgtggtggcatgcagatcttcgtcaagactctcactggcaaaaccataaccctacaggtcgaaagctctgaca

SEQ ID NO: 22805 - DNA, 354 bp, Glycine max
  Clone ID: LIB3050-018-Q1-E1-A8
gggggcaacaccaataacgatgataacagcaaggattccaaggctgctggcgacaagagattcaaaacgctgcccccagcagagtctcttcctaagaatgaaaccattggaggctacatccttgtttgcaacaatgataccatggctgagaatctcaagagacaactctttggtctgcctccacgatacagagattctgttcgggccattactccggggttgccccttttcctttacaactattccactcaccaactccatggaatctttgaggctgcaagttttggagggtcaaatattgatccatcagcttgggaagattagaaatgccctggtgaatctcgtttccccgct

SEQ ID NO: 22806 - DNA, 305 bp, Glycine max
  Clone ID: LIB3050-018-Q1-E1-A9
gaaacacatgttgagaagaattgcagcaattttcgtgataagctttttggctttggcatatcaagccattcaccctccacccccatgaacatgtggtagttcccctgaaggtcctcttatcacagggccaacgattaagctcagagatggaaggcacatagcatacaacgaacatggtgttcctagagaagaagccacgaacaagattgtgttcttacatgggttccgttccagtaaacatgatgctgtgattgcaacacaccttccccaaggacttgttgatgaacttggagtgtacattgtgt

SEQ ID NO: 22807 - DNA, 385 bp, Glycine max
  Clone ID: LIB3050-018-Q1-E1-B1
gaccataaaatccatctcaaactcttggatcatatatttcaacctcctcagatttctttcctagtaaaccaattttcaaccacatgggtatccctcactttctcgttataccatatccagttctgggtcatgtgaatccccttatgcaattgtctgaggctctaaccaagcatggctgcaaaatcacatttctgaacacagagttcagccacaaaagatcaaacaacgctggtgctgaactagacaaccttaaggaatcaggaatcaagtttgtgacactcccagatggcttggaacctgaagatgatagaagtgaccatgagaaagtttttttgtctatccaaagcaacatgccttctttacttccaaagctcatagaagatat

SEQ ID NO: 22808 - DNA, 371 bp, Glycine max
  unsure (1)..(371): unsure at all n locations
  Clone ID: LIB3050-018-Q1-E1-B10
gacagtagttggagtacaactaactgcaccatcaccagataaaacttgggtggtgccttttttctttttctttctctctatcgattctcgtaacaaaccctacccttttgagtcttccaagttttcaccatcgtaatgggttccgaaggatccagcgtcgtggttcctaggaatttcagattattggaagagcttgagagaggtgagaagggaattggggatggaactgttagctatggaatggatgatgctgatgacatatacatgcaatcttggactgggactatcatcggtccccctagtactgttcatgaagggcgtatctaccagttgaaattgttttgcagcanggattatccagacaatcctcc

SEQ ID NO: 22809 - DNA, 415 bp, Glycine max
  Clone ID: LIB3050-018-Q1-E1-B11
aggcgagaagacgatagagggggaaccactacaagctgagagggaatatccagagttataatcttggtggcatgggttgcagtgctggacttatctctatagaccttgccaaacagctcctccaggttcatccaaactcttatgccttagtggtgagcatggtgaacatcactctcaactggtattttggcaacaacatgtcaatgctagtctcaaattgtctcttcagaatgggtggagctgcagttctactctccaacaagtcttctgatcgcagaagagccagataccaactgatccatacagtgcgtactcacaagggtgcagatgacagatcatatggttgtgtcttccaagaggaatatgagaagaatacaattggtgtggcactctcaaaggacttaatggctgttgc

SEQ ID NO: 22810 - DNA, 379 bp, Glycine max
  Clone ID: LIB3050-018-Q1-E1-B12
ggatcaagaaaaatgagatctttgagctatttcatgtaaagcttcctgtatagcatttattggttaggcaattcttctatcacctaaatggtgtgtgtaacaaggtcagaagtgaccaattgatgtgaaaatcccatcattggcaatgcctttattgtgtcgtacgttttccctttttcccctccctccaaccctcacgatctgcctccaatttttttcaaagtataatttgtttgacaaattcactgaggtcaagcttaacgttaggtccccttctgacccaactctgctctcggcttgtaaatatcccagttaatttttaaaaacaagtataatttttgctaattccactaacaaatcgtatgacattgtatttgtg

SEQ ID NO: 22811 - DNA, 325 bp, Glycine max
  Clone ID: LIB3050-018-Q1-E1-B2
gttgtgggagaagaagatgcaatttggatgctaaaattaatcctcccttacttgaatgagttcctagcgaaactcaaagccttgttttctggagatccaggtaccacaataaagttggcagtgttgctcgttgttttggccagatgtggcagctacataaccgtttggaagatggccaaatttggcttcgttggagtttatactgtaccaaagatatgctcttcgtattctgcacagttaactgaatatggaaatttttggattcgtcgattccgggatgcatgggattcatgcactcacaagaaagccgtggctcttggcatct

SEQ ID NO: 22812 - DNA, 318 bp, Glycine max
  Clone ID: LIB3050-018-Q1-E1-B3
tgggggcacacgtgaagcttcatggactttggtaaactccctacactttgatggtggtatggaccttacagtttaaggatagaccagatccacacatataagaacaccgctacaatcagagtcttcaacttcgtgaatacaacccattagactctaaaactccagtgcttgtccataatggaacacccctaagtgagtccatgcttactgttgaatacattgatgagatctggtcacataagtcactacgtcctgctgatccctacgagagagctctggccatgttttcggtcaaatatgctgatgatgaccagtttt

SEQ ID NO: 22813 - DNA, 364 bp, Glycine max
  Clone ID: LIB3050-018-Q1-E1-B4
ggagcggaagttgtctcagatgattttggacaagaagtttgctggaacattggatcaaggtgctggatgccttgtcatattcgacgatcccaagactgatgctatatatcctgctactctagagaccatttccaatgttgggaaagtcgtggacagtctttatgttaggtctgccaagataatggcatgagcactctggttattttactccgatgtcacgttgcttgttgttgctgttgttttcttcttaattgtgactagcttatcatctgtttttatctatttttatttttgttgaactcaattgtggtaaatctcttccggtggctttgaacatttaaatgttttggtggtcaatgccact

SEQ ID NO: 22814 - DNA, 349 bp, Glycine max
  Clone ID: LIB3050-018-Q1-E1-B5
gaacccaaccaaactgaaccaaatcatcacacacacatactaagaagcaacaattcttctacaatggatctcctccttctggaaaagaccctcataggtctcttcctcgctgcggtggtcgccatcgccgtctccaccctccgcggccggaaattcaagctcccaccgggcccactccccgtcccaatcttcggcaactggctccaagtcggcgacgacctcaaccaccgcaacctcaccgatttggccaaaaaattcggtgacaccttcctcctccgcatggggcagcgcaacctcgtcgtggcttcttcccctgagctcgccaaagaggttctccacacgcagggcg

SEQ ID NO: 22815 - DNA, 271 bp, Glycine max
  Clone ID: LIB3050-018-Q1-E1-B6
taggggttccaatgttggaatcaaatcaggggagaatatggaaaacagtgatgaacaaatgtacagagtccggagattagagatctcagacaagggaaaaggcttcatcgagttactgcagcaactcagcgtatgcgattccgtctccgacaaggaattcgaggatcgattccgagacctcaatgttctcggcgacgagcacgtgatcggcgtgatcgaagactaggcttccggaaagatcattgcgacggggagcgtgtttatcgacaag

SEQ ID NO: 22816 - DNA, 361 bp, Glycine max
  Clone ID: LIB3050-018-Q1-E1-B7
gagaaatctgacgtgtattcctttggagtggtgctgtttgagttactctgcgctcgtccgcctctgatcagaactgcggagaagaaacaggtgtcgcttgctgattgggcgaggcactgctgccaaaatgggaccataggccagattgtggaccccactttaaaggggaggatggcgccagagtgtttgaggaaattctgcgaggttgcggtgagttgtttgttggacgacggaacgctgaggccgtcgatgaacgacgtcgtttggatgctggagtttgcgttgcagttgcaggagagtgctgagcagcgtgaaaatactaatattgttgataatgaaattaatgagagaagagaggaag

SEQ ID NO: 22817 - DNA, 353 bp, Glycine max
  Clone ID: LIB3050-018-Q1-E1-B8
gtgtgatgatggtaacaagaaggagaacaagagtgttagtgagtggtgagagtgcgaagaacgtgagggctacatatcatttatataaccctgagcagattggttggaacttggtcactgccagtgcctactgcgctgcatgggatgccaacaagcccttggcttggcgtaaaaaatatgcatggactgctttctgcggacccgttgggcctcgtggcagagaatcttgcggcaagtgcttgagggtgacgaataccggaactgggactgaggctacggtgaggattgtagatcagtgtgctaatggaggcttggacttggacgtcaacgtgttccgacaattggacactaat

SEQ ID NO: 22818 - DNA, 332 bp, Glycine max
  Clone ID: LIB3050-018-Q1-E1-B9
gttctagtgtgtgattgtttgttgttgtaactcggtcttcttcttttgttgttctgtgtatgtgtttgttttttctctcacctgaaaatgtcttgctgcggtggtaactgtggttgcggaagctcctgcaagtgcggcaacggctgcggatgctgcaagatgtacccagacttgagctacactgagccaaccaccaccgagaccttggtcatgggagtggcacctgttaaggctcaatttgagggtgctgaaatgggtgtgcccgctgagaacgatagctgcaaatgtggaccagactgctcctgcaacccctgcacttgcaagtgacgtgt

SEQ ID NO: 22819 - DNA, 345 bp, Glycine max
  Clone ID: LIB3050-018-Q1-E1-C1
ccaacccttaggaaggaaaaatgctgaaatccctccgatgcgaccccgtatccgcaccgtaaacggaacttgtataagatccagtactctgtgaactgggatgatccttcacccggtgctgctctgaatttcacgaaccaagctaagaagttgttcagttacatgaccccttttgtgtcaagaacccagaagtgcgtttttgaattacagggatcttgatattggggttaacagctttggtgaaaaaaaccttcaggaaagggttggttaatggaacaaatacttcaatgataattttcagaggcttgtgaagattaagaccacggttgatcctgaaaacttttt

SEQ ID NO: 22820 - DNA, 380 bp, Glycine max
  Clone ID: LIB3050-018-Q1-E1-C10
ggggagagaatagagaggagagatggatccagacgcgttggcaaaggcattcgtggagcactactacagcaccttcgacaccaacaggaacggcttagcgaatctctaccaggagggttccatgctcactttcgaagggcagaagatccaaggcgcttccaacatcgttgccaagctcacctccctcccttttcagcagtgccaccactcaatctccaccgtcgactgccagccctccggcgtcaacgccggcatgctcgtcttcgtcagcggaaaccttcagctcgccggcgaacagcacactctcaagttcagccagatgttccatttgatatcaacacctcaaggaagctattatgtgttgaatgacatattccgtt

SEQ ID NO: 22821 - DNA, 334 bp, Glycine max
  Clone ID: LIB3050-018-Q1-E1-C11
gtattcacttccttctggaattacaaagtgtactatgtctatggcttcatgctactggtttttctgattcttaccattgttactgtttgtgtgacaattgtgcggacatactttttgttaaatgctgataactaccactggcaatggacttctttcctttcagctgcctcaacagctgtttacgtgtatttgtactcagtatactactactatgtgaatacgaagatatcacgcttcttccaaaccagcttcgatcttggatacactttgatgtcttgtcctgggctgggaattctgtgtcgaactgtgagttatcttggctcgaagttgtttg

SEQ ID NO: 22822 - DNA, 288 bp, Glycine max
  Clone ID: LIB3050-018-Q1-E1-C12
ggatacaaaattgagcgatttctccaattttaccaattcggattcgacattcgtcaagaacttttaagcattggaactctaagtgttgaaatgcgtatctgagcgctttaaggtaccgattaaaggaccaatcgtcccttcgggttagatggaagtgaggactacatgggacaaatggtatcgagcacgtctatggactatgcgcactgaatagttcagcaattggtatgaatctcaacctcctcagtctgttctatacaactcctatgtacacatcgtgtcattgac

SEQ ID NO: 22823 - DNA, 385 bp, Glycine max
  Clone ID: LIB3050-018-Q1-E1-C2
agaagggggaagcggcgccaccatagttggtgtagctagctacggagggatatacggggaagcgtttattcattcattaagatggcatcggagcttcaattgcccccaggcttcagattccatccaacggaccaggagctggtgttgcactatctctgccgtaaatgcgcgtcgcagcctatcgccgttcccatcatcgccgaaatcgacctctacaaatacgacccctgggacctacccggattggcttcctacggagagaaagagtggtacttcttttcaccacgggaccggaaatacccgaacggttccaggccgatacgggcggctggaaacgggttactggaaggcaaccggggcggataagcccattggccaacccaaa

SEQ ID NO: 22824 - DNA, 358 bp, Glycine max
  Clone ID: LIB3050-018-Q1-E1-C3
aggggaacaacacatccacgaactaataatctctgtgccacctgcagacattctactcacaaaagccaactctctccaccatctgaaacatgcagcgtcaaagtcacatttcggttgcaatttcactaatatgcatcctgttttgttccacattaactagtgctcttgatgaacctgagtatggttacaatgaaaaaagtgcaaatgggccctaacattggggtgatctgaaagaagaatgggcagcctgtaaaataaggcaaattcaatctcctattgatttgtccactaatggagtggaagtgatccccaagttaggggggctaaagtactggaactataagcctcaacatgctac

SEQ ID NO: 22825 - DNA, 353 bp, Glycine max
  Clone ID: LIB3050-018-Q1-E1-C4
ggagataccaaggaaatttggttcttacctcttacccgcagacagatgaaagaagggaaatacatggaagctgtgtgtgcaagtggaagcagtgtttgggtcacatcctcgcttacacgcacacccaagatcacactccctctattccgcgccagttagcaccagctaacagcatttccttcacaatcccttcttttctcctatcacccttctcgctatgctaatgctagaaccctccgcgccacaacctcctccagacccattttccttccccacataagtgcatcactggaacaaatttactacacttatattatggtcaagcccgacggcgtcaaacgtggcctcgtggg

SEQ ID NO: 22826 - DNA, 354 bp, Glycine max
  Clone ID: LIB3050-018-Q1-E1-C5
gaaactaagaagagtgagaaggtgattgacatgggtgttggttttgaagttgtttctggtgagtatttggggtcagcagttgtacaaccaccttggttagactttttgaggcaatggggtccaaaaatcacttatgacattgcaaaggagctggacaatttggcgaaggtgttccctgctttggaagcccttgaagatggtttgccaaatgacttgttgggacaggagggacccacaggacctaagctcaaaagaaattggcaaggtgatgaggtttgaaatggaagacttggagaatggtggcattattgacaccatgcaattataaaacgagactttaatttggttggtttg

SEQ ID NO: 22827 - DNA, 321 bp, Glycine max
  Clone ID: LIB3050-018-Q1-E1-C6
gttgtggaaaatgaagtggccacaagcacccataaggaaagttcattttttgataaactcaagaagacattctcttgggttggaacaaaagggtcagaggtcacattcagggaggagtatcacctaactccaaaagatggttactccagaagccaaaccatggtgctgaatggtattccattggagttaacagacgaaggagatcttccaccgttggatccagtgcgcaataacgtgcgatctccaatatacatgactcctttgtccattgcatttgttgtataccccaactttgatgctccagcttgtgctacacacaga

SEQ ID NO: 22828 - DNA, 345 bp, Glycine max
  Clone ID: LIB3050-018-Q1-E1-C7
ggacaaagatcgacgatgatggacgaaaccgaagaattagaaccgttgtttgattacagccgggttcagcctctgaaccccatcgacctcgatgatgatcttgatgattacgaggatgtgatttgcgttgatagtaaaaagaggaagatttcccaggctgttgggaatgagaagactagtgggaaaagagtaacagtggtggacattgaggatgatgattggttacctcctccaccaaagatcgcaagtaatgcacagaagacgattgaccaggattcaactttgaaaaaattgagattaaagaagcatgaacttgcatcgtttgccgaatcagcaaaagaattg

SEQ ID NO: 22829 - DNA, 320 bp, Glycine max
  Clone ID: LIB3050-018-Q1-E1-C8
gataagaaagaagatcaaaagaaataagagaaacatatggcagcactgggtggccttaccgacatcaccggagcacagaacagcatcgatatcgaaaatctcgctcgctttgctgttgatgaacacaacaagaaagagaatgcagttctggagtttgtgagggtgattagtgcaaagaaacaagtggtttctggcaccttgtactatatcactttggaggcaaatgatggtgtgacgaaaaaggtttatgaaactaacgtgttggacaaaccatggttgaacatcaatgaggttcaggaattcaagcccatcactgttgc

SEQ ID NO: 22830 - DNA, 380 bp, Glycine max
  Clone ID: LIB3050-018-Q1-E1-C9
ggcaccaatattatccaaattcgtgagagcttattcaatcaaaatgtctcccaaatacaagctagtgctgttgatagcattggttttggttgcaacctcccttgctggtcgcacaaaggaacatccgaagcatcctccatcccttcaagaacaacaacacaccccataccttgatagctacccgccaaagcatagaccgaaaccacctcatcctgtacatggtgccggggaggaaccaaccttcattcctcgaaagaatggaccaagtaaggctccgaactgatgagtgagtcaaaggtttcagattgccgcaaatggtttaactttgactcgatctctaccactataacatcacgacaagttgttacaatcataatcgc

SEQ ID NO: 22831 - DNA, 353 bp, Glycine max
  Clone ID: LIB3050-018-Q1-E1-D1
caaacctccgtaacggtgccaaaagaccaccaaaaggggaaaaaattcaaggttaaaaccaggttccaaccgattcttttccaaacaagaatccaaaccccctggtcaaaataaaagggtaaccctccgaaattaaaaatcccaaccttccgaattccttcccaaaataaattaaattgaagggaaaaaaacccattttaaatccaaccaaaaaaggggggaacccattttaaacccaaaaaaggcgaaaccggcaaatcccttcaaccgatttcaacaacagcaccttacctaattaccttaaccctttcaacgggcttggccctgctgaatccttttgatcaataaaacag

SEQ ID NO: 22832 - DNA, 196 bp, Glycine max
  unsure (1)..(196): unsure at all n locations
  Clone ID: LIB3050-018-Q1-E1-D10
ggacacttatggaactgggaagattcctgacaaggagattcttcaaattgtgaaggagaatttcgacttcagacctggaatgatcaccattaacttggaccttaagaggggtggccataggttcctcaagacagctgcttatggacactttggaagggatgaccctgacttcacctgngaagttgtgaagccactc

SEQ ID NO: 22833 - DNA, 404 bp, Glycine max
  Clone ID: LIB3050-018-Q1-E1-D11
gaatctctgaaaccacaattcacaaccgaaacagtttccatctctctcacaaaatgacaacaatatcaaattgctcccttctcttcctcttcctcttcctctccaccctccacatagcttccaccctctcaacccccaccaacttcatcaagtcctcctgcagcaccacccagtacccagccctctgcatccagtccctctccgtctacgcctccaccatccagcaagacccccacgagctcgtccagacagccctctccctctccctcaaccacaccgaggccaccaaaaccttcgtcgcaaaatgcagcagattcagatgcctcaaaccgagagaatacgctgccttgaaggactgcgctgaagaaatcagtgacagcgtcgaccggctcagccggtcgctg

SEQ ID NO: 22834 - DNA, 336 bp, Glycine max
  Clone ID: LIB3050-018-Q1-E1-D12
gtcgccgccaacatctcaggtggccatttgaacccaactgtcacttttggattggccattggaagcaacatcactctcatcactggttccttatactggattgcccaattgttgggttctatagtcgcatgcctcctcctcaatttgatcaccgctaagagcattccaagccactcgccggctaatggtgtgaacgatttgcaagctgtaatgtttgagattgttatcacatttgggttggtttacactgtgtatgcaactgcagtagacccaaagaaggggtcattgggtatcattgcacccattgctattgggttcgttgtgggtgccaacatc

SEQ ID NO: 22835 - DNA, 303 bp, Glycine max
  Clone ID: LIB3050-018-Q1-E1-D2
agggtaataaatggaggatcaaaacaagatactgcttatctatggctactcaggactagtcaactccctgatcacactatatggtaagacttctgaattttagggtccaaacgctatgaactccttctaacaataaatctaataccaggaataaaatgctatgcttagaccaacttcaggtttttagatactgagaaacaccgatatattgaattagcataagacggctataccatatgatactcaactggcggaaacttataccattacactgtctacagtttaatcgcatattgagacttt

SEQ ID NO: 22836 - DNA, 307 bp, Glycine max
  Clone ID: LIB3050-018-Q1-E1-D3
aaaacaacaacaaaagggaagcaaaaccaccaccgccaccaacaacaagtaacaaaaatccaacaagcaaatcaatcctctctctctgtctcccaatcaaaacagacatgggtttgaacgaggattttgagcagtatgctgagaaagcaaagactttgccaccgactcaatcaaacgaagacttgcctatcctttatggattgtacaagcaggccaccgttggacctgtcaacaccagccgtccgggaatgttcaacatgagggacagagctaaatgggatgcatggaaagctgttgaaaggaaatc

SEQ ID NO: 22837 - DNA, 360 bp, Glycine max
  Clone ID: LIB3050-018-Q1-E1-D4
cacgcgtcagttacagctgcgataacgacacaaaggggtcgtaaaagcatgcacaaagttgatgggttgacccctgaacagcgcaagcaaagacatcccaaggcacttcacgagatggcggcactaaaagctgcacatgatgcatgagggaatcatgcatgtagaaccttccatcttggcaatatttcaattagtggttagagttcgacattgttatttgaagacatggaatttatagaatatttaagttgcattaatcgtgcagtatgatgtctgcactaacgtcatctgtgacagatgaatatataactactacaacactgaaaagtgttatcactcaggggctgaatctagatcttg

SEQ ID NO: 22838 - DNA, 362 bp, Glycine max
  Clone ID: LIB3050-018-Q1-E1-D5
gtgtcaaaacaggtaataacattagcagcaatgactcaatctccaaacccattggattcccctttggcatactcaggttccacccatttgttcacagtatccaagagcaactccatcagcatcaatcctcagcatcatgaaagatatcaagctcaagactagtgctatatattttgagttgaggcttggaaattgatttgatttttgtatatatggaagttaattaattctgagaggcttatacttttctttggtgggggtggagacggttacatataatttggataattggtattttatccttgtttgattctctctctgtacataccttcttttactgcttttatccatggtgaaatcag

SEQ ID NO: 22839 - DNA, 234 bp, Glycine max
  Clone ID: LIB3050-018-Q1-E1-D6
cccaggcgtcagtagacgagtgagcggaggcgtgagcgggagcaagattaggacttaaggggggtgtcaacgttcaaaacgtcatgagcgtgttgctttccgtgcttgaaggacgtcctagtgatggcattagggttgatcttgtcattaactcatttgtagtgagatttattcaagcaggaattgaggcaagcatcattattcttatatggggaactcgtttgaaattgaata

SEQ ID NO: 22840 - DNA, 337 bp, Glycine max
  Clone ID: LIB3050-018-Q1-E1-D7
aggggaggaatcgaagtctgttccgttctgatcagaaagggaataacggtaacggagatatggggcttctgtctaacagattaactacagagagcctgaaaccatgggatcacatctactcttggaggactgcttacatatacgctcatcatggcatttatgtcggcgatgactaagtcgttcacttcactacacatgggcacgaagtaggaaccggtactgcactatatcttctcctcatcagttcaggaccagccaagcctcgagaacgttgcccaacttgtacagcaccccacgaggaacacggggttatctcctcaggcatgaactgcttcct

SEQ ID NO: 22841 - DNA, 256 bp, Glycine max
  Clone ID: LIB3050-018-Q1-E1-D8
taacgggcaactgcagtagacccaaagaaggggtcattgggtatcattgcacccattgctagtgggttcgttgtgggtgccaacatcttatcaccaggcccattcagcggcggttcacttaacccagctcgctcattcggcccacctgtggtcagtgcagacttggctgctaactggatctactgggttggcccattgattgcatgacgtttggctggcttgatttatggagacgtcttcattggttcctatgccc

SEQ ID NO: 22842 - DNA, 384 bp, Glycine max
  Clone ID: LIB3050-018-Q1-E1-D9
agacgacagaaggggttcaatctttacccaaagacctggaactatattcaaatggatcgggccacgaggtagtgattgtggtatagtgaatgcaaacatacctacaaatggagctgaaattggtggtgcctttggtggagaaaaggcgacaggtggtggccgtgaagcgggaagtgactcatggaagcaatacatgcggcgttctacatgtaccatcaattatggaagtgaactaccattagctcaggggataaactttggctagaaagctatcctagcacatgaggctgcacaaaataatgcgattttgcagtctgaagagagttctatatataccgagatgttagtctggctgacatgggttcaaagtggtgtcctaacaag

SEQ ID NO: 22843 - DNA, 280 bp, Glycine max
  Clone ID: LIB3050-018-Q1-E1-E1
aaaagacgaccaaaaggggaagaagaaacaatggtaaaaaaaatttgagaaaaaaaaaaataaaaaagggttgaattggtttcctctccctctcccaaaaaacaaactcaacccaatcctcaataatcacctatctaaagatttcttcattcctcactcaatcatttctgttttcatttccctctttgatatcctcgttatcgccgaatcagctaccactaagatattgttttctgatgtaattttcgtcctgttgttaattgactcagttgtctgaatc

SEQ ID NO: 22844 - DNA, 367 bp, Glycine max
  unsure (1)..(367): unsure at all n locations
  Clone ID: LIB3050-014-Q1-E1-F12
gggagctgagctgagaaaacccccaaccccaacctcaaccttaacctctcctcactttcttttcaaccagaactatgattaagctttttaaagtaaaggaaaaacagagagaactggcagaaaatgcgagtggcggaccacccgttaagaagcaaagtgccggcgagttgcgtcttcacaaagatataagcgagctgaatctaccaaaatcatgtaccatgcaattcnccaatggcaaagatgacctgatgaactttgaagtttcaattcgacctgatgatggatattacttaggtggcacatttttgtnttcctttcaagtgtcttccatctatccacatgaagcaccaaaggttaaatgcaagac

SEQ ID NO: 22845 - DNA, 327 bp, Glycine max
  unsure (1)..(327): unsure at all n locations
  Clone ID: LIB3050-014-Q1-E1-F3
ncgggaccaagaggttggccacaagagccttctccagagtgatgctctttaccagtatattctggagaccagtgtctaggcaagagaacctgaatccatgaaagaactgagagagttgacagcaaaacacccatggaacatcatgacaacctctgcagacgaagggcaattcttgaacatgctccttaagctcatcaatgccaagaacaccatggaaattggtgtctacactggatattcacttcgtgccaccgctctcgctcttcctgaagatggaaagatcttggccatggatattaacagggagaattatgaattgggtgtgcc

SEQ ID NO: 22846 - DNA, 316 bp, Glycine max
  Clone ID: LIB3050-014-Q1-E1-F4
aatcatcatatcgtgtataacatatcactacctgttatactatttgattttactgcagcaaagaattcttgtttccttaccattcctctctcctcatgtgccattttttgagatctaaggagtttgattatgctaaacgtaatagtagcactgcataaaactagaagatattaattttgtgtagtgaagcaaaaattgacacaatctgacttaccttgatgccagttggcaaataagagacttactttttcatattttcttcaattcattttatagctggtgaaatttatctgttcatatttcttttaccagtttt

SEQ ID NO: 22847 - DNA, 354 bp, Glycine max
  Clone ID: LIB3050-014-Q1-E1-F5
ggataaccgaaagtgacatggggtgcttgccttcaagcttcatgaatcttagaagacagcgatatctgagagttctagatccgagggagcttcgaatgatagaaagtggctctgtagatgtcatagattgcaaatcattgaagcacgcattggttcttgctgaacaattcaagtatatcagcagtggcgttggcattcagaattaccaaggattggttgaagaatcggtggtggtggcattagatgcaatttcatcaactgttgaaactgtggttgaccattcagagcttatagatgacaagagatatattagtattgatgaaagaaaattgaagccagtgaagagaattgatg

SEQ ID NO: 22848 - DNA, 209 bp, Glycine max
  Clone ID: LIB3050-014-Q1-E1-F6
gatgaggatgaagatgatcaccatgacgaaggactagaaggtgatgcatcgggtaggtcggcgcagaccagctgtgaagagaagactcgcaaggcaatgcttaaacgtgggatgacaccggtcacaggtgtcagtctagtgacactcaagaagatcaggacgagctggttcgtaatctcaaaaccagacgttttcaagagtccaatatc

SEQ ID NO: 22849 - DNA, 315 bp, Glycine max
  Clone ID: LIB3050-014-Q1-E1-F7
ggaggaacaaccatgttccctggtattgctgacagaatgagcaaggaaatttctgcattggcacccagcagcatgaagatcaaggttgtagcaccacctgagagaaaatacagtgtctggatcggtggttctatcttggcatctcttagcaccttccagcagatgtggattgcaaaggcagaatatgacgaatctggtccagcaattgtgcagagaaagtgcttctaaactgtgtcgatagatagggttattgaagggagagactactatcatcacaatttgtctggaagcaatgcattgcagattgtaaccctt

SEQ ID NO: 22850 - DNA, 321 bp, Glycine max
  Clone ID: LIB3050-014-Q1-E1-F8
gaacctccgttatcaaaacgcagccaagtctctgttctgtattctagggtttggattctgagtttcgtttcagtttttgatcaccatgagagctaagtggaagaagaagcgtatgaggaggttgaagaggaagcgccgaaagatgaggcagagatcgaagtagtgtgcttgtttccccagcaactattgctactagttttgtgggatttcagctatgtttttgtttccaaatgttacgatacatttttattggtttctcttgcttttgtcttacctcaagagagatgctcttaccgcaaattaattagatttaatatttga

SEQ ID NO: 22851 - DNA, 350 bp, Glycine max
  Clone ID: LIB3050-014-Q1-E1-F9
ggaattcatcccattcctaattctaatttttttctactctattcaatttcaatttctctctgtgtttcccctctcatcaccatgcttccaaagttcatcattagccccttcagggtggaatcccaagaagggaagcatgtgaacaagagaagaaagcatgtgagatcatttgagagtaccaacatggatgttggtttgagacttctccctcaaattacaagctcaaatagcacatcaaatgtcctcttgaaatctgcagtgagaaaggcaaaccaacaatccatccctcaagacttttgcttccttaaaacttgcaatctatgcaataagcaactcagtccagacaaaga

SEQ ID NO: 22852 - DNA, 258 bp, Glycine max
  Clone ID: LIB3050-014-Q1-E1-G1
gcatatggaggtgaagatgaggcttttttaaggaaagttgtcactcctatccataacgtgattgctaatgaagctgcacgtaccagaaaaggaaagtcaaaacattcacaatggagaaactatgacgatttaaatgaatatttctggtccgctgattgtattcgattacgttggccaatgcgtgctgatgctgatttcttttgcctgccatctgaaaagctggtttttgataaatcaaatgtctgctgcaggagttct

SEQ ID NO: 22853 - DNA, 381 bp, Glycine max
  Clone ID: LIB3050-014-Q1-E1-G10
caaggaggggagcatacagtagcggctcagtgtacgacaagaaccctgatgatgagatccagtctgggcaggtcccagacgatgtgatccaggcggcaacacaatccggcaaatactgggccccacatccacagactggggtatttgggccccccggaggaggtgaccaaactgcttctgccattcactctgatgcgctggaggagaatgcctggtttcgccccaccagtctcgaggatttcgagaagcctcacacccttccttaacaaccattggaggacatcatagtatcatactaaattaaataaacactgtgtcagcctctcatgtgtgtccctggtttccttccctcaactagctgtttaattactcctcaacttc

SEQ ID NO: 22854 - DNA, 377 bp, Glycine max
  Clone ID: LIB3050-014-Q1-E1-G11
ggaagaaggcaaatcgcgaagactagatctgatctgagagaatggctcctcggtctagcagcaaggacgcccaagaccttttccgcgctctttggtctgcttatgctgcaacccccactaatctcaagatcattgatctctatgtcatctatgccgtattcaccgctttcatccaggttgtttacatggctttggttggatcatttccatttaactccttcctatcaggagtactttcttgtgtaggaactgctgttcttgctgtttgtctcaggatccaagtgaataaagagaataaggaattcaaggatcttgcacctgagcgcgcttttgcggattttgttctctgtaatttggtgcttcatttggtgattatg

SEQ ID NO: 22855 - DNA, 210 bp, Glycine max
  Clone ID: LIB3050-014-Q1-E1-G12
gaactacaacgtgagaaacatggcttccttaagctccttagtgctgctccttgcagctctaattctatcccctcaagttcttgcacactatgagaatcccccagtgtacaagcctcatactgagaaaccaccagtttataagcccccagttgagaagcctcctgtttacaatcctccagttgaaagaccctcaagttataagcctccagt

SEQ ID NO: 22856 - DNA, 261 bp, Glycine max
  Clone ID: LIB3050-014-Q1-E1-G2
ggacacaaggaaaaaagaaaaaaaaagtcttaaattgtttcttgttttctctgtcgtttcgttcccttaatctttgatctctgagttacaagttataacaaaagaaataaacaacacatataaatatttgtaagaaaatatatatatgatcatgggttttcgtcacaaactatgggacgaaacgttggcgggtccagcaccggaaaacggtctggggaagctccgaaagtaaaactcgttctccggcggaagctccgttcg

SEQ ID NO: 22857 - DNA, 364 bp, Glycine max
  unsure (1)..(364): unsure at all n locations
  Clone ID: LIB3050-014-Q1-E1-G3
tggggaagctangagaagagaagtgttcccttagaagagtagtgtaaaatggcatcactcaaagctgagaaacctgttgaaaaatcttgttgctctcaaccatctgcaggacaggtgaagaaagagtcttctgccaaacctagttcaggcacttccaaagccccggtctcgaaagcaaccccaaagaaaattccaagccagactaggaagaaggcaagcagcaggaaataagctgaagatgcaatagtgaaaagtacgaaagactaaaaaataatagttgttgcacttggaattatgggaagactcctaaggatactgttatatggtgctcttcaaccatgtttataagtagtgctattaatgt

SEQ ID NO: 22858 - DNA, 361 bp, Glycine max
  Clone ID: LIB3050-014-Q1-E1-G4
agaagaccacaagaagggaaaagaagacggagaaggaagaaaagaaggggtggttgtccattccatagggagagatcatgagagaagagaaaagatgtttgagccgcagcagctatacactcgagcgaagaccgaggaattcgacctcgaatcaggggaaaccctctacccagggctgagcgtcggcgagaaccagctccgatggggcttcatccgcaaggtctacggcatcctctccggccagatggtcctcagcaccctcgtctctgtcaccaccgttttctatactccaatcaatgacctcctcaagggcaattccaccctcctcctcatcgtcctcgtccttcctttcatctttttg

SEQ ID NO: 22859 - DNA, 208 bp, Glycine max
  Clone ID: LIB3050-014-Q1-E1-G5
gacagaagaagaagaagaagaaacgagaagaagcttcttcttggttaccttgacagacagagagtggagcaggcgacaaggcagcgagttggcacattttgtgtttggtggagatgcctagtcggagcttggtagaagtggagccaccaagcccactgagagagttgatcggcgccgccgttatgatgatcggagttgtgttaccagt

SEQ ID NO: 22860 - DNA, 366 bp, Glycine max
  Clone ID: LIB3050-014-Q1-E1-G6
gacaatatataccttctaaacattctcttgcacccaaaccctggaattaagcacgttatttcattagggttggttttgttgaacagaaaaaaagagaaaaaaaaattatgggaagcgatggcgtgaggaaaccaagattcctatgccttcatgggttccgaacaagctgagaaatattgaaaacacagttacataagtggcctcaatcggttctagacaacctcgatctagtatttgtggatgctccttttccttgccttggcaaatccgatgtagaaggcatttttgatcccccttactacgagtggtttcagttcaacaaggaatttacagagtacaccaactttgacgagtggcttcagtaca

SEQ ID NO: 22861 - DNA, 246 bp, Glycine max
  Clone ID: LIB3050-014-Q1-E1-G7
ggggggaaaaagaggaagatcttccggcaagttttcatgtgctaaatggggtcccctgtcaacctgcagggcacaattcttttgatatgggcaactccttgacagcataagatgcaacttcacgctccatgacgttaacttctatccatttaatgcaagcgttgctaagttcctcaattcaaattttcaagtcacgctcagctcgcttaattcgattgagcgcatccgtatttacgataatttcct

SEQ ID NO: 22862 - DNA, 356 bp, Glycine max
  Clone ID: LIB3050-014-Q1-E1-G8
ggcagttgttagcgaaggctgaaagaataacgatggtgggagtggtgatagaagatgaagttgttgttgctccaactaacttttcaatggttgaagagggaatttatcgctctagtttccctcgttcttcaaatttctcctttcttgaatctctcaatcttcgatccatcatatacttgtgccccgaaccctatccgcaagaaaatttagagtttcttcaatcgcaaaatattcggctctttcactttggtattgaaggcaagacggatctctctgtgtctgccgttagagataacatactggaggccgttaaagttttaattgatgtgagaaatcatccagttttaatccactgc

SEQ ID NO: 22863 - DNA, 380 bp, Glycine max
  Clone ID: LIB3050-014-Q1-E1-G9
gaccattgaaaagcctaatggcaatgcttcactgaagactgaaccaggagaaatccaaaagcaaggcaatggcccaaatgaaaaacaagtgacaaacatagaaaatgaaaccaaagggaatggtattcaatcaaagctttcgagttctgagggaaatggcataagggtcataacaatttcaggggaaaacagaggtgcacacatgcaaataaccaaatcccgaaagaaacaacaacaacccattcatcacaagatgggaaattctgatggtgagaaagtgagaacactatcttcgcctccaatgagaggtgtgtacgggaacagcaatgtgcagtgtgtcaacaactcaatgttgttccacactagtttaaccaaccatg

SEQ ID NO: 22864 - DNA, 212 bp, Glycine max
  Clone ID: LIB3050-014-Q1-E1-H1
gagggatcttgtgtagagaggagttgctgttaaggagccatctgctccccatggagttcgtcttttgattgatgactatccttatccttcggatgggctagagatatgggatgccatcaactcctgcgtgtaagaatatgtctcagtctactactagtcagatgaggaacgctcaattgaccctgaactccaagcttggttgaaagaacttg

SEQ ID NO: 22865 - DNA, 376 bp, Glycine max
  Clone ID: LIB3050-014-Q1-E1-H11
gtcttcgatttcgtttcatggaatcgccgcattcatagctcaaaatgcattccttcaaagacaaagttacacagaaactctctcatctctttcccaactccttctcctcctcctcctcctctccccaggatagtccatattctcaagaggataaacctttgtcttcatatttatcttacactatcccttcagtcagctttgatggatcgaagacaaacaagaatcaacgtgaacttaaaccaattcaatcaacttctgctggatataattatgagaattttgagtatcaggatgttccatcggataattatgttgactgtactaacatggatttgttgaaagatgataatgataatattaatgaagatcctatctc

SEQ ID NO: 22866 - DNA, 354 bp, Glycine max
  Clone ID: LIB3050-014-Q1-E1-H12
catgcatcaaattgaaatcattgccatactttgtgaagaagaggaacaaaattccgacacacgtggcactgcaccaaccgctgatctcagcagcagcaatagcagcgtgagcagaagctacagcgaggcgagcctgcttcctcggcttgccacgtggtacaaatccagggacgtggcgcagaggatccttctctccgtggaatgccaaatgaggaggtgctcctacacgcttggtttgggcgagccgaacctagcggggaagccgagcctgctctacgacctcgtgtgcaagccgaatgagatccacgcgctgaagacgacgccgtacgacgagcgcgtggagaaccacgagaa

SEQ ID NO: 22867 - DNA, 221 bp, Glycine max
  Clone ID: LIB3050-014-Q1-E1-H2
tgcgaacagagcctgaagagagcagagagccttccaccagatgggcatgatggaacaagaagcttggagagcccagagaggcttgccggagggttctgtcaacattttgagagcctggcttttcgagcattttctcgacccgtatccaagcgatgcagataagcatctgttggggcgagagactggcctatcgcgaaatcaggtatcaaactggttcatta

SEQ ID NO: 22868 - DNA, 331 bp, Glycine max
  Clone ID: LIB3050-014-Q1-E1-H3
ggagaaaccaagtttgtgctgcacaaaatagaaagcattgatgaggcgaacttgggatacagctacagcgtggttgggggtgctgcattgccagacacggcggagaagatcacattcgactccaaattggttgctggtcccaatggagggtctgctgggaagctcactgtcaaatacgaaacaaaaggagatgctgagcccaaccaagacgaactcaaaactggaaaagccaacgctgatgctctcttcaaggccattgaggcttaccttttggcccatccccaatacaactaatcctcctcaacttacttgttatcactttcttgccttt

SEQ ID NO: 22869 - DNA, 405 bp, Glycine max
  Clone ID: LIB3050-014-Q1-E1-H4
attcccgtctcgacacacgcgtaagtacagagacagaagggggcacacaacactagctatagtaagctacacttatttgaggttggagaaatatggctaaagatgttgaggttcaagagcaatgaggagagtactctgcaaaagactaccatgaccctcctccagcacccttgttcgacccagaggagctcacacagtggtccttttatagagccctaatcgctgagttcatagcaacccttctcttcctttatgtcaccgtgctcaccattattggctacaaaaggcagactgatgccacgctaggtggcaccgagtgtgatggggttggcattttgggcatcgcttgggcctttggtggcatgatcttcatccttgtttactgcaccgccggtatttcaggag

SEQ ID NO: 22870 - DNA, 339 bp, Glycine max
  Clone ID: LIB3050-014-Q1-E1-H5
gggattttggtggatcgttatgaggagatgattgagaattatcacccggggcttggggatcatacgtggcctctggtgacccattttgtagggtgcaaaccttgtgggaagtttggggattaccctgtggagatgtgcttgaagcagatggatagggcctataactttggtgataaccagattttgcagatgtatgggttcactcataagtcgcttgctagccgcaaggtgaagagggtgaggaatgatactagcaaccctcttgaggttaaggatgatcttggattgcttcaccctgctttcaaagctatcaagctcccttcgtcttgataagatcga

SEQ ID NO: 22871 - DNA, 354 bp, Glycine max
  Clone ID: LIB3050-014-Q1-E1-H6
ggcattgtgaaatcaacagagaaacatttcactaatagagagacataagcataatattgagaaataatggagggttgtacttattgtgtgaagttgctatgccttgttgggtttgtggtgcttgtgagtactattgcaggggtggagagtgctggtgaatgtgggaaatctaccaccccagataatgaggcttataagcttgcaccatgtgcctcagcagcacaagatgagaatgctagtgtttctcagagttgctgtgctcaggtgaagaaaattgggcagaacccaagctgcctctgtgcagttctgctctccaacacagccaaaatggctggtgtcaaccctcaagttgct

SEQ ID NO: 22872 - DNA, 57 bp, Glycine max; identical to SEQ ID NO: 12752
  Clone ID: LIB3050-014-Q1-E1-H7

SEQ ID NO: 22873 - DNA, 332 bp, Glycine max
  Clone ID: LIB3050-014-Q1-E1-H8
actgacggctggtgtcataagtcatcgatctgatgaccggcagctagcgttggcgaggacacttgatgccttgattgaagggacgccatcccctgagacagattcatgcctctcgtttggtccccgtgctccaaagtctggttcaggagcatgtagcaggcatgtgcaaggaccatttattgaagcatttgtgttcacgatctggtggtaggaattacgttgaatattgtagtctgcaagagcttgcacaacatcatcagccatccagacatatgatatatcgaagattatacatgctaactggagttgactttgtagatcagctaacattg

SEQ ID NO: 22874 - DNA, 274 bp, Glycine max
  Clone ID: LIB3050-014-Q1-E1-H9
gtcttctgaaaaatcaactctgaatcccaatgcaaaggaattcaagcttaaccctaatgcaaagagttttattccatcgcctgctcggcctcccactccagtgtctgatggttccttctattttccaactaacgtaactactgtaccaagtatgccacgcatgcccgtgggtattggaattggatctacttttgctgggccacaccctatcatatataatcctcacgtaacacaaatgccgtctcaaggatattttcatccgaactgcacccca

SEQ ID NO: 22875 - DNA, 399 bp, Glycine max
  Clone ID: LIB3050-015-Q1-E1-A1
gggtaaccatgtatggaatatggtgcttcatcacggtcctgttgttctccccagtggcgttttcggaactgtgcaacccacaggacaagaaagtgttgctccaaatcaagaaggacttcaacaacccttacctgctagcctcctggaaccctaacaccgattgctgcaactggtactgcgtccagtgccaccccgaaacgcaccgcatcaactccctcgtcatattatcctctgttccccaaaccaatttatccggcccaataccaccctccgtcggtgacctaccttttcttgagacccttcaattccacaagctccctaaactcaccggcccaattcagcccactatagccaagctcactaaactcaaggagatctacatcagctggaccaatgtct

SEQ ID NO: 22876 - DNA, 368 bp, Glycine max
  Clone ID: LIB3050-015-Q1-E1-A10
ggtgactgaaaaaaggttttagatcgtagtaactaagcactacgaaagcacgagatatcgaagatggctctgcccaaagcgaaggagatcgtgtcgtccaattccgtcgtcgttttcagcaaaacctattgccctttctgcgtcgatgtgaagaagctcttcggtgacctcggtgccaattacaaggccatcgaactcgaaactgactcggatggaaaagagctccacgcagcattagttgaatggacggaccagcgaagcgtgcctatcgtgtataatggtggaaaccacattggtggctgtgactcaacgactgccctgcacactcatgggaagctggttcctctgctgatatctgctggagctgt

SEQ ID NO: 22877 - DNA, 388 bp, Glycine max
  Clone ID: LIB3050-015-Q1-E1-A11
gactatgaaaatgaagttgatgattaatatcgagaggatgagcatgatgacctttcttcctcctacaaatctgattctgataatggacatgacttgtcagataatccttcctggttaaagaaaatacagagaactgtacgcaatatttttcaggttgtcaacttagtccacgctccagtgaaccagacagatgctgcccatgtacacaaggaatatgatgaatcaagtgccaagttgtcgaaattacagtctaaaatatcaattctgaatctatatctaaaacatgattttggtccagcaaatgagttttattcattctatgatcattgcgttaagggcattgagaagaatacacttacaaaagctgcccctataagcaggcttctca

SEQ ID NO: 22878 - DNA, 304 bp, Glycine max
  Clone ID: LIB3050-015-Q1-E1-A12
gacctcaagatacagttgtcaataccttacaaaaggctgaagcacaaagtcgattcatcacttcatttttgagagagactgggatggcttcacctatcaaaatcacactgaagagttcagacggtgaagagatctatgtgcaggacgttgcaggtggggagtctcatacaatcacgcatatgatagacgaaaactgcgcatactagcgcaatgcatctcacgaatgttatgccaaatagtctggattatgttctcgagtattacatcagacacattgacgcgaactgcacttaggacaagccca

SEQ ID NO: 22879 - DNA, 88 bp, Glycine max
  Clone ID: LIB3050-015-Q1-E1-A2
cgggattcacacaaacgggacaagatatatatatagaagagccttccatatatagcctctcaaaaaaatggaagagttacaactcctt

SEQ ID NO: 22880 - DNA, 413 bp, Glycine max
  Clone ID: LIB3050-015-Q1-E1-A3
acaaaggggggaaattgatcccacaggattggcagaaaaaaacgctgccattctcaacaagggcctcccaaaagctattggaaccacaaccaatggaacccccgcaagttgcagcacgtcagcaacagcatcctcaaccctgaacttcccttctcctttcatcagatgctgtactatggttgctacaaggattacagtcacgactcacccgcttggatacccaagcgggaaagtgctgctttgactaatgtttggcagttgctagagacgaagggtgaagagtttctgggttcggcatataaggatcctattacaagctttgatgatttccagaaattttcagtctcaaaccctgaggtgcaaccgattttacattcatctgggatgttaataagatttgctagcacactttc

SEQ ID NO: 22881 - DNA, 124 bp, Glycine max
  Clone ID: LIB3050-015-Q1-E1-A4
ccaacacttcagcgaaggcttcattacggatgcaatagcacgacaaaaggggaaccaccattacctccctgacaatctgcagtctgtgcatccaccattcaggggctaccttaaggatatgctg

SEQ ID NO: 22882 - DNA, 387 bp, Glycine max
  Clone ID: LIB3050-015-Q1-E1-A5
tgcctaccacaaactacaagatgcaggagcagttgctagttctgctgccgcaaagatctatggcttgaatatacttgatcaagacattcaggatgatagtgataatgtcacccgatttttaatgttagcacgagaacctatgagtcctgacactgatacgcgatttacgactagcatagtattttctttaaaaaagggtcctgggatacttttcaaaccccttgcggtttttgctttgcgccaaattacccttacaacaatggaaggctccccttggcgcaacaaccttcaacgagcatatgataccaacatttccatatactttgaaaaccttttctatgttgattttgacgcaccagtgggcagcacagagtgcacagaatgccc

SEQ ID NO: 22883 - DNA, 165 bp, Glycine max
  Clone ID: LIB3050-015-Q1-E1-A6
tggaagaacgaagctgaagtcatagaagacaagaaggaactggcagtgaccgcagacaagaaggaaattgaactaacacatgagaataacgaagctgaactcatacacgagacgacggaagtgcaactgacggacgacaagaacgaccttgaactaacacaacag

SEQ ID NO: 22884 - DNA, 311 bp, Glycine max
  unsure (1)..(311): unsure at all n locations
  Clone ID: LIB3050-015-Q1-E1-A7
ggcgccaatggagttttgttctgagaattcgaatctaggatttgtttgagcgttcgcgaaggatcatggtggggttcagaaacagatacatggttatggaggtttttctgaaccctaatanggacaaaggtggggatgattctgttatagttacacagtttaatgtctccaaagctgtaagagacagcatattggtgaattttggggagtgtggtttggcttcgtcattgggatcgtttcagggaagtataacggcttgtaaaaatgctgccttgaaatgtgaggagtcaaaatttgagcagtacaaactc

SEQ ID NO: 22885 - DNA, 206 bp, Glycine max
  unsure (1)..(206): unsure at all n locations
  Clone ID: LIB3050-015-Q1-E1-A8
gggatcaatcacattatgtcctttgcaatcatctccaatgtatggatgaacaatcaccaaagatcagaggcttcatcacaagcatgtgtcagtantccttccgatcctcggaattctcagcaggagagttgcagtgaagaatcactcactgttacgtacactaatgtcacccaaactttgattaatggtacattgaggtacattgg

SEQ ID NO: 22886 - DNA, 389 bp, Glycine max
  Clone ID: LIB3050-015-Q1-E1-A9
ggagagaaaaaatggccagatcaatcaaattctttgggttgaacacatgggccaagattccttctcttgggttagggacttggcaagctgaacctggtgttgtagctgaagctctcaccacagccattcaggttggatacaggcatattgactgtgctagtgcgtataagaatcaagcagagattggttctgctcttaagaagctttttgatgatggtgtggtgaagcgtgaggacttatggatcacttccaaactctggtgttcagatcatgcaccagaagatgtgccacaagcattggataaaacattacaggaattgcaacttgactatcttgacctctatctgatccactggccagtccgcatgaaaagtggaacatttggactc

SEQ ID NO: 22887 - DNA, 434 bp, Glycine max
  Clone ID: LIB3050-015-Q1-E1-B1
aagaggacgacagaaggggggactgaaaattggggaactcacataaggggcacccctgcggttccaagcagccacccagataacaaaaaagcagctttacaaagtggacaacctcaaccagttcaatactaccatgaccaacatcaacatccctacgtgcaacatagcccagttgacaaaccaagcaacagtcccatggagtcaatccttaacatgttcgattcatggagcaaaaaagctgaagccaccgcacacaacgtctggcacaaccgtgagtcttcctagctactctatttcatcctagttcaagatgaaactctcaataaaaatagcaaatttagtccctatttttacctttgtctttcatataataccatgaattagattaatcaatggtgtcaattttaataaaacattgggaaagacaaattttg

SEQ ID NO: 22888 - DNA, 345 bp, Glycine max
  Clone ID: LIB3050-015-Q1-E1-B10
gatacttagatcttcttccttcactcaatcaagttttgactttatttggagtttctccaaaatgagccggccaatggaggaagatactgtgggtaagaatgaggaagaggagttcaacactggaccgctgtccgtactcatgatgagtgttaaaaataatactcaggtactgataaattgtcggaacaacaaaaagcttctgggtcgtgtaagggcttttgataggcactgcaacatggttcttgaaaatgtgagggagatgtggactgaggtgccaaaaactggtaaaggaaagaaaaaggcccagccagtcaacaaggatagattcatcagcaagatgttcct

SEQ ID NO: 22889 - DNA, 329 bp, Glycine max
  Clone ID: LIB3050-015-Q1-E1-B11
gaaacgtagctctgccatgttcagtcagggtcgtcttcactgaatcagcggcttatgctttgcaaattttcatttctctgagaatgctataaggtacaaagattccaattattcgactcagtaactcgctatatctaatcagtatccatatcttacagcgattcgagagttcagaacatgcatgcattcatcgcatctgcaatgggtataatcatgagtacattcacgttcaatgcatggatacccattagggtttacatagctcagatttatctaatccctatcatcatgaagttagctgagactgccttgttacatgcgatgcattc

SEQ ID NO: 22890 - DNA, 361 bp, Glycine max
  Clone ID: LIB3050-015-Q1-E1-B12
catggaagttgagactgtcccatctgaagccaaacttttgccaccaaagccaaagtttgagcctttggagcctcatgagatgtctgatggtcaggtacagttccgcaaggtgaatgttccatctcatcgttatacgcctctcaagaaagcttggatggatatctatagtcccatatatgaacaggtgaaaattgatgtccgtatgaatttgaacgctcgtagagtggagctgaagacaaggcctgatacacctgatattagtaacctgcaaaaatgtgctgattttgtccatgctttcatgttgggttttgatgtcatagatgccattgcgcttctgcgtttggatgagctctacattgag

SEQ ID NO: 22891 - DNA, 351 bp, Glycine max
  unsure (1)..(351): unsure at all n locations
  Clone ID: LIB3050-015-Q1-E1-B3
aaaagaccaccaaaagggtacggttccaaaattccacccaaaggttacgcttcccaaacaacaccagaagggtaccgttccaaaaaaaccccacaagggtacggttgcaaaaatacaacaaaagggtacggctccaaaaagacacaaaacggtacggcttcaaaaaaacaactcaagggtacggctcccaaaacacgatcataaggctactgctttctantaagacgacatcacngggtacngcctgcgaagatataccatcagactgggattgtgcccaattcatcctttcttttcattacatacgcacaacccactttactccctctttcacataaagaattttgatat

SEQ ID NO: 22892 - DNA, 322 bp, Glycine max
  Clone ID: LIB3050-015-Q1-E1-B4
ggacggcaaagacggaggaaaggtcgcaaacgcgaaaatggtgaagtttctgaaaccaaacaaggccgccattgtccttcagggacgctacgccggcaagaaagccgtgatcgttcgaaccttcgacgaaggaactcgcgagcgcccctacggccactgtttggtggcggggataaagaagtaccctgcgaaggtgatcaagaaggactcggcgaagatgacggcgaagaagtcacgcgtgaaggcgttcgtgaagctcgtcaactaccagcacctcatgcccacgcgctacacgcttgacgtggacttgaaggacgcggtt

SEQ ID NO: 22893 - DNA, 369 bp, Glycine max
  Clone ID: LIB3050-015-Q1-E1-B5
gatgatgacagcttaaaagagaagattgcagaaatgaacacagaattgctgaaacaaaaggcagaaatgctggaggagtattttggcattcatattgatgagcatggaaatgtctctagacttcctgtgatacttgaccagtacacacctgacatggatcatgtccctgaatttgctctttgtttgggcaatgatgttgattgggaagatgaaaagaattgcattcaagcagtttcagctgctttgggaaacttctatgctatgcatccactgatgttgcccaatccgtctggtgaaggtttgcttttttacaagaagagaaaaatgatggatggttatgctgaagagaatacctgtgataatactggg

SEQ ID NO: 22894 - DNA, 342 bp, Glycine max
  unsure (1)..(342): unsure at all n locations
  Clone ID: LIB3050-015-Q1-E1-B6
ggagagaatagagatccagtcaaaacaatatctttctctctctgtttggtttggcctcttgctgtaagaagccagccacagtactgttgcgctcctgtggaancatcgatgggcttttacaggttcacatcggttgagctttgtgtcagatatgcaaatagtgttatccttattcttgtgatatacaagtttgtatgatcatattttctcggattgtctagcaagtttagctcaattggacgttgaacgaattattataaatctattaagattatcttcaatttctacgagaaaaaaatattttatagaattttgagattatgggtagaagtataggaaaag

SEQ ID NO: 22895 - DNA, 327 bp, Glycine max
  Clone ID: LIB3050-015-Q1-E1-B7
gaattgtaagagaaagagaaagcccagatcacagaagcagaggaagagagagaaacaccagagatgggtcttttctttggttgcttcggcgtagacaaacgcatgagcaaggaagaagagagattggcctctgaagaagcgcgtgccaaagctgctgaagccgcacagaaaaggcaagagcaatttgagaattctgcagcaggacgagctgctcgtgcacagcaacaagcaatggcaaagcaatctgcaaataccaacaaaggcgaaccagttctaaagtggcaaatgagttgaggttagacattctgtcagttggagttaactttt

SEQ ID NO: 22896 - DNA, 390 bp, Glycine max
  Clone ID: LIB3050-015-Q1-E1-B8
gatccacaccaagaaaaacagaacaaacatgacaccaaccaaagtttcagtttctctctattctaacgttgttgactggcagtagatctggcaaatattacgatggaagagaatatggcgattcaagaagcagcttccgctgggttgaagagtatggagcatctgattcgcgtcctttcttcacaaatcccttctgcatcgtcatcatcttctaatgcacagcaccaccgtcttaatctcaaccaccttgactgcgcggaaatcaacgaacttcacggctccaagttcaaataagtcaacaacttggttaattgcaacgggcaagctcgcattcgttgcgcaacttcacaaccttccccatcaatttctccctctcaaacttaaacttaa

SEQ ID NO: 22897 - DNA, 392 bp, Glycine max
  unsure (1)..(392): unsure at all n locations
  Clone ID: LIB3050-015-Q1-E1-B9
gacaacaaggatgtcaggcatgatcgggatagtcataatgatccgaaaggtgacaccaagacagagaaagatggttataatgtggttagcagccacttgaattggaaagattcaaaagagtaccatagaggaaaaagatattctgattcccctggtgggaattgggacacatggcatatgtcacgtggaaatacacaaggctcagttgaggttgggaaggagagttcagcagcaggagaaagagatcatgttgaagctcatgaagctgtttgtgagaacaaagttgatcctaaaggtgatgatagatctaaagagaaagatagaaagaggaaggatgtgaagcatacggaatggggagatanggaaaaagaaagaagtgatcgtagaaacag

SEQ ID NO: 22898 - DNA, 299 bp, Glycine max
  Clone ID: LIB3050-015-Q1-E1-C1
caacagaaggggatcccaaatttggtggtttaagttccggaaccaatttcaaattcatccaaccagccactggattcttggaaagcatggacactcagaaaattcaacctgaaaagcattcttcatcaactgcaactgccccatctgttacttaatgtcgaaagaagaagaatgaagaagctgctttcttggacgatttgaaggaccacattgatgagtttattaatgcttctatggatgaacacaaaacttgttttaagaaaacaattcagaagatgtttggtatgtccaaggctgtt

SEQ ID NO: 22899 - DNA, 282 bp, Glycine max
  Clone ID: LIB3050-015-Q1-E1-C11
cagggggcctaatagtgtgtccacataactatactaaactaataactaagggagtcactcccacattttgataattaatcattattatatatatatattgttggcttactagttactaccataccatggacagtgattctcagtgtatgcccattttgtacctatatttaataagttgttatagtatatattggtaacctatggctctattaactgagtgtatgataatgcgttaggtcttatggtttgctttgttaatgtttattacatctctatcatcat

SEQ ID NO: 22900 - DNA, 347 bp, Glycine max
  Clone ID: LIB3050-015-Q1-E1-C12
gattgatttcaatccaaagcaccaaatccccaaagcaaaagtgctactgtcttagaaagagagagagagagactgcgtttgacgccaagagagagaaaaaatggtgaacttcatgttgatgattagtgcagaccttgagaacctcaccaatctccaaccccaaggtggctgcgacgaccctaacttctcttacctcttcaagttgaaatgcggaagatgcggagaactgagccagaaggaaacctgcgtcgtcctaaacgacaccgttcctctccccgttgggaagggcaccactcatctcattcaaaagtgcaaattttgtggcacggatggcactgtgaccatga

SEQ ID NO: 22901 - DNA, 337 bp, Glycine max
  Clone ID: LIB3050-015-Q1-E1-C2
gaaaatcaattgggaaaaaggcaaaggggatcgctgaaatcaattactctggttgtactgggaaaagatgagaaactgagaatgggtggtgggtgcaagtgtttggtatccttggtgttggctttggtgttgatgaggaatttggcggaggcgcaatcgggcagcagcagcagctgcgctcaagaactaattcgatgtgtgaactttctgaatgggacaatcaatccatcaagctcttgctgtgaccctctcaaacataccgtggaaatacaactggattgccgctgcaacatcttcttcagccccggcttgcttcaaagcttcaacgtctctgttg

SEQ ID NO: 22902 - DNA, 275 bp, Glycine max
  Clone ID: LIB3050-015-Q1-E1-C3
ttggttgggggttcaacttttttggaacctttgattttgggtttgtggttgatcaggatttgggcggatgcccaatcgggcatcagcaccagctgcgcccaggaactaattccatgtgtgaactttctgaattggacaatcatcccaacaagctcttgctgtgaccctctcaaacataccgtggaaaatcaactggattgccgctgcaacatcctcttcatccccggcttgcttcaaagcttcaacgtctccgttgattaagctctcgctctcag

SEQ ID NO: 22903 - DNA, 380 bp, Glycine max
  unsure (1)..(380): unsure at all n locations
  Clone ID: LIB3050-015-Q1-E1-C4
atcaccttctcaacaacccaaatatattccgttaatgaaaaagcggtagccgctagagcangagattgaagggcgaaaaagaagactgagagaagagagatgggcgtgaccaaggaagaagttgaatcatccttgaaggccaaactgaacccttctcatcttgaagtggttgatacatctggaaggtgcggtgcaagttttgtggtggagattgtatcagaacaatttgaaggcaaaaggctacttgagaggcatcgaatggtgaatgctgccttagaggaagaaatgaaacaaatccatgctctctctattaagaaagctgttaccccagaccagtggaaacaacagcaagaatcaaccaatcaaatcctgctgcctaa

SEQ ID NO: 22904 - DNA, 346 bp, Glycine max
  Clone ID: LIB3050-015-Q1-E1-C5
gaaagaggtttggcatgttgctgatgttccaaagaatgataaattccagtatacatactttgcacataaaataaacagctttgacactgcccctaaaaaattgttggcatcagactctcgtttacgtccagatagatatgcacttgagatgggtgatctatccaaatcaggggcagaaaagagcagtttggaggacaagcaacgcactgaaaagaaaatccgagaagccaaagagcataaatttacaccgagatggtttgatttaactgaagaagtgacatcaactccttaaggtgatttggagatctatcaatacaatggtaaatacaccgagcatcgggctgct

SEQ ID NO: 22905 - DNA, 285 bp, Glycine max
  Clone ID: LIB3050-015-Q1-E1-C6
ggaagaagttctgcactgaacccaaatgcacctctattcatacctgctgctcttcggcaggtggaggatttttcacctcaatggtgggatcttgtgaaatcttcaacatggtttcgtgattattggttgagccaacataaggaggaagaatttgaagttgccaatgactctagtaatgatgatattgagaatatgctctcagaaacttttgatctaggcatggaagaagacttcaatgttctagagaacgagtttgagcagttggtgatgtcctctgaagctcta

SEQ ID NO: 22906 - DNA, 325 bp, Glycine max
  Clone ID: LIB3050-015-Q1-E1-C7
gacagatattaacaaccatatctattcttacaagttacatccattgagaaacatgaaggtctcccccttagcattttcaatcctttttttgtccttcaccatagaactcttcattggcattgcttcagcagcacaagaagcagtgcttgacacctcatgccagaagctgagaacaggtgtcaagtactacattctaccagtcttcagatgcagaggtggaggcctaacactttcaagcactggcaacaacatatgccccctctttgtggtgcaagagaagcttgaagtctcaaaaggcaccccagttaccttcacaccctacaat

SEQ ID NO: 22907 - DNA, 331 bp, Glycine max
  Clone ID: LIB3050-015-Q1-E1-C8
ggtcaccaattagcgccttaacatgttcctcgcccttaccactctgtcaacgccgtaatgtctctccgttaccactgccagtccttgttcagtgcttgacaacgatggtgcacactgagaattggctcagcctcagcttcggcagtgattggaacgacacgccatggccttgcatgaagtgttgtgtatcatgctctacgcgtcatcagggtctatcgtgtccgtctaacgattacattttcgtagacccttctgagctccagttgtgtggtgcttgaaaggttctgatcgatggtgtcatcactatgagattcgtactctgaaatgcccc

SEQ ID NO: 22908 - DNA, 380 bp, Glycine max
  Clone ID: LIB3050-015-Q1-E1-C9
ggagagaaaaaatggccaaatcaatcaaattctttgagttgaacacaggggccaagattccttctcttgggttagggacttggcaagctgaacctggtgttgtagctgaagctctcaccacagccattcaggttggatacaggcatattgactgcgctagtgcgtataagaatcaagcagagattggttctgctcttaagaagctttttgatgatggtgtggtgaagcgtgaggacttatggatcacttccaaactctggtgttcagatcatgcaccagaagatgtgccaaaagcattggataaaacattacaggaattgcaacttgactatcttgacctctatctgatccactggccagtccgcatgaaaagtggaaca

SEQ ID NO: 22909 - DNA, 402 bp, Glycine max
  unsure (1)..(402): unsure at all n locations
  Clone ID: LIB3050-015-Q1-E1-D1
ggaaccaattatggcataccctcaacttcaaaaggtggaacctaatgtgcacatcaaggcttctgctgatcagttccataatgttttatgcaacaggacacaccatattgccaacattttccctggaaaagtacagtctgttgaaattcataaaggtgaatggggcactgagggatccgtcatctcctggaattatttacatganggcaaagtttgtgtggctaaggagatggttgaaggcatagacatgaaaaacaataaaatgacctttaaggtcatagagggagacctgctgggacattacaaaagcttcaagtttttaatgcaagttactccaaaggaaaagggaagcgttgtgaattgggttctggaatatgagaaacaaaatgacaatactcctga

SEQ ID NO: 22910 - DNA, 397 bp, Glycine max
  Clone ID: LIB3050-015-Q1-E1-D10
gactacatcagaattcacaacacaaaccaaacttgccattcttcacaaaaccacaaagcatggcatcaaaactactactaagcctttctctgctactcctaactctcaccctccacacgtcttgcaccaccgcacttgccaaacgaaccaacccaaacccaacaataacaacaacaacagacttcatcaagtcctcatgcaaggccacgcgctaccccgccgcgtgcgtgcaaaccctctcgggccacgccagcgcgatccgccagagcgagcagcaactcgccgtcacggctctctccgtgagcgtgtccaagacgcgctcatgcgcgtcgttcgtgaagagaatgggctccgtgaagggaatgaagcccagagagtacaacgcactgcgtgactg

SEQ ID NO: 22911 - DNA, 353 bp, Glycine max
  Clone ID: LIB3050-015-Q1-E1-D11
gactacatcatacttcacatcacgggctacagctgctattcatcacatttgccaaaagtgcatggcagctaaacgactaccaatcctttctctgctattcataactctcaccctccatacgtcttgcatcaacgtacatgcctcagtaaataatccaaacctaacactaagacctacaacatacgtcatcaagtcctcatgcactgccatgcgctaccccgccacttgcgtacatacactctctcgtcactccatcactatgcgacagatcgagcaacaactcgcattcaaggttcacttcgtgatacatgtaaatactctcttatgaacgtcgatcgtgaaaagaatgggct

SEQ ID NO: 22912 - DNA, 376 bp, Glycine max
  Clone ID: LIB3050-015-Q1-E1-D12
gacacaaaagggtatctaaagaacacaacattggagattatggagctagaaccaaagaaaggaccggttcatgatcaatacgatgatcttgttggttctttttcttcttcttcttcttcaacatcatcttctgtttctggaatttcaagtgggtcatcattggaatctgattcttttgaagaagtaacatcctctgcctcctcttcttcatcatcagcagctgatgatcaacttgtaattgtaactgatccattgggtgacatgacttctctctttcaacaacttcccatcaagagggggctatcaaaattctaccagggaaagtcacaatctttcacttcactgacaaatgtgaggaacttggaggaccttgcaa

SEQ ID NO: 22913 - DNA, 373 bp, Glycine max
  Clone ID: LIB3050-015-Q1-E1-D2
ggcaccaatattatcaaaattcgtgagagctaattcaatcaaaatgcgtcccaaatacaagctaatgctgttgatagcattggatttggatgcaacctcccttgctggtcgcacaaatgaacatcctaagcatcctccatcccttcaagaacaacaacacaccccacaccttgatagctacccgcatatacatataccacctcatcctgtacatggtgcccgggatgaatcaacctccagtccacgatagaagggaccaagaaggcccccgaactgataactgagtcagacgtttccgattgtgcatgcgtcaaatggtttaactttgactcgatctctaccatcacaacatcacgatatgttgttacaaaca

SEQ ID NO: 22914 - DNA, 150 bp, Glycine max
  Clone ID: LIB3050-015-Q1-E1-D3
caaaaaaccaacaaagggggaccccaactaacacctttccagagaagtaatttaatccttcaaacccatttaataattcaaaatgggtattttcccatttgaggaggaaacaacttcccttgtggccccagcaacgctttaccaaactct

SEQ ID NO: 22915 - DNA, 349 bp, Glycine max
  unsure (1)..(349): unsure at all n locations
  Clone ID: LIB3050-015-Q1-E1-D4
gatgggggttaataatgcagtcaaggctggatctgttgaggtagcacgaagacacgtatacattgaagagcggagaccaaacagtaacatcccttcacgacgaggaangangggtagaggtangagtagctatcaattatcagaggcacaaagaggacgttttggtccaaggagcttttgcaggggaagtggccaagatggaggtgaatgggagtataacaaacccaaaggaaacggtttctatagacaaagtacccgtcaagagaggggatattcttcaaggtatcaagggccaagaaatggtcagaaccctgcccaatcagcataaagttttaagagaaacaaattt

SEQ ID NO: 22916 - DNA, 374 bp, Glycine max
  Clone ID: LIB3050-015-Q1-E1-D5
gatgtgtcaggtgacaacactggattccaagaggatgatttccctggcatggactgcggcaatgatacagtaaccaatgaggatgattggcaactcttataaatgtgattgccggactatgacatggattcaaagtacaggtcaaaaatttgttgcttgattctcatgggcctaattgccactgcaagtttggttgatccctggcatggggattccactcttcaaacattgtttaatagtcttatagaaagtaatttaaattcattatgattctttggcttaaaatcatttgctcatttgttcgtatagctaaccaggtaattggtggacattaacaacggcaatttgattaaaattggtggccggtacccttt

SEQ ID NO: 22917 - DNA, 123 bp, Glycine max
  Clone ID: LIB3050-015-Q1-E1-D6
agatccattagttagattaacgcggtgatcttgcaagtgtggcgggggaagagggaattcccataacaccttttcgtggcctgcaggtgtctcaagatctgagggccttgatgacatttgcga

SEQ ID NO: 22918 - DNA, 377 bp, Glycine max
  Clone ID: LIB3050-015-Q1-E1-D7
gacctcagctgtgattgcaaaggttcataccattggattggactgtagagctccttaaaactgatactttacttgcaggcatgcgtgccaattggtatggattattaaggaagaaatttaaggatacatttgggcatgttggtggagtcatcttggggggattagtgggtcttaagagaccagaaaatcatggtgtcacatactctctaacagaggaatttgtgactgtttatagaatgcactcactcctatctgataacctacagctaagagacatatccgctactccaggatccaacaaatctcctccattagtcaaagaaattcctatgaagaaattgattggactgcaaggagaaaaaaacattatctgaaat

SEQ ID NO: 22919 - DNA, 340 bp, Glycine max
  Clone ID: LIB3050-015-Q1-E1-D8
accacgcgtccgtattcgagcggccgcattatatattgttgatttcacttgttattgctttgatcaggacaatgacagttcagttcagcacctaataacagttacatgacttacaagcatacttgacaattgatcagtatcattatcgaccaaatttagtgagcacatcgtgtatatttgcagaatcagcatagcgggataattgcctatagacagagcagtaccacatagtgtcaaaaagtcactatgataggaatttgagactgtgtaaagtatcaactcatacatacctgataggcgacatttaagacactgatattagatttgacaacacaacaaa

SEQ ID NO: 22920 - DNA, 368 bp, Glycine max
  Clone ID: LIB3050-015-Q1-E1-D9
gtcttccaggggatggattggaggagcattttgtaatacaaatggaaggtgttaacatcttggctgtcagttatggtgccccaggggcttgcccttatccccgacaactgaagcttcctggaaagtggtctttcaagtcacacacagttctaaaaagcagtgaacaggcaccaagagctccaatatttactgaagaggcacttggcgggctggagggagacggtgaggctgtacagccaatagaaaggtccttttgggctaaatactggatgtacctgatcccgcttggactcatagtaatgaatgctgttactcaagctatgaatatgcccgaggaacaagctggccgacaacctgatgctccggca

SEQ ID NO: 22921 - DNA, 223 bp, Glycine max
  Clone ID: LIB3050-015-Q1-E1-E1
ccgggtcaacccagccttccgacggcccaagagaacaacaaaaggggttctgtggaaaattgggggttttcccaccactttggcttccattggaaccatggtttggttgcaatctaaaccccctgttgaaaagcaaaaaaggttgtccctgttgatggcttcggccttgtttcagggcccttccattggacctctgattgatttggctattgccattgatcct

SEQ ID NO: 22922 - DNA, 394 bp, Glycine max
  Clone ID: LIB3050-015-Q1-E1-E10
caacaagaggtatggtgctgccaaaattttcagtcaccctgatgtcactgctgaggaaccatggtatggtattgagcaagagtataccttattgcagaaagatgtaaattggccacttgggtggccccttggtgggtttcctggaccacagatgcacattacaaagcttgtatttatgctggcattaacattagtggcatcaatggagacgttatgcctggccagtgggaatttcaagttggtccttctgttggtatctctgctggagatgaggtgtgggctgctcgctacattttggagaggattacggagatagctggagcaattgtttcatttgatcccaagcctattccgggagattgggatggagctggagctcactcaaactacagca

SEQ ID NO: 22923 - DNA, 352 bp, Glycine max
  Clone ID: LIB3050-015-Q1-E1-E11
gactgctcaaactctctctctctctcttctcttacacacacaagcactacaacattttctttggtctctcattttctctatagctagatgggttctggtgctttacaacttcttctgatcttgggtcttctggctagctcatgcttagcacaagccccaggtgctgcacccacacaaccacccactacaaccccatcaccaccaccaccaagatcagcacctgcaccagcacccaccccgccagcaacaccaccaccagcaacaccaccaccagcagcagcaactcctccaccagcaacatcaccaccagcaacaacaccaacgccaacaccaacagctgcacctacacctg

SEQ ID NO: 22924 - DNA, 347 bp, Glycine max
  Clone ID: LIB3050-015-Q1-E1-E12
agggacacatgcaaacactaatcataagccacgcacttaaccctatcttcttagttacatatttcaattttaaaactccaattacaatgatccttccaaacatcaaagttcgttttttcttactcttttgccttattgggatagtgtcagctcagttatcctctagcttttatgccaaaacgtgtcctaatgcactttcaaccattaaatcagaagtagtgtctgctgtgaacaacgagcgtcgcatgggagcctccttgctccgtcttcatttccatgattgctttgttcaaggttgtgatgcatcagtactattggatgatacatcgagtttcacaggtgagaag

SEQ ID NO: 22925 - DNA, 411 bp, Glycine max
  Clone ID: LIB3050-015-Q1-E1-E3
caaaagaacaacaaaagggagacctgaataataaaaaacccataataattgcctccttttggaaaatttttcccaaaaagcctttggcaatttgcttaaccatattcaggaaagcaattcgtccaagtcagccattcacatctaaaaggtaattaaggaacaaaggacaaaattgcaagcaaattgcacttaaaattctttaaaaataacttgagaagggcttttatagataagtaatcaagcaattagtacacttcagactattgtcaactaactcgtcgtagtcagcatcttgtagatgaattaagaaccaagaacaagagtgcaagcaagttgcacttataaaatgttgtgaaatagctaaaagggacttctactcaaggagaagtaatactaattaattaacattgt

SEQ ID NO: 22926 - DNA, 359 bp, Glycine max
  Clone ID: LIB3050-015-Q1-E1-E4
ggaattcagaatggaaagatttggtgggaagagagaacgtggaatccgcagtgaggaagttgatggtggagagtgaagaggcagatgaaatgacaacaagagtcaaagacattgcagagaaagctaaaagagccgtggaagaaggtggaacatcttacgctgatgctgaggcgttgattgaggagcttaacgctcgcagattggcaagacaagattagatttttacataatacaagaaagaattcagtttctaaagtacgcataacaacacaataaaagaagcttgttactttcctgcaccacttgaaagttctaaattgcagtcagcaaccacaattttggtcgcaatactgttgttg

SEQ ID NO: 22927 - DNA, 399 bp, Glycine max
  Clone ID: LIB3050-015-Q1-E1-E5
gtgaaaggtgtcgttggcttggccaaaggtctgaggaaggtgaaaagcacgtacccgctgctggttgcagtgttacccgatgttccagaacatcacggacacattcccacctcccaaggtgccattgtgagacaaattgaaaccgtgtacgctcctgagaatcacacgcaattcgccatggcatattacgtcatcaactaatccaagctacgtagttgcgaatgtgtataattcagcacgatgatagacctacacggtgatatacaagtgtctgacaatattgaccacttgtttgacttgccagataactacttttaatcggtgatgcgacgttattgtgatctcacttcgggtcacactctgcagtatcatatcggatactgccatcagtcccctcat

SEQ ID NO: 22928 - DNA, 329 bp, Glycine max
  Clone ID: LIB3050-015-Q1-E1-E7
gacccttcggtggaatcatcactgcgtcatcttcaaccaaccaccgcgaccagagctcttctccgccgcgtccggagctcttctccaccacgttcaagttggttaaggataatgggtcggaaagctggtacgctttttatcaagcccaagagattcggtaatcttcaaaaaccttgcatgaaggaaatggcattgtatctcagttgtatggctgcaaaccatagtgacaccgaagcctgtgctcgtcagaaggagctattgaatgtctgtattgatgctcagagtaaaaagaacagaaagtcttgggggagtatcagttatcaactgca

SEQ ID NO: 22929 - DNA, 138 bp, Glycine max
  Clone ID: LIB3050-015-Q1-E1-E8
gactcttcggtggaatcatcactgcgtcatcttcaaccaagtaccgcgaccagaactcttcgcggccacgtccggagctcttcaccaacaggttcaacttggttaaggataatgggtcggaaagctggtacccatttt

SEQ ID NO: 22930 - DNA, 357 bp, Glycine max
  Clone ID: LIB3050-015-Q1-E1-E9
caacaagaggtatggtgctgccaaaattttcagtcaccctgatgtcgctgctgaggaaccatggtatggtattgagcaagagtataccttattgcagaaagatgtaaattggccacttgggtggccccttggtgggtttcctggaccacagatgcacattacaaagcttgtatttatgctggcattaacattagtggcatcaatggagaggttatgcctggccagtgggaatttcaagttggtccttctgttggtatctctgctggagatgaggtgtgggctgctcgctacattttggagaggattacggagatagctggagcaattgtttcatttgattccaagcctattccggga

SEQ ID NO: 22931 - DNA, 411 bp, Glycine max
  unsure (1)..(411): unsure at all n locations
  Clone ID: LIB3050-015-Q1-E1-F1
caaaagaacaacagaagggaaaggaattggaatcagacctgaaaaaccctaacaatgggaggcaaatgtccgtataggaacgtgaagaagagaagatattctcacaagacagcgcggcgtacgaagtttgagttgaaaggggacgacatggtttatgcgcagctgaacaaacccgatgaagagagagcccctttacccctcgatgaagatttgcctgggatgggccagtactattgccttcactgcgatcggtacttttccaatgtagccgtgagggatgagcactttaagaccaaacgacacaagaagcgtataaaacaaatgatgggtcctgcaccacatactcaacttgatgccgatgtagctgctgggatgggtatgccagacaatggaacanagctaatgtctatg

SEQ ID NO: 22932 - DNA, 341 bp, Glycine max
  Clone ID: LIB3050-015-Q1-E1-F10
gaaacggggcaactttaccagagaagaagaggacactatcatcagtttgcatgaaatgttgggaaacagatggtcggctattgcggcaaggttgtcagggagaacagacaacgagatataagacgtgtggcacacccacttgaagaagaggctgccacaaaattaccaacagagccatcacactaaaaaacgaagcagaaaacaaccaccaaagttggatgcggacacctcgaaatccaagcaagacgccaaactagaacaacaagaccccgttaatattcatggatcgaactctgaggacatgatgatgccactatctcctcctcactgttctatcgaca

SEQ ID NO: 22933 - DNA, 312 bp, Glycine max
  Clone ID: LIB3050-015-Q1-E1-F11
gcaatttggaggtggctcattcttgctttcatgcaactcaacagtttatttacttagtgagttttgtttaaatttaaaaaatttagttagatgacaatttgcaaaaaggatggtataataacctagcaaggctataggatatagaagttgggcacgacgcaagttttctgcttcagtaactactaccctttactgggttcattgaatctacattttttcccaatctattttctttcataaatgttcaattgacttgtaatttgtaactttcgattgaccgaattacaacattgtagtgaggatatagtattc

SEQ ID NO: 22934 - DNA, 359 bp, Glycine max
  Clone ID: LIB3050-015-Q1-E1-F12
aacagaagacgacagaaggggacgggccaaagtttcgtcttgaactgtcagttccagagactctggatctgttggacctacgtgaacaagctggttcagcagcataagcaagaatcaaacaaagaatgaatgtgcaaaatatgtacgttttggtgtgccagctgtgtggttttggcagattttccgtgaagcgtaagcttggaaagtgaatcatcatcatgttttgggggaagtaaagggagcgtgttgttgagagtgagagaccctttgttggtgaataaatggttgttgtggtatctatcccctggaagatgctttgtagctgttacatgacatttactacctttgtatgattaagt

SEQ ID NO: 22935 - DNA, 328 bp, Glycine max
  Clone ID: LIB3050-015-Q1-E1-F2
gatcgaatgtaagaaaccactaaaagtcctattgaatactcagtaatcgtatttgcacggttttcctcagtatctcatattacacaatggagtacagagtgaaaacttaacattaacacgttactcacatagttcaaatccatgttcccactatgcatgtcaaacacacctccatcatcatcttcttcacatctttcagagactcgcaattctttctcttcacactctcatgggtctctctcagctgtaccactgtctgagcagcagtttctgacaacggtagtggttagcccttgtgctgcctgcaagattctccaccatatgtgtg

SEQ ID NO: 22936 - DNA, 130 bp, Glycine max
  Clone ID: LIB3050-015-Q1-E1-F3
aatagaagcaaaattccatccaggctttaaaattgaggttatttgcaaataggtgtccccaaaaaccaccggacttgaaccgtatttttgaaaaattggacttgaagggcaacggattggtaacccttga

SEQ ID NO: 22937 - DNA, 280 bp, Glycine max
  unsure (1)..(280): unsure at all n locations
  Clone ID: LIB3050-015-Q1-E1-F4
tgggaatgccaatccattaatccttccgacctttctaaaatcacatttctgtcatctctgcgtcttcttcctctatcaatcgttttccatggctcgtaccatgcaaatcgctcgcaaatccaccggtggaaatgctcctacgaagcaactcgccaccaatgctgcaaggaaatctgcaccgacaaccggtggagtcaagaagcctcatcgctatcgccctggaactgttgctcttcgtgagatccgaaaataccanatgagcacagagcttctgatccgc

SEQ ID NO: 22938 - DNA, 349 bp, Glycine max
  Clone ID: LIB3050-015-Q1-E1-F5
gactagttcagattatggacaccaagttgggtagccaatacccacaaaatggagcctacatggctgccactcttgctctaaaatgccttaataacgaagctaaggcaaagcctccaatgacagacgttttagaaacccttgaacagattgcagagtgctaaaagggtcccatttgaatcatacccctactgcattcccataatctgcttgcgtactctaaattttgaacatctgtaaatatattccttatttttataaggttggtttttacaatgagaaatgctacgaacacactattttgaacacttcctctcttgttagttgaaatttattgaagatgacaaaattt

SEQ ID NO: 22939 - DNA, 317 bp, Glycine max
  Clone ID: LIB3050-015-Q1-E1-F6
aagcgatacgacaacagaaagggggcaaaaaccgctcaatggatccccgtactcgagggggtattacacatgcaatagcgtcaaaaggtctccgacgcggacacacatggaccgtactccggacgatccggcaatgtcgactgtgacatatgaatgagagcaccgtcactcgattccagagaacatttccggtcgagtgtgtttgagattcaatcacagtcaaggtagctgcaagcttaatctgacattagtacatcagtagattaaatcacaagggaaacatagtcggctctcaccaagatcatcgtaatcaacat

SEQ ID NO: 22940 - DNA, 309 bp, Glycine max
  unsure (1)..(309): unsure at all n locations
  Clone ID: LIB3050-015-Q1-E1-F7
gggtttcataatcatatcccaatgtgaatcctcgtccaattctctgcaactgcattctcgttccctttccgccgcagcgattttcagagatttaaacttccttgctacgagatatgcgcagttactgattagttgatgatagctgtcgacaaatttcgcatgggaagagaacgaacacggaaacgccctcgtcctgcatgggacgttgcccctccctcagtgtccgangcgcaacaggctctgccagtgcacggtgacgaagaattcgaaagaatgcacgtttcgcctccgaaaagggacgacgatcga

SEQ ID NO: 22941 - DNA, 298 bp, Glycine max
  Clone ID: LIB3050-015-Q1-E1-F8
ggaatacagatggatacagacgcgttggtccacgtatacgtcgatcactatgacatcaccttcgatatcaaccggaacggtttaccgaaactgtatcatgatggttccatgcatatcttcgaataggcataagattcatggcacctctagcatcgtttctcatcgcacgtcactcactttcgaacagtgctagtactccatcgcgactgtcgactgccacactttcggtgtcaacaactggcatgcctatcgttgtcatgagaaaacttcaactcgctggacattacgacactctcaa

SEQ ID NO: 22942 - DNA, 337 bp, Glycine max
  Clone ID: LIB3050-015-Q1-E1-F9
gaacaagaggtatattgctgcccgtattttcagtcaccctgctgtcactgctgaagaaccatcgacaggtattgagcaagagtagagcttatggcacaaaaatgttccatggacacctgcgtggccccttggatgatttccagtaccacatatgcacattacagcacttgtatctatgctggcattaacattactggcatcactggataggttatgcctggtcagtgggaaattcaagttggtccatctgttggtatctctgcaggcgatgaggtgtaggctgctcactacattttggagacgattacagagatatctggcacaattgtatcaattg

SEQ ID NO: 22943 - DNA, 374 bp, Glycine max
  Clone ID: LIB3050-015-Q1-E1-G10
cacccaaagttcagaagggagcaggatgacctctatattgatcacaatctcagcttaaccgaagcactctgtggcttccagtttgctgtcaaacatcttgatggtatgcaactagtgatcaaatcaaatcctgaggaagtcatcaaaccaggtcaatataaagcaataaatgatgagggaatgccacaacacaataggccattcatgaagggtcgcctttacatccagtttaatgttgatttcccagactcagggtttctttcccctgaccaatgccagttactggaaaaggtgttacctcaaaagagcagcaagcatgtgtcagacatggagctggatgattgtgaggagaccactttgcatgatgtcaactt

SEQ ID NO: 22944 - DNA, 341 bp, Glycine max
  Clone ID: LIB3050-015-Q1-E1-G11
ggccttggaggatttgcagctgcacttgaatcacaaaagtcttgggtgatgaatgttgtgccgtcaattgctgagaacactttgggtgttgtctatgagagaggtctgatcggcatttatcatgactggtgtgaaagcttttccacatacccaaggacatatgatcttattcatgctaatggtttattcagcatataccaggacaagtgcaacctagaagacatccttctagagatggatcgcatcctaaggcctgaaggagcaatcatcatccgggatgaagttgatgttcgtaaccaggttaagaaaattgttgggggcatgagatgggatgccaaact

SEQ ID NO: 22945 - DNA, 350 bp, Glycine max
  Clone ID: LIB3050-015-Q1-E1-G12
gggaccctacaaatcaaagtgaaacatgtggggtggcatggattttggagcctgaaatgagaggaaagttgggtaaacatgaatgcttatgtcatttgatgaagattgatagtgaaagaccaaagacagagcaaggaatgaagatagagacacggatagctttaatttgccttaagctttttaattacttagggtttatcaataagggttttaagctgaatgaaaatatcgaatgatcaatactgaagcacgtgtagttgaataaaacgtaatcttgctctcttgagaaattccaaacagtataccacacgattaatgaacggtagacttagtaacttttttttcatttc

SEQ ID NO: 22946 - DNA, 182 bp, Glycine max
  Clone ID: LIB3050-015-Q1-E1-G2
gaccctgatttggagcaatggatgcatgaaccttaggctcaagtgggaacatttctaaaccatttcattttccttacactcttaaagtcacagcgtttagaattgatatcatcatacgcagtatgctgtttcatgcatatgcagataagaactttgatgaggtgtggaagaccacttgtatt

SEQ ID NO: 22947 - DNA, 257 bp, Glycine max
  Clone ID: LIB3050-015-Q1-E1-G3
gccaaaagaccacacaaagggcgaaccaaaaagctctgagaatccacaaccaacctctaaaacaaaagtgggttttggggcacatacaacctcccctggtaaaaattacaaggccaacaataaccaattttgccaaggtccttaatttggataataaaaatttcaaggaaattacctttgaaggtttgcccaatttaaatttaaaattgaagaattgggttcaaccaccaaaatgggtgcctttggtggattttttc

SEQ ID NO: 22948 - DNA, 410 bp, Glycine max
  Clone ID: LIB3050-015-Q1-E1-G4
ttaccaagtggtgtgtggtgaaacatgcactgccaaacctatgaccactgtggaatggtacttggtgttcacctgtgtagctgtggtgctatcacagttgccaaacttgaattccagtgctggggtgtcactcattggagctgtcactgctgtacggtattgtactgccatttgggtaacctctgtggcacggggtgccctaccggatgtgagctataaccctgtgaggactggaaacagtgttgaaaatgcctttagtgtgcgcaatgcattgggtatcattgcctttgctttcaggggccacaatctcatccttgaaattcagtctactatgccttcaagcgagaagcatccatcacacgtgccaatgtggaaacgggtcaaagtttcctacacgatcattgcagcat

SEQ ID NO: 22949 - DNA, 403 bp, Glycine max
  Clone ID: LIB3050-015-Q1-E1-G5
gatcacaacttcatttccaaaataaaaagacttccttttttgcaattgtcatttgtcaccaaacaattgttgttagctctcacaagcaagcttcagcaacgacaatgaagaaagtagtcttacagttggacttacatggtgatagaatcaagcaaaaagctatgaaaacagcatctggcctttcaggggttgaatcagtttctgttgatatgaaagacatgaaaatgatcgtgttgggggacattggtccagtgagtgcagtgtcgaagctacgaaagtgttgtcacactgaaatagtttcagttggaccagcaaaagaggagaagaaggagaatgtggagccagcaaaagtaccagttcctctaaagctccatgaagcctatcccctttattatcagatgac

SEQ ID NO: 22950 - DNA, 417 bp, Glycine max
  Clone ID: LIB3050-015-Q1-E1-G6
agggatagcagcatcatactaagcattgaattcaaaaatttaagttcattccttgtgttttgctgtcctccgcaaaagcaaacatgtcgaacacatgcggcaactgcgactgcgctgacaagactagctgcaccacaggaaacagctatggtgttattgtagagactgagaagagttacgtcgagactgttgtcatggatattccagcagctgagcatgatgggaagtgcaagtgtggcactaaccgcacttgcacggactgcatctgtggccattaatgaatatgtatgaaaatgtaagtgccatgtgtttggcaatacatatatccaaataatgtaatcttcatatgaataaatgtgtgtgctgttatcctacttcaggtctgtgtagtcatgcaatctgaatcatttcaagttc

SEQ ID NO: 22951 - DNA, 182 bp, Glycine max
  Clone ID: LIB3050-015-Q1-E1-G7
aaactatacaacgtcaagccaaagtcacccttatgaatccaaagaatattttgagattccatgggcaagtttgaggggattggttgagccaacttttgctgaaaggatagtgatcaaccatagagagtatttcaaaaagggtaaccttgttgtatccagtgctgtcaacataactgaaactg

SEQ ID NO: 22952 - DNA, 383 bp, Glycine max
  Clone ID: LIB3050-015-Q1-E1-G8
gaaattgaatcagtgcccaaagaaactcgttccttcgtcctcctcgcaaatcacaactcgcaaaccacaatgcctaagcagatccacgagattaacgaatttcgtccgactgcccggacgaaggatgccaagtccgtgaaaatcaagacgagcatggatgtccttaagtttaaggttccatgccccaagtacttgtacacgctttgggtctttgaccctgcaaaagccgataagttgaagcaaactcttcctcccggtttgagtgttcaagacctgtagagctgttcagtgtggcaccatgcgtttgtttctcattttgttacctgatgctctagattttgtggcatggctttacaggtaggtgatttttacgaagacatttt

SEQ ID NO: 22953 - DNA, 370 bp, Glycine max
  Clone ID: LIB3050-015-Q1-E1-G9
ggcattgtgaaatcaacagagaaacatttcactaatagagagacataagcataatattgagaaataatggagggttgtacttattgtgtgaagttgctatgccttgttgggtttgtggtgcttgtgagtactattgcaggggtggagagtgctggtgaatgtgggaaatctagcaccccagataatgaggcttataagcttgcaccatgtgcctcagcagcacaagatgagaatgctagtgtttctcagagttgctgtgctcaggtgaagaaaattgggcagaacccaagctgcctctgtgcagttctgctctccaacacagccaaaatggctggtgtcaaccctcaagttgctgtcaccatccccaagc

SEQ ID NO: 22954 - DNA, 230 bp, Glycine max
  Clone ID: LIB3050-015-Q1-E1-H1
ggaacaataaggaaattggaaaacctggtgcggctttgacggaaccagttcccatcttgcctatgacatctgatggttctgttccaaatgacaatctccctgctaatggatgtactgtgtcagcatccatatcatgtctatcaggatcactgccttctcctggaggtctataatcctggccaggaaaacattgttgaaggtgcatcaccttcagatgatttttttgaggg

SEQ ID NO: 22955 - DNA, 290 bp, Glycine max
  Clone ID: LIB3050-015-Q1-E1-H10
agacggggatctcagatggaatttatgcaatcacatattccgattaatagtatcacctccgttgtatttgagaatcccggctatgtatgttcttgctccgagtccactcggtggaagacgaccacactctggatccctaatagatcttccactctaagtccacaatcccaatcccaatcgcaatccaataaccctaaattcatctaacgcagaggtgcactccatgtgttcggttcctcttcccattcctcgttctgaccccagtcctcacttgcgtctctcgtcttcat

SEQ ID NO: 22956 - DNA, 254 bp, Glycine max
  Clone ID: LIB3050-015-Q1-E1-H11
ggagaaaaacgagccaattcatcattttctctcttctctgcttcttcttgttcaaatcttaggagctgaggagaatcaatcgagagaaatatgtctggtatcgctcgtggacgccttgctgaggaacgaaagtcatggcgcaaaaaccatccacacggtttcgttgccaagcccgagactctacctgatggcaccgtaaatttgatggtctggcattgcactattcctggcaagaccgggactgattgggaagg

SEQ ID NO: 22957 - DNA, 307 bp, Glycine max
  Clone ID: LIB3050-015-Q1-E1-H12
gagagaaagagagagaaagatgtcgaagcgtggtcgtggtggttcggcggggaacaagttccgcatgtcgctgggtcttccagtggcggcgacggtgaactgcgccgacaacacgggggcgaagaacctctacatcatttcggtgaaagggatcaaaggccgtttgaaccgtcttccctcggcctgcgttggcgacatggtgatggccaccgtgaagaagggaaaacccgatctgaggaagaaggtcttgccagctgtcatcgttcgccagcgcaagccatggcgccgaaaggacggcgtctacatg

SEQ ID NO: 22958 - DNA, 404 bp, Glycine max
  Clone ID: LIB3050-015-Q1-E1-H2
ccgacaacgctatcaaaaaccactggaactccaccttgaagcgcaagtgctcttcaaccatgatcgacgacaacacccaaccgctgaaaagatccgtgagtgccggcgcggctattccagtctctactggactctacatgaacccgcccacaccgggtagtccctccggatccgatgtgagcgagtccagcttaccggttgcatcctcttcgcacgtgttccgtcccgtgcctagaactgtcaaggttctaccacccgtagaaaccacgtcgtcctccaatgaccctccaacttcactttctctaacactccccggtgttggtgttgttgactcaaccgaagtctccaatcggacaactgagccgattcactttacaccgccaatgccacatcggtcgaatact

SEQ ID NO: 22959 - DNA, 393 bp, Glycine max
  Clone ID: LIB3050-015-Q1-E1-H4
gaccgcattattcatcttttctcttctcattcaccaattcacaattcattttatttcttaagatgccaactgacccgtcatcagtttccggcgaaatcgtgtgtgtgaccggtgccggcggtttcatagcctcttggcttgtcaaacttctcttagagaaaggctacactgtgagaggaaccgtgagaaatccagatgattcgaagaatgggcatttgaaagaattggcaagacgcaaggagaagctaactctgcataaagttgatttcttcgatattgcccccaataaagcagctcttcacgggtgccacggtgtcctccaaaccgcttctccggtcaacgacaaccctgaagagatggtggagccagcagtgaaaggaacgaagaatgtga

SEQ ID NO: 22960 - DNA, 410 bp, Glycine max
  Clone ID: LIB3050-015-Q1-E1-H5
caaagaaaaagtaaacaaagcaagaaaaaggcgttgcagatcggagtttcaactgccagaatcgaagccgtggttggtggtggagcagatctgagtttccgatagaagctgtggtcggtgttggtgcagatctgagtttccactctcaatcctttcgtgccggtggcggtgcagatctgagggtcgcttatggcggatttggaagcgccgcgagtcttctccaccgccgacagaacgagatggcaaatcgtaatgcatgtctaacatggttcatttctgtgcgatttggttgctttttcccttctttttgaatgtgcacttggccaatcctaatgcatactattggcgaaagaaactatttgcctttaatttaattatcttaatgaatgggcgttgctgaatgcatctaa

SEQ ID NO: 22961 - DNA, 420 bp, Glycine max
  Clone ID: LIB3050-015-Q1-E1-H6
ggaccccaattcatatggtggctagctgctcaaagtgtattctatcatctatacaatcaagtgtcatacatgtctctggatcagatctctcctttgacgtttagcattggaaacaccatgaaacgtatatctgtcattgtgtcttccattattatcttccacacaccagttcaacccatcaatgctcttggtgccgccattgctatccttggaaccttcttgtattcacaggcgaaactatagagttggggaactaagattcctctagggacttgtttgttacagtccttcatgctcaaccagggacaaggaagttgattttgtaatgtgtcactgctggatttttgtaatactaagatgatctggctatcagtccatctgtagatataataataaaaataatgctgctgaggaaacatt

SEQ ID NO: 22962 - DNA, 388 bp, Glycine max
  unsure (1)..(388): unsure at all n locations
  Clone ID: LIB3050-015-Q1-E1-H7
ggacgggaagaaacgcatcgagcgtggagaaagagaaggatgatgaggttaaggtggagtgtactcgtaatggtcacgttcgctgtttctctgttttggcttggacccctgcaagtcaaagcctctaattctgtttccgccttcgttcaaaacgccatctactccaacagaatcgccgttttctccaaatcctattgcccctactgtttgcgcgccaaacgcttgcttgctgaactcaatgaaaaaccttttgtggtggagctcgatttgcgagatgatgggtttcaaattcagagtgttcttctggatttgataggtagaaggacagtcncgcaagtgtttgtgaatggcaagcatattggtggatcggatgattccagtgctgccg

SEQ ID NO: 22963 - DNA, 325 bp, Glycine max
  Clone ID: LIB3050-015-Q1-E1-H8
gataacaatcgttattataacgcaaacttcaacttgtaatcaagggagagagaaaatttcaagcacaaaaaatggcggagaagaaagtggtgatcctacgaggtggtgttgccggtgccaaccttgcaaaaactatacaacgtcaagccaacgtcacccttattgatccgaaggaatattttgagattccatgggcaagtttgaggggattggttgagccaacttttgctgaaaggatagtgatcaaccatagagagtgcttcaaaaagggtaaccttgttgtatccagtgctgtcaacataactgaaactgcactggtgactga

SEQ ID NO: 22964 - DNA, 389 bp, Glycine max
  unsure (1)..(389): unsure at all n locations
  Clone ID: LIB3050-015-Q1-E1-H9
ggccctaattcccgttttcccaactcctccataaccaattccatcttcaaatattccaattccaattccaattctattcttttcgattcctcttcctcttccccccacggttaggaaattttgttgctggaagaattgcttaagggcatatagctggttttgtgcacatgggatcagagagtgtggctccaatggttgagacctcgaaaaacaggtcttcttctggtaaaatgaaccaagggaaagtccccaggaaaattcacaaggctgaaagggagaaaatgaagcgtgagcatttgaatgaacgctttgttgatcttgccagtgcacttgatctaaatgagaacaatggaaaggcttctatactgtngtgaaactgcaagttgctg

SEQ ID NO: 22965 - DNA, 341 bp, Glycine max
  Clone ID: LIB3050-016-Q1-E1-A1
ggttctagtgtgtgattgtttgttgttgtaactcgttcttcttcttttgttgttctgtgtttgtgtttgttttttctctcacctgaaaatgtctcgctgcggtggtaactgtggttgcggaagctcctgcaagtgcggcaacggctgcggaggctgcaagatgtacccagacttgagctacactgagtcaaccaccaccgagaccttggtcatgggagtggcacctgttaaggctcaatttgagggtgctgaaatgggtgtgcccgctgagaacgatggctgcaaatgtggaccaaactgctcctgcaacccctgcacttgcaagtgaggtgttgggagag

SEQ ID NO: 22966 - DNA, 236 bp, Glycine max
  Clone ID: LIB3050-016-Q1-E1-A10
gacaatggggttctaatgtgctgattgtatgctgttatttcacgtactgcatctgatggtggtctgtctctgtgtttgctgtttctctcacatgatggtatcgtgctgctgtggtggctgtcagtctgcggtagctctgccggttctgcatctgctgcagatgctgcaacatgtatccatacctgagctgaactgagtcaaccaccaacaataccgtggtcatgggagtggcacct

SEQ ID NO: 22967 - DNA, 358 bp, Glycine max
  Clone ID: LIB3050-016-Q1-E1-A2
tggatcgttccccgaagaaaaaattgacgaacgagagtgggagaacgagagataagaagaagagaagaatacctacccagcaagcacaattagagaattttttttcacaaactgttgacttgattcagtttcatctgcttctgctgggtggttggtaatgtctgctcctatgatcattgaccctatgatgatatcggcaccagaaactcaatcagcagcagctagcatactagttgcacaaagtgaagttgaatttgctgtatgtgactgttgtggactaacagaagagtgcacccagcctatatagacagaatcagagagaggtactttggcaaatgggtttgtggggtgtgtgctg

SEQ ID NO: 22968 - DNA, 350 bp, Glycine max
  Clone ID: LIB3050-016-Q1-E1-A3
gtcgacgtacgatatcggatgcaagaaagactagaggaggggcatcacctataagaatttcaaatgcagataagtttacaaacaaggaaattattgggaaagatgatcctcatgatattgctgctgtggatagtccaagaagatgctcagatcatgaggatgatggtgggagtgatcgatctggaacagctaagaaggataaatctttcaccattgcccataggtcagattttcaggacaggggtgttaatcacatgtcagatactaaacttaaagctcaaacaaccagctattgtaccaatgggggtgttgacactatagtcctagatgggaaacatccaggcacagag

SEQ ID NO: 22969 - DNA, 403 bp, Glycine max
  Clone ID: LIB3050-016-Q1-E1-A4
ggaggctaggacaaaaaaattgttcccttagaaaaatattgtaaaatggcatcactcaaagctgagaaacctgttgaaaaatcttgttgctctcaactatctgcaagacaggtgaaaaaagagtcttctgcaaaacctagttcaggcacttccaaagccccggtctcgaaaccaaccccaaagaaaattccaagccagactatgaagaatgcaagcagcaatacataagctgaagatgcatgagtaaaaagtacgatagactaaaaaataatagttgttgcacttggaattatgggaacagtcctaacgatactgttatatggtgctcttcaaccatgtttataagtaatgctattaatgtctgtaccacttgcatacgtgattttctcgtcatgttactcca

SEQ ID NO: 22970 - DNA, 440 bp, Glycine max
  Clone ID: LIB3050-016-Q1-E1-A5
ccaggtcgactcacgcatccgaagacgacagaatggggagaaagaaagagaataaaattattagagtaatcatatgatgtaaggtgctggctaggcccgcttcctcagtgtttgatgcctctgctggcagattaattgtactcttcaagtctgagaaagtagattctatactattcctgtctcactttcgccatgggaatatcatttttgctttttactatgtccaaggatgaatttatatgaataattttactttacatcttcctttctccatgattcttctcagattaattttaaggtgaaatttgtatcattttttgtacatatttttatatcatcatgtttcatgcccctcgtcttcagttcaacactactcaaatgaatcacatgattacgatcgattcaacacaacacacacgcacactccttccattttaatg

SEQ ID NO: 22971 - DNA, 322 bp, Glycine max
  Clone ID: LIB3050-016-Q1-E1-A6
ggaacagaaatcgcatataaaatgcgaaaagaaatgaattcaatgttcggagatctgcacaggatctctctccgtgtccgttgaactttctttacgccctcctcgtaacataaaaattcagatcccgccaactctgaagacctctattctctttccctcccctttccactttcccgagaaaaataaacttttccgtcaattttctctccacggtttccttcttcctcacaatggctccgaacttcgacaatcgaagattcgttctcgctcttcgcattttccttctcctctcctattcttcaacctctcaacgaccttcgct

SEQ ID NO: 22972 - DNA, 379 bp, Glycine max
  Clone ID: LIB3050-016-Q1-E1-A7
gttgaaagcgagaggcatgaagcctagagaatacagagcggtgcaagactgcgtggagaacattggtgacagcgtggaccgtctcaggcaatcggttacggagttggggcggacgggcgaggacttcgtctggcacatgagcaacgtccagacttgggtcagcgctgccctcaccgacgacagcacttgtcttgacggcttcgctggttccgccatgaacggaaacgtgaaggctcttataaaggacaggattgtccacgttgctcaagtcacaagcaacgctctcgctttggttaaccgctttgcctcaagacacccaagtgctactcaaactccttaactcttatatatttctaatatccccagcatgcctttctgt

SEQ ID NO: 22973 - DNA, 419 bp, Glycine max
  Clone ID: LIB3050-016-Q1-E1-A8
gcattaaaaagattagtttccaaagcaatcgcctcacttcaatgacgggatttgagggttgtgtagctctagaagaactgtacttgagccataatggtattgcaaaaatggaagggttgtcatcgttggtcaatcttcgggttttagatgtatcatcaaataagataacttcagtggatgacattgtgaacctgacaaaattggaagatttgtggcttaatgataaccaaatagcatcacttgaaggaattgctgaggcagtctctggttcaaaagagaagcttaccaccatctacctaaaaaataacccatgtgctaagacgcccaactatactggaatcctacgggaaatcttccccaacattcaacaaatagattctgatatattttcttagaagtttcttggcttcagccttttt

SEQ ID NO: 22974 - DNA, 386 bp, Glycine max
  Clone ID: LIB3050-016-Q1-E1-A9
ggttctagtgtgtgattgtttgttgttgtaactcgttcttcatcttttgttgttctgtgtttgtgtttgttttttctctcacctgaaaatatcttgctgcggtggtaactgtggttgcggaagctcctgcaagtgcggcaacggctgcggaggctgcaagatgtatccagacttgagctacactgagtcaaccaccaccgagaccttggtcatgggagtggcacctgttaaggctcaatttgagggtgctgaaatgggtgtgcccgctgagaacgatggctgcaaatgtggaccaaactgctcctgcaacccctgcacttgcaagtgaagtgttgggagagcaagcttcaagcatagatagcccttaattaggaataatgataaac

SEQ ID NO: 22975 - DNA, 373 bp, Glycine max
  unsure (1)..(373): unsure at all n locations
  Clone ID: LIB3050-016-Q1-E1-B1
aacaacacaaattcaaattttgaggaattgatcaacgttaacctatttggtgtctttctgggaacaaagcacgccgcaagggtaatgatccctgctagaagaggaagcatagttaacactgcaagtgtttgtggaagcatangtggtgtagcatcacatgcatacacaagttccaaacacgccgtggtggggctcacaaagaacactgcggtggagcttggagcatttggtgttagggttaattgcgtgtcaccctacgtggttgccacgcccttggctaagaatttttttaagcttgatgatgaccgagttcaagggaattaatcaaaccttaaaggtactgatcctgtgcctaatgatgtatcccaaactg

SEQ ID NO: 22976 - DNA, 356 bp, Glycine max
  Clone ID: LIB3050-016-Q1-E1-B10
gtaacaaggacatcatcatggttgaccacatgaggaaaatgaagaacaatgccattgtttgcaacattggtcactttgacaatgagatcgacatgcttgggctggagaactaccccggcgtgaatcgcatcagcatcaagccccaaactgacagatgggtcttccctgagaccaacaccggtatcattgtcttggctgagggtcgattgatgaacttgggatgcgccactggacaccccagttttgtgatgtcctgctccttcaccaaccgggtcattgctcagcttgagttgtggaaggagaagagtaccggcaagtacgataagaaggtttacgttttgcccaagcaccttgat

SEQ ID NO: 22977 - DNA, 377 bp, Glycine max
  Clone ID: LIB3050-016-Q1-E1-B11
ttgggtcacatcgacatcatcatggttgaccacatgaggaacatgatcaacaatgccattgtttgcaacattggtcactttgacactgagatcgacatgcttgggctggagaactacctccggcgtgaagcgcatcacgcatcaggccccatactgacagatgggtcttccctgagaccaacaccggtatcattgtcttggctgagggtcgattgatgaacttgggatgcgccactggacacgccacttttgtgatgtcctgctccttcagcaaccgggtcagtgctcagcttgagttgtggaacgagaagagtaccggcaagtacgataagaaggtttaccttttgcccacgcaccttcatgagaaggtggctgca

SEQ ID NO: 22978 - DNA, 298 bp, Glycine max
  Clone ID: LIB3050-016-Q1-E1-B12
aagacgagagaacgggcagaaggagctcctcatgcctgacctgatgatgacaacgaagtggaatcccattgtgtgctgcagtggccatctgggccgttggattgagttcatcggcatggaaagacagtgccgcatgacacgcaccgtcagtggactgctcactgccggaaatgtcctcaccgggatcgcctccgcgtcgcattgccctggatcacggtcaactgaccacctggaaaagggcgacccgccatgaaaattgtgcgatgtacagccccttcatgagttggctacagcgctc

SEQ ID NO: 22979 - DNA, 322 bp, Glycine max
  unsure (1)..(322): unsure at all n locations
  Clone ID: LIB3050-016-Q1-E1-B2
ggttctagtgtgtgattgtttgttgttgtaactcgttcttcctcttttgttgttctgtgtttgtgtttgttttttctctcacctgaaaatgtcttgctgcagtggtaactgtggttgcggaagctcctgcaagtgcggcaacggctgcngaagctgcaagatgtacccagacttgagctacactgagtcaaccaccaccgagaccttggtcaatggagtggcacctgttaaggctcaatttgacggtgctgaaatgggtgtgcccgctgagaacgatggctgcaaatgtggaccaaactgctcctgcaatccctgcacttgc

SEQ ID NO: 22980 - DNA, 335 bp, Glycine max
  Clone ID: LIB3050-016-Q1-E1-B3
tacggctgcaaaaaaacaacacaagggaaggcccggcggaatcagcacaaaatggcaaaatgaactccaacattgcaaatcccaccactgggtgccagaagaagctggaaatcgatgacgacctgaagcttcgagcattttgggacaagaggatctcccaggaggttcttggtgatgctctgggtgaggagtttaaaggatatgttttcaaaatcaccggtgggtgtgacaaacaaggattccctatgaagcaaggactgctgacccctggtcgtgttcgacttttgctccatagaggaactccttgtttccgtggatatggaaggcgcaatgga

SEQ ID NO: 22981 - DNA, 266 bp, Glycine max
  Clone ID: LIB3050-016-Q1-E1-B4
gagagagtttcatgttcggtaatttttgatttgataatttcaaccctcaatttttttttatatatccaccaatccgcaaagtgcaaatttcgaatctttcacgtaatgggttcttctcttttccctcttcggcaccgatcgatccaatgctcttcccataggtacgatctgacacaccaagctcagagccaaattggttcgtctcggggacatgggtgctgggaaatccaaccgcgttttgcgcattgtcaaaggtcaaattcccg

SEQ ID NO: 22982 - DNA, 397 bp, Glycine max
  Clone ID: LIB3050-016-Q1-E1-B5
gcggcaacggctgcggaggctgcaagatgtacccagacttgagctacaccgagccaaccaccaccgagaccttggtcatgggagtggcaccagttaaggctcaattcgagagtgctgaaatgggtgttcccgctgagaacgatggctgcaaatgtggagctaactgcacctgcaacccctgcacttgcaagtgaggtgttggagagctaaagcttcaagcagaaatggcccttagaaataatgataaaaactatatgtagtttcaaaacttcaaaattatgtagtatgtactatgttgcactctggtgttttgtgtctaaacaaacacccttagaataaagtggtcatttcttgcccttgagcaagttcaagtgttttggacttgtgatgggtgtgt

SEQ ID NO: 22983 - DNA, 407 bp, Glycine max
  Clone ID: LIB3050-016-Q1-E1-B6
gatgagaagtgttttttgtccattgtagattgtcatatatagagaagcagaattagaaagaagggtagctaggagactttctgaattgaagccttttttttcattgagtgattgagagcatggagaacatgaagatgaacaaagatgaaaggtttgcacaaaagggtgtcccaatacatagccaggttatgaagatcaggcaagagtcagagaaaattgttgattggtccccgggcaagccagagataagacccgttctccgtgaaataagccggcagatttcccggtcgccgttggggatctccggcagaccgatttccgttggtgagtcataggttaagaacatggttaagggttttggattagtgtgttgatgtacacaggtggaagagggaagatttgtgtgc

SEQ ID NO: 22984 - DNA, 141 bp, Glycine max
  Clone ID: LIB3050-016-Q1-E1-B7
ggaaccaagcagaggacactggctcgtaaagtctgatacttttcattccttagctgtgaagagaacatgtagttgttgaatgtgtttgtagctcatacttcatgtactgtaccattaggaacaatttttcagcgtgagttt

SEQ ID NO: 22985 - DNA, 383 bp, Glycine max
  Clone ID: LIB3050-016-Q1-E1-B8
gattcttataaaacataacaaacaacaaagtgcaaaataaggaaaaaagttcacgatgttgacacattgccatcaattgtgcaagccagtttccatcatgattctagttaacttggctctggcttttgtcaatttacttctgaagaaggttcttaatgaaggaatggactacatgtccattataacatatcgacaggcaatttcatttatcttcatggcacctattgcctgcatctatgaaaggaaacacaaacaaatcaagatgtagaatgtcaatagcagagccaccaatggcaatgaataactttgatccaaatgtgtcctctaatcttcccgggatacaagttctctaaataacaaaaaaagaagtaatatgctgttat

SEQ ID NO: 22986 - DNA, 352 bp, Glycine max
  Clone ID: LIB3050-016-Q1-E1-B9
gtaacaaggacatcatcatggttgaccacatgaggaaaatgaagaacaatgccattgtttgcaacattggtcactttgacaatgagatcgacatgcttgggctggagaactaccccggcgtgaatcgcatcagcatcaagccccaaactgacagatgggtcttccctgagaccaacaccggtatcagtgtcttggctgagggtcgattgatgaacttgggatgcgccactggacaccccagttttgtgatgtcctgctccttcaccaacccggtcattgctcagcttgagttgtggaaggagaagagtaccggcaagtacgataagaaggtttacgttttgcccaagcacct

SEQ ID NO: 22987 - DNA, 351 bp, Glycine max
  unsure (1)..(351): unsure at all n locations
  Clone ID: LIB3050-016-Q1-E1-C1
gttgcacaggttgtgcaaatgcttgaagaagcagagaatagtagtgaagcatgaccgtgagatcaagaaagtaatatctatctgtttatttcgtgttttccttctgctgttgtagtttgtttgcagagacgtattttagtctaagatttcaagacttctaaattaggctttccatccaatggtatttgttttgctgaacttttggcactttctgaacgaaaagattggcttgtgttagagctgtgttatttaactaacgactcagaaccttgttcatttgtacataggttatgcgatgcatcttatttctctgttcaggtaaaaaaaantaaaaaaaatagcatataaaaa

SEQ ID NO: 22988 - DNA, 118 bp, Glycine max
  Clone ID: LIB3050-016-Q1-E1-C10
gacacaatcagaacatgatccttcatgttcaagtccgtagatacatggaaatgtcatgtggtattctagctatgatgatgattctgcacatggcattgagcggtgttgattcatgctg

SEQ ID NO: 22989 - DNA, 342 bp, Glycine max
  Clone ID: LIB3050-016-Q1-E1-C2
gagttatgaagactttgggagtgagtgaatagttgaataccatttagtcatcaaactttcatgttgaacaaaatgcttaaaatgttgtacataaaactttagaggttttgaaattttaactgttggatgaacatatgcattggtgtgtacaacgtgcattcacctcattcttggtgatgggaaatgaaagttggaatgcttgcatggaagggaaagacttggtgcaaataaataataatcttttttcccttgtgtgtttggccttttgtactaataagcttattctacgttgtgttgatactagaattaatataattgtgttttgttgtttgtccgagcaag

SEQ ID NO: 22990 - DNA, 197 bp, Glycine max
  Clone ID: LIB3050-016-Q1-E1-C4
aaaaaaacaacagaaggggggcccactgaagttacttgtggtggaaatgcactgaagttttatccttctgtgcggctaaatatcaaaagaattgggtttgtcaagaagggtgaaaagactttaggaagtcaggttcttgtcaaggttgtgaagaacaagcatgcccctccatttaatactgcacactttgagattga

SEQ ID NO: 22991 - DNA, 409 bp, Glycine max
  Clone ID: LIB3050-016-Q1-E1-C5
gacagacacacaaacaatttaccagctatacttgttccttttgaaggttagaagtgctacaatacaaacaatgacagctactcaggaagatgtgaagcttttgggtattgtgggaagcccatttgtgtgcagggtccagattgcccttaagttgaagggagttgaatacaaatttttggaagaaaatttgggcaacaagagtgatttgcttctcaaatacaaccctgttcacaagaaggttccagtgtttgttcacaatgagaagcccatagcatagtctcttgtgattgttgaatacattgatgagacatggaagaacaaccccatcttaccttctgatccttaccaaagagccttggctcgtttctggtccaaattcattgatgataagattgtgggtgctgtatgg

SEQ ID NO: 22992 - DNA, 395 bp, Glycine max
  Clone ID: LIB3050-016-Q1-E1-C6
ggcaccaatattatccaaattcgtgagagcttattcaatcaaaatgtctcccaaatacaagctagtgctgttgatagcattggttttggttgcaacctcccttgctggtcgcacaaaggaacatcctaagcatcctccatcccttcaagaacaacaacacaccccacaccttgatagctacccgccaaagcatagaccgaaaccacctcatcctgtacatggtgccggggaggaaccaacctccattcctcgaaagaagggaccaagaatgcctccgaactgatgagtgagtcaaaggtttcagattgcctcaaatggtttaactttgactcgatctctaccaccacaacatcacgatatgttgttacaatcataatcgcaatttgaaaccttgg

SEQ ID NO: 22993 - DNA, 326 bp, Glycine max
  Clone ID: LIB3050-016-Q1-E1-C7
ggtgaatcaactgcagaagcacagatttctttacagttatgaagaggaaatgtggcacatattaatgaatcatagggtctcatcagttacatattaaccattcaaacattgcaatttgcaacattaaccattgtgtgtaagcacacctttaggccttagccagttagccatatgctgcctacatttctagctagtatatttttcccaagtttctttgcgtagtcattggtcaaggactttgtaattttcatattttatgtaatggatggttgagttttgaagtatatgaatttgagccctgtaatgcaatatcgactgattttact

SEQ ID NO: 22994 - DNA, 370 bp, Glycine max
  Clone ID: LIB3050-016-Q1-E1-C8
ggagacgagggtaatgtcgcgttgtgttgcgtcgtgtcgtgcgctgttcctctgtctgtcgtttttgttttcagaccaaaccctagctccgcatcgcaaccatgtcgaccaagcaaggtggaaaagctaagcctttgaagaaacccaagtctgataagaaggattacgacgaggttgacatggctaacattcagaagaaaaaggaagaggagaaggcgctaaaggagttgaaagccaatgcgcaacagaagggaagctttggaggttctgggctcaagaaaagtggaaagaaataagggctccttatcaagattgtatacatccaataatgaaccctgtaatttaataccatgataacttccgtcctaat

SEQ ID NO: 22995 - DNA, 401 bp, Glycine max
  Clone ID: LIB3050-016-Q1-E1-C9
gagagaatcaagacatgaagcttcatgttcaagtccgtagatatagggaaatgttaggtggtagtcgaattaggatgaagataaagacgtggtttggagggtgttgattcatttgaatatgatggtggtgtgggcccgtgaagctgcttctctttgttgtaaagcgactcgccgctctcaagctttcatgtgcggtaacaagttgcatcagtgtgccccacagccaccatgcaggtcaaccccaccacacaacagaatacatctctttggttgaggattgcaccaaaggtgaagagctgttgggtgagagacactgctttctctcacgcagaagtgtgagttgctgagacatacagaaaccttcaaaagctagtggttgaattctctcttccttccatata

SEQ ID NO: 22996 - DNA, 388 bp, Glycine max
  Clone ID: LIB3050-016-Q1-E1-D1
gatggtggtgaaggtgtatggtccaacctatggatcccccaagagggtcctggtgtgtctgattgagaaggaaattgagtttgaaacagtgcatgttgatctcttcaagggagagaataaggaacctgagttccttaagctgcagccatttggatcccttcctgttattcaagacggtgattatactctctatgaatctcgtgcaataatcagatacttagctgagaagtataaagaccaagggactgacttattgggaaagacaatagaagaaaagggtctagtggaacaatggcttgaagtggaagctcataactttcacccaccactctacaacttggttattaatgttctgtttgcgccattaacggggggctctttcggacaa

SEQ ID NO: 22997 - DNA, 167 bp, Glycine max
  Clone ID: LIB3050-016-Q1-E1-D10
cggggggatcatccatatcgctgcgctcatgctacaacccgagccacttgctgtgttaacacagcttagcaactgctactaatttggctggcctccaccatggcgcttggcatttatacctcgcctggtggtcttcctggtcatccttgtatcaacgctttcagtcc

SEQ ID NO: 22998 - DNA, 294 bp, Glycine max
  Clone ID: LIB3050-016-Q1-E1-D12
gggcagggaatttactcactgcctcactgtgagagcaacgaataacaggtatggtggacgccggatagagccacagtgcgaactgcgagctgtctccggagactcggaacgatctgtagtcggcgacggggctgagctgatcgccgaagaagggaggccacgggtggaagttcacgtcgatcggccacggttactaccatgttgagatgccgcacggtgctatgggcgctatggacccgaacttcgaggattctgtggagattggcatcgtttgatcgccgtggtttccggtgg

SEQ ID NO: 22999 - DNA, 346 bp, Glycine max
  Clone ID: LIB3050-016-Q1-E1-D2
caatggggaaccaaaagaggaactacgacaactacgacgtaacgcggagcgatgaggaaaatggatttgggagagtgcctccgcactattttctggcgaagacgataatctcttcgttctcggtgcacgatcgagttgggaggactctcaaaggacgcgatctcagtaaggttcgaaacgctatttgggctactacgggattccacgactatacccttatcataggatcacatgatcataacatatgttaattaccgtattaatttactactgtgataccaattgatacgacttttgttgagaagtcagttctagagttttcattttttcgattagcatctcagtg

SEQ ID NO: 23000 - DNA, 296 bp, Glycine max
  Clone ID: LIB3050-016-Q1-E1-D4
gaaggaaacgggaaattcaatttccaagaaaacatcaggtggtatacgtaaaggtgcttctgcatctgggaagaaggttgctaaagctccatagactactgcatcatgaagatggtgaagatatatcaatcaatgcgcctttctcaggaaccactatttggaggaattgtatagaaccccgctctttacgtaattgtgccttcacaaatttagtggttgactttagtatattttccacggaggacatcgatgattacttataatggccctctgttttttgaatttagatgatgtgt

SEQ ID NO: 23001 - DNA, 405 bp, Glycine max
  Clone ID: LIB3050-016-Q1-E1-D5
gggattattcagacacagtatacaaaagttcacagtactgttttaagcaagattccaaaactctcaaacaaagaaaagaaggtgcagtaggaacatgggtgcaaatggataagtgaagtctagttaggagtgtacgatgaagttcttgaggtttgaaatttctttttgctgggattctattgctctgttgattgatggttagaagatggtatgcttattcttcagaatcagggttgaccaatagctttgacttaggtgcttattctcttacgattttcttatgtaccccttggaagatgctttacatgaacttttatcaatgggtatattaccctagttaaactatatttggataagaaagattatcagagaggggaaaaatagaaaagaaaggacatggagaac

SEQ ID NO: 23002 - DNA, 399 bp, Glycine max
  Clone ID: LIB3050-016-Q1-E1-D6
gggcgtaccctggctgattataatatccagaaggaatccactctgcatttggtgttgaggcttcctggtggtatgcaaatatttgtgaagactctgacagggaagaccgtaaccttggaggtggaaagctctgataccattgataatgtgaaagcaaagattcaggacaacgagggtattccaccacatcagcagaggcttatttttgctgggaagcaattggaagatggtcgtaccttggcggattacaatattcagaaggaatccaccctgcatcttgtcctccgccttcgtggtggtttctgagtctgtctgttatgtccaatattagttgaattctctgttgttatgtccagtgtatgttgaactcgttggttgcagctgttatttaggtgctgc

SEQ ID NO: 23003 - DNA, 406 bp, Glycine max
  Clone ID: LIB3050-016-Q1-E1-D7
gattatggatggtaccagccttgtgcatattcttgacagtgaacttgaagaacagctatttcaacttgcaagtaggtgttctgttgttctatgttgccgtgtcgctccgctgcaaaaggctggaattattgcccttgtgaagaatagaacatctgacatgacactagccattggagatggtgctaatgatgtctcaatgattcaaatggctgatgttggagttggcatcagtggacaagaaggccggcaagctgtaatggcatctgattttgcaatggggcagtttaggtttttagttcctctcttattgatacatggtcattggaactaccaacggcttggttacatgatactgtacaatttttacagaaatgctgtccttgttcttgtcctattttggtatgtg

SEQ ID NO: 23004 - DNA, 364 bp, Glycine max
  Clone ID: LIB3050-016-Q1-E1-D8
gacactttccgtgtaaacagaacagagcaacactgaacaatggcgcaaccttcctcctcctcgaagcctgttgtccctctcctgaaggacgagctggacatcgtgatcccgacaatccgaaacctcgacttcctcgagatgtggcggcccttcttcgaaccttaccacctcatcatcgtacaggacggagaccccaacaggaccatcaatgtccccgaaggcttcgattatgaactctacaaccgcaacgacatcaatcgcatcctcggacccaaagcctcctgcatctcgtttaaggattctgcgtgtcgctgctttggttacatggtctccaagaagaagtacatctacaccatcgatgacg

SEQ ID NO: 23005 - DNA, 333 bp, Glycine max
  Clone ID: LIB3050-016-Q1-E1-D9
gatcatcaatacagctgagctcttgatagtactcaggcaagctacggtattattatggcttatcaagtgttgctaatttgtttggtctccaccatagctgtttgcatacatactatggagaaagcaaagcaggaaaaaccttctaccaagtctacaggcccttcacataattggccacctccagcttgtgtccccaattcaccaccacgatttttacaagctctcaaaccgccacgggcccatcatgcaacttttccgtggctcagtcccttgtgtggtggcttccaacgcagatcccgtcatcgagttccttacaacccacgacatcaactt

SEQ ID NO: 23006 - DNA, 156 bp, Glycine max
  Clone ID: LIB3050-016-Q1-E1-E1
ggagtgatgcaggacgagaagaagatgaacgtgaagaaaggattccttggtgttcaagtgggtttagaagacgacgaagaaggtggctattcccctcaaagattcgtgatcccaatctcttacctttcccaccctctcttcaagcaccttctggac

SEQ ID NO: 23007 - DNA, 191 bp, Glycine max
  Clone ID: LIB3050-016-Q1-E1-E10
gatggcaagaatggtcattaagaagaccatttcgcggggtggccaacacttacgtcatggtggaggaaacatctccatcagcagcatcctgcgagaggcccatgtatgacggataggcttcacgctattgaatctcatcctatctgtccgctctctttatatgtcatggttaccatggatggggtagccac

SEQ ID NO: 23008 - DNA, 215 bp, Glycine max
  unsure (1)..(215): unsure at all n locations
  Clone ID: LIB3050-016-Q1-E1-E2
ggagcaacagttagttaacactgcaaagtcagatatttcncgttgactaataactaaataattaatcttctacaagctcactaacgcaccatcaaagaccctagatttagtgtataagtataaagtataatataacctcaaccccatgatgtagttgtaagctccacagaatagggcgaacacagtcgtttttagtttagctgtggatctaatca

SEQ ID NO: 23009 - DNA, 372 bp, Glycine max
  Clone ID: LIB3050-016-Q1-E1-E3
gtggactcatcgtgtcaaactcaaactgttgtttctcctacaatgtgtaaatcagagtacaaattcttgagaagtgcttgcaagggaatgtctaattctcacttgtggggccaagtaattgtgacagcaggatgggatggatacataagagtgtaccagaattatggattacccgttcgtggctgaaaccaaagtttaggctcatttgttggggaattataaggttatttgctatgctcacatagcattagagggttcttggatacaatagaatttgcttcaatgcaaaacttcattgttttcaagcataatagtatagcagccagggaaattcttcagtagctgattggtggttgccctcacataataata

SEQ ID NO: 23010 - DNA, 347 bp, Glycine max
  Clone ID: LIB3050-016-Q1-E1-E4
acgagaggatggtcagctatgtcttgcagtagtaacgtgaacacaataccacttcaacatactatatgcgagtacatgctggcatccttagccagtgctttgctcaaaccaacagatcatccaggaacatgtatcgtgcattaggctactactggttaacaattgccatctatacatgcaatgtgtataagtttagccattaattttccatgatcagcgtacaatttatcgctcaactcatgatataagttcatttcgtatgtttgcatcctcaatcatgatattcatgaccattgacggcatcacttcgattgtagttgagatcaaagtgttcgatcgttgaacac

SEQ ID NO: 23011 - DNA, 212 bp, Glycine max
  Clone ID: LIB3050-016-Q1-E1-E5
gggcagagtttaggccacacacgttgttggagaagcttccgacacgagagtgcaaccttgtggtactggagcccctcgcttatccggtgttacaggctggtcccaagatctgtctggcgcaggacctggacttaatgcagatccacacgttggtggctggtactctcaggacgtgcatcgtgattccaatacccagcccacgggcctagcct

SEQ ID NO: 23012 - DNA, 355 bp, Glycine max
  Clone ID: LIB3050-014-Q1-E1-F11
ggaacagtacccggtttcgacactcgcgtctcagcctcagtttcggatctctcccttctctcaccaatttccaggatttgaaaaatggcagattccaaaccaggattggggaagccagtgttcaccaaggtcgatcagcttcgtccagggaccagcgggcacactttaactgtgaaggtggtcgatgctaagatggtgatgcagaaaggtcgttctgatggtcctcaatcccgccaaatgcgaattgctgaatgtttggttggtgatgagactggaatgatcatattcactgccagaaatgatcaagtggatgtgatgaaagagggtactactgtgaccctgcacaatgccaaaa

SEQ ID NO: 23013 - DNA, 355 bp, Glycine max
  Clone ID: LIB3050-012-Q1-E1-F1
gggcaacaacgctggtgaagactacggaggtggaacagacttggatgactttgtggcttttatcaatgataaatctggagcaggtccatatggaaaaggacaacttactttccatgctggtatcgtagaaagcttggatgtcttggtaaacgaatttgtacctgccagcgatgaagagaagaaatccgtgtttacacgattggaagatgaacttgtgaagcttaagggttccgcctcaatgtactggaagatttacttgaaagctgccaagaattacatggaacaaagttctgattatgctaacaacgagactcagcgcctacagcgcattcttgataagtcgattatccctgcg

SEQ ID NO: 23014 - DNA, 325 bp, Glycine max
  unsure (1)..(325): unsure at all n locations
  Clone ID: LIB3050-012-Q1-E1-F10
gtacggcctgatcgagacccacaagttgaacggccaattcagatggatttcatcgcagatgaaccgtgtgaggaatggagagctctaccgcgtgatctgcgacaccaggggtgctttcgtgcagcctgctgtatacgaggcttttggtttgacagtggttgaggccatgacttgcggcttgccaacattcgccacatgcaatggtggtcctgctgagatcattgtgcacggcaagtctggcttccacattgacccttaccatggtgaccgtgctgctgatctccttgttgacttctttgagaagtgcangcttganccaactcac

SEQ ID NO: 23015 - DNA, 180 bp, Glycine max
  Clone ID: LIB3050-012-Q1-E1-F11
gtggaataaaatgatgtgatgtgatgtaataaataacactaactattttatgtagttgtactgaagaacctcgagcattgtatggctgcatttctcgtactaagttcctcttgtcttatggattttctgatgctctgttaagatactattcgtttccagtgatgtatatcttttgcctcc

SEQ ID NO: 23016 - DNA, 344 bp, Glycine max
  unsure (1)..(344): unsure at all n locations
  Clone ID: LIB3050-012-Q1-E1-F12
gattgaccgaacaaagactatggctgatgtctacggtgctttttttgattttgcttctatgttggagcccaaggttgacaaaaacggtcccaatgcaacaaaaacattgagcaggctggaagctatacagaaaacttgcagagaatctggtctcttaagtaaaaggaaatcttacattgtgaatgatgaaagtggatatggctcaaccatgattgtcatattggtcatcatggtttccatcatttttgcttatctgtctgctaaccaccataatagctagtgtaagttctgttgttaattttaatgtacggttganattgtaagaacaattatccttatctata

SEQ ID NO: 23017 - DNA, 391 bp, Glycine max
  Clone ID: LIB3050-012-Q1-E1-F2
gacagcaacaaacatcttcacaaactagtaatattattcttcgaatccattttattattcataatgggtattttcacatttgaggatgaaaccacctcccctgtggctcctgctaccctttacaaagctctagttacagatgccgacaacgtcatcccaaaggctgtcgaagccttcaggagtgttgaaaaccttgaggggaacggtggccctggaaccatcaagaagatcgctttcgttgaggatggagaaagcaagtttgtgttgcacaaaatagaatcagttgatgaggcaaacttgggatacagctatagcgtagttggcggagttgggttgccagacacagtggagaagatcacattcgaatgcaaattggctgctggcgccaacg

SEQ ID NO: 23018 - DNA, 381 bp, Glycine max
  unsure (1)..(381): unsure at all n locations
  Clone ID: LIB3050-012-Q1-E1-F3
ggaggagttcaggaaggtattcaacaaagaacatcctgaaaacaaagcagtgactgctgtgggcaaagctgctggagcaaaatggaagaccatgtctgatgctgaaaaagcaccttatgtggtaaagtctgagaaaaggaaagtggagtacgagaagaacatgagagcctataacaagaaacaggcggaaggtcctactggtggggatgaagaagaatctgagaagtctgtatctgaggtgaatgatgaagatgatgatgangaaggcagtggcgaagaagaggatgacgattagagaatggactgataattgcatttatgtaggttctgatgattttgatcatctgttgtaggtggtctggtcatttcctgataaacata

SEQ ID NO: 23019 - DNA, 382 bp, Glycine max
  Clone ID: LIB3050-012-Q1-E1-F4
gttccgcaactagttaaagcagctgaagagaaacccgttgataaaagttcttcctcctgtgtcccatttggagagccagttgaacaaggtcataaaaccatgcaagaagatcatctgaagcttgaggaagcctgtgttatggtgaatggagatgaaatccaattacctcccaaagcaagtggtaatttagatactaataagaaaaaggcgcgacaaaccttttctttgtcaaagaagtctgccagaaagcaagagtataaggagcttgcagcatggcatatgaacagtgaaaaagtaaacggagattgcatggagaatttagatccaactttaccacaagataataataaattactgcttcctagtatgtctgaacctgaat

SEQ ID NO: 23020 - DNA, 363 bp, Glycine max
  Clone ID: LIB3050-012-Q1-E1-F5
gtagcacgaatcgaaggggacaaaatacaactttaggaatagtatatttgtaagtagatgtagactgtagtggcccatataagaaggatcgagaatagaaaacgtgtttcacaatctgaatagaaatcaatgcgatgacgtatagtgattaggtgaattgcacatgtcgttgatatgaaagaaatttccgcgctggaaatgaattcacctcactaagaatgcaatgattaagttgttatatttattataacttattataatatttataagatttaatgtgactttttatttttgtatgttttacggttattttgtatattaaaatttaaaatttcactataatcctttaagtatctaaaatat

SEQ ID NO: 23021 - DNA, 380 bp, Glycine max
  Clone ID: LIB3050-012-Q1-E1-F6
ggtggaaaaaaagcattttgcaactgctcgcagcttaacgctgcaatttctttccaagttggtcgagcgacttcaggattgccttgcatacttttggtgtttgaagagctaatctgtctaccaaaatgaagggacgtgtaaggtgggatgaggctaatattggagaaattgaggcaaacaaacctgtgaggcagaaaattactgagcctaagaccccatatcatcctatgattgatgatgacagttctctatctcctgtacgaggaagttttgatgcatgtattgataatgaaaatcgtgctgaagcaatatggagtgctctgaatgatgtaccctcagtagcagaatagcactggacaatctggtggttgacatcatct

SEQ ID NO: 23022 - DNA, 300 bp, Glycine max
  Clone ID: LIB3050-012-Q1-E1-F7
ggattgggtttggttctcagtgtacccaaaaacagaggcaaagctgttgtttattattcgcattcgtggtattaatgccatggaccccaaatcaaggaagatcctgcagttgttgcgattgagacagattttcaatggtgtatttctcaaagttaacaaagccacagtgaacatgctgcacagagttgagccgtatgtgacttatggatacccaaatctcaagagtgtgagagaacttatttacaagagaaggtatggaaagctaatgaagcagaggactgctctaactgacaactctat

SEQ ID NO: 23023 - DNA, 212 bp, Glycine max
  unsure (1)..(212): unsure at all n locations
  Clone ID: LIB3050-012-Q1-E1-F8
ggaacaaaacaagtgtttccaatagattatcctaagtccttgggaatagtgctgcaatggcttcaaatcaaggagaggttgaccctttgggagccactggaagcccatttgtgtgcaaggttcatattgccctcaagttgaanggagttcaatacgaatatgtcgaagaaaatttgaggaacaagagtgaactgcttctcaaatccaaccca

SEQ ID NO: 23024 - DNA, 356 bp, Glycine max
  Clone ID: LIB3050-012-Q1-E1-F9
gaagacgacagaaggggttcaaggttgcgggatgagattacaagtggagccacacccagttcatgcttcaaatgtggtgaagaaggacattttgcccgggggtgcacaagttctatcaagtcagggaagaggaattgggaatcatcacacacaaaagataaaagatcccaaaaagaaaatgattacatgggaaatagatctgcatctaatgatatggttggggctcgcagaaagaaacgttcacctaccgaagaaagaggcttttcaactcccaagaaatcaaagagtagaggtggttggacggcggagtatcctaccgaagaaagaggctttacaactccaaagaaatccaaaag

SEQ ID NO: 23025 - DNA, 379 bp, Glycine max
  Clone ID: LIB3050-012-Q1-E1-G1
ggaggctgaagctgagaagcaatatctgtatgagaagatcaaattgcaggaaacttctcgtgtatcacagagcagtagtggggttgacccctcttcaatgctggtgtattccaaaatccatgatcttctctacagtgttcctcccaaggcagacggtcaatctaatgagtgccaccctttcagaacaaacccatgagtactggttcagtgtatgttataatcttctacatattatagcaatgctattctgttgcacaattgatgaagagctagtctaattccattaggttcaagacaatgtaagccttttgtagatcgaagaggtactagtaagtaaaggcttaacttagtttgaaatttggtttgttctatggggtgt

SEQ ID NO: 23026 - DNA, 352 bp, Glycine max
  Clone ID: LIB3050-012-Q1-E1-G10
gaaggtgaaaggtaatgttttcaagaacaagagagtcttgatggagagcattcacaagtccaaggctgagaaggcaagagagaagactttgtctgatcagtttgaggctaagcgtgcaaagaacaaggctagcagggaaaggaaacttgctcggagggaggagcgcttagcccaaggtcctattgacaagacatctactgcacccagtgccccagctgccacagcaccccagtctacccaagcgccaaagaaattcaagaagtgagtagcatatcctggaattcaaaggacgtggagtctttaatagctctggcaaaatctttagtctgctaaagtagttgtgtcgaatctc

SEQ ID NO: 23027 - DNA, 355 bp, Glycine max
  Clone ID: LIB3050-012-Q1-E1-G11
gataccaatcttggaattcctttcggttctgtgctcaatgatgctgttcgtataagctacgccgcacacctgatgcttgtatttccagttgtcttctttccattgcgtctcaacatagatggcctcctcttctctaaatcaaggcctctggttctggataacttcagatttgcatcactcactattgcccttattggtgttatcttcctgagagcaaatttcatacctagcatttgggatgctttccagtttactggagcaactgccgcagtctgtataggattcatttttccagctgccatcactcttacggaccgctacaacattgcaactaaatcagacaagattttgtgtg

SEQ ID NO: 23028 - DNA, 378 bp, Glycine max
  Clone ID: LIB3050-012-Q1-E1-G12
gaacaaaacaagagaagggtccaattttttgaaaattattaccatcattcatattcatcaacgacccctcttctgtgcccacttccaaatcttctcctctcgctatgggttgcggctcctcccttccagataggggctcaaggcagttgggtcgacccaattcagagaatggtggagggcaggacgccaagaatctgagggtcaagcttgttctcttaggtgattctggtgttggtaaaagctgtattgttctacgatttgttcgtggtcagtttgatccaacatctaaggtaactgttggagcttcttttttgtcgcaaacaatagctctgcaagactctacaacagtcaagtttgaaatatgggatactgctggtc

SEQ ID NO: 23029 - DNA, 325 bp, Glycine max
  unsure (1)..(325): unsure at all n locations
  Clone ID: LIB3050-012-Q1-E1-G2
tacgccaatcctttttccacaataatccaaataattttgctgatgtangaggtggtgtcctaggctgtagaggattccactcaagctttagaactacacagagtggcctgtctcttaacatagatgtgtcaactacaatgataatttctcctgggcctgtggtggatttcttaatttccaatcaaaatgtgagagatccttttcaacttgactgggctaaaggccaaaaggacctaaaaaatctgaggattaannactagccatccaatcaagaattcanaatttctgggctcagtgaactcccatgcagagagcagacttttac

SEQ ID NO: 23030 - DNA, 383 bp, Glycine max
  unsure (1)..(383): unsure at all n locations
  Clone ID: LIB3050-012-Q1-E1-G3
gtccaaccaagcctccgtaacggtgccaaaagaccacaaaaagggggacaaaaccctaaaaaacccaaagccttgaaaagcagaaaaaaaccaaacaatggggcgaagacccgcgaggtgttatangcaaattaagaacaaaccataccccaagtcacggttttgccgtggtgttcctgatcccaagatcaagatttacgatgttggtatgaagaagaaaggtgttgatgagtttcctttctgtgttcatctggttagttgggagaaggaaaacgtttctagtgaggccctggaagctgctcgtattgcttgcaacaagtacatggccaaatttgctggaaaggatgctttccacttgagagtcanggtgcacccattccatg

SEQ ID NO: 23031 - DNA, 85 bp, Glycine max
  Clone ID: LIB3050-012-Q1-E1-G4
ttaggtacagctgcgaaacagacaacgaacggtatcgctgctataccacgacataccggtaccgctgctaaaacactacaaaatg

SEQ ID NO: 23032 - DNA, 371 bp, Glycine max
  Clone ID: LIB3050-012-Q1-E1-G5
gaggttaagaaccaagagttacagcatttgaagcaattggtgtctcaataccaggagcagattagaaccctcgaggtgaataactatgctttggcaatgcatttgaagcaggctcaacagagcaacccctttcctgggcgcttcccacctgatgtcttctaatggggtgaatgtttagaatgtaataataaaggcagcaaatagctgcatcaggttgattaattatgtcgtgttatttttctctctttcttacaaaggtcaagcgttgttgtagttcaagacttcaggttattctatcctacagtatccgaatatactgtcactcagttcaattaccccgtttgggattttatgatttcgagttgtagtct

SEQ ID NO: 23033 - DNA, 384 bp, Glycine max
  Clone ID: LIB3050-012-Q1-E1-G6
ggagtacgagtacattgaagaagatatctttaacaagagcagtctccttctggagttgaatccggttcacaagaaggttccggttcttgttcatgcccagaaacccatcgctgagtcattcatcatccttgaatacattgatgaaacatggaagaagtatccattgttacctcacaatccttatcaaagagcacttgctcgattttgggcaacctgtgttgaacaaaagcttgggaaggctggatgggtagcaatgtctaccagcggcgatgaacaagaagaggctatgaaagaagccaaagaaatgatggagaaaatagaagaagagattaaggcacacgaattttttggacgagaacatattgggtaccttgatattgcaat

SEQ ID NO: 23034 - DNA, 352 bp, Glycine max
  Clone ID: LIB3050-012-Q1-E1-G7
ggagagagagagagaatggggaagaagatgactttggttcagactattgccactgctggcgtcttctctgcgatttcattctggtatgggttcatgtttggtagagagtcatcgcgcaaagaactctctcagctgatcgaagatctccgtcacggcggcgaaaacactccacctccctcccattcttgattgagctatctctttctttcaaatcgttacagtgtatgtctcttccaaatttccccctaacatttttgtaactagcgttgattctcaactctttagcttgttctaagtgcaccaaacaacacagtattgcagcttccttatattattaccgttatgaattatc

SEQ ID NO: 23035 - DNA, 317 bp, Glycine max
  Clone ID: LIB3050-012-Q1-E1-G8
ggaaccaaaccagaaacacttaatttctcatctcatcatttctaattcgacctcttttctcctgcactaacaatccaagatgaataccaacaacgacaccgaaaaaaaccaatcatttccagaagcacaaggagcatcatcatcatcatcttctccacccaatgttgggactgagaattggggaactcacataatgggcacccctgctgttccaagcagccacccagataacaaaaaagcagctttacaaagtggacaacctcaaccagttcaatactaccatgaccaacatcaacatccctacgtgcaacataacc

SEQ ID NO: 23036 - DNA, 297 bp, Glycine max
  Clone ID: LIB3050-012-Q1-E1-G9
ggtagtagaattgcagtgaaattggagagaaaaaaaaaaaatacactcaaacatggagggctatgagatcctcaaagatattggttctggaaattttgctgtggccaagcttgttagagacaactgcaccaatgagctttttgctgtcaagtttattgagagaggccagaagattgacgagcatgtccagagggaaatcatgaaccacagatcattgaaacaccccaatattattagattcaaagaggttctgttgacaccaactcatttagccatagtaatggagtatgcttctgg

SEQ ID NO: 23037 - DNA, 387 bp, Glycine max
  unsure (1)..(387): unsure at all n locations
  Clone ID: LIB3050-012-Q1-E1-H1
gaaggcaccagtaattaataacaagctagctattagttcgattttgtagtaagtgaggtgccaatatggtgaagatagctcttggtactttggatgactcttttagcgctgcctctcttaaggcttatttcgcagagttccacgcaactctgattttcgtgttcgctggtgttggatcagccatcgcttacaacgagcttacaaaagatgcagccttggatccaacggggctggtggcagtagctgtggcacatgcatttgcactgtttgtangtgtctccgtcgccgccaacatctcaagtggccatttgaacccagctgtcacttttggattggccattggaggcaacatcactctcatcactggtttcttatactggattgccc

SEQ ID NO: 23038 - DNA, 362 bp, Glycine max
  Clone ID: LIB3050-012-Q1-E1-H10
agaggatgacaatgtggggaacaagaaggtggttgttgtggagcatgctgttaatggtaatggcgtattgcctcacaccactgagtgaatcatgttatgttaagagaacaatagttcaaattgtataaaggggccggtttgtattgattgtttttgctgtttgctgtgtcttgtgtttggcatgataaaatagtacaatgtgccgtaaattgctttggattgaattatgcaattcggtgttgttgtgaatcagagttctttatagagcatgtacggtcttatttgggattgaattttgtttggaatttgggacttggttgccatcaatgtaaacttttttagaaatgaagtaatatgttctg

SEQ ID NO: 23039 - DNA, 225 bp, Glycine max
  Clone ID: LIB3050-012-Q1-E1-H11
gaaggatgtcaatgtcaggaacaacatcgtagattctgtggaacaagcagtgtattcagtaacttgatactgccccagtcgagatgaatcccacatgtaatgtttagagatgaattattcacattgaggtgtagggccggttcgtgatgattgctttcgctgtttgcagaatcttgtgtatagtacgccagccgattagaatgtgccttagattgctgtgcgagt

SEQ ID NO: 23040 - DNA, 349 bp, Glycine max
  Clone ID: LIB3050-012-Q1-E1-H12
gactcacaaaacaatataacttaattgccttaaggaacgttcgagaccacagaggtttctctagtcttctcctgtggagagcttgttttctcttgttcattcatctcacttccaattaaggaacaagctttccaccaatttgaatcaccaatggctcgctctttctccaacctcaaggttctctctgctcttgtcgccgacggattctccaacactctcaccatgcgtgggtacgcagtagcgacacaaagcgcaacaagaggaggagcagcctccatcagcggcaagtcaggggaagacaaggtactgggaagacgtgctgaaaacgtttcgtgggttccagaccctg

SEQ ID NO: 23041 - DNA, 373 bp, Glycine max
  Clone ID: LIB3050-012-Q1-E1-H2
gaacgctcagcactcaaatcctctgagagaaaaaaaaattagggttttgcatttcgggtcagacagactcagacatgggaggaggcaatgcccagaagtcaaagatggctcgcgagaagaacctcgagaagcagagggctgccgctaagggaagccagttggattcaaacaagaaagccatgtctattcagtgcaaggtgtgcatgtaaacatttatatgcaccacatcagaagtgaagtgcaaggagcatgctgaagccaaacaccccaaatctgatctccatgtttgttttcctcatcttaaaagtgaaagagtgcatgttgagacatgatatatcaatatatggccttatatagtctctatccacagaga

SEQ ID NO: 23042 - DNA, 369 bp, Glycine max
  unsure (1)..(369): unsure at all n locations
  Clone ID: LIB3050-012-Q1-E1-H3
accaaatccaactctaacgtttcaacctgtttttgtggacctgggctttggtaggaaatccactaaagataagcaatcacataaaggcataagcaagggcttgtgcttggagattacagggcgagtgcagcatgatagaaatgaccagaagtatgttatgatggaaaaccaattggcaacagcttcaaatgaaaatgtttggcaagtatcttcaggaaatggaatgcacatcatggaagatgatggtcaatgtttactgaactatgataagtaaagtgccttatccagcttttagcgattactgttacattcttcatttgctttctcncattttctttttgatttgcgcgtctaagccatgaaattgat

SEQ ID NO: 23043 - DNA, 382 bp, Glycine max
  unsure (1)..(382): unsure at all n locations
  Clone ID: LIB3050-012-Q1-E1-H4
ggaacaaaacaagtgtttcgaatagattatcctaagtctttgggaatagtgctgcaatggcttcaagtcaggaggaggtgacccttttgggagctactggaagcccatttgtgtgcagggttcatattgccctcaagttgaagggagttcaatacaaatatgtcgaagaaaatttgaggaacaagagtgaactgcttctcaaatccaacccagttcacaagaaggttccagtgtttattcacaatgagaagcccatagcagagtctcttgtgattgttgaatacattgatgagacatggaagaacaaccccatcttgccttctgatccttaccanagagccttggctcgtttctgggtcaaatttcattacgataaggtttt

SEQ ID NO: 23044 - DNA, 328 bp, Glycine max
  Clone ID: LIB3050-012-Q1-E1-H5
gcaaatttcccgatcgccgttggggatctccggccaaccgatttcagttggtgagtcataggttcagtatatggttaagggtttttggattagtgtgttgatgtacacaggtggaagagggaggttctgtttgcttcccctgctcctgttctgttttcctctgttttttggtcagagaatatttaggcatttagctatattctccactttttttcttttttctttttgttgtatataataataataatagtgttattggatatatcatatgtgttttatttttttatttttttgtttggttagctttagttttctggtttgatatgtt

SEQ ID NO: 23045 - DNA, 377 bp, Glycine max
  Clone ID: LIB3050-012-Q1-E1-H6
ggttaaaagaaattaatgaagaaagaaaagaatccccactctagctccacttacacagactgtataggttgccacatgtgatcttctgtttctcttgcttgttccaggaacgttgggttaactttccatgcatgccagttgttttctccaaatttgttgcttctcttacatttcatgatgaggtgaaaacttatgataattgttgggtccaattgtccatgtttactattaggacaaaatttagatacattatttatttatttatttttggtgaatttcaccttaaaaagtgatgattcaagagctaggcttatcatgctatatggaccaagctgtaatccctccactgtcaagagccactggtggtcgctgctatg

SEQ ID NO: 23046 - DNA, 352 bp, Glycine max
  Clone ID: LIB3050-012-Q1-E1-H7
gaggcatagacgacaaccaagtacagagaagtaaagagagttttgctttttgaaatggcagcgtcgtcgtcgtcgtcggagaagcaagtggtgctgataggcatagacgacagcgagcagagcacgtacgcgctgaattgggctttggatcacttcttcccgagcccaatcttcaagctcgttctcatccactcaaggcccaccgccacctccgccgtgggcttcgccggccctggaaccgctgagatcttgcctattgtagattccgatttgagaaagattgccgccagagtcctcgaaaccgccaaacaactttgcttcaacaaatccgtgaatgatgtgacagcggaag

SEQ ID NO: 23047 - DNA, 354 bp, Glycine max
  unsure (1)..(354): unsure at all n locations
  Clone ID: LIB3050-012-Q1-E1-H8
gctcatcgagtctcatatttttcatacaacacattctttctagacacgcaacacctagaagatttccttattctttttggtgctaaaccgttgggatatagcaacaacatgttaggaatgaagagacatagagataatgaagggtcagagagcttagatttggcaaaatgtcttgtgctgttctcttgtccaatagaaagcaacaaggcacaacagaaaagttttggggctgtggaatttgagtgcaagacgtgcagccgcaagttctcntcctttcaagcactgggaaggcacanggcaagccacaagaggcagaagctannaggggaagaactcaaagaacaagccaaaact

SEQ ID NO: 23048 - DNA, 351 bp, Glycine max
  unsure (1)..(351): unsure at all n locations
  Clone ID: LIB3050-012-Q1-E1-H9
gacgatgatccaaagcaacaaaaacttcaaaccgtagtgaccaacaagaaggtttcatatcttgagaccttgggagtcatgagaagccccacatcgcgtcattaaaagtacattagcctcacagaggtgtttgttggattcttgatcaattctttccttttgtacataagaatgtgcatacaaaatcatcggctttgaagcattgtcagagatgtgttttatccatataaggaggatttgtagtccggtaggcacccagatgtgatttttttgacaatacctaccacaagtatcaagtctgtccttcnccgtgaccttttaactcacttttcctttctgacagtgttgatg

SEQ ID NO: 23049 - DNA, 374 bp, Glycine max
  Clone ID: LIB3050-013-Q1-E1-A10
gaagctaacgggaaatcacctacaaggttcgcgtccaattttgacattttcagcaaattttgaaaaagatgcacattggaaactattaaaggagattttgttacagatatttgaaacaccaaaggaccacagaaaggccaagcctttccatgatcacgtttttgttttctcaatagttgatgaccatatatggttccggaattatcagatctctgctcatcataatgagtcggacaaattacctagaggtggccttgataaaatgacattgattgaggttggtccgcgattctgcttgaacccaattaaaatatttggtggcagttttggaggcccaactttatatgagaatccgctctatgtgtcaccaaatc

SEQ ID NO: 23050 - DNA, 270 bp, Glycine max
  Clone ID: LIB3050-013-Q1-E1-A11
ctcaaagagagagatgaatactgaaatgatggagatggagtgtttttggtgaaaccttaattgatttggatttatctggatttcgcgggagtttttaggagcttttccattggtagcacgtgtttaggctttgagaaatatgcgttagcgttactgtttgtaataaatcattatgatgattactttgtggggttattgatttccttgactcatttatttgtaattatctctattttttaatgaagaataatatagaatacatttcttttg

SEQ ID NO: 23051 - DNA, 378 bp, Glycine max
  Clone ID: LIB3050-013-Q1-E1-A3
ggaagtttgaaagacaaatacaccatggcagatatcctgagtgaagaacagattgttgattttaaagaggcctttggcttgtttgacaaagatggggatggttgcattactgtggaagaacttgccactgttattcggtcgttggattagaaccccaccgaagaagagctccaagatatgataagcgaagtggatgcagatggcaacggaaccattgaattcgatgagttcttgagcttgatggccaagaaagtgaaagacaccgatgcagaggaagagctcaaagaggctttcaaggtttttgacaaagatcaaaatggctacatatcagctagtgagttgagacacgtaatgatcaatctaggagaaaaactaacc

SEQ ID NO: 23052 - DNA, 155 bp, Glycine max
  unsure (1)..(155): unsure at all n locations
  Clone ID: LIB3050-013-Q1-E1-A4
cctcaacactggagtcactaagttggactcngtggaaattcattccgggactcagctaagctgaccaaacatgattcacaatggttgcattgtatcccaagggtgtgccctccgaattctaggtcacgcaaccatgtcatacctagtacctctgt

SEQ ID NO: 23053 - DNA, 139 bp, Glycine max
  Clone ID: LIB3050-013-Q1-E1-A5
gaagaagaagaaggttggttgattggtcccattgattccgaagagaaaagaaaagatgtttgagccacaacagctatacacttgcgcgaagaccgaggaattcgacctcgaatcaggagaaaccgtctacccagggctg

SEQ ID NO: 23054 - DNA, 353 bp, Glycine max
  Clone ID: LIB3050-013-Q1-E1-A6
ggaatcgagattcatggagcacatgggtatctcattgatcaattcttgaaggatgcaatcaatgatagaacagatgaatatggtggattactagaaaaccggtgcaggttcttaacgcaggtggttgaagctattgtctctgcaattggagcggaaagagttggtctcagaatttcaccagcaattgatttcagtgatggctttgactctgacccacttgggctaggcttagcagtgattgagagactcaacaatttgcaaaaacaagtgagcacaaaactcgcctatcttcatgttactcagcctcggttcacactcttggcgcaaaacgggtcagtgagtgaaaaggaaga

SEQ ID NO: 23055 - DNA, 394 bp, Glycine max
  Clone ID: LIB3050-013-Q1-E1-A8
gggtcaaagaacacatctccattcgatgaacactacataattatgtgggcagtttctgtggccttatcactttatgcaatgatgttaattgctgagttcacagtggagcttcacaaacacagtttcctttcgatcatcaaacggttcactgtgctaatgggagcccttgtcgctgttctgctcactataatcattcttcccctgtttggatatttcaagttgcttctttggaccatttgtttcgtgaaggcaacatttgtgagcttcgaagaaatttgtaattgtttttggaaaggattgtgtcaaaccattgacatggtaagcagttactttggcagggaacatgctagtttgccagtataatgtataattagtactcgaagcaacatgagtg

SEQ ID NO: 23056 - DNA, 315 bp, Glycine max
  Clone ID: LIB3050-013-Q1-E1-A9
ggagtgtgtgagagagagagcgagcagtttcagacacagagagaggggtttgggattggagggattgacgctgcgtctcttcctcttctctttcgatccatccctcattcctaatcctccaatccaaccacctcagcctcacgctcacatatacacatatctgaacgcgtatcgtccctcctatagcttcaaagcgcatcctcaaggagctcaaggacttgcagaaagacccaccaacttcttgcaccgctggtcaattacctgaggacatgttccattggcaagcaacattaatggtcctggctgatagtcctt

SEQ ID NO: 23057 - DNA, 371 bp, Glycine max
  Clone ID: LIB3050-013-Q1-E1-B11
ggaagttgaaggggaaagagagaaaagaactagctagctggagtctgagaactctagcatgtactagtactactcctacattcctccatcttcctttgtactattttttttttaaccataaaagcaagagcacaaagatggtgagagctccttgttgtgaaaagatgggtttgaagaagggtccttgggctcccgaggaagatcaaatcctcacatcttacattgacaaacatggtcatggcaattggcgtgccctcccaaagcaagcaggcttgttaaggtgtgggaaaagctgtagactccgctggattaactatttgaggcctgatattaaaagagggaatttcacaattgaagaagaagaaactatc

SEQ ID NO: 23058 - DNA, 318 bp, Glycine max
  unsure (1)..(318): unsure at all n locations
  Clone ID: LIB3050-013-Q1-E1-B12
gaagctagcagccaagtaatattcaatanaaatatggaactgacgaggctcatttcggttctcttcttcttgctagtgatcacggtgggatcttctgcttctccacagcattggagaaaaaaaagggttcgcgagccgtgcaagaagttggtgttttatttccacgacataatttacaacggccacaattccaagaatgccacttccgcaattgttggaacacccgcatggggaaacaggaccatactagcggggcagaaccacttcggtgacttggttgtgttcgatgaccccatcaccttggacaacaacttgcac

SEQ ID NO: 23059 - DNA, 250 bp, Glycine max
  Clone ID: LIB3050-013-Q1-E1-B3
gactcaaacaatgattagtacagcataataaaaacatcgatcagtatcaatatcagcgcacaacatatccacatccagagtttgagaattattctgatttttgagaattgaagttcatagaactaatggcttttagagggtttgcctctgtctagttgcggtcatagtggccactatgtggagtcaaaatgcttgccaatcgggttgcaccaatacactaacaagcttaagcccttgtctgaactacata

SEQ ID NO: 23060 - DNA, 338 bp, Glycine max
  Clone ID: LIB3050-013-Q1-E1-B4
agccaaaagacgacaaaaaggggggcaaaaatccgccccagcaaaaacaacaagttgaatttgtgcaaaaatggaaacctttcaagttcaaaccgaacaaaggcgtgtccgcaatggcacatttggaatttgacaaggcgttgttttaactgaagtcctccgattacgatctgtatgccaatcactccattggttaacacgcctcccaagaaaattaagcgtcccttgggttctttaaggaacctccatttccctggggttcggtctctatttctgcatcagctttccttgctgtctcttatatttatgcaagacgagacaagctttttagaaacaaa

SEQ ID NO: 23061 - DNA, 392 bp, Glycine max
  Clone ID: LIB3050-013-Q1-E1-B5
gaagaagggagagaaaagggtcctcatcctcttgctcaagctggaactggctctttccctggaggcttcattgggaaacataggttgcaagcagccataaccaacctcaataaccaaattagtattttgcaggaagagttgaaaaaagttgaaacaattggtgaatcctccaccgtttgcaaggatttaatttcaagcgttgaatccactccagatcctctccttccattcactaaaggttcggtcgatgcgggttgggatcgatggttcggaggtgcccaccactctcgaaatcacaaacgttggatttagatattttgttttgcatttatttatattttttggttactatgaacatttaatttaaaatttacctgcttgtgatggaaaca

SEQ ID NO: 23062 - DNA, 404 bp, Glycine max
  Clone ID: LIB3050-013-Q1-E1-B6
gacgatcaaacaacaaaaaacactgcacctcttcttctgggtacgccactttttttttttttttattcttctttttcttcaacccctctattcgcaaaggaatcgattctgttcagttttcttcgtttttagtttaaattcacagtcttttgaggaaaaaaattaaagggtaaccgctcgtttaatccaccaagctcaatttccatccctccacaaaaaaaaaaaaaaatcaacaaaatcagcttttttattattattattatgcataagatttctatggaggctttgacttatatcgtgggcatcgaatcgggttattgattgatgaggtttgatgggtgtgatcagatttggtgaagaagaagaagaagaagaagaagaagaaagtgtgacttgatgattat

SEQ ID NO: 23063 - DNA, 280 bp, Glycine max
  Clone ID: LIB3050-013-Q1-E1-B7
agggaatagagttgggaaaaataaaaagaatccatgagatattaatcaacactacacatatagtataaatacaacatctatgtagccacttaataatacactttccctcaatttttgtgccccgaatatgcctattatttccagctatttcaatggcttcgtgattcacatatgttcagcaacagtagactcttcagcatactcacacgagatagcattcagatgtatcttagtcaccaatcacaatatgactgtcactgcaaagatagtgatgattata

SEQ ID NO: 23064 - DNA, 396 bp, Glycine max
  Clone ID: LIB3050-013-Q1-E1-B8
gaagatgagaagaagaagcaaggggagttgaaggagaagtttgacaacctatgcaaggtgatcaaggatgttttgggtgacaaggttgagaaggttgtagtctctgaccgtgttgttgattcgccatgctgactggtgactggagaatacggttggactgcaaacatggaaaggatcatgaaagctcaagccctaagggacaacagcatggcaggatacatgtcaagcaagaagacaatggagatcaaccctgagaacccaattatggaggagctcaagaagcgtgcggatgctgacaagaacgacaaatccgtgaaggaccttgttctgttgctgttcgagactgctcttctcacttctggtttcagccttgacgaacccaacacttttgggaac

SEQ ID NO: 23065 - DNA, 351 bp, Glycine max
  Clone ID: LIB3050-013-Q1-E1-B9
gatataaaatatttctggtaaataaaaattgatagacagttttggttccgcatataaagcttctctggcgcttgggcttagcataacccttacctttggtatagagaagaagaatagagagtgatggagtgcgtattcggattggtgggtaatggattcgcgatcgtggtggctgattcatcggcggtgcacagcatcctcgtccacaagtccaacgaggacaagatcatgcttctcgattcccacaaactcatcgccgctagcggcgagcccggagacagggttcaattcactgagtacattcagaaaaacgtcgccttgtatcagttccgttacggcatccctctcaac

SEQ ID NO: 23066 - DNA, 378 bp, Glycine max
  Clone ID: LIB3050-013-Q1-E1-C1
ggagcgaagaagatattagggtttttgagtgcggtgcggcgatcctagcactctcttctgcagctttcgccgacagcttcattcaccatggctgagcaaaccgagaaggcttttttgaaacaaccaaaagtgtttctcagctcgaagaaaactgggaagggaaagagacccggaaagggtgggaaccgcttttggaaatccattgggcttggatttaagactcccagggaagccatcgaaggaacctacattgacaagaagtgccccttcactggcaatgtttccatccgtggccgtatcttggctggaacatgtcacagtgctaagatgaacaggactattattgttaggaggaattatctccattttatcaagaag

SEQ ID NO: 23067 - DNA, 260 bp, Glycine max
  Clone ID: LIB3050-013-Q1-E1-C10
ggaagaaggcaaatcgcgaagactagatctgatctgagagaatggctcctcggtctagcagcaaggacgcccaagaccttttccgcgctctttgatcattgatctctatgtcatctatgccgtattcaccgcgttcatccacgttgtttacatggctttggttggataattccacttaactcttcctatcacgagtactttcttgtgtatgaactgctgttcttgctgtttgtctcaggatccacgtgaataaagagaat

SEQ ID NO: 23068 - DNA, 364 bp, Glycine max
  Clone ID: LIB3050-013-Q1-E1-C11
aggggaacaaacccaaaatgcacgagtgctccatttgtggccttgaattctctctgggccaggctctgggtggccacatgagaaaacacagagcttccatcaacgaagggtttcctattattccttctatcgaccaagttattgcgaaaatcccggttttgaaaaggtcgaatagcaccagggttatgtgcttggacttggagttacacctgtagataatgactctgtgcttggaatcaactatgaaatcaccacctcaacttctttttctttgttctgactaactctttttacctctttctggacacatgtagtattctttcatttttgtgtaaaaatttcattgacttttcccttataaaga

SEQ ID NO: 23069 - DNA, 375 bp, Glycine max
  unsure (1)..(375): unsure at all n locations
  Clone ID: LIB3050-013-Q1-E1-C2
agggataaaaagaacgtccaaaaataaaaattcattgtatatgtataatcgctttttaaaaaattatcagaagtcatttttatttttgcacattaattaatgattatatcatgatattttgtttgaaatgtataaaaggttgctcttatgtcgaaaatgcagaagtagtattttgtttttggtttatcaaaatattgtattacaaggatttgaaggtatgaatatgtattttaagctaaggctactgtggaccagtttgtaagtggttcatggggaacaattaattttaaccgttagaataaacttgttattataggttaaatcacacctgatttcctcaccacttctccttcgnacactatatatattgccgac

SEQ ID NO: 23070 - DNA, 414 bp, Glycine max
  Clone ID: LIB3050-013-Q1-E1-C3
gacaacttcattagcaaaacaaaagccataggttactactcttcgccttttcctttgcaattgttaccaaacaattcttgcttagcccttacaagcaagcattaacaacaatgaagaaagtagtgttaaaggtgggcttacatgatgatagaatcaagcgaaaagttatgagaacagcatctggtctttcaggggttgaatcagtttctattgacatgaaagacgagaaaatgaccttattagggaacattgatccagtgaatgcagtgtgcaagctacgaaagtgttgtcaaactgaaatagttacagttggtccagcaaaagaggataaggagaaagagaaggtggagccagtaaaagaacctgctcctctcaaactctatgatgcctatccctattattatcaaatgacac

SEQ ID NO: 23071 - DNA, 136 bp, Glycine max
  Clone ID: LIB3050-013-Q1-E1-C5
aaaaattatcgtgtcaactcgcgttcacacattatccatgaatcctgtctcgcctactaccaggatactactgtattgctcatataattcacgatgtattgcacaacacgtgttagggataactcgaatcactcat

SEQ ID NO: 23072 - DNA, 216 bp, Glycine max
  Clone ID: LIB3050-013-Q1-E1-C6
gagagaaagagagagaaagatgtcgaagcgtggtcgtggtggttcggcggggaacaagttccgcatgtcgctgggtcttccagtggcggcgacggtgaactgcgccgacaacacgggggcgaagaacctctacatcatttcggtgaaagggatcaaaagccgtttgaaccgtcttccctcggcctgcgttggcgacatggtgatggccaccgtgaa

SEQ ID NO: 23073 - DNA, 382 bp, Glycine max
  Clone ID: LIB3050-013-Q1-E1-C7
gacaacccaaaaactactgaaattcccaaaggcaaaaaacaaaaatacaagatgaagagcaagttcctttttgttttcctattcttgggaattcttaactgtgaagcacaatatttcaatgccaacccatacgactatttacaactagccttaaggtggcctaattcctattgcttgacacatgaaggtggttgcagggaaatagtaccacaatatttcactattagctaccttcatcccatgagaagaggaggccctgatctgcgaaattgcccctcaccatttaatatgccaaatagcactatggagacaaacaagaatgacctactcaaatactggcctgatctgagaactgataattttattgagagcaagtcattat

SEQ ID NO: 23074 - DNA, 374 bp, Glycine max
  Clone ID: LIB3050-013-Q1-E1-C8
agagacgacagaagggggtgaactcaaggacgagctcttctgcatccgttttccttctattgaaaattgcaaaagcttcatggaaacattccaagaagttgctgaaacacaaaaggcagaggatgagaaggaatcatctgatgcagctggtcttattgagaaattaagtgttgaagagaaggctgatgcagagaagaaagatgaagagaagtctgaggacaaaactgtggagaaagaatctgcatcaggaaaggaaagcaaggcagttgaagagcctgcgtcctcagcttgagtaattcctaatcataatccaaacttggctaactgacaagggtaagttggtgaagtttttggcggccaaaacctgggaaaat

SEQ ID NO: 23075 - DNA, 433 bp, Glycine max
  Clone ID: LIB3050-013-Q1-E1-C9
gaattccaggccgacccagcgcgtcaggcgagacgacgatagagcggggtgtgcttgtgcttaagagctagaacactgctgagctcggaggactaccatgcccacatatcaaaagctcataggacagagtgttctcactgatgttcctcgctactccaatggtcacctagccttcaacaaccaacacagccatcacaagatcctttctaatgcaagggttgggtatgatgaatccactcctgctgagacagatggtggtgaagtcgtggatgttgaaagggatcagtgcaccaacaagaagataaaggtcgctttgaattgcacaagtggaagacctattggccttaacaagcttatagccacaagcctagtttgctattaaaaaaacctatctaataacaacatcataatcagcaacatgaatgtgttaaaa

SEQ ID NO: 23076 - DNA, 406 bp, Glycine max
  unsure (1)..(406): unsure at all n locations
  Clone ID: LIB3050-013-Q1-E1-D1
gaattcatattcataatccacatttattcatcagtttttcgttcccttcacaaaactcagaaccctaactatatccatggcatcgggtggaacagaagcttttccagatttgggtaaacactgccagcaccgcgattgcaaccagctcgattttcttcctttcacctgcgacggttgccaacagatcttttgtttggaacacagatcctacaagtcccacgcgtgcctgaaatccgaccacaacagcagaaaggttgttgtttgcgaagcatgttccatgtccatcgagaccaccggccatgtgggacaagactgggaggcaatcttgcagaagcacctcaagtctggtaattgtgnacctaccaggaagaagaaacaatttgtcccgtcaagcgttgcacggagg

SEQ ID NO: 23077 - DNA, 312 bp, Glycine max
  Clone ID: LIB3050-013-Q1-E1-D10
gacagcaacagacatcttcacaaactagtaatattattcttcgaatccattttattattcataatgggtattttcacatttgaggatgaaaccacctcccctgtggctcctgctaccctttacaaagctctagttacagatgccgataacgtcatcccaaaggctgtcgaagccttcatgagtgttgaaaaccttgaggggaacggtggccctggaaccatcaagaagatcactttcgttgaggatggagaaagcaagtttgtgttgcacaaaatacaatcagttgatgacgcacacttgggatacagctat

SEQ ID NO: 23078 - DNA, 318 bp, Glycine max
  Clone ID: LIB3050-013-Q1-E1-D11
ggaactagttccaaagatattgggaacgaaactgagaaaggtaaagatggtgtttaggtagagactacaaaaatggcgtcgaaggcttcttcctctgcttctcaaacccaaacactctcttcaatttccgaccaaaaggagtttcctcaacatgtttctatgacccgcacttggcttaacaaattgggcatcgacaaacccattcctcagagttgcgaaacccgcggcttctactcccacttctttggaagcttcgtcaaactcaacgatatcaagaggggacgaatctcttgcactattgctgtcaaaccccaaatc

SEQ ID NO: 23079 - DNA, 284 bp, Glycine max
  Clone ID: LIB3050-013-Q1-E1-D12
agaaaggggattcgatgcgattctcggagatgaagaagggcttgatgcatagctatggcgttgctgtgattgtgttggctttgagtttgtgtttgggttcatcatcggagcaattaagttcacgagaatgcgagaatctcggtttcaccggactcgccttgtgctccgactgcaacactctctccgagtacgtcaaggacaaagagttggtatcggattgtttcaagtgttgcaccgaagactccaacgatgccactaccaaagttacttactctggagctgtg

SEQ ID NO: 23080 - DNA, 342 bp, Glycine max
  Clone ID: LIB3050-013-Q1-E1-D2
agcaggtgatgacgaagaacctttcaatgataattcctcagactcttacttttgcttgggtgaactttttcttttctggatttgtaccacccaagataccctttccattgacacagaggtttaggtcaatgctacagaacggaatacaccttatcacagtagatgttagctatgtcagcagtcactcttggtacatcctcaatctgtttggattatcaagagtctttagtctcatcttgggtgaagaaaatgctgtacatgatacacaacgtatgatgcacatcggtggattttgatttgatccttcacatggtctaaatgctgagaaagacaatcttgaca

SEQ ID NO: 23081 - DNA, 326 bp, Glycine max
  Clone ID: LIB3050-013-Q1-E1-D3
ggagtgaggagtgaagatggggtcagaggtgtctaaacatatggagcgaagaaagacaatccagacagagaagaagagtctgtccgatctgaaaagcagcggagaagactaccctggctccgactaccgtccccaagacagaaaaaactggatgtcccatctcgaaccttagaaactccgcagcaagcaaatcgtctggcccgggcaccaagactccgcaagcaacaaaattgggattcctctcctcactcgcccctttgcccagtgccaaacactctccatgtaacggcaactctccctcgggacccgcggtcttcgaaatccgc

SEQ ID NO: 23082 - DNA, 311 bp, Glycine max
  Clone ID: LIB3050-013-Q1-E1-D4
gggagacttaaagttgtaaaatttgactaacaatgtttgttgaccccaaatttaagtggttgcaagaaagctgcaactcctggccatggctatgccaggttccctttacatatggtccattgtggttggcatatgctatgcggtgccgcttgccattacactgccaactgcctcagagttatttggcctcaaaaattatggtcttatatacaacattctcaattttaaacttccctttgggtcgttcctctcttctggtctccctgctggcattctctatgatttggaggcaactaccaccgcacgaagag

SEQ ID NO: 23083 - DNA, 373 bp, Glycine max
  Clone ID: LIB3050-013-Q1-E1-D5
gaacttcaacttgaagtagatagaaagaggctatggctggtcttcaaagatctgcagtgtccttcaggaggcagggttcatcaggcttcgtttgggacgataggttcttatcagaggaattgaacaaagccaaagaagatcagaacaacaacaacgatggcggccccgagattaaagagcttcatcaagttcaaacaacgccgccaccggagagaacccgctccaacggcggagcacggggttaccgcaccggaaaagtttcgccggcaattgagccaccgtctcccaggctctctgcatgcggcttctgcgccgcctttgggaaagcaggggacagcaagccccaacggactacacccgccaaacatcgacc

SEQ ID NO: 23084 - DNA, 333 bp, Glycine max
  Clone ID: LIB3050-013-Q1-E1-D6
ccaaaaatccatctggcaaaattcttcggaaggatctcatcaaactcgcaacgtctaaactctgaatagatgagctttttcgtaatatattttttctatcggagttggacaagtgaggaaataatctttagctccttttttgctgtaattttctggcttgtttacttttgctgctttcatattatctgttctttgttcaacagtctattgtaatttgtagagaacaaagtgctgtgagtacaccttataggcaataaaattgtctctttgtaatttcttttttcaattggaataacttctctatcagtttgtcatcagactttgtggacaata

SEQ ID NO: 23085 - DNA, 229 bp, Glycine max
  Clone ID: LIB3050-013-Q1-E1-D7
ggttccactcgttctttagatctatccactcacctgcctcttcctcaaccctttctccatctaacgagtaaggaaaaatggcgcgtaagaagatcagagagtatgactcaaagaggttgttgaaggagcactttaagagactttctggcaaggagttgccgatcaagtctgcacaaattactgcatcaactgatttcactgagcctacagagaaagaaccctggctttc

SEQ ID NO: 23086 - DNA, 265 bp, Glycine max
  Clone ID: LIB3050-013-Q1-E1-E1
ggaagacagagcagagaagccgcttcaatgtccaaagatgacaactcttcttctcaagattcttcatctgaccttgaattttctctctccctatgcccccgctaattcctccttcacttctcttcccattaccgctcccagtcaagttgttggatgggctccccttggagcatatagaatgaacagctataatagccatgcaaaatcaccagccacagaagttttcaattctacacctgacaaaagagcaagcaatagtgctggg

SEQ ID NO: 23087 - DNA, 259 bp, Glycine max
  Clone ID: LIB3050-013-Q1-E1-E10
aaaagaccaccgaaggggggaaatggaatcagtggactacatcagttcttatgattgtctactctggaggacatacatctatcgttcacctttgttaatcataatggtttaaactcaccgtgttgacactcaactcataagtcactaaatttcgatgctcgccatattaccgttacaggactagcatccttaacaaatttgactgggcttacataactggaattgtatggtgcacgacgaacagactttggaacaaact

SEQ ID NO: 23088 - DNA, 391 bp, Glycine max
  unsure (1)..(391): unsure at all n locations
  Clone ID: LIB3050-013-Q1-E1-E11
gaaccatggctggtgtgaaccccgaggcagganggtggaaggcttatccttctgttatggagactgctcttgatagtggtgatggaaggagtcatcataacatgagtgatgatgggtcggtgatgcatttctctgctacaaggtcagtggcagtgccatcatctggacagaataaagtgattcctagtccaactcagtttagcatcctctataaggggaaaatgtgtatctatgaaggaattcctgcagaaaaggtgcgtgaaataatgttgattgcttctgtctctgctaagtctgctgaaatgaagagtgggatccgattgacttcattcattcncaaaagcccttcttcttcacagggaaactctactaatttgccttcaacccaatc

SEQ ID NO: 23089 - DNA, 162 bp, Glycine max
  Clone ID: LIB3050-013-Q1-E1-E12
aggtatacaaagctcagaggaatgtaatactgtgtgttacagcatgtcttctctactggtctatcagccgcatttgcaagtatcagaaggaaatccagagtctggaggaagtggagaagagaatcaaggcccagttgattcctttagtcatgattagtggat

SEQ ID NO: 23090 - DNA, 203 bp, Glycine max
  Clone ID: LIB3050-013-Q1-E1-E2
aggtgccatcatggccattcagactcattatcttggcaccgtggaaaggaatggatctacgatcatgtgtggtctaactactcctgatagtgactatggatggatcgataacagccaccatgagattgcgactcaggtcattcatccgctatatccttaaattctacatcatcacatatttgaagcgactgaggcttctaaac

SEQ ID NO: 23091 - DNA, 314 bp, Glycine max
  unsure (1)..(314): unsure at all n locations
  Clone ID: LIB3050-013-Q1-E1-E3
gaaaacaaggtttggaacaccagacacatggaatggaaaacgcaaaatatcataacacattacacatggctttcacttgatgaanggcaaatcagcgcatcctatggaagattatttagtttcagaatttaagcaagaaaaggacagataattacgcttgtttgcaatatttgatggccacttaagccatgatgtancaagctatttgcagaaccaccttttccaaaacatcttgcaacagcatgacttttggactgagacagaaagcgcagtgaaaaaagcttacgttganacagatgagaaaatattggaac

SEQ ID NO: 23092 - DNA, 216 bp, Glycine max
  Clone ID: LIB3050-013-Q1-E1-E5
gagagacttattgtagtaacttttgcgtagcgttgttagttgacgcgatgtcgatgtggttgcacgagaatctcttctcggagggcctgtctatgccacgttcgcttctgatatggtcgatagtgcgttggcgtacgctatccggtgccgcttgccgttagacggctaactgccccagagtcatgtcgtctcagggatgatggactttggagcaca

SEQ ID NO: 23093 - DNA, 367 bp, Glycine max
  Clone ID: LIB3050-013-Q1-E1-E6
gatagttgaatttttaacttgtctgttcttatcttcatcctacgccaatagcccaaaaccttgttctctttttgtggttcatttctctcttccagatgccacttgccgttcttcaccctcacgattttctcaggaaaaacccatctagccagtaccagaccataatccctcactctcccaacatgaatcctaataagtctcaccggacttcccgaaaccgtaagaagcggcccgatccaagcccacaaggcgttgtcagcccagcccggctcacattatccccgaaaccccaagtcaaaaacaagccgcagcagcaactcgtcatgggtcaggtcaaaatactcaaacgcggccaacttttgaccca

SEQ ID NO: 23094 - DNA, 389 bp, Glycine max
  unsure (1)..(389): unsure at all n locations
  Clone ID: LIB3050-013-Q1-E1-E7
gaggatattggcgttgacatgtccgttcctagcagcagatctgcaaccctgcaaagtttgcaatcggtttacaatgatgatactccacaagttagaaggcgacgagtaagatttcagctaccagaaaatcctggtatggatcccgatgttagggaagagcttttggatttaattcaagccaaggaagctggggttgcatatataatggggcactcgtatgtgaaagcaagaaaatcatcctcattcttgaaaaagcttgtgattgatattggctactcatttctgcgcaagaattgcangggtccagctgtagctcttaacattcctcacattagtcttattgaagttgggatgatatattatgtgtagttcttggtgaaatttacaac

SEQ ID NO: 23095 - DNA, 91 bp, Glycine max
  Clone ID: LIB3050-013-Q1-E1-E8
tacggctccaaaaaaacacacaaaggttacggctccaaaaaaacaaaccaaggaaaaaaggaacctaaattcctaaaagaaaaaaaggaat

SEQ ID NO: 23096 - DNA, 357 bp, Glycine max
  Clone ID: LIB3050-013-Q1-E1-F10
ggcacacaattaagctcaaatcaaaagtccctttgcatactatctatcacttatcagttatcacaaagcaaattcattaagtcttttgccatggcctccaacagctgcttcatcttggcttttttcattgctatttccttctcatgcatggattttggcctagcagctcgccatcttatgcaaacaagtactgcaccaaatttgcctttgccaaaaccaacattgccacctttgccttcacttccaacactgcctcagggcaatgttccacctttgcctacaatcccatctcttccaaccattccaactgttccacaggtcactcttccaccacttgctgccactttacttccaaac

SEQ ID NO: 23097 - DNA, 347 bp, Glycine max
  Clone ID: LIB3050-013-Q1-E1-F11
gtacaaagaaccagtttggaatatatttttaatccttctttgtttcttcactttcttccatacacataaccatgtcttctcagaccgttgtcctcaaagttggtatgtcatgtcaagggtgtgctggagctgtaaacagggttttggaaaaaatggaaagtgttgagtcatttgacattgatctgaaagagcagaaagtgacagtgaaaggaaatgtgcagccggacgaagttctgcaagccgtttccaaatccggaaagaagacggcattctgggtggatgaagcacaaccacctgaaaacaagccttctgaaactgcacctgttacctcagctgagaatgataac

SEQ ID NO: 23098 - DNA, 202 bp, Glycine max
  Clone ID: LIB3050-013-Q1-E1-F12
acagaaaggggaaggaaaattggctagaatccctccgaatcgaacccgtttccggcacgttaaaggaaactgtttaagattcagtactctgttaactgggaagattcttcaacccgtgctgccccgaatttcaccaaccaagtttaaaaggtgttcaattccaagaacccctttgtgtccaaaaatcccaaaagttcgtttt

SEQ ID NO: 23099 - DNA, 303 bp, Glycine max
  unsure (1)..(303): unsure at all n locations
  Clone ID: LIB3050-013-Q1-E1-F2
aaaagggaaaaagagaaagcttcgtcaaccgcctgaggaaaaaagaaacagaanaagaaattaaacataaacaccattttttattttcataaatatggaatagaaaaacgaaagtcttgaaaaagaagaaaaaaaaaacaattcttttcccttagggtttgactgtgaattgctacatcgcgtgtggcccaaacagtggaatcaccgattccgtcaagttcggtcctctgcanggaaagatctgtccccaattgcccgaaagtttcggattctagaaagagaaagcttcgtcacccgcctgag

SEQ ID NO: 23100 - DNA, 406 bp, Glycine max
  Clone ID: LIB3050-013-Q1-E1-F3
ggtgtgagttcattaacatatacaaattctctgtgttgtgttgtgtacttgtgttaattgtgttgttgttgtaggaaatttaagtgaagagagaatgatgatgaagtctgctatgtgtgcattggtgcttgtggcactggttgtggttgaagtggggcccatggctgaggctgcggtgacttgcaacccaacacagttgactccttgtcttccggcaattaattcaggttctgcaccttcgagtgcttgttgccagaagctgaaggagcaaaagccatgcttctgtggctacctcaaaaaccctagcttgaagcagtatgttaactctcctaatgccaaaaaaaccgttagttcttgtggtattgcctatccaacttgttaagcacctcttatatatatataaaat

SEQ ID NO: 23101 - DNA, 396 bp, Glycine max
  unsure (1)..(396): unsure at all n locations
  Clone ID: LIB3050-013-Q1-E1-F5
ggtatatggtcgcggtatcagagtaggactggttaccacaacatgtacaaggagtaccgtgacaccactctaaacggtgcagttgaggcaatgtacaatgaaatggcttctcgtcacagggtcaggagcccttgcatccaaattatcaagactgcgaccatcccagctaagctttgcaagagggagagcaccaagcaatttcacaattccaaaatcaagttcccattggtctacaagaaagttagaccacctaccagaaagctgaagaccacatacaaggccaaaaagcccaacttgtttatgtaacgtggttgatgaatgagttacaaatacttggtgtctatcaggcgtntttagtagagacgtacccgttggttttttactgccagattttgt

SEQ ID NO: 23102 - DNA, 238 bp, Glycine max
  unsure (1)..(238): unsure at all n locations
  Clone ID: LIB3050-013-Q1-E1-F8
ggactagagaccaaacaatgaatgacaccgttgaagaagaagccgaaatccgaaacggtacgatcagaacaaccctcgtgagaggtatagggacgttcaatttcattccacgcattgcctctgaatgagaaataatacgccacatggattacatgctcatctgggttaacacctgtaaaaggattgaagatgcaagaactttgattgcagttcaaaagtanaanaaaaaaaccctgca

SEQ ID NO: 23103 - DNA, 132 bp, Glycine max
  Clone ID: LIB3050-013-Q1-E1-G10
gatttcatttctctctctctcgccgcttagactagtagggcttctcctattggtcgcactcttaaccagcgccgcgctctcctgcgcccccgaaggtgatcctcttatcccacactcctccctttccctttc

SEQ ID NO: 23104 - DNA, 387 bp, Glycine max
  Clone ID: LIB3050-013-Q1-E1-G11
ggggccaaatgctttgcttactgcaggcaacacattgatagctagcatagctcattcacggaaaggccggtggaggaaccgtgtaattacttgttaacaccatatcttaaagagacacagttggtgtatcttgtcttgttgaattgaaaactgtgctatagacacccttaaaaaaggaattgcttgaaatgagcatgacttttttcttttctgcttctggggtgaaaagtctgtatataatatagactttcatagacaattgatttgcggccacagatagaggatttttggaggcttgactggagagatgattcaatttctgaaggaaatcttcagtctcattttgagatgtttctgttagctgattatagtgtccttgaacccagg

SEQ ID NO: 23105 - DNA, 219 bp, Glycine max
  Clone ID: LIB3050-013-Q1-E1-G12
ggggatttcatctgcaagcatttaggacgtgcatctggttcaaaagcagctactgctttgagtaaagttacaagtcatgcctccaaactataagttactatagctagtcatgcacctgcatgataggcacattgtttgggcactgtagaatatgtatttaagttggtgtttaatgtcccgtgggccctgcctatagaaaagagagagccagcaagcaca

SEQ ID NO: 23106 - DNA, 325 bp, Glycine max
  Clone ID: LIB3050-013-Q1-E1-G2
gggcaagttgacttggaagagaacaccatgatgatttagcacaatttatgccaggaatgggctatgctactgaagcacttcatttgcctggaatatctaagaggttggagtttgatttggcaattaagagcaatgatttgagaagagctcttcattgtcttcttaccatgagtaatagcagagatattggacatgatggtactcaaggacttggtttgaatgacattcttaatttatcagataaaaaaccaaattaagtatctgattaaaaacaagatatagttgaaggtgttcacggtatactgaaattcgcaaaagagttttt

SEQ ID NO: 23107 - DNA, 309 bp, Glycine max
  Clone ID: LIB3050-013-Q1-E1-G3
tgcggttctagtgtgtgattgtttgttgttgtaactcgttcttcttcatttgttgttctgtgtatgtgtttgttttttctctcagctgaaaatgtcttgctgcggtggtaactgtggttgcggaagctcctgcaagtgcggcaaccgctgcagaggctgcaagatgtacccagacttgagcgacactgagtcaaccatcaccgagaccttggtcatgggaatggcacctgttaacgctcaatttgagggtgctgaaatgggtgtgcccgctgagaacgatggctgcaaatgtggaccaaactgctcctg

SEQ ID NO: 23108 - DNA, 270 bp, Glycine max
  Clone ID: LIB3050-013-Q1-E1-G4
acgcacgcgtcagtacgcatgccaaaaaacacaaaagggggcggcaaaaagcattcactgtgtcccgaaaaaaaagaagagaaccaagataaccgacggatgaaaacgacaatgtggaagagcgttgccgccgccgccaagaggccctccgcctcctcccccctctcgccctcgcctcgaacccgtcgatcgcgaaaagacatgtccgttactgctgcgagtgttcactaagattgggagtcaccattccatggaagacattgccgtcag

SEQ ID NO: 23109 - DNA, 377 bp, Glycine max
  unsure (1)..(377): unsure at all n locations
  Clone ID: LIB3050-013-Q1-E1-G5
gaatagaaatagaactgtcttttcatatagatatcccttcaacacaacataggtcatcgaaaggatctcgaagacccaccaacgcacgaaagccgggatctttcagaaaatggattcctattcgaagggtgcataaccgcatggataagctcacactaacccgtcaatttgggatccaattcggttccttaggaggtatcgggaaggaattttggaatgtaataatatcgattcatacagatacagaagaaagggttttctattgattcaaacgctctacctacgagatagggatagagaaagaggaaaaaaccgaggatttcacatagtacttttggtcganaaatcgatctgatttntttcgtacttttcgctca

SEQ ID NO: 23110 - DNA, 349 bp, Glycine max
  unsure (1)..(349): unsure at all n locations
  Clone ID: LIB3050-013-Q1-E1-G7
ggcaggtagagagagcgagagaacaagaacataagggaaccacagcggcggtaacagaagaacaagcagagaatgggtcgagtgagaacgaagacggtgaggaaatcctctcggcaggtgatagagcgtcactactcgcgcatgaccctggacttccacacgaacaagaagcttctggaggaagtggcgataatcccgtcgaagaggctaaggaacaagatcgcggggttctcgacgcacctgatgaagcgcatccagaagggccctgtgcgcggcatctccctcaagctccaggaggangagcgcgagcgccgcatggacttcgttcccgacgtctccgccatcaaca

SEQ ID NO: 23111 - DNA, 222 bp, Glycine max
  Clone ID: LIB3050-013-Q1-E1-G8
gcacacccgtggcacgatcttgagataagacccgaagctccaaagatcttcaactgtgtggtcgaaataaggaaaggaagcaaggtgaaatatgaacttgacaaaagaactggacttattatggttgatcgtatactttactcatcagttgtttatcctcacaactatgggtttattccacgtactatttgtgaggacggtgattccatggatgtcctgggt

SEQ ID NO: 23112 - DNA, 356 bp, Glycine max
  Clone ID: LIB3050-013-Q1-E1-G9
gacatgtagtaattgtcagttggcagttttttcttagaatgaaaatgtcgtctaaggtcactagtgccaccctttgcctagcagtcttattcctcttcttaaccttcacatatgcaggcggacttggccctgcatcttcctctatcacttcaatcaaaactcaacatggggttttggaagaggagaagttggacgtggaggaaacttgtgatggtattggtgaagaagaatgcttgatgagaagaacacttgtggctcacacggattatatctacacgcagaagcacaaaccatgagatattcatatatagctggttctcatatcaaattcaggctatatgcctcacccgtttaca

SEQ ID NO: 23113 - DNA, 365 bp, Glycine max
  Clone ID: LIB3050-013-Q1-E1-H1
ggtctcgaagctgtcaacaatggcgatttccggcgatctcagagtctcagcaacacttcctctgtatcactcccactcgcctccactccgaacctcttctcagtcttccccaaaggtagactttcatcgtttcttgaacagagcttgtagcatctctgaattcactccaaaatgcccttacctgacaattgtacgatgcaatatgcgtgggtattgcaagccagttgctgcggtccttggaggtcctaaatttacatcaaattcagttagccaagaaaccgagaactttctccttgatgctgttaaaatgaacttctttgagcggttaaatttggcttggaagataattttccatcggcaacatc

SEQ ID NO: 23114 - DNA, 345 bp, Glycine max
  Clone ID: LIB3050-013-Q1-E1-H11
gaatgcgaatcctgtggttcacgccaagaaagagcgaatcgctcgttctgatgatcctcacgccgatgacgccgttgatcctctcgacatctatgatttcgtgagggatattcgggatcccgaacatccttattccctggaacagctcagtgttctctccgaggaatctatctccgttgacgacaaattaggccgaattctgataacttttacgccgaccgtacagcactgtagcatggccacggttattggactttgtctcagagttaaactgaagcactacttccctcctcattacaaagtggacatcaaggtttctcctggattctcatgcaacgaagaatc

SEQ ID NO: 23115 - DNA, 335 bp, Glycine max
  Clone ID: LIB3050-013-Q1-E1-H12
ggtccttctttgcgagattgaatcgtaagcagcggctaccctaatcctctcctcttcctctctactaatttcagctatggccgacgaagctgtggttgttccagatcccaccagatcgatgtcaagctctttaaccgctggagcttcgacgatattgagattactgacatttctctggctgattatatcggagtggcgacatccaagcacgccacgtatgtgcctcacaccgccggcaggtactcggtgaagcggttcaagaaagcgcaatgccccattgttgaaaagctgaccaactccctcatgatgcacggtagaaacaatggcaagaaact

SEQ ID NO: 23116 - DNA, 207 bp, Glycine max
  unsure (1)..(207): unsure at all n locations
  Clone ID: LIB3050-013-Q1-E1-H2
ggcaacacanattacatagtaactctttttctcgaatccacagagtgagactcatcgtgtgaacaacgataacggcatgtttgggcgtacttgaaaaatttgagcggccatggacgaaaccgccgtaacgatgaagcctgattggctcaacaaccgcgcgagggtcgccggagagagaacccaagaatttttctgtggcggcgacga

SEQ ID NO: 23117 - DNA, 285 bp, Glycine max
  Clone ID: LIB3050-013-Q1-E1-H4
agcccaaacgtcaaagaaagggaaagggggttactggattggaccaacccttcggttctgaattcggtcgttaatttcgtaccggggaataataacctatccatttgttcaggaccaaacccaaggcatggtgaactacaacccttgcaatgaccccaaagtcccaactttatgccatgtgggcacttcatttccccaaaaaatggaggaaaaggtgcaaaacggcttgaaaaaccaacgggtccaaaacaattcctggtttcttcacaataatttcacacaggg

SEQ ID NO: 23118 - DNA, 308 bp, Glycine max
  Clone ID: LIB3050-013-Q1-E1-H5
ggagtgtgtgagagagagagcgagcagtttcagacacagagagaggggtttgggattggagggattgacgctgcgtctcttcctcttctctttcgatccatcccacattcctaatcctccaatccaaccacctcagcctcacactcacatatacacatatctgaacgcgtatcgtccctcctatggcttcaaagcgcatcctcaaggagctcaaggacttgcagaaagacccaccaacttcttgcagcgctggtccagtagctgaggacatgttccattggcaagcaacaataatgggtcctgctgat

SEQ ID NO: 23119 - DNA, 337 bp, Glycine max
  Clone ID: LIB3050-013-Q1-E1-H6
ggcaccatcactagaacatatagaaaaaccaagtaatactagccaaaatatgtctcccaaatacatgtcccttttcctcctagtaatactagggatggcttttctggccactacttcccttgctgatcgtcgttttctttcggtggaagatggtcatgatcaccatcaccaccacccaccaaaaaaacactggcctccaaccacacaaaatgaaccttcaaacgcagaaaacaaggagaacactgaggtggaggatggtcatgatcatcaccatcactacccacctaaaaaacactggcctcctaccacacaaaatgaaccttcgaaagtagaaaac

SEQ ID NO: 23120 - DNA, 383 bp, Glycine max
  unsure (1)..(383): unsure at all n locations
  Clone ID: LIB3050-013-Q1-E1-H7
ggacatgataataggtgtgtgcagtaacatttccatttcatttggagagacagagtagtgagtagtgagagggcgaagcgatgaatgccccagatcgttacgagcgtttcgtcgtccctgaaggcaccaaaaaggtttcttatgagagggacacgaagatcatcaatgcggcgtccttcaccatcgagagagaggagcacactatcggcaacatcctccgcatgcaactgcacagagaccccaatgtcttgtttgccggatacaagcttcctcatcctcttcaatacaaaattattgtcaggatacacaccactagtcagtcttcngcaatgcaggcatatanacagtctgttaatgatctggacagggaacttgatcatttg

SEQ ID NO: 23121 - DNA, 138 bp, Glycine max
  Clone ID: LIB3050-013-Q1-E1-H8
aatgggggttgctgtgttgcacaacacaataagtagccgttgctgcaatgaaaaacaatcaaaaaaccttccctggcaacaaaaaccttcttcccccgtcaatctccagttcccactaacctcaatggacttgccttt

SEQ ID NO: 23122 - DNA, 212 bp, Glycine max
  Clone ID: LIB3050-013-Q1-E1-H9
aggggaagtagccttaacaaagcaaaatgaaaaattttggatatctttcaaggatggccactgcaaaacacaggaaccctgatgaaagtgaggtgttaactgaagttgtaactgatcatgttgacagcagcagttaccaacatgaaagacagccactggaagaacattaagagaatccttaaatgcttggtggcataattgccttttccgaa

SEQ ID NO: 23123 - DNA, 347 bp, Glycine max
  Clone ID: LIB3050-014-Q1-E1-A1
gaagtcgcggacgatcggcagggaacaagttccgcatgtcactgggtctgccggtggcggcgacggtgaactgcgccgacaacaccggcgcgaagaatctctacatcatatcagtgaaggggatcaacggaaggctgaaccggttgccgtcagcttgcgtgggtgacatgggtatcgccaccgtcaagaagggaaagcctgatctccgtaaaaaggtgctccccgccgtcatcgtccgtcagcgcaagccgtggcgccgaaaggacggtgtttacatgtacgtcgaagataatgctggggtcatagtgaatcccaagggtgaaatgaaaggttctgctatcactggt

SEQ ID NO: 23124 - DNA, 362 bp, Glycine max
  Clone ID: LIB3050-014-Q1-E1-A10
tcccgggctgacacacgcgtcagtgctgctacaagacgacaacagggggaggtgacgtcaatcaacttgttcccgtacaaaaattgtgttgtatggtatgctcatttctgagaaagctgtcgtaatgtctagtggcacttatccatctgcatgacatgtgtggaatgactcttctgccaaacctagttcaggcacttccaaagccccggtctcgaaaccaagccgctctaaaagttcaagccatacttagacgtacgtacgcagtaatagatcatctgaagatgcaacagtattcagttcgatagacttcgttataatacttgttgcacgtggaaataccggaatagtcctaatgatactgt

SEQ ID NO: 23125 - DNA, 379 bp, Glycine max
  Clone ID: LIB3050-014-Q1-E1-A11
agacaaattacttcctatcttgaaagtgagctccattttctatcctctagttttaccaagtggattggagctcagaaattctatccggaggccataaatggatggctgcacaaatgtgcttctcttaaacaaaagccaggcaagaaagagaccccaacgtccactcctaagaatgtatggtcctccaatatatgccacctgtgaaatctggttggaaaagctcggtgaattacccatccaggatgttgtggattctatgaagagtttagcaggtgaaattgcccggttcttaccgcgtcaagagaagaaccacagtaaaggtgcaaatcaaccccatataacatcttggaatgctcatatccgcagcgaatcatccgat

SEQ ID NO: 23126 - DNA, 341 bp, Glycine max
  Clone ID: LIB3050-014-Q1-E1-A12
gggggctaggagaagagaagtgttcccttagaagaatagtgtaaaatggcatcactcaaagctgagaaacctgttgaaaaatcttgttgctctcaaccatctgcaggacaggtgaagaaagagtcttctgccaaacctagttcaggcacttccaaagccccggtctcgaaaccaaccccaaagaaaattccaagccagactaggaagaaggcaagcagcaataaataagctgaagatgcaagagtaaaaagtacgaaagactaaaaaataatagttgttgcacttggaattatgggaagagtcctaaggatactgttatatggtgctcttcaaccatgttt

SEQ ID NO: 23127 - DNA, 408 bp, Glycine max
  Clone ID: LIB3050-014-Q1-E1-A2
aggggctgggcattccgtttcgcagatctgctccttccgttccccctcagaaatcagttgaagagcatgggtcgtggagttagcagtggtggtggtcaaagttcattgggttatctttttggcagtggagaggcccctgccccaaaaccagcaacaaataatgccccagcccaacctgaagtgcacgctgtaaataatgtgcctcctccaaaagcatctcctcctactaaaacaatagaccctaacaaagctgctggtatcaacagtcattctactgatggccagaacaccgggaacttcatcacggaccgaccctcaaccaatgtccatgctgcgcctggtggtgggttcttccccaggttatccccttggtgaacctggggaagggaaatgataccttgtttgcaa

SEQ ID NO: 23128 - DNA, 353 bp, Glycine max
  Clone ID: LIB3050-014-Q1-E1-A5
tcgatcaaaaaaaaaactttttaattcaaaggctttactggtatattttatttgttgacgtaaaaaagacgaaaatcgtgtgataaagttgagtatctaaaagtaaaaactaaaagaaaaataaaaaaatagtgaattgaaacaacttagtaactatatatagagtaatcaaaagagaagtggttagtagtggcgagcgaaaatcgataattaattttggtttttattattttttaaaaaaatcaaaaattgaaaatttcaataagaatttataaaaaacaaaaatggaaaataatacaaaacatggtaaaactttgtaggaataaaaaagggaaaaccactctccaaagaca

SEQ ID NO: 23129 - DNA, 394 bp, Glycine max
  Clone ID: LIB3050-014-Q1-E1-A6
ggaacttcacaaagtttaaacctttcaccttcctccatactttcttcatctgggttttgcttgctataaaaatctagctaaaatttgtcgtttgctttcagcaagagctttagcttaattatcaccaggaatttatttggcagtcatggattattcatcatggatgattaacacttccttggatctcaacattaatccccacaggcttcatgaagaacttcccgtaagtataaacatattgggcggaagatcttctgtgaaatgtatcgctcagaataataattctttcttcatttcatcttgtgtgttcatttcagaaaaaagaggtggaaaacagattgttgtcattgaaattggaggtgaagaaatcttctgtaaaacaagagtctgctgg

SEQ ID NO: 23130 - DNA, 329 bp, Glycine max
  Clone ID: LIB3050-014-Q1-E1-A7
ggaagagagaaaagcaaaatcgaattatcatagaaagaagtgaattgaatttcattgacagagtcagagtgaagtgttgcgcaaatctgaggtgcgcattgcattgtggttgatttgtaagaatggcgccagtgtcggctctcgcaaagtacaagctggtgttcttgggtgatcagtccgttgggaaaaccagcatcagcactcgcttcatgtacgacaaattcgacaacacttatcaggctacaagcggtatcgattttctgtcaaaaactatgtatcttgaagatcgaactgttcgactgcagttgtgggatagagctggacaggaa

SEQ ID NO: 23131 - DNA, 335 bp, Glycine max
  Clone ID: LIB3050-014-Q1-E1-A8
gaagggagtttcagttaacgtacctagttgttggtctttatatttagttattgacatcaacagagtcatggaggaagttaatgtggttcaaaccaagaatggaactgtttcagtagcttctgcgtttgctggccacaaggaagctatacagcaaagggaccacaaatttttaagaattgctgttgaagaagcgtataaaggggtagactgtgaagatgggggtccctttggtgctattatagtttgtaatgatgaaattgttgctagatgtcacacatggttctgaggaacacagaacccactgctcatgcagaagtcactgtaataagaaaggc

SEQ ID NO: 23132 - DNA, 295 bp, Glycine max
  Clone ID: LIB3050-014-Q1-E1-A9
ggggtcattgggtatcattgcaaccattgctaatgggttcgttgtaggtgccaacatcttaccagcacgcccattcagtggctgttcaatgaacccaactcgctcattctgcacacctgtggtcacatggacacttcgctgctaactggatccattgcgttgtgcccattgactgaaagacgtttggctgacctgatttatggacacgtcttcattggttcatataccagcgtcccaccctctgaaaccaatccctgagcatcaacttgaaaaatatgacttcttgttctatcca

SEQ ID NO: 23133 - DNA, 129 bp, Glycine max
  Clone ID: LIB3050-014-Q1-E1-B1
acccgttttaatggcccgaagagactgtggagaccctgctgcttgctacactttatttatttctgaagtttggatgcatgtgtgaaatttgagttggaaataatattgagatatttgtggcttttcttc

SEQ ID NO: 23134 - DNA, 375 bp, Glycine max
  Clone ID: LIB3050-014-Q1-E1-B10
ggaccgacacaacaacaaccaaatcatactttacatttgcgcatctcttatttaaccacacacctgtgagagtatataggaacatataccattactatggctctgaagttaggacatggcgtgatgatactagttattataagtgcttcaatgttttcagtgagcatggccaacaaggattggtcctttggtttcaactacactgattggtggtctagattcggaaatcatcctcagaacataacacagcaacaacccaagcaaattgtcgtgggtggttctgagcattggcactacggattcaactacaccgattgggcattcaagagtgccccattttacctcaatgatactctagttttcaaatatgatgct

SEQ ID NO: 23135 - DNA, 365 bp, Glycine max
  Clone ID: LIB3050-014-Q1-E1-B11
ggagaacaaaacaggtgtttcgaatagattatcctaagtcgttgggaatactgctgcaatggcttcaggtcaggatgaggtgacccttttgggagctactggaagcccatttgtgtgcagggttcatattgccctcaagttgaagggagttcagtacaaatatgtcgaagaaaatttgaggaacaagagtgaactgcttctcatatccaacccagttcacaagaaggttccagtgtttattcacaatgagaagcccatagcagagtctcttgtgattgttgaatacattgatgagacatggaagaacagccccatcttgccttctgatccttaccaaagagccttggctcgtttctggtccaaat

SEQ ID NO: 23136 - DNA, 377 bp, Glycine max
  Clone ID: LIB3050-014-Q1-E1-B12
gggagcgaagtgaattgaaattgaagtgactcggggtgagttgactcagcaatggcggaagaggtgactcgggtgatggtggcggtgaacgagtcgagcattaagggataccctcatccttcgatcagcagcaaaggggctttcgactggaccatcaacaagatcgttcgcgacaacgtctctgccttcaaccttctttttcttcacgttcaagtccccgatgaagatggttttgatgacatggatagtatctttgcttctcctgacgattttaagaacatgaatcagagagatagaattagaggagttcatctgctggaatacttcatcaataggtgtcatgaaaattggggtggtttgtcaagcatggataatgc

SEQ ID NO: 23137 - DNA, 153 bp, Glycine max
  Clone ID: LIB3050-014-Q1-E1-B2
gaaagcaacgtcgtagaacgcatcaatctcaagtcctcagttccatcccgtgggagcagcctacctctccacatcgacacatgtcctcaacatgatgcatcagcgtacagcactgatccaaccatcagcaccatgggaaacaacgatcgagtt

SEQ ID NO: 23138 - DNA, 254 bp, Glycine max
  Clone ID: LIB3050-014-Q1-E1-B3
ggttctagtgtgtgattgtttgttgttgtaactcgtgcttcttcttgtgttgttctgtgtgtgtgtttgttttttctctcacctgaaaatgtctcgctgcggtggtaactgtggttgcggaagctcctgcaggtgcggcaacggctgcagaggctgcaagatgtacccagacttgagctacggtcagtcgacgggaccgatacgttggtcatgggagtgacacctgttaacgctcaattgtagggtgctgaaat

SEQ ID NO: 23139 - DNA, 197 bp, Glycine max
  Clone ID: LIB3050-014-Q1-E1-B4
ggaaaaaaggaagaggaacgaagcaatcgcaagtcgtctgttctgtcccgcgggagcagacgagctgtcgtcatcgccaaacaacctcaaaaacattcatcaacgttcactattaatccatccatcattaagtaagaaaataaggttcgatttttggagcgttgttttgcttctgatccatcatggaggtgccgagt

SEQ ID NO: 23140 - DNA, 322 bp, Glycine max
  Clone ID: LIB3050-014-Q1-E1-B5
ggaacctttgcattctattcattcaagattcagcaagtgcgttttggaagcagagaccgaaatacttcgagatggcccgtagaaagcaaactgctcgtaagtcaactggaggaaaagctcccaggaagcagcttgcaaccaaggctgcacgtaagtctgcacgaacaactggtggtgtgaagaagcctcatcgttatcgcgctggaactgtggctcttcgtgagattaggagataccagaagagcactgagctcctagtgacgaagcttcctttccagaggttggttcgtgaaattgcccatgatttcaagactgatctgcg

SEQ ID NO: 23141 - DNA, 331 bp, Glycine max
  Clone ID: LIB3050-014-Q1-E1-B6
ggagacgagggtaaggtcgcgttgtgttgcgtcgtgtcgtgcgctgttcctctgtctgtcgtttttgttttcagaccaaaccctagctccgcatcgcaaccatgtcgaccaagcaaggtggaaaagctaagcctttgaagaaacccaagtctgataagaaggattacgacgaggttgacatggctaacattcagaagaaaaaggaagaggagaaggcgctaaaggagttgaaagccaaggtgcaacagaagggaagctttggaggttctgggctcaggaaaagtggaaagaaaataggggtctttatcatgattgtatacatccaatattg

SEQ ID NO: 23142 - DNA, 370 bp, Glycine max
  Clone ID: LIB3050-014-Q1-E1-B7
gacgaagaaggggaagaagcaattgatgtcatcggcgccgtggagaggcgaggagagtgaagaatccttcaaagagggaaagctgaaagtgacgaggcagggtgatggcacttccaccatgcacgtccctgcctccaagtccaagcatcatcaccatgacctccacgacgacctcggaatcgagattgatcctgaactacgctacagcttccagcgcaattttcagtttcttcagcgtgtttttagcattgacactatggtgaaacctcttcctcctgtcatggcatacaatgtctctcgcaacttgaacttcttcactcgcattttcacacaattctttgatcctgaaggtattgcaaatgcccagaaa

SEQ ID NO: 23143 - DNA, 235 bp, Glycine max
  Clone ID: LIB3050-014-Q1-E1-B8
gacgatatgaagatagaaaagtgagatggattgcatctctcgctttgtattggaagatgggaagcgtaaatcggaatgccttctttcgtttgagaagaattttgtgatcagaattagtgagctgaatacaagacaatgtgatagtgggaagcttttcgcaagtgacgactcagccctttcatcaagtacgacatgaagttatcacgaggaggacatcataacgctgggaagaggt

SEQ ID NO: 23144 - DNA, 373 bp, Glycine max
  Clone ID: LIB3050-014-Q1-E1-B9
gaatccaaatatttaatcctatcctatcgtagcaaagaaagaaagaaagaaaaccctagcttaccttttcaactttcaagatgcaaatctttgttaagacactcactggtaagacaatcacccttgaggtggagagttcagataccatagataatgtaaagtccaagattcaagacaaggaacggatcccaccagaccagcaacgtctcatttttgctggcaagcagcttgaggatggacgtacacttgctgattacaacattcaaaaggagtccactctacacttggtgctccgtctccgtggtggaatgcaaatctttgttaagaccttgaccggaaagacaatcacccttgaggtcgagagctctgacac

SEQ ID NO: 23145 - DNA, 364 bp, Glycine max
  Clone ID: LIB3050-014-Q1-E1-C10
gataccaaaaacaaaacacaagccaagtgaaagtgagaaaacataaaaatcaaagagcataatgtcagggatcattcacaagattggggagacccttcatgtgggagggcacaagaaggaggaggagcataagggtgagcaccatgctggagaatacaaaggggagcaccatggtgaacacagtagtgagtacaaaggagagcatcatggtgaacacaaagctggacagtaccatggtgagcacaatccagagcacaaagatgggttcctagacaaagtcaacgacaatattcatggttatggccgctcctccgatggcgagaagaaaaataacgataagaagaagagcgaccatggccattag

SEQ ID NO: 23146 - DNA, 202 bp, Glycine max
  Clone ID: LIB3050-014-Q1-E1-C11
gtagacctatcatctgtgaagaacatggaggatcctaaggtggttgagagagtgaatgactgaatagcatgtggggctgatgctattcctggggacccgccatgccagcatgccgatcacgatggtgtggcgatgtgccacgtggaccacaaagttagaaaaaaaagctaatgagttcaaattttaagttctaaaccaaaaa

SEQ ID NO: 23147 - DNA, 370 bp, Glycine max
  unsure (1)..(370): unsure at all n locations
  Clone ID: LIB3050-014-Q1-E1-C12
gatcatcgtgatcatcacaattctaattcattcaccaaaaagttcttcgccccttctttgtccccattctttctctttaatatactttgtccatattttcctctttctcttcctatcaaacatccatggcttccttgtcttctagtacaaaacagagcaataataaccaagaggttgatgagaaaccaataccgcacgatcaaaacgttctgcaaaagcacgttgcgttcttcgacaggaaccacgatggcatcatatacccgtgggagactttccaaggatttcgagcaataggttgtgggtacttattatcgtccgttgctgctattttcatcaatggaggtctcagtcagaaanaccgcccgggaaa

SEQ ID NO: 23148 - DNA, 289 bp, Glycine max
  Clone ID: LIB3050-014-Q1-E1-C2
gtcatatggtaagaaatatggactaactctggaacaattgtcgttattgtggagcaagaaacctgcaacattggcggggttagaatcaaagggggccattgcagttggaaaccatgcagatattgtagtttggcaaccagagctggagtttgacctggatgatgattatcctgttttcatcaaacattctgagctctctgcttacatgggaagaaggttatctggaaaagttttggagacttttgttagaggaaaccttgtgtttaacgatgggaagcatgctcctgca

SEQ ID NO: 23149 - DNA, 320 bp, Glycine max
  unsure (1)..(320): unsure at all n locations
  Clone ID: LIB3050-014-Q1-E1-C3
gtcattttttttgggaaaccttcggtgattggagctgtgcanggcatgatgactggacttgtatgcatcaccccacgggcacggcttgtgcaatcatgggctgctatagtgatgggaatattatctgggagcattccatgggtgactatgatgattttgcataaaaagtcaactttgctacagaaggtagatgacacccttggtgtgtttcacacacatgctgtggctggccttttgggtggtctcctcacaggtctattagcagaaccagccctttgtagacttctattgccagtaacaaattcaaggggtgcattcta

SEQ ID NO: 23150 - DNA, 398 bp, Glycine max
  Clone ID: LIB3050-014-Q1-E1-C4
gaatggtgacgtatttgtcccgtttccacgcaattttcattgaaaagaaaagaagcaccgagcgaagccagccaggttgtcgtccgattccttcgtgcgtgcgattcttctgatattccaaggcgacgcaccgacaccggacccatctccggcgacatctcaccgatctccggcgaatccccggtccccactttcttccctcgaaatgaatcccgagtatgattatctgttcaagctccttcttattggagactctggtgttggtaaatcatgccttcttctgagatttgctgatgattcgtacatcgagagctacataagcaccattggagttgattttaaaatacgtactgttgagcaggatggaaagaccattacactacagatctgggacacag

SEQ ID NO: 23151 - DNA, 337 bp, Glycine max
  Clone ID: LIB3050-014-Q1-E1-C5
gacaaaaaattattcgataaagtcactcgcattgaagcaagaagtgaaaagtttgacatgtttatgcacctggacattaattccgagatatatccgttaaaggttggtcagaagtttgcgcttgtgcttgtttcaacacttaatcctgatggaactccagacagtggatattatacccagatcagtcgacaatcactggccaacaattttgaggatgtcatgtatgggaagctctacaggataacagagggttcagggcgtgaaaaagcggagatgaatatttcatttcgtgggcttctgatgatgctgaatggagatacctctcattgcaacaagt

SEQ ID NO: 23152 - DNA, 393 bp, Glycine max
  Clone ID: LIB3050-014-Q1-E1-C6
ggggttacaatggggaactcaaagaaacatatccacagcaagcatatgaacggatcgaaaaattaaatgctgggaatagatagagcttaacgtccatatatgcttattgaatggaaagtgatttggaactggaatacagcttccaagaaaatgaaggaaaattttgttgactaagtgctttttgacttgtgtcgtctagcttcaagctttaagtacagtccattgccatggcaaactccacaatgacatggcatagtagtgctactgctatctagctaagattaattagcatacaagtccatggcttccttaaagcatgtctacatctttaccctactcagcttcatcaattttaaggagtgaagaaaaacgtttttggaagttacgcttttg

SEQ ID NO: 23153 - DNA, 387 bp, Glycine max
  Clone ID: LIB3050-014-Q1-E1-C7
ggtagctgagttggttatttatccatttagaaagacattgtggttacccatagtctcatagtgtcatactgcaacacaaaacaatgggttcccttatggcaggatgggactctacccacatagaccctcaatcagccacacttaaaaggaaccgctcactcaccaaggatgaaattgatgcttactggaaatcaaagaagaagatagaggaagaacaccttagagctatttccaacttgtcagagactattcaggctagcaaaagcacagaacctgagaagaagttgcagaagtcaatgaccatgcctgtgacccgtgcacgggactacttaaatatgggcatagacacaagtttggagcatcctattaagaaaaatggctggtgga

SEQ ID NO: 23154 - DNA, 311 bp, Glycine max
  Clone ID: LIB3050-014-Q1-E1-C8
ggcagttcaattccaatatattccattctctctgtgtatttccctacctctcccttcaagatgcagatcttcgtcaagagcctcaccggcaagaccatcacccttgaggtggaaagctctgacaccatcgacaacgtcaaggccaagatccaggacaaggaaggaatccccccggaccagcaacgtctcattttcgccggaaagcaacttgaggacggccgtacccttgctgactacaacattcagaaggagagtactcttcacctcgtcggccgtctccgtggtggcagtcagatcgtcgttaacacact

SEQ ID NO: 23155 - DNA, 382 bp, Glycine max
  unsure (1)..(382): unsure at all n locations
  Clone ID: LIB3050-014-Q1-E1-C9
agccttgaagatttattcaacttctgcagtcggaaattgcctctcaaaactgttcttatgcttgctgatcagatgctaaatcgagttgaatttgttcattccaaatcatttttacatcgcgacatcaagccagacaacttcctcatgggtttagggaggcgtgcaaatcaagtgtatattattgactttggcttggccaagaaatatagagacaccactacacatcagcatattccttacagagagaacaagaatttgaccggaactgctaggtatgctagtatgaatactcatctaggaattgagcaaagccgtanggatgatttagagtcacttggatatgttcttatgtactttttaagaggaagtctgccttggcaag

SEQ ID NO: 23156 - DNA, 67 bp, Glycine max
  Clone ID: LIB3050-014-Q1-E1-D1
tatcctatccagggaatcatatttgcttcggaggatatggacttcaagcacttgagccatcatggac

SEQ ID NO: 23157 - DNA, 270 bp, Glycine max
  Clone ID: LIB3050-014-Q1-E1-D10
gaatggagaagtgagcggtgagaggaaacagaagagagaagagcaatcggtgagtgaatggaatggattcaggtcctccggcgaacgatttgtgttcagtgtgccatggcaactttcatattccatgccaagccaattgttctcactggttttgcggaaattgcacaatgcttgtgtggcagcacggatcagtgggttgttcatgcaaatgtccactgtgtcgtccagccatcagtctcttagtctccacagaaaagtctctgatgcaac

SEQ ID NO: 23158 - DNA, 286 bp, Glycine max
  Clone ID: LIB3050-014-Q1-E1-D11
ggagtggatttgtcatatcttgtggtagggagtagtgtttgaatgtggtttcttgctatggaatgcattcgtgatgctcttgtacacttttgacttttggtcaaattagaatttttaccttagtgttgactgtaccagaggtagtgtttttctttgctgatgaggttgagaattgagattaatgtgtaaattgtgctgagttgttttatctattgtatcactcttgatattgaatttgtaattttatgcttcaaatggcaggtgatatcttgacttggtttttgat

SEQ ID NO: 23159 - DNA, 396 bp, Glycine max
  Clone ID: LIB3050-014-Q1-E1-D12
ggcaacaaggactactactcttcttttctttcttcatcgtcatcacgcactttttctctctaacactttcacactctttctctctctctctctctctctcagaattttctcctctctccgattccttttattaattggagttttctcgctcctttttctttccctgaaaacatttcatcttcgtattgatgtcggaaaagggtcggccacttcccaaatttggtgaatgggatgtcaatgatccagcctcagctgaggggttcacagtgatttttaataaggccagggatgagaaaaagacaggtggcaacccagagtcaccaggaaagactgctactgatcctcatagcaaacctgcagtagagcctggcaaaactcagactaaaaaatgggttt

SEQ ID NO: 23160 - DNA, 218 bp, Glycine max
  Clone ID: LIB3050-014-Q1-E1-D2
cgggagataatgaatggtcagagagcttagatttgggaaaatgtcgtgtgctgttctcttgtccaatagaagccaacaaggcacagcagagatgttttggggcctgtggaatttgagtgcaagacgtgcagccgcaagttctcttcttttcaagcactgggagggcacaggggagtccacaagaggcagaagctatagggggaagaactcaaataaca

SEQ ID NO: 23161 - DNA, 330 bp, Glycine max
  Clone ID: LIB3050-014-Q1-E1-D4
ggactcaaaaagagggttaacaagaaaaaaaaaaacttgaaataccttcaactcgaggaacacaaccactgaaaaaagagaaagtgagaaaagggtcgaacaactggtgaagtcattgatggctacagaggaagagagtgcggtgaaggagcctttggatctcattaggctcagcctcgacgagcgtatctatgtcaaactccgttcggacagagagcttcgtggcaaacttcacgcttatgatcagcatcttaatatgattcttggtgatgttgaagaaattgttactacagtggaaatcgatgatgagacatacgaaggaaattgtga

SEQ ID NO: 23162 - DNA, 292 bp, Glycine max
  Clone ID: LIB3050-014-Q1-E1-D5
gatagcagcatcatacaaagcattgaattcaaaaacttaagttcattccttgtgttttgctttcgtcctcaaaaccaaacatgtcgaacacatgcggcaactgcgactgcgctgacaagactatctgcaccaagggaaacagctatggtgttattgtagagactgagaagagttacatctagactgttgtcatggatgttccagcagctgagcatgatgggaagtgcaagtgtggcactaactgcacttgcacggactgcacctgtggccattaaggaatatgtaagaaaat

SEQ ID NO: 23163 - DNA, 180 bp, Glycine max
  Clone ID: LIB3050-014-Q1-E1-D6
ggaaaacgttgatctgattccgaatttgcgttcgttcccgtatcagagtccaggacgatgtcgtttgggtcctctctgctgtctcattcgcatacccttcaattcgtgtccaacagaaacagaaccttccgctttaaagccaccggcgaagtgtcccgaattcctccccgcaaaatgggt

SEQ ID NO: 23164 - DNA, 335 bp, Glycine max
  Clone ID: LIB3050-014-Q1-E1-D7
gagaaacaaaagaaacaagaaaacaaaacgcgatggttgacgtcgacgttggaacctcggactcgccgaagcgccaccacaacaacggcttcctcgtaacaatatcggcggttctggcgctgctaacaaagcgcagagcagcgaagccgaccaaaggggatgagtggaagaaggaattgaagaagtcgcggccgaagaagcttctcagcaggataagaagcaaagcgcttttcggtcacaaccacaacaacaagaagaagctgcgaagcgtggaagagacacaacaagggtggggaaacggcggcgtttggcagaaggagattctcaagggtggc

SEQ ID NO: 23165 - DNA, 395 bp, Glycine max
  Clone ID: LIB3050-014-Q1-E1-D8
ggcgcatattcatacataccctttgcacattcttcttcttcttcttgttctctttctctctctgaagcaagtgccgagcaattaataactcaagttttgggtcactccgtgaccgtgatgatcgtaaagttattgtcctttgagtgatgggtttgtgctcttcggtccccagaaacgctaacgaagacatgaagctcaaactctcgttcggttcaaaatctgagaagcttgtgattcctccaacatcgatcaacggacaacaacaacaacaaccccaaaatgggtggtcaacggctcggtcaacgaccaccttcactgaccatggtagcaaagaggaagccttttttgattcaaagcctggttagactcagattgtgaagatgatttcgatagtg

SEQ ID NO: 23166 - DNA, 367 bp, Glycine max
  Clone ID: LIB3050-014-Q1-E1-D9
ggaaccgaacagctacacaaagttcgcgtcggttggagtaacgggttggtgaagccgcgtaacaatgaacaaacactgaaacaccgattatcattacttacaagcgtttttgtctttctttctttctttctccatttcctcatcgatcagatctgaatcaatctcacattcttcaatttaatttcactcgtaattcacttatcgtgatttccgaatctggccgccaaaccctattacctttgtatagatcatctcaactttgctgctcgggagaaataacaaacgaaattagcggaggaatatctccgccattgacgacaattgacaaccggtgagtatatgcgtccctaattggtcctgttacgga

SEQ ID NO: 23167 - DNA, 144 bp, Glycine max
  Clone ID: LIB3050-014-Q1-E1-E10
tgtgtgttcctgcgtgtcttctcttctggtctttctgccgcgtttgctcgtgggggctgggggtcgtgcgtctggtggtcgtggccgtgggcctcttggcccggtggcttcttttggtcgtgctttgtggcttgcggctccttt

SEQ ID NO: 23168 - DNA, 336 bp, Glycine max
  Clone ID: LIB3050-014-Q1-E1-E11
ggaaccatggccaccgtttctttcaacgaaaactagcttctgtatttattcttctgtttgtgaaatatgtttttgtcttcgttactttttatatttactcgtccgatgttttcgatttgattattttgttttgacggaggaacaggatgtgagttgtggttttctctgtgatgatgaaaacgatgacgagtctgatatgatatccattccttacaatactgacgacaaatcgacgcatttgtctgagaggattccactctttctcccgtcctttatatttgggttgtttaattttttgcgcgtggtttgttgtttcgattgtttgtatattttgtg

SEQ ID NO: 23169 - DNA, 364 bp, Glycine max
  Clone ID: LIB3050-014-Q1-E1-E12
gacatgagaagtgttttttgtccattgtagattgtcagatatagataagcagacttagaaagaagggtatctaggagactttctgaattgaagccttttttttcattgagtgattgatagcatggacaacatgaagatgaacacagatgaaaggtttgcacaaaacggtgtcccaatacatagccaggttatgaagatcaggcaatagtcagagaaaactgttgattggtccccgggcaagccatacataagacccgttctccgtgaaataagccggcagatttcccggtcgccgttgtggatctccggcagaccgatttccgttggtgagtcataggttaagaacatggttaagggttttgga

SEQ ID NO: 23170 - DNA, 361 bp, Glycine max
  Clone ID: LIB3050-014-Q1-E1-E2
gacaccagtgcgagccagagaagatatcgaaaggctcaaacaccttcaagaacttgtatctttctttgtgagtatttgttactacaattttacattcgtttcatctctacatatttcattagtcatggcacctcaagcagtttccttcaagtcgttcgccgttgcacttaggtgtagcgcttttcttctccgcctccgctctggacttagtttcggggcatgtcgccggtgccggcgccggtaccgggaccagatgccggagcagctggatccgtgtcgagctcagtcgccatgattggagcttccgttgtgattgcattgctcgccatcttcaagcactgaagaatcgtctgaggatgga

SEQ ID NO: 23171 - DNA, 214 bp, Glycine max
  Clone ID: LIB3050-014-Q1-E1-E3
tgataaaatgctgacagttgagcccaccaaaagaattacagttgaagaagcactagcccatccataccttgaaaaactgcatgatgtagctgatgaaccaatctgcatggagccattctcatttgattttgagcaacagcaattggatgaagtgcaaataaaagagatgatctacagggaagcattagcactgaatcctgagtatgcttaaagc

SEQ ID NO: 23172 - DNA, 299 bp, Glycine max
  Clone ID: LIB3050-014-Q1-E1-E4
cgggataccaacggcagaacacaagccaagtgaaagtgagaaaaaataaaaatcaaagagcataatgtcagggatcattcacaagattggggagacccttcatgtgggagggcacaagaaggaggatgaccataagggtgagcaccatgctggagaatacaaaggggagcaccagggtgaacacagtagtgagtacaaaggagagcatcatggtgaacacagagctggagagtaccatggtgagcacaagccagagcacacagaggggttcctagacaaagtcaaggacaagatccatg

SEQ ID NO: 23173 - DNA, 372 bp, Glycine max
  Clone ID: LIB3050-014-Q1-E1-E5
ggagctgggtttgttttcggcctttgatcttcgattctctctctttttctctcgcgaaaaccgtatcagcaatgtctggagaatcagccagcgctattcacaagggtcaagtcgatctcttagacttcattgactggtctggggttgagtgcctcaatcaaagctccacccactctctccccaatgctatcaaacacggttatagagaagacgatggtttgcatctggagagtgatgcagacgagcagcttttgctcgatattcctttcactcaagtcgttaaactttattcctttgttatcaaaggtcctgaagaaggccccaagacagtgaagctcttttcgaagaaggagcacatgggatttagtaatg

SEQ ID NO: 23174 - DNA, 393 bp, Glycine max
  Clone ID: LIB3050-014-Q1-E1-E7
ctgggcattccatttaatattgcatcttatgcccttttgacatgcatgattgctcatgtttgtgatctcattcctggtgattttattcatgttattggggatgctcatatttaccgcaatcacgtgaggcctttgcaggagcagctccataaccagccaaagccttttccaactttgaagataaatccaaagaagaaagatatagattcttttgtggctgctgatttcaagctcataggctatgatcctcaccagaagattgatatgaagctgtctgtctaaaatctggggattctcactccttcaggcacaaccttaggaagattatgttaaatctgtgtacaattaaagaacatatcgtagcacatacttcatcgcataaatactgttact

SEQ ID NO: 23175 - DNA, 373 bp, Glycine max
  Clone ID: LIB3050-014-Q1-E1-E8
gtatcagaggtcattcatgaaggggaagctttacattcacttcactgtggagttcccagattccctaaaccctgaccaggttaaggccttggaagctgttctgccaccaaagccttcttcacaattgacagacatggagctggatgaatgtgaggaaacaacactccatgatgtcaacatggaggaggagactaggaggaagcaacaacaagctcaggaggcatatgatgaggatgatgacatgcctggtggtgcacagagggtacagtgtgcccagcagtaatgacttgtgtggaagctagaatcagaattgatgaaaatgatgatgatactgttgatgtttccgtaaccgtagtgtgtgtggactaaagat

SEQ ID NO: 23176 - DNA, 366 bp, Glycine max
  Clone ID: LIB3050-014-Q1-E1-E9
ggaggaagatgatgattttgaggagttagacccctcttgttgctttatgtgtgatcaagagcacaaaacaatagaagactgcatggttcacatgcacaagcatcatggattcttcattccagatgttgagtatttgaaggatccaaaaggcctcctcacctatcttggccttaaggtcaaaagggactacatgtgtctgtactgcaatgatcgatgttatccattcagcagcttggaagcagtcaggaaacatatggaggcaaaaagtcactgtaaagtgcattatggtgatggtgatgatgacgaggaggtagaattagatgagttctatgattatagcagcagttatgtggatgatcaacgcaa

SEQ ID NO: 23177 - DNA, 381 bp, Glycine max
  Clone ID: LIB3050-014-Q1-E1-F10
gtataaaagcctgcttggtaatccttccagtggtaagcttagtggaactgcacccccttcaatatcagggcaattagaaggaaatgattcatccagtgaggttaaaggcgagagctcgacgaatgctactgtaactagtggaatcccggattatcgtggaaaacctggattttcacttcagagcccaccaaaacgggaatagtctttcattttataaaacttgcctttttgatgaattcagttttttgatttatggatgttgctgtggaaattgagttcggactttagagagaagaaggcggaagagtctggttggaattgcattgctggttgttgtggcatttaccacgggatacacgttgtttaacttttaattttaat

SEQ ID NO: 23178 - DNA, 351 bp, Glycine max
  Clone ID: LIB3050-012-Q1-E1-E9
gggatgacgtatgaagaaatcaagaagaacatgccagaggagtatgaatcccgcaataaggacaaacttaggtatcgttatcctcgtggagagtcttacttagatgttattcaaaggttagaacctgtaattattgaacttgagcgacaacgagcacctgttgttgtgatatctcaccaggcagttttgagggcattatatgcttattttactgacaggcctttgaaagaaattgcagatattgagatgcccctccatacgataatagaaatacaattgggagttacaggtgtcgaagagaaaagatacaaactaatggactgaaatgaataactgaaggagagaagaaac

SEQ ID NO: 23179 - DNA, 390 bp, Glycine max
  Clone ID: LIB3050-010-Q1-E1-F5
gggaattattgctcccatcgccattggtttcattgttggcgctaacattttgttgggtggggccttctccggagcagccatgaaccctgctgtgacatttgggcctgctgtcgtgagctggacctggaccaaccactggatctactgggccggccctctcatcggaggtggaattgctgggcttatctacgaggttgtcttcatcagccacacccacgagcagcttcccagcactgactactagaggggaaaaatgaaataataaaaaaaaaaatgtgtattattgaatttctccggaatcttcttctgtgtatggttttccttcctttgtgttttctttcctgttgaatcggtggccgttgatctttggtttgatggttgatgatcctg

SEQ ID NO: 23180 - DNA, 364 bp, Glycine max
  Clone ID: LIB3050-010-Q1-E1-F6
gatgcaagtgtgacctaactacacacatgaaatttttttggtttcttcaagtcctgttctgcgtggccatggctctcagcaatcactccgttgctcctagagcaccagctcctcctacaagccgagacccaatccatccacagctacgtaaagtctccgattcatggccatgaagattttcttgattagcttatatatataaagtttggttcttcaaatcataccgatatatgtattatcacttttcttcaaaacctctttaatttctgcttgggatcaccagatgataagcatagtcctagctagctactccaatgtttttggctagatgtgtttaatgaatactttgatcattcttgttacg

SEQ ID NO: 23181 - DNA, 363 bp, Glycine max
  Clone ID: LIB3050-010-Q1-E1-F7
caagcaagaaatgttaattagtaataagttacatgctcttgtggaatatgagactattgaggctgctgagaaagctgtggctatgttaaataatgaacaagactggagaaatggcatgcgggttaaacttctcaagggaatggggacgtatgggcacaaaaaacaagcttggaaaggatctcattctgagaagaatagctcaaggcatgtatctgaacaaacaggagatgaggagaatcatggctctaatgagcatcgtgaagatgcacatgaggaagaagatggggatcatctgtcgaaggacaaaggtgggcagaggtatagaaatcaaggaagatcaagacaacataaatatcgtgctgg

SEQ ID NO: 23182 - DNA, 119 bp, Glycine max
  Clone ID: LIB3050-010-Q1-E1-F8
accacgcgtcaggccagatgtcaatagaacggggagaggaccaccagcagcgtcttggtttgtgagataaactgcggcagagatagaaaatagttttggggtcacgaatctgcccgaag

SEQ ID NO: 23183 - DNA, 394 bp, Glycine max
  Clone ID: LIB3050-010-Q1-E1-G1
catggcaagtggctgctacacttgcacacagcctaagccaaaccctagccctaacccattcccttaccctaaccccagccctaccgcaaagagctgccccagggacgcacttaagctgggtgtgtgcgcaaacgtgcttaatggaccaattggtgcgattgtggggtcaccaccggaccacccatgttgctcagtgctagaagggcttcttgaccttgaagttgcggtttgcctctgcactgccatcaaagctaacattcttggcattaaccttaacatccccatttcacttagcttgatccttaacgcctgcgagaagtctccaccctctgacttccctatgcactagacattattaagcatgccattctcaaatatccatgcactaccttat

SEQ ID NO: 23184 - DNA, 349 bp, Glycine max
  Clone ID: LIB3050-010-Q1-E1-G11
gatagttgaatttttaacttgtctgttcttatcttcatcctacgccaatagcccaaaaccttgttctctttttgtggttcatttctctcttccagatgccacttgccgttcttcaccctcacgattttctcaggaaaaacccatctaaccagtaccagaccataatccctcactctcccaacatgaatcctaataagtctcatcggacttcccgaaaccgtaagaagcggcccgattcaagcccacaaggcgttgtcagcccagcccggctcacattatccccgaaaccccaagtcaaaaacaagccgcagcagcaactcgtcatgggtcaggtcaaaatactcaaacg

SEQ ID NO: 23185 - DNA, 320 bp, Glycine max
  Clone ID: LIB3050-010-Q1-E1-G12
aaatcaaatcatgcaacatgatggtctgccaatgcaaccttgaccaagtgcagattccgaaaaacctgctgggggttctgttcttgcaaaagaacatgataagcgatttctgaacaggggtggtttgagtgtacaaaaatttaaacacaatattgttggccagagttcaaaatctttgatcgctgatgagatggacattggtgtagatggggatgatggagttgttgaacgtaaccaccctacttcctcaagcttgacagactcatctaatggctctggctcaatgatgcataccatttcatcaggctctcggagctttg

SEQ ID NO: 23186 - DNA, 250 bp, Glycine max
  Clone ID: LIB3050-010-Q1-E1-G2
gacacagagttgcaagagaaagataaaagaagatggcgactcttgattccgacgtgcctatggttcccgccggcgagccctcgagcagcgccggtgcctcttccaagaagcccaagcgcttcgagatcaataagtggaacgccgtcgctctctgggcctgggacatcgttgtcgataactgtgctatctgccggaaccacatcatggatctctgcatcgagtgccaagccaaccaagctatcgccactag

SEQ ID NO: 23187 - DNA, 325 bp, Glycine max
  Clone ID: LIB3050-010-Q1-E1-G3
gattgtggatgtgctactctaccgagtaagacttggcacatgtatgacaagcatcctctaagtctaaactatttcgtggaagggagtttgagggaacatgaatgtggcatttgcaatgagaaaatgtctccgaagcaatggttttattattgtgatgattgtgactctggtgctcacccttcttgtgttgttggcaagtctaggcgtgtgaagtttggacgcagtttcaaatatgatgttcactcacaccctcttgctttggttgaagaaactgagcagaacaatgaatgcggagcctgtggtgaacgctgcaatggatggacac

SEQ ID NO: 23188 - DNA, 343 bp, Glycine max
  Clone ID: LIB3050-010-Q1-E1-G4
ggactaatggatggtggtggagatggtggtggattctacggtggggtacatacgcgtgtgtggtcactcacagagagtgatttcaaaggcatggatgagtcacactttagtgacttgaagcttgagtactcatcagaatcaaagcacgagttttctgctgcaaagatgagcaacaatatggggggtgatactttctcttctttcagaaatgggaatttcatgccacatgatgttggtggaggttcttatggagggttggtacgggatggagttatatccaatggagggtcatgtagactcactgtgaatgacagaggaatccagacgggaaagaaaagcatga

SEQ ID NO: 23189 - DNA, 373 bp, Glycine max
  Clone ID: LIB3050-010-Q1-E1-G5
gataagaaagaagatcaaaaaaaaaagagaaacaaatggcagcactgggtggctttaccgacatcaccggagcacagaacagcatcgatatcgaaaatctcgctcgctttgctgttgatgaacacaacaaaaaagagaatgcagttctggagtttgtgagggtgattagtgcaaagaaacaagtggtttctggcaccttgtactatatcactttggaggcaaatgatggtgtgacgaaaaaggtttatgaaactaaggtgttggagaaaccatggttgaacatcaaggaggttcaggaattcaagcccatcactgttgctgttaatcctctttcggtgacggtctagcacatagctaagttatggaagtgact

SEQ ID NO: 23190 - DNA, 282 bp, Glycine max
  Clone ID: LIB3050-010-Q1-E1-G6
gcaatctagagatacataagattcaggaggcaacaacatcaaaaacacagggtggtcaatgtgtatggtccaaccaaaggatcccccaacagggtcccggtatgtctgattgaaaaggaaactcaatgtcaaatagtgcatcttgatctcttcagtgcatagattaatgaacctgagttccaaaagcagcagtcatttagataccatcccgttagacattatcgtaactacactcgcaatgactctcgtggttaaatcacatacttcactgagaagtatacc

SEQ ID NO: 23191 - DNA, 379 bp, Glycine max
  unsure (1)..(379): unsure at all n locations
  Clone ID: LIB3050-010-Q1-E1-G7
ggcgtacacagcctcaacaaccctaacgcgtgcagagcagagagagacgcagccatggggcgaagacccgcgaggtgttatacgcaaattaagaacagaccataccccaagtcacggttttgccgtggtgttcctgatcccaagatcaggatttacgatgttggtatgaagaagaacggtgttgatgagtttcctttctgtgtccatctggttagttgggagaaggaaaacgtttttagtgaggccctggaagctgctcgtattgctagcaacaagtacatggccaaatttgctggacaggatgctttccacttgagagtcacgctgcanccattccatgttcttacgattaacaacatgccttcctgtgctggagctg

SEQ ID NO: 23192 - DNA, 353 bp, Glycine max
  Clone ID: LIB3050-010-Q1-E1-G8
ggagtttagtgggcctgaattgaagaaaattatggccaatgaaaagcttgcggagattgccttgaccgatccaaagcgtgcgaaaaggattttggccaaccggcaatcggctgcgcgatccatagagcgaaagatgcggtacatttcggagctagaacacaaggttcagactctacagacagaagccaccacactatctgcacagcttactctgttacagagagattctgctggactcactaaccagaatagcgagttgaagtttcgccttcaatctatggaacagcatgcaaagctccgagatgctctaaatgaggctcttactgctgaagttcagagattacagattgcta

SEQ ID NO: 23193 - DNA, 358 bp, Glycine max
  Clone ID: LIB3050-010-Q1-E1-G9
gggttggagtggctatttaaaaggatgattgagttgggaaaaacggggcttgttttcaatccttatggagggaaaatggctgagattccttctgatgcgacgccgtttccgcaccgtaaagggaacttgtataagatccagtactctgtgaactgggatgatccttcacccggtgctgctctgaatttcactaaccaggctaagacgttgttcagttacatgaccccttttgtgtccaagaatcccagaagtgcgtttttgaattatacggatcttgatattggggttaacagctttggtgagaatagctttcaggaagggttggtttatgggaccaaatacttcaatgataattttc

SEQ ID NO: 23194 - DNA, 376 bp, Glycine max
  unsure (1)..(376): unsure at all n locations
  Clone ID: LIB3050-010-Q1-E1-H1
ggagagcttgaaaatgtctcccaaatacatgctagtgctgttgatagcattggttttggcagtctcgtcnctttcccatggtccagtacacggttcagtacacccaaggcctcatcctcctccaaaaattactcgatactccgcgccacatatacataaaccaaaaccaccaaacgtggcaacaacaaacacctatgcagcaaagaagcctccaactaaaggttgaactgttaggctatgatcaaaggttttgcaacgtcaagggagtatattacaacagtaatcgcaatttgaaaccttgactagagatacnttaatggcatatagtattaattactggtcagtgctatgagtatgcatgtatgattaaataata

SEQ ID NO: 23195 - DNA, 260 bp, Glycine max
  Clone ID: LIB3050-010-Q1-E1-H10
ggggcaaaacccaactgaggcagagctccaggacatgatcaatgaagtggatgctgatgggaatggtaccattgaggtccctgagttcctaaatctcatggccaggaagatgaaggacactgattctgaggaggagctgaaagaggcattccgggttttcgacaaggaccagaatgggttcatctctgctgctgagctccgccatgtgatgaccaacctcggggagaatctcaccgatgacgaggttgactagatgattc

SEQ ID NO: 23196 - DNA, 410 bp, Glycine max
  Clone ID: LIB3050-010-Q1-E1-H11
tccggctcgaccccgcgtcaggtactggcgaaaaaaacaacaaaaggaaaaaaaaaatttaagaaccggtttgaacccattgaaaatttacaaatccaattgaattcaataaaaaaacaaatcctggaattaaaaaccccggcaaaggcagaaacaccaccttttgaaaaaaactcggatgcaactccttcagtttccgctccaactcaaggtgccaagctttcaaagccagaaacggatgatctgccaaactcaccttcagttaagacagaccagatattgtatcatgacgctgaattatcaaaactggactcagattttggaaatgttactcaggattattcaactgaggaaattggtgattgggaatttgatgagcttgaaagagaattgagcaagtagttacgttg

SEQ ID NO: 23197 - DNA, 343 bp, Glycine max
  Clone ID: LIB3050-010-Q1-E1-H12
ggtggtgcgcctccccacaaatacacacagaaagttgagaggtggtggtagctgctgcgaagcgttctgcagccaataatagctttcgcagcaaaaccaacgattcaaattcaacctcctcagatggcacattctttctcgccagccaaacgcgcccttgcctttgcccttcaacgacgagggtacgcagcggcgtctgatgcttctccttcgatgagagggggattggatagcattagtgtaatggagaagggtgtgacaaaaaacagttcgggcccatcggggacctcatcagcttgggccccggacccaatcacgggttactacaggcccatcaatcaca

SEQ ID NO: 23198 - DNA, 377 bp, Glycine max
  Clone ID: LIB3050-010-Q1-E1-H2
gataaggaggttatggatgtcttcaataaaatatcagaactcttccctggagtacgttcaccttgatgcatttgtgtgttgttgctgtttgctgggtcaagttatgcatccctttcctgatgaccaatgaagattagctcggcctaaccacacggaaccatgcaaaactcttatgctcatggctgtatactgcaggctcgcggttacagctccattgtgacatgcggatagtaactgtgtcttcttcgctgggctaaaataatgccacagttggatttttttgtttcactaaaatagttgagattgtgtagattgatgttttatgttttcattaaatattttgtttgacgcattgtacttgcagtgtggtttttggg

SEQ ID NO: 23199 - DNA, 379 bp, Glycine max
  unsure (1)..(379): unsure at all n locations
  Clone ID: LIB3050-010-Q1-E1-H3
gatattaagcatagtacaaaacaatgaagaccaaactgctagcatttctcctcttctttgccttgactacaaaaccactactacttggagcagctggagctgctccagagccagtgattgatacatcaggcaagaagctgagagctgatgcaaattaccatatcatccctgcagtgcccttcaccatatgtggctttgttggctgtttcactggtggaggcctttcactagacagcatagatgaatcttgccctcttgatataataatcgagaaagccaatgaaggcctaccactgagaatctcancagttaacaccannnaaagtgttattcgtgtctccacgatttgaacatttttttctctgattctgaatgaaag

SEQ ID NO: 23200 - DNA, 315 bp, Glycine max
  Clone ID: LIB3050-010-Q1-E1-H4
cgaaaaaacacaaaagggggacgctatgagaagagaagtgttcccttagaagaatactgtaaaatggcatcactcaaagctgagaaacctgttgaaaaatcttgttgctctcaaccatctgcaggacaggtgaagaaagagtcttctgccaaacctagttcaggcacttccaaagccccggtctcgaaaccaaccccaaagaaaattccaagccagactaggaagaacgcaagcagcaataaataagctgaagatgcaagaataaaaagtacgaaagactaaaaaataatacttgttgcacttggaattatggga

SEQ ID NO: 23201 - DNA, 371 bp, Glycine max
  Clone ID: LIB3050-010-Q1-E1-H5
ggagcagaacactctcattatcaaaggtgaaggtgctaaagaaggcgatgaagaagagagcgctcgtcgctacactagcaggattgacttgccggacaagctctacaagattgaccagatcagagctgagatgaagaacggtgtgctcaaggtcgttgtgccgaaaatgaaggaggaagagaggaaagacgtgatcagtgttaaggttgagtagaacaacccaagctgatttggccattttgcatcgacactactctttagttttcttttattaggtggtgatgaatctagttagtagatataacagcttaatagtattgttgctgtgtttggttttgaaacttcaaacgtatccgttaaaattgttatat

SEQ ID NO: 23202 - DNA, 389 bp, Glycine max
  Clone ID: LIB3050-010-Q1-E1-H6
gctctctaagtaaaatcttaaatttctgaacattgaacaactcttcacacaacaaaacttttttctggcattgtagcatcatgactggcagagaaatcctccatatgatgaaggtgaaagcagggtttggaacaccagacacagggaatggaaaaggcaaaatatcaaaacacattacacatggctttcacttgatgaagggcaaatcagcgcatcctatggaagattatttagtttcagaatttaagcaagaaaaggacagagaattaggcttgtttgcaatatttgatggccacttaggccatgatgtagcaagctatttgcagaaccaccttttccaaaacatcttgcaacagcatgacttttggactgagacagaaagcgcagtg

SEQ ID NO: 23203 - DNA, 381 bp, Glycine max
  unsure (1)..(381): unsure at all n locations
  Clone ID: LIB3050-010-Q1-E1-H7
ggttgttcatttctgtctcagtgagagaaactctctctctagaaaccctattgcacgttttgcaatcgaactcgacaatggccaacagcaacctccctcgaagaatcatcaaggaaacgcagcgtttgctcagtgagccagcaccaggaattagtgcctccccttctgaagagaatatgcgatatttcaatgtgatgatccttgggccaacccagtcgccttatgaaggaggagttttcaagttagaactatttttgccagaagaatatccaatggctgctccaaaggttaggtttctaacaaaaatatatcatccaaacattgataagcttggcaggatttgtcttgatattctgaaagatangtggagtcctgcccttc

SEQ ID NO: 23204 - DNA, 338 bp, Glycine max
  Clone ID: LIB3050-010-Q1-E1-H8
ggattcatttgagagaaaggatgcggaaagagatcttttggccaaactacttgtcaaccttgtgaaatctcagcatggaaccttgaatcaagttcagctcattaaagggtttgaatctgctctcagtacattggaggatgctgttaatgatgctcccagagcagcagagtttcttggccgaatttttgcaaaagccataacagagaatgtagtttctttgaaggagattgggcagttaatacatgatggtggagaggagccaggtagtctcttagaagttggacttgcagctgatgttcttggaagcactttggaggtaattcaaagcgagaaggggg

SEQ ID NO: 23205 - DNA, 336 bp, Glycine max
  unsure (1)..(336): unsure at all n locations
  Clone ID: LIB3050-010-Q1-E1-H9
gaacacaaaggagaacaccatggtgagcacaaaggtgaacacaaaggagaacaacaccatggggagtacaaggagggacttgtggataagatcaaggacaagatccatggtgatggccatgacaagggtgagaaaaagaagaagaaggacaagaagaagaaggagcatggacatgaccatcatggtcatagcagcagcagtgacagtgattagatcntatatgttaagcacgtgtacggtacgatgggagtgaggagccagaatccctcttcctgctttatgatataataccaataaaataacgattccggaaatcatgtctgtaactgctccttt

SEQ ID NO: 23206 - DNA, 389 bp, Glycine max
  unsure (1)..(389): unsure at all n locations
  Clone ID: LIB3050-011-Q1-E1-A1
gaggtagtggtcggagaggatgaagaattggtggacagcaaaatactgtgaatggtacatctagctcaagcacagacttctttagtggattaactggcagtgattccttgaatgggggcactctaaacattgaaagtgagaagacaagtccttcacatgatatgggatttttcaggtttggggcaccagacaatgaggacttgtttggagatagacctttacctgattgggttggatggggtgaaccatccgaaatgcaagatgctggttcaagtangaacccctttctggataatgacgagtctggtagtaatttgcctattaagcctcaagaaggtagtcctaatctgagttctccttcaaatggggaatccataccttcaaatggg

SEQ ID NO: 23207 - DNA, 376 bp, Glycine max
  Clone ID: LIB3050-011-Q1-E1-A10
gttggatgatggctacaagtggacgaagtacggacagaaagtggtaaagaatacacagcacccaagaagctactaccgttgcacccaagataactgtcgagtacagaaacgcgtggagcgcttggcagaggatccaaggatggtgagaaccacatatgagtggagacacgtgcactcgccatcaaatgaacttgaagactcgcaaaccgcttttgaacttagtaacttcctgtggtagtagcatacaccatcataatgtctacatagatgtatagttcagtagatcgtggagactacagatgaggaccgaatacgtagagaggaatgagtaaacatgacagtgtatccaggaaatggtgcatgcatacgttggttc

SEQ ID NO: 23208 - DNA, 322 bp, Glycine max
  Clone ID: LIB3050-011-Q1-E1-A12
ggctgacacgtacaaacatccatcatcatgaatagtttactccgaacgagttgacgccgattccactcactcaaccatgagccgattcaggcgttttgagctcatagaacaaccagctttcttccactcctgctacgctttcccgttccttcgtcctcgaagactcactctctctcgacctcgacctcgtgccacttcacagccacttcgacgctttcgcagatctggtgtacgcgccgtcctgcgcttaccggcgcgtggagaggcatctcgagaatgagttgcgtttgcagagccgctctgaccgtgtagcggagctgga

SEQ ID NO: 23209 - DNA, 376 bp, Glycine max
  unsure (1)..(376): unsure at all n locations
  Clone ID: LIB3050-011-Q1-E1-A2
accctcggaatgacatcatgtgggtcacctgagacatcttgtcaatctgctacaaccatgaacttgtttcctaccaaggaaaacaacgtgacaccaaaggacctgacagctatggatttgtgctctccacaagcttcctcctatcgtccttcagaggagattccaaccttgattaattccagtgcaattaaatctgtgagcaagagtgctaaaactgcacagatgacaatcttttatggtggacaagttgttgtctttgatgattttcctgctgacaaagcaagtgagatcatgtctctatccaccanaagggattccccaaaacccagaacaattctgttttcaactacacaccgagccagccttcatttcctgc

SEQ ID NO: 23210 - DNA, 324 bp, Glycine max
  Clone ID: LIB3050-011-Q1-E1-A3
ggaggtcgttggcgagaatgggaagaaagaaggggtatgctgagttcgaggagtcgccgccggacgattttgatccggcgaatccgtacaaggacccggtggcgatgctggagatgagggagcacatcgtgagagagaagtggatccaaatcgagaaggccaagatcattatggagaagctccgctggtgctaccgcatcgaaggcgtcaaccacctccagaagtgccgccacctcgtcaaccagtatctcgagtccacccgcagcatcggttggggcaaagaccgtcgccaaccatctcgccacgctcccaaagttgaccctg

SEQ ID NO: 23211 - DNA, 395 bp, Glycine max
  Clone ID: LIB3050-011-Q1-E1-A4
gggcattgtgaaatcaacagagaaacatttcactaatagagagacataagcataatattgagaaataatggagggttgtacttattgtgtgaagttgctatgccttgttgggtttgtggtgcttgtgagtactattgcaggggtggagagtgctggtgaatgtgggaaatctaccaccccagataatgaggcttataagcttgcaccatgtgcctcagcagcacaagatgagaatgctggtgtttctcagagttgctgtgctcaggtgaagaaaattgggcagaacccaagctgcctctgtgcagttccgctctccaacacagccaaaatggctggtgtcaaccctcaagttgctgtcaccatccccaagcgttgcaacctggctaatcgccctg

SEQ ID NO: 23212 - DNA, 385 bp, Glycine max
  Clone ID: LIB3050-011-Q1-E1-A5
ggcccaccggaattgaatagaaatagaatcgtcgattttctctttctctgactctagggtttcattattttcttctgtagatccatctatctagcttcggagctgcaaatggacgtcgcagtcactgccttccggtcaccgctgatcatcctccgaagaccggtcaacgagtctgcctcagctcggttcggttccacttttgggttttccagaaagcaacggttcagttcagtatgtatccccaaacacaagcacaagcaaggtcgtagaagagggtttgtagttagagcttctgcatcctcatctccggagtcggatgatgccaagattgctcctcttcagtttgaatcctcaattgggcagttcctttctcagattttgaaag

SEQ ID NO: 23213 - DNA, 371 bp, Glycine max
  Clone ID: LIB3050-011-Q1-E1-A6
ggatgaagataaggagaaggaggagaagaaaaagaagaccattaaggaggtatctcatgagtggtcattggtgaacaagcagaagcctatttggatgaggaaacctgaagagatcacaaaagaagaatatgctgctttctacaagagtcttaccaatgattgggaagagcatttggctgttaagcacttttctgttgagggtcagctggagtttaaggctgtcctctttatccccaagagggcaccttttgatctttttgacactaagaagaagcctaacaacatcaaactgtatgtccgccgtgttttcatcatggacaactgtgaggagttgatgccagaatatcttagctttgttaagggtattgtgg

SEQ ID NO: 23214 - DNA, 395 bp, Glycine max
  Clone ID: LIB3050-011-Q1-E1-A7
gaacctaattgagcagcgaaaatcctctgatactgttgttttcctgaaactatgacaaccatgtcaacctcatcctcttcccaaagcctcaaaattggcattgttggattcggcaactttggccagtttctggccaagacaatgattaaacaaggccacactctcacagcaacttctcgatctgattactctcaactttgtctccaaatggggatccattttttcagggatgtcagcgcattcctcgccgcagacatagatgttatagtgttgtgcacatcgatattatcgctatccgaggttgtagggtcaatgccactcacttccctgaagcgaccaacgctctttgttgatgttctttctgtgaaagagcacccaagagagcttctactacg

SEQ ID NO: 23215 - DNA, 368 bp, Glycine max
  Clone ID: LIB3050-011-Q1-E1-A8
gactgcatttcccacctcaatattaatatatttctttccccacaagagagatcatggaaaaggatatcattcatctttctccaacatgggatggtgacaatggcaattccactgagaaaaggctcaggctatttggttttgagctaaacccttctaaagatggttatgccaaagaatctggtgaaggagatgaaagtgtgaactcctctaactcagtttcttctggaggagacaaaactgtgcaagagaaaccctctgccaaagactctgatgagagaaagtttgagtgccaatattgttacaaggaatttgcaaactcacaagccctaagaggccaccaaaatgctcacaagaaagagagaatgaag

SEQ ID NO: 23216 - DNA, 346 bp, Glycine max
  Clone ID: LIB3050-011-Q1-E1-A9
cggggtgtctcactcacatcacacactctcatagctgtagcggcgacactaagatcggagaaagaatggcgaaaacgacgtcgttgctgctctttacactgctcctcttcggaaccctagctctcatccaggcgaagaaatcgaaggaggatttgaaggaggtgacccacaaggtttactttgatgttgagattaatggaaaagaagcaggtcgtattgtaatgggtctttatgggaaggctgttccaaaaactgcagaaaacttccgagcactttgcacaggggaaaagggaactggtaaaagtggaaagcctctccattacaaaggtagctcattccatagaat

SEQ ID NO: 23217 - DNA, 360 bp, Glycine max
  Clone ID: LIB3050-011-Q1-E1-B1
gttgaaggaatagagcacatactcaatgcagaaaatgattgattcataaccctcaagagagagctcaaatgccatgcactggctcagatgacaattcagtttattctatttgtggtgaatttaaagtgaagcttggaagatcaagaattaaggggaattcttttatccaaatttgggatgtatgtagtgatgatgcatctatacaaagaaattattgtgtttagttcccttgaacaagggcaataagattgacttgttgctctacatggtctattagaagcagattagctccagcattcaatttttctgtgcaacaacagattggcaacagatgctgaaaatacattccttgtaaaaatg

SEQ ID NO: 23218 - DNA, 355 bp, Glycine max
  Clone ID: LIB3050-011-Q1-E1-B10
aggcgagaagacgacagacggggataggagcatcatacattgcattgaattcataaactaagttcatttcttgtgctttgccttattcctcatgagcacacatgtcgaacatatgcggcaactgtgattgcgctgacatcactaactgcaccacgggaaacagctatggtgttatagtagagactgagaagagctacatcgagactgttgacatggatgttcgagcagctgagcatgatgggaagtgcaaatgtggcactaactgtacttgcacggactgcgcttgtggccattaaggaatatgtatgacaatctcattgccatctgtatggcactacgattctccagataatgt

SEQ ID NO: 23219 - DNA, 357 bp, Glycine max
  Clone ID: LIB3050-011-Q1-E1-B11
gaaagggaaaaaaaaaaatagcaacaaaaacaagaaaaaaggttacctctttcaattttatcccttgttgtgagcttaattcaatttctgctcacacataatggcttgcacgctcgctgattcattactcctattcaagggttcttatcagaaaccagttctgaggagagacattgctgcccggtactccccgggtatatttagtctaaacagtaatgggcttatccagaaaaggttcaggcgtcaaaggaattttgttactaggaataaggttactgtcatacatgccgtggcaattccagtacaaccagctccggtggaaagtgcggagtatagaaaacagctagctgaagacta

SEQ ID NO: 23220 - DNA, 393 bp, Glycine max
  Clone ID: LIB3050-011-Q1-E1-B12
cggtcaggaaatcccgtctcgaccacatccgcaagatcgcgacgaccgcgcgcgacgaattcggcgtgcgcgcggtgatccatccgcatgcgggcggctacatcgagttcgccgacgagatcgaccggatcgtcgccgatatcacggccgacacggtcggcctgtgcctcgacacgggccacctgcattactcgggcatggacccggagacgtggctgcgccgccatgcggcgcgtctcgactacgtgcatttcaaggacatcgacgcggccgtgtacgacgcggtgatgggcgagcacatcgcgttcttcgccgcgtgcgcgcgcggcgtgatgtgcccgatcggcaagggcgtgctccactacccgtcgattcggcgcgcactctacgaca

SEQ ID NO: 23221 - DNA, 373 bp, Glycine max
  Clone ID: LIB3050-011-Q1-E1-B2
gaacgcaacgaatgaaaagaagatcctcaagttgctgagcagccaaacactctctctctgtctctcgaaaattctcagtttgcagagaaaatctgaatcatgtcgtggcaagcgtatgtcgactatcaccgtctgtgtgacatcgaaggtaaccacctcagtcacgctgctatcatcggccaagacggcagcgtttgggctcagagtaacgacttccctcagttcagacctgacgagataactgccagcatgaatgactttaatgagcctggatcacttgctccaactggattgtatctctgtggcaccaaatatatggtcatccagggttgaaccggtgctgtcattcgagggaagaacggtcctggtggtg

SEQ ID NO: 23222 - DNA, 392 bp, Glycine max
  Clone ID: LIB3050-011-Q1-E1-B4
ggcagcagcaactttaaacgccgaagaaagttcatccaatctccgaagcccttcaccgcattgcaaccatgtcgagaagaaaggttagagagccaaaggaagaaaacgtgactctgggcccagctgttagagatggcgaacatgtctttggcgtcgctcgcatctttgcctccttcaatgataccttcattcatgtcactgatctgtccgggagggaaacacttgtccgcatcacaggtggaatgaaggttaaggctgacagagatgaatcgtctccctatgctgctatgcttgctgcacaggacgttgctgccagatgcaaggaactgggcataactgctcttcacatcaagctccgtgcgacgggtggaaacaagacaaaaacaactggt

SEQ ID NO: 23223 - DNA, 375 bp, Glycine max
  Clone ID: LIB3050-011-Q1-E1-B5
ggcgtacgcagcttcatccctaacgcgtgcatagcagagtcagagacagagacgcagccatggggcggagacctgcgaggtgttataggcaaattaagaacaagccataccccaagtcacgtttctgccgtggtgttcctgatcccaagatcaggatttatgatgttggtatgaagaagaagggtgttgatgagtttcctttctgtgtccatctggttagttgggagaaggaaaatgtttcaagtgaggccctggaagctgctcgcattgcttgcaacaagtacatggccaaatttgctggaaaggatgctttccacttgagagtcagggtgcacccattccatgttcttaggatcaacaagatgctttcgtgtg

SEQ ID NO: 23224 - DNA, 348 bp, Glycine max
  Clone ID: LIB3050-011-Q1-E1-B6
gaactgttgatcgagtcagactcatggcgtgacgttccgattttttattcacgctcttgcggactaacatgctcatctgtcataaaatttattaatcatgtcgttccgatcgaaagactacaattaccatcggtgaattgcccatagtacaagtgagattgaactgaaaactgcagctgctgatgtacgttttccgatcacagttcagaccacacactgtttcactcgcaagatatagttgcaaacatgcatgacatcaatgggtgaagattcatgtcaatgtcagaaatgtgccacagaggaacgctccctatgctcaggtaaagtggttgaaatgtggactgacca

SEQ ID NO: 23225 - DNA, 391 bp, Glycine max
  Clone ID: LIB3050-011-Q1-E1-B8
ggctttggtatggaagagagtagtggggcatgccgaggaaaaggacggtggcatccgaacgaaagcggtagcaaaatccgtttaagttaattcttttgacgcatacaaaggaaaacattttcttattcaaatactcaccaataccaaatccaacacccacacccacaccaataacaagcttggttggtacttatctacaatctgcatcatggaaggtgttattctgagaagggtcattccttcggataacagttgcctcttcaatgcagttggatatgttatggatcatgacaaaaagaaagctgctgagttgagacaggttatagcagcaacagtagcaagtgatccacagaaatattgtgaagcatttcttgggaagccaaacgctgag

SEQ ID NO: 23226 - DNA, 383 bp, Glycine max
  Clone ID: LIB3050-011-Q1-E1-C1
gacccaaacacttctctttttctctctctacactctattcaacccttcacattttctctcttctttatcttaaattacttttccatggaggaaagcaagaaacgagtccgggacgagtccagctactcacccgagtcccaaactcagctggtcgactctcccgagtctgaaagtcagcgggtcgactcacctgagtctaagattcgtcgagttgactcgtccgagtctcaactcgactcggtccttgactcggaggtgcgtctacaagacgacatttttaacatacttgacgacgccgataatgtgcctgagcgtgactcggtgcagggtcttgactcagtgatcaaaagcttcgaagatgagataaacgctcctggttcgga

SEQ ID NO: 23227 - DNA, 334 bp, Glycine max
  Clone ID: LIB3050-011-Q1-E1-C10
cccaaaggtatttttagcgatgtttgtatatgttggcctgggtctctctcagacgatcaagtgttggagaaaagcgcgttgtatcagagagccactatgggaaatttgaaggacgtgtgggtggtgggaaactcgggacaccctctgatggagggtgttttggttccttacactcatcagaatcttacttggacacagcacgcgtttaatcagaatgttggggagattcagagcattgctaaggacgctttcaccaggctcaaagggaggtagtcttgcttgcagaagaggactgaagtcaagcttgaggacttgcccgtgcttcttggggcct

SEQ ID NO: 23228 - DNA, 354 bp, Glycine max
  unsure (1)..(354): unsure at all n locations
  Clone ID: LIB3050-011-Q1-E1-C11
ggagtgagacatcattaattccaaaatcacactcctatatatcttcctatagcaatatatatgatgggtgacactgagatcaagccatcagttgaagtagtcgtatgtgcttccatgaacaataataatagcgcaaacaaccacaccctcccaaccgacatcaccaagccatcacaattaccaatcttgaccaggctccatgctggttactttttcatatgcctttcctttggagcacaagctttgctctggaagagtttgagtaaacacaacaaggactcacaaagtctctggcatggattcaacttgatgccttccattgcatttctacttcnttggtgtgtgtcactgctg

SEQ ID NO: 23229 - DNA, 376 bp, Glycine max
  Clone ID: LIB3050-011-Q1-E1-C12
ggcattgtgaaatcaacagagaaacatttcactaatagagagacataagcataatattgagaaataatggagggttgtacttattgtgtgaagttgctatgccttgttgggtttgtggtgcttgtgagtactattgcaggggtggagagtgctggtgaatgtgggaaatctaccaccccagataatgaggcttataagcttgcaccatgtgcctcagtagcacaagatgagaatgctagtgtttctcagagttgctgtgctcaggtgaagaaaattgggcagaacccaagctgcctctgtgcagttctgctctccaacacagccaaaatggctggtgtcaaccctcaagttgctggtcacatccccaaagcgttgc

SEQ ID NO: 23230 - DNA, 357 bp, Glycine max
  Clone ID: LIB3050-011-Q1-E1-C2
caatgggaacacgcaagtttaaccaatagagggctgcatcacaaacagacagatgcaatagcacaacagagatctgacacatgttgtcaagaaacacctctttggcttttccgtgcaaatttcacccacagtgtggccagttcatttgcctcagatcctgatccaatcctatacctcagcatactaaacacaatatttggtgccagcaaaacagcacataacatggactacattcgctcatgcacgaactcctccgacgtcatcactgacgactttgtcgtctcacgacgcatacaatcctcatagaacttctcacacacacggctaactgtgggcccagcaaaaccatacaacttt

SEQ ID NO: 23231 - DNA, 364 bp, Glycine max
  Clone ID: LIB3050-011-Q1-E1-C3
ggaggaactaagcaaactagaattgtcaaagaaaactgggaagaccaagaaaaatcgtctcttcaggaaagaactttatctcgcattaattttgttgactgcctcagttagaagcttattatctgcccaaggaattcacttctacttcctattatttcaagggataagttttctggttgttggtcttgatttgattggagagcaggttagttgatgtccagattttggatttttagtgcatacaaaacctctaagatcctcattgataaaggtcagaatggccaaaccataaacccatccctgaacacattgatttgagcctaagctgttcagtgtggtttttggctcccaattaaagcaaatc

SEQ ID NO: 23232 - DNA, 428 bp, Glycine max
  Clone ID: LIB3050-011-Q1-E1-C4
cggtcaggaaatccgggacgacagaacggggaagcaagtgcagagcaattaataactcaagttttgggtcactccgtgaccgtgatgatcgtaaagttattgtcttttgagtgatgggtttgtgctcttcggtccccagaaacgctaacgaagacatgaagctcaaactctcgttcggttcaaaatctgagaagcttgtgattcctccaacatccatcaagggacaacaacaacaacaaccccaaaatgggtggtcaacggctcggtcaacgaccaccttcactgaccatggtagcaaagaggaagccttttttgattccaaggcctggttagactcagattgtgaagatgatttctatagtgtcaatggtgactttacaccatctagagggaacacaccagttcaccacacttttgggaccccttct

SEQ ID NO: 23233 - DNA, 392 bp, Glycine max
  Clone ID: LIB3050-011-Q1-E1-C5
gggcgtgagaaagcagtggaggaagccttggaagcattgaaaatcctacaggaaacactgaaagacaagaaattctttggaggagagagcataggattggtagatattgctgccaatttcattgggtattgggttgccatattgcaagagattgcagggttggagttgctcaccattgagaaatttcccaagttatataattggagtcaagactttatcaaccaccctgtgatcaaggagggtctgcctcctagagatgaattgtttgctttcttcaaagcttctgctaaaaagtagaaccattttagaggtaggattcataataagttagtatgattttgttgggaaacaattatcttgttgtgagcaaaggattgttctgttttaaattt

SEQ ID NO: 23234 - DNA, 379 bp, Glycine max
  Clone ID: LIB3050-011-Q1-E1-C6
gacacactaagcgtgaactaatatcgaaattcaattataccctgaccctgtgttagtttcgtgtgttgagaagcagagagaggcagagatgcaaggaagcgcagctgacggtgaagccttggatttcgagcctgaggacgatgacttgatggacgaggacggcgcccccgacgccgacgcttctccgcctcaaccaagctcaaatccgccatcaccgccgccgccgcccccaaaaagaccaagggtcgcggattccggcaggacaccgacgccaaccgtgacactcgcctctccggctccgacttcgactctctcaccaccgagggcggccctggccctcaaagattcattgaaggatggatcattccggtcaccggcg

SEQ ID NO: 23235 - DNA, 377 bp, Glycine max
  Clone ID: LIB3050-011-Q1-E1-C7
gacagacaaacaaacaatttaccagctatacgtgttccatttgaaggttaaaagtgctacaatacaaacaacggcagctacacatgaagatgtgaagcttttgggtattgtgggaagcccatttgtgtgcagggtccagattgcccttaagttgaagggagttgaatacaaatttttggaagaaaatttgggcaacaagatctgatttgcttctcaaatacaaccctgtacacaataaggttccagtgtttgttcacaatgacaagcccagagcagagtcgcttgtgattgttgaatacattaatgagacatggaagaacatccccagcttaccttctgatccttaccaaagagccgtggctcctttctggtccaaa

SEQ ID NO: 23236 - DNA, 393 bp, Glycine max
  Clone ID: LIB3050-011-Q1-E1-C8
gagggaggggagaagagaaagaaggaaggagacatttataaaaagctctttcccttcccctaaatccctcacactcattccatttttacctttctctctcgctcgcaaacgcaaataataaaaaacaaggttttagccatggcatcgaagcggatcttgaaggaactcaaggatctccaaaaggatcctcctacctcatgcagcgccggtcctgttgctgaagacatgtttcactggcaagcaacaattatgggtcctccagacagtccttacgctggaggtgttttcctagtcactattcatttccctccagattatccctttaagccacccaaggttgcattcaggacgaaggtatttcacccaaatataaatagcaatggaagcatttgc

SEQ ID NO: 23237 - DNA, 342 bp, Glycine max
  Clone ID: LIB3050-011-Q1-E1-D10
ggcagccaaagaaaagaaaatcctcaattttctgagcagccaaacactctctctctgtctctcgaaaattctcagtttgtagagaaaatctgaatcatgtcgtggcaagcgtatgtcgacgatcaccttctgtgtgacatcgaaggtaaccacctcactcacgctgctatcatcggccaagacggcagcgtttgggctcagagtaccgacttccctcagttcaaacctgaggagataactgccatcatgaatgactttaatgagcctggatcacttgctccaactggattgtatctcggtggcaccaaatatatggtcatccaaggtgaacccggtgctgtc

SEQ ID NO: 23238 - DNA, 340 bp, Glycine max
  Clone ID: LIB3050-011-Q1-E1-D11
gacaatgtcaaagctaagattcaagacagagatagtatcccaccacaccaacagacgctcatttttgctggaaaacatcttgacgatggccgaaccttggcagattacaacatccataaagaatctaccctccacttggtgctccgtcttcgcggtggtatgcaaatctttgtgaagacccttactgggaagaccattactttggaggtagagagctctgacacaattgacaatgtgaagacaaagatccaagacaaggagggtattcctccagaccagcaaatgttgatttttgcgggaaagcagcttgaacatggacgtaccctggcacgctacaaca

SEQ ID NO: 23239 - DNA, 351 bp, Glycine max
  Clone ID: LIB3050-011-Q1-E1-D12
ggaggaaaagagaaaaaaagagggaaactcaaagtcatcatccaccatggcaaattctgtggcattttccgacgagattccgaacatgagcatgagcacaagcttccctttctcccctgctttctctagcatctttgacatgatgccacctccaccaccttcctcatctcacgatcctaaagctcccaacaactttgctggcttcatggacttgctcgctgtccctgctgattattatgccccttctttattcgactggccccaaaacaccaccgccacgtcagcaccaccacctctcaccgcccaaatcaaccaccctcttccgtctccggccagctccaatgtccccga

SEQ ID NO: 23240 - DNA, 397 bp, Glycine max
  Clone ID: LIB3050-011-Q1-E1-D2
agaagggggttctagtgtgtgattgtttgttgttgtaactcgttcttcttcttttgttgttctgtgtttgtgtttgttttttctctcacctgaaaatgtcttgctgcggtggtaactgtggttgcggaagctcctgcaagtgcggcaacggctgcggaggctgcaagatgtacccagacttgagctacactgagtcaaccaccaccgagaccttggtcatgggagtggcacctgttaaggctcaatttgagggtgctgaaatgggtgtgcccgctgagaacgatggctgcaaatgtggaccaaactgctcctgcaacccctgcacttgcaagtgaggtgttgggagagcaagcttcaagcagagatagcccttaattaggaataatgattaactaat

SEQ ID NO: 23241 - DNA, 330 bp, Glycine max
  Clone ID: LIB3050-011-Q1-E1-D3
agaatggggttctagtgtgtgattgtttgttgttgtaactcgttcttcttcttttgttgttctgtgtttgtgtttgttttttctctcacctgaaaatgtcttgctgcggtggtaactgtggttgcggaagctcctgcaagtgcggcaacggctgcggaggctgcaagatgtacccagacttgagctacactgagtcaaccaccaccgagaccttggtcatgggagtggcacctgttaaggctcaatttgagggtgctgaaatgggtgtgcccgctgagaacgatggctgcaaatgtggaccaaactgctcctgcaacccctgcacttgca

SEQ ID NO: 23242 - DNA, 387 bp, Glycine max
  Clone ID: LIB3050-011-Q1-E1-D4
ggcaaatacaaacctaaaccaaaacccgtgtctgtgtttgtttccactttgcaaatcagtgtgtacccaggaatctcttgattgagaaagtgtgttagggtaagagttgtgtcgtgtccacgagacgctgggagaaagaaagtgtgtgtgagttgttgtaaactgaattttcatttttctttagccatgagcacacttgttcgcaacaccaccctcaccttcagccgcagaaacagatacgagcttcttggtttgcagggcaaagacaagatggtcaagtccatcagctacagacgcagaagggcaaagcaaaggcaaatctttctcacaacctacaagttatcttctttgaatagtaacacttttggggagccgacacaaaagcct

SEQ ID NO: 23243 - DNA, 355 bp, Glycine max
  Clone ID: LIB3050-011-Q1-E1-D5
ggcttgatgagttaaccaaaaccaaccttggcctgcactcaaagaacaaaaccttcaaaatagtatccaaaacaccccttttactcccaatatctcaaacccaatttcaatttcaatttcaaattctcttctccaaagatgtctcttcaagctcaaccacaacaacaaccacaacaactagtccaagtttacccaacaaatcagccaccttcatcttctcatcactcaaatgggtcatttggggcagttttcattgtccttgccataatactagtcatttctgtagttgcatgctttctagggcgcctttgcaacaagcgctataataatagccacagcaaccgccagaaaccct

SEQ ID NO: 23244 - DNA, 340 bp, Glycine max
  Clone ID: LIB3050-011-Q1-E1-D6
gtaggaggatgcagttgggaaatttggtggagtcgatcaaatcgaaggtgagatctttgaagccgaagaagggaaagaagccatacatgaagatggacaagagtgccagcgtcaaggtagagattcgcagcacaaaagcccgcacgcttatacaaaagaccttgaaggctgctgatatttccaattaatcctaccttcttctcttctcttttcagaaagagtaacaacattccgcctcttgcgtcgttactggttacgctcaagagggttcttttcactacgagatccgccttcttccagacgccctccgccagtcctcgaagccgttgcttgtaccaca

SEQ ID NO: 23245 - DNA, 386 bp, Glycine max
  Clone ID: LIB3050-011-Q1-E1-D7
ggaatttctgtagttgaaattaccagttactatactctctctttctgaaacaatttgcccaattgtttgagatgttcaatatgagatttgtatctcaagattgggtggtttcatgtgcactaatacttctggtgtcatgcacaacatactcatcagcttctttggggaaacctgagaacaacataaaaacatctgtttttaaatcacccaagattgagctaggtccagggttagtttcaaacaaattttattttgatgttgactttccaagaggccatattgcactcaagagtttcaatgctgaattggttgatgagtcagagaaatcagtgcctctccaagaaacctatctccatcaatgggcttataataaaataacaccagcc

SEQ ID NO: 23246 - DNA, 398 bp, Glycine max
  Clone ID: LIB3050-011-Q1-E1-D8
ggatcaggtagccaattcaccgttaacctaagaaagagaagtagctgtagtaataggaagaggatgatcggcgtcggaaagatcaagcagtacagtaacgtcctcgacaagcccctcaccaagggcaagcaagaggttagtttgagtgcattcgcgttcttgttctcggagcttgttcagtacaaccaaacgcaggtcgacaacattggcgagctcgaacgaagactggaggatgctggatatgcggttggggctcgagttcttgagctgctttgccacagagataagggaaacagaagagagacacggctgttgaatattctttcttttgtacacagtacagtgtggaaagtattatttggaaaggtagctgattcactggagaaaggaactgaaca

SEQ ID NO: 23247 - DNA, 338 bp, Glycine max
  Clone ID: LIB3050-011-Q1-E1-D9
ggtacaaaacataaatttgtttgctattatggcttcttcattaaacaatggccgtaaagcaagtgagatttttcaaggtcaagctctcttgtacaaacatttgcttggcttcatagattctaagtgtctaaaatggatggttgagcttgacatacccgacataatccacagccatagccatggccaacccattactttttcagagttggtgtcaattctacaagtcccaccaactaaaactcgtcaggtgcagagcctcatgcgttatctagcacacaatggattctttgagatagtaagaatccatgacaacatagaagcatatgctctcactgctg

SEQ ID NO: 23248 - DNA, 356 bp, Glycine max
  Clone ID: LIB3050-011-Q1-E1-E11
gaaatgcaggtgtctatgttggaaatatacaatgaaaccattcgtgatctgttagctacaaataagtcatcagcagatggaacaccaacacgtgtggaaaatggtactcctgggaagcaatacatgatcaaacatgatgtcaatggaaatacacacgtttctgatctcacagtagtggatgttcagagtgtaaaagaggttgcatttcttttaaatcaagctgcaagtagcagatctgtgggaaaaactcagatgaatgaacaatcttctagaagtcattttgtattcactcttcgaatatatggtgtaaatgagagcactgaccaacaagtacaaggtattctaaatctcattga

SEQ ID NO: 23249 - DNA, 157 bp, Glycine max
  Clone ID: LIB3050-011-Q1-E1-E12
aggcaaggggataacgaaagggggaaattagggtatggtcaaattgtgttacatcttgtcttgcgcagttcctcggtctgtcgtttatgtatacaaacaataccggatttcagcaaggcaacaaatttaataaggcaaggtggaaaagcaagacatt

SEQ ID NO: 23250 - DNA, 381 bp, Glycine max
  Clone ID: LIB3050-011-Q1-E1-E2
cccgggcctgaccacgcgttcagttacggctgcaaaaaaacaacaaaaggggacagacaaacagacaatttaccagctatacttgttccttttgaacgttagaagtgctacaatacaaacaatggcagctactcaggaggatgtgaagcttttgggtattgtgggaagcccatttgtgtgcagggtccagattgcccttaagttgaagggagttgaatacaaatttttggaagaaaatttgggcaacaagagtgatttgcttctcaaatacaaccctgttcacaagaaagttccagtgtttgttcacaatgaacagcccataacagagtctcttgtgattgttgaatacattgatgaaacatggaagaacaaccccatctt

SEQ ID NO: 23251 - DNA, 144 bp, Glycine max
  Clone ID: LIB3050-011-Q1-E1-E3
gtcgcgataagatcatatactgggacagacctacagacgatttaccagctatacgtgtgcctttttaacgttagaattgccaccatacctacaatagcagctacgcaggatgatgtgaatcttttgggtattgtgggaagccca

SEQ ID NO: 23252 - DNA, 353 bp, Glycine max
  Clone ID: LIB3050-011-Q1-E1-E4
gggcacttgaaatttgaaaacttgatctgcctttgctttgttatttcattaacagcacccctttgggccatatattggttacctcaactgcttttctgttcatctttccagaattattgtaaagttccctttttttgttctgtcttttcattcttttttcaaagtgaattcctgggattttttgttttcaattgagggcactaaaataaaagaactgactggaatttccatttgtcctgctgggtccctgagattttaagtgtgttgttttccttttggtgggtggatcccaagttcatgaattccctcttttctccagccaatttgttttgttgccgattaaattaattccg

SEQ ID NO: 23253 - DNA, 350 bp, Glycine max
  Clone ID: LIB3050-011-Q1-E1-E5
gacagacaaacaaacaatttaccagctatacttgttccttttgaaggttagaagtgctacaatacaaacaatggcagctactcaggaagatgtgaagcttttgggtattgtgggaagcctatttgtgtgcagggtccagattgcccttaagttgaagggagttgaatacaaatttttggaagaaaatttgggcaacaagagtgatttgcttctcaaatacaaccctgttcacaagaaggttccagtgtttgttcacaatgagaagcccatagcagagtctcttgtgattgttgaatacattgatgagacatggaagaacaaccccatcttaccttctgatccttaccaaa

SEQ ID NO: 23254 - DNA, 381 bp, Glycine max
  Clone ID: LIB3050-011-Q1-E1-E6
agccgtcagtacagcagcgagagagaactaaagggggtctcgtggaattctaagcatgctcaaccctagcggcttctgcattctatgttcgtgtcttgcatcaggatgcattcacatgtcaatcacacatatgttgtcaaacttatgggtcttagtggatccagacgaccagtgatccaggttagagtgatgtctgtggatgatctcaaacttcagatcctgacgactgtggcatgacctgtgagacaatgtgacattcacagtttaactgagtctgaaagggaagcaggacaatggcgcctcacggtcgcttgttgatggcatgcctccaacatcgaacaacagccctatcttacttgatgattatggtaattaatccgt

SEQ ID NO: 23255 - DNA, 358 bp, Glycine max
  Clone ID: LIB3050-011-Q1-E1-E7
gggttggagtggctatttaaaaggatgattgagttgggaaaaacggggcttgttttcaatccttatggagggaaaatggctgagattccttctgatgcgacgccgtttccgcaccgtaaagggaacttgtataagatccagtactctgtgaactgggatgatccttcacccggtgctgctctgaatttcacgaaccaggctaagaggttgttcagttacatgaccccttttgtgtccaagaatcccagaagtgcgtttttgaattatagggatcttgatattggggttaacagctttggtgagaatagctttcaggaagggttggtttatgggaccaaatacttcaatgataattttc

SEQ ID NO: 23256 - DNA, 383 bp, Glycine max
  unsure (1)..(383): unsure at all n locations
  Clone ID: LIB3050-011-Q1-E1-E8
gaggagcagaatggcgaaggagatagtgaaagagcttcttcctctaattcgagtgtacaaggatggcagcgtggagcgtcttctaagctctgaagacgtggcagcctcccctgaagatccccaaactggagtctcatccaaagacatagtcatcgcagacaacccctacgtctccgctcgcattttccttcccaaatcccaccacactaacaacaaactccccatcttcctctacttccacggtggcgccttttgcgtcgaatccgccttctcctttttcgtccaccgctatctcaacatcatggcctcagaagccaacataatagccatctccgtcgacttcagactcctcncacaccaccctatccctgctgcctacgaag

SEQ ID NO: 23257 - DNA, 350 bp, Glycine max
  Clone ID: LIB3050-011-Q1-E1-E9
cagttcagttgtgagtaaaggaaagaaagggatcagtagcgtgatgacgatttgttggggcttatgtgatgatttcagttgcattgatcaaaacaaagtttctggtttgtggtcaatctgcgttgacaccgatgcattctcatgagtcgccattgatggattacctctatttggcttatgcaataccaccacatgaattataagactttcacagtcacatcttgcatcatcaattcagcgtacgtccagttacaaagttcattcactgttaattctatgttcgccgtctacagagaaccacagtttcacaaccttactcgcgatcgctagacaactacatcctcagggaa

SEQ ID NO: 23258 - DNA, 364 bp, Glycine max
  Clone ID: LIB3050-011-Q1-E1-F1
gaatgcacaccacatagcaaaacctcaagtaccttctccttcacattccctcagcactttctgtattcaaaacttttggcattgtttccaatatcctaacttgagactatatatatagcagcatatatatatatataatggatagggtgacacagatggcatcagagaggccagtggtgatattcagcagaagttcatgctgcatgtgccacaccatcaaaaccctcttcagtgactttggagtgcatccaaatgttcatgaacttgatgagataccaagagggaaggacattgagcaagctctttcaaggctagggtgcagcccctctgtgcctgctgtgttcattggtggtgagcttgttgg

SEQ ID NO: 23259 - DNA, 99 bp, Glycine max
  Clone ID: LIB3050-011-Q1-E1-F10
gacccacgccgtcagcgccacgcgttccgtacaggcgatgacgaggacaaacacagggggttacccaagttatggaatccaagccacaaacactttgct

SEQ ID NO: 23260 - DNA, 365 bp, Glycine max
  unsure (1)..(365): unsure at all n locations
  Clone ID: LIB3050-011-Q1-E1-F11
gattgagccatatattcccattcgtgtgtttccttcggcgcttgcttccgtgacttgagaaaaagaaatttagggtcttaagggtttcattctgcggcatcagacatgggaggaggcaatgggcaaaaggcaaagatggcacgcgagaagaacctcgagaagcagaaggccgcctcaaagggaagccagctggattcaaacaagaaagcaatgtcgattcagtgcaaggtgtgcatgcaaacatttatgtgcaccacatcggaagtgaagtgtanggagcatgctgaagccaaacaccctaaatctgatgtttatgcttgttttcctcatctgacaaagtgaacatattggagactgcaaatgga

SEQ ID NO: 23261 - DNA, 332 bp, Glycine max
  unsure (1)..(332): unsure at all n locations
  Clone ID: LIB3050-011-Q1-E1-F12
cggctcgaccaccctcagccagcttcgccaagcttccttacggctgcaaaaaaacaacaaaagggaacggcacaaagggaaaaaagaaaatggtgtccttgaagcttcaaaaccgcctcgccgctaacgtcctaaagtgcggcaagggcaaggtctggcttgatccaaatgaattcaatgaaatctccatggccaattctcgacaaaacataaggaagttggttaaggatgggtttattatcaggaagccgactaagattcactctcgctcncgtgctcgtcgaatgaaggatgccaagagaaatgggcgtcactctggttatggtaagcgt

SEQ ID NO: 23262 - DNA, 294 bp, Glycine max
  unsure (1)..(294): unsure at all n locations
  Clone ID: LIB3050-011-Q1-E1-F2
caagccttcattaaggcgccaaaagaacaacaaaagggaaaaaccaacaaaacatttaacaagccaaaactgttcccttttaaaggtaaaaattcctgcaatacaaacaatggcagctactcaggaagatgtgaagcttttgggtattgtgggaagcccatttgtgtgcanggtccagattgcccttaagttgaagggagttgaatacaaatttttggaagaaaatttgggcaacaagagtgatttgcttctcaaatacaaccctgttcacaaaaacgttccagtgtttgttca

SEQ ID NO: 23263 - DNA, 315 bp, Glycine max
  unsure (1)..(315): unsure at all n locations
  Clone ID: LIB3050-011-Q1-E1-F3
gactgcgaaccagtagggactcccattccgactcttagccgccgatctctcagggcttgcatcttctcaggtaagctgtgaagatgtacacatcaaggaagaaaatccacaaggataaggatgctgaaccaactgaatttgaagagtcagttggacaggcattgtttgatctggaaaataccaatcaggagcttaaaagtgatctgaaggatttatacataaactcagccgtgcaagttgatgtttctggaaaccgcaaggctgttgttattcatgtcncttacagattaaggaaaggtttccgtaagattcatg

SEQ ID NO: 23264 - DNA, 356 bp, Glycine max
  unsure (1)..(356): unsure at all n locations
  Clone ID: LIB3050-011-Q1-E1-F4
ggaggcggagacgaagaagtgaagagaagagaagagaagggatttggatctgaaaagagaagatggggggaggaatggaagcacacaagaacaagttcatacacgattggggcactgccagagagaatctggagttcaatttccgttggactcgccgcaaccttgctcttgttggcatcctccgcatcgctantcccgtcctcgtctacaagggcatcgtccgtgaattccatatgcaagatgaagataatggtccgccgtacangaagttcatgtgagagagtatggacagtcttttgtaataattcgtcaagttagaccttgatattatgaggctacaaaccatgttttttttt

SEQ ID NO: 23265 - DNA, 344 bp, Glycine max
  Clone ID: LIB3050-011-Q1-E1-F6
ggtggagtataattgctgcgtgtgcatggtgcggcataaaggcgcggcgtttattccgtgcgggcacacgttctgcagaacgtgttcgagggagatttgggtgagcagagggaactgccctctctgcaacaatttaattttggaaattcttgatattttctgaacctggtaataattttcattaatctttcaatataacctttttaatctctatctatgaatttttctttttctttgggtttggggaagaaactatttccactattagattaggatcatgtggttatgatgaatttgtccgtgacctgtgataacgatttgttattaaccaaatggacttacta

SEQ ID NO: 23266 - DNA, 364 bp, Glycine max
  Clone ID: LIB3050-011-Q1-E1-F7
ggcgcaggtagagagagcgagagaacaagaacataagggaaccacagcggcggtaacagaagaacaagcagagaatgggtcgagtgagaacgaagacggtgaagaaatcctctcggcaggtgatagagcgtcactactcgcgcatgaccctggacttccacacgaacaagaagcttctggaggaagtggcgataatcccgtcgaagaggctaaggaacaagatcgccggggtccccaacccacctgatgaagcgcatccagaagggccctgtgcgcggcatctccctcaagctccaggaggaagagcgcgagcgccgcatggacttcgtccccgacgtctccgccatcaacaccgaccacatcg

SEQ ID NO: 23267 - DNA, 396 bp, Glycine max
  Clone ID: LIB3050-011-Q1-E1-F9
aaaaacacaaaaaggaattgtgaacaattgaatttcagattttgtgttccgtcagtccgtggttttagagaaattgtatcaatggattctcaggcaacagcaagaaggatctagggtggccaccattgatattgttacccatttgcagaatgagcttgaatatggaggagaggaggcaccagtgtccccaaggcagccaatgcatcaacagaattcccagactgcaatgcacaacactaactttggtgcgtccataccctctaatgcatttggagcaactgtggcaagacaggggatacgtgctggacaacctgatcaacaaccaaagaactcagtgttctcaaatgcactctctagtcctattcgacgcatccttcagccatatcatttggcaca

SEQ ID NO: 23268 - DNA, 375 bp, Glycine max
  Clone ID: LIB3050-011-Q1-E1-G1
gacatcacaaaccaaacaacttctaacacatacactactctctctctctcttattgtatggccgccaattccagtagccgagggatcaccgccttagggaagcgagtcgccaaccggatctggacttccaacgcacctcctctcacttcaaggaggggagcatacagtagcggctcagtgtacgacaagaaccctgatgatgagatccagtctgggcaggtcccagacgatgtgatccaggcggcaacacaatccggcaaatactgggccccaaaatcaacaaactgggggtaattgggccccccgggaggaggtgaccaaactgcttctgccattcactctgatgcgctggaagagaaggcctggtttcgcccc

SEQ ID NO: 23269 - DNA, 400 bp, Glycine max
  Clone ID: LIB3050-011-Q1-E1-G10
ccacgcgttcagtacaggctggcaagaaaaacgaacaaaaggggttgaaggaataaagcacatactcaatgcagaaaatgattgattcataaccctcaagagagagctcaaatgccatgcactggctcagatgacaattcagtttattctatttgtggtgaatttaaagtgaagcttggaagatcaagaattaaggggaattcttttatccaaatttgggatgtatgtagtgatgatgcatctatacaaagaaattattgtgtttagttcccttgaacaagggcaataagattgacttgttgctctacatggtctattagaagcagattatctccagcattcaatttttctgtgcaacaacagattggcaacagatgctgaaaatacattccttgtaaaa

SEQ ID NO: 23270 - DNA, 379 bp, Glycine max
  Clone ID: LIB3050-011-Q1-E1-G11
cgggtacccagacttgagctacaccgagtcaaccaccaccgacaccttggtcatcggagtggcaccagttaaggctcaattcgacagtgctgaaatgggtgttccacgctgagaacgatggctgcaaatgtggaccaaactgctcctgcaacccctgcacttgcaactgaggtgttgggagatcaagcttcaagcacacatagcccttaattaggaataatgatatactactaatgtgtatctaaaaacttatgtattatgtctgtgattgttttcgtgcactctggtgttttgtgttaaacaaacatccttacaatacaatggtcatgtcttacctttcagccagttcaactatattggacttgatattggtgtctta

SEQ ID NO: 23271 - DNA, 68 bp, Glycine max
  Clone ID: LIB3050-011-Q1-E1-G12
gaaagaaaaaaaaacaactcccccctttcttcctcttcactccccaaatagacaagattgtccattcc

SEQ ID NO: 23272 - DNA, 395 bp, Glycine max
  Clone ID: LIB3050-011-Q1-E1-G2
ggatgccaattttctgaacacgcttttgaagagggtaagttcgagcaccggtactgtgctgtgctgcattacttgcatttcctctataatgggttgtttccactctaagtcggcgaggcagtttcctgcacaggagaatactgttaatcttgcggcagagacagcttttactgtcagtgaggttgaagcactgtttgagctttttaggagcatcagcagttctgttgtcgatgacggactgataagcaaggaagaattccaattggcaatcttcaaaaacaagaaaaaggataacctttttgcaaaccggatctttgatttatttgatgtcaagaagaagggagtcattgacttcgaagactttgttagatctctgaatgttttccacccaaatg

SEQ ID NO: 23273 - DNA, 366 bp, Glycine max
  Clone ID: LIB3050-011-Q1-E1-G3
ggatatgatgagaaatggttgatcaacgtgcatgccattgacacaaggggcgtggaagataggttggggtgcattgagtgtacgtgtgacctttataatatcacaaaggatgcagatggtaaccctttgagtccagattataagggaggtttggattgttgccctgataataccacgtgcaggctaaacaaaggcttcaagggtccaaagagaaccttataccttaaatacacagtgaagtggttcagttgggacaactacgtggtgccccttaagatttatatacttgatgtgactgatgttttgaacgtgtccaaaggagggactccaaagcataattgcgacgttgagtatcaggttgaacct

SEQ ID NO: 23274 - DNA, 326 bp, Glycine max
  Clone ID: LIB3050-011-Q1-E1-G4
ggaataaaggggaccgtcaaaggatggatgaaacgtaacctcgtcactttaggatgcagttgagcgtctgctactagctaccacggacagtcgcactgcatctgataattctcacatccacgatcacatgttgctgagtttgatacagagcatattgcatatcaccgtatgaatgccaatctccctttattactgtggaaactatgggtgatgacatcacactaacatcctctaaatagatccctataaatagactgagagttcaatacatctgtacgttgatcaacacagtaaccgcgttcttgaacatgttcacacatttacca

SEQ ID NO: 23275 - DNA, 277 bp, Glycine max
  Clone ID: LIB3050-011-Q1-E1-G5
aggggagcagaatgagagcaatttatgtcgggaagagattgtggacatattggaagacgttcaggcccgaactgaaatatccatgtgtattgtaggtgtaaaacagtgagtataatacttaattcagaatgaactgaaattaatttttgttaccacaatcatcactacacatccttgacctccgaccaagatttggcatttcaatgcaaacactatagcggatcaaatcagcgtttgtggcaacaagttccctttggtgcctaaagacttgtttttt

SEQ ID NO: 23276 - DNA, 395 bp, Glycine max
  Clone ID: LIB3050-011-Q1-E1-G6
ggagattgccggtggcttgacagagatttcagcagtttttgaatctgtcgatgagccggaggaggcgctgaagctgttgaacagggcaatgaagttgttggaggataagccagggcagcagagcactattgcggggattgaggcacgaatgggagtgatgtattacatgattgggaggtatgaggactcaaggaactcgtttgagagtgctgtggcgaaactcagggctagtggggagagaaagagtgccttctttggagttgttttgaaccagatggggttggcatgtgttcaactgttcaagattgatgaggctgctgagttgtttgaagaagctaggggaattcttgaacaggagtgtggcccatgtcatcaggatactcttggggtgtaca

SEQ ID NO: 23277 - DNA, 396 bp, Glycine max
  Clone ID: LIB3050-011-Q1-E1-G8
ggaaactcagagagcagttctactgatgaagaatcttgcaagaaaccaagggaagaaatcatcaaagcaaaaatttcaagagtttatgtcaggactgaagcacctgatactagccttattgttaaagatgaataccaatggaggaaatatgggcaaaaggtgaccagagataacccttgtcctagagcatatttcaagtgctcttttgctcctagctgccctgtcaaaaagaaggtgcaaagaagtgtggatgatcaatctgttctggttgctacttatgaaggggagcacaatcatcctcagttttcttcccaggtggaagcaacatcaggttctggccgtagtgtgacccttggttcagtgccctgtaccgcatctctcagcacttcaacacca

SEQ ID NO: 23278 - DNA, 245 bp, Glycine max
  Clone ID: LIB3050-011-Q1-E1-G9
tcagttgcgatgcagacaacacaacggtagggtgaggctcgatgacgtgatgtcatggatgccataccactacccattggtagtgcttctactcgcaaagtgttaggagtggatggctgcatttctcgtactcatttcaccgtgttgcaatgattttccggttcccaggttaaatatttaccatatcgagtgctgtacatcttttgcttccaagtttcccttcaatgtccatctcgttagttgcg

SEQ ID NO: 23279 - DNA, 276 bp, Glycine max
  Clone ID: LIB3050-011-Q1-E1-H10
actcatctgtttaccctgaaaggatgcaaattatttgcaatagtgttacaacacctctcaagtcgaaaaggtctgcaagaacagaattatcgtctggggattgtttggtggaaggtaaggatcgctaccaaagtgttgcttcttgttcaatattcaattcaaatgttggacagctatcaaatacatatgtccccttttatcgtaaatctttgatcatgaagttcccaagaatttcaacctaccatccaaagaacagttagtaaagaagtttagtgt

SEQ ID NO: 23280 - DNA, 382 bp, Glycine max
  unsure (1)..(382): unsure at all n locations
  Clone ID: LIB3050-011-Q1-E1-H11
ggttctagtgtgtgattgtttgttgttgtaactcgttcttcttcttttgttgttctgtgtttgtgtttgttttttctctcacctgaaaatgtcttgctgcggtggtaactgtggttgcggaagctcctgcaagtgcggcaacggctgcggaggctgcaagatgtacccagacttgggctacactgagtcaaccaccaccgagaccttggtcatgggagtggcacctgttaaggctcaatttgagggtgctgaaatgggtgtgcccgctgagaacgatggctgcaaatgtggaccaaactgctcctgcagcccctgcacttgcaagtgaagtgttgggagagcaagcttcaagcagagatagtccttaattangaataatgat

SEQ ID NO: 23281 - DNA, 311 bp, Glycine max
  Clone ID: LIB3050-011-Q1-E1-H12
tcaacaccttaatttgcacacgctgcttcttcagcttgagaaatggcacaagaaacctttctattcacatctgaatctgtaaacgagggtcaccccgacaagctgtgcgaccagatctctgatgcagtgctcgatgcgtgccttgaacaggaccctgacagcaaggttgcctgtgagacatgcaccaagaccaacatggtcatggtctttggagagatcacaaccaaggccaacgtagactatgagaagattgtccgtgacacatgccgcgaaattgggatcatctctgatgatgttggtcttgatgctga

SEQ ID NO: 23282 - DNA, 306 bp, Glycine max
  Clone ID: LIB3050-011-Q1-E1-H2
cgggacactcattccatttttacctttctctctcgctcgcaaacgcaaataataaaaaacaaggttttagccatggcatcgaagcggatcttgaaggaactcaaggatctccaaaaggatcctcctacctcatgcagcgccggtcctgttgctgaagacatgtttcactggcaagcaacaattatgggtcctcaacacagtctttaagctggacgtgttttcctagtcactattcatctccctccagattatccctttaagcaaccaaagtttcaatcaaggacaaaggtattcacccaaaatata

SEQ ID NO: 23283 - DNA, 384 bp, Glycine max
  Clone ID: LIB3050-011-Q1-E1-H3
gcactattttgagtggagatgttatcataagtcatctggcagcatactcaaagcctatatatgttgtttttctgacagatgtatatggggtatatgatcgcccaccaacagaacctaatgcaatactcttaaaggagattgccgttgctgaagatggaagctggtcagttgtaaaaccgaagttgcagaactcaattgaactaactgttgctgctcatgatacaactggtgggatgaaaacaaagatagcagaagctgcaatgatagccaaacttggaattgatgtctacattgtaaaggcagcaacaagccactcattaagggccttaaatggagatctgagaagcagcatccctgacgactggctcgggacggttgttcggt

SEQ ID NO: 23284 - DNA, 417 bp, Glycine max
  unsure (1)..(417): unsure at all n locations
  Clone ID: LIB3050-011-Q1-E1-H4
gcccgaccaagccttcattccggttgcaaaaaaacaacaaaagggaatcaaaacaaacctaaaaacaaacacacttatcctttctttcttgtcttaaaggtcaacaacatagttatagcacaaacttaattcaccatggtttttccaaaaccctcttctgagtctgacctctttctttgttccaactttgcttctcgctatgccagggactctcttcncaggttcagcatgccagangactccatgcctaangaagctgcgtaccaaaacattcacgatgagttgcagcttgatgcaattccaaagctgaacttggcttcttttgtgaccacttccatggaagaagagtgcaacaaactcatcatggaatccatcaacaaggactatgttgacatggacgagtatcctgccaacact

SEQ ID NO: 23285 - DNA, 376 bp, Glycine max
  Clone ID: LIB3050-011-Q1-E1-H5
ggaagcatccgtttccgtctaagtgactttgtctacttgtgtcccccagaagccttaaagctcttctctgctttgaaaatggctgattggggcccggtggtgatcgcagtggtgctgttcgtgctgttaagcccggggcttctgtttcagatgccggccaggggaagggtagcagagtttgggaacatgcaaaccagcggggcctccattttggttcacgccatcatctactttggcctcatcactatcttcctcattgccattggcgttcacatctacactggctaactcctggatctggttcagtttcacccatctatgtttatctctgccttttaattagtctttttagctttacaataatttccttgtttga

SEQ ID NO: 23286 - DNA, 261 bp, Glycine max
  Clone ID: LIB3050-011-Q1-E1-H6
ggagcttgggaggaaataatatcagttccgttctcaaaatcataacagtacttcgcgtgccctagctcagtccgtcgctcctcagccttccggcagtgcttggtcgtggccgtcacggttcaaacttcaaaggcatttgttgtgttggagtatgctatggatgacatgtttgattcttcgctgaacttggaggacacccattacaaggaatgctatgacgaaggctacagccatggccttgtcactggcaacgaagaagct

SEQ ID NO: 23287 - DNA, 76 bp, Glycine max
  Clone ID: LIB3050-011-Q1-E1-H7
cggggagcttacgaggtatgtgtctcatgacatttctcgaaagtcttgcattacgacgcgtgcgtctgctcaccct

SEQ ID NO: 23288 - DNA, 384 bp, Glycine max
  unsure (1)..(384): unsure at all n locations
  Clone ID: LIB3050-011-Q1-E1-H8
gacagcagagaaagaagcttcacaattcacattcccaccaacggaaccatggcctccgtgtacagctgtacggagtgcggatccaacctgaatcttaactccgctcatgcctaccctccagacttctacttcgaagccggcaacaagggctccgtctccttctccgccgtggaccccaccaagttcaagttcgagaaggaggacaagcttcgccctttcttcgaaaccgtcaactactggggaatccagaggaagaggaccaagatcaagtgcaacacctgtgactgtctccttggctacgtctatgacgatggtccanctcttaccaatagtcccggtcaatttcacatgggtcctagccaagttatccccagagcgccaaga

SEQ ID NO: 23289 - DNA, 383 bp, Glycine max
  Clone ID: LIB3050-011-Q1-E1-H9
gacggaatatcttcccaagggagatcatcgtgatttcttgaaaagaataggagctttgaaaccatcgacagctgtgagatttgcacttgatattgctaggggagtgggttatttgcatgaaaataagccatcacccattattcaccgtgatcttgagccttcgaatatattgcgggatgattctgggcacctaaaagttgcagactttggggttagcaagttgctggcagttaaagaagacaagcctctaacttgccacgatacttcctgccgctatgtggctcctgaagttttcagacaataatatgacactaaagtggatgtattttcatttgcactaattctgcaagagatgattgaccgctgctctcctttttctgcaa

SEQ ID NO: 23290 - DNA, 370 bp, Glycine max
  unsure (1)..(370): unsure at all n locations
  Clone ID: LIB3050-012-Q1-E1-A1
gacagacaggattaatagaaagcggctcattagacagaagtttcaatccgatgaattattttgtttggaatgaaacatctatatactaaattatagctaattatctagaagtattacaatagccgagttgagtttatcatgtggtgggctttccgatccctttccttttgtgttttacttttgctgggccatttaacatgttatttcttggtaacactaccagccaagtttgaatcttaaggcaaggcaatcctccatcaccgcanaaacaaaatcattttagtttttaaatattacaatttaattagatatttcaagaatatttcttatctctcattttaaattttaatatgttcttgaaattgaacgt

SEQ ID NO: 23291 - DNA, 289 bp, Glycine max
  Clone ID: LIB3050-012-Q1-E1-A10
cattgatttgattgtacagcatatccgcacaaagcttggtcagcatgacctgtgtaaaatatatcctaatttgtagtgtcattcagtcaacttttcagatacggggtatgcataccctgatacgtgatgctaagacagcattgcatgatttcacattttacccagatcgtttgattcgattggttgtggaacatggtttggggcatctgccatttacgggagtacagataatcactcacactggttctgtatacactggtgttgctctttgtaaaaagttgtgtggtgt

SEQ ID NO: 23292 - DNA, 353 bp, Glycine max
  Clone ID: LIB3050-012-Q1-E1-A11
ggtcattgaagacattgattgcagtgtggatctgccagagcgtcggcatggggatcatggacgtaaacaagctgacgtgcagttgaccttgtctggattactgaacttcatagatgggctatggtctagttgtggagacgagagaatcatcatattcaccaccaaccacaaggagaggctagacccagcactgttgaggccaggaagaatggacatgcacattcacatgtcctattgctcctaccaaggcttcaagattttggcctcaaactacttagaaacttcctctgaccaccccctctttggagaggtagaggggctaatagaggacatacagataacccctgcgcaag

SEQ ID NO: 23293 - DNA, 366 bp, Glycine max
  Clone ID: LIB3050-012-Q1-E1-A12
gggggaggagagcttaaaaaaacaagataacaaataaagtataagtgcggggggtcaaactgggtgtatataatcggatcactataagacaactctttcttttgaggtttcaaagaatgattttcgaattcgattgaatctaaaacacaaaagaattggtttacaggatagaagaaacccacgtatatgtgataggatattctatatgaactagttatatatgaactaaccatatccatatatattatataaaataactaatattttatatctaaaattgccccgctactactgtaaatttcgatagggattaaaaaacaaagcctttccgtttcatctcgaattgtgaattgataatcaatgaac

SEQ ID NO: 23294 - DNA, 398 bp, Glycine max
  Clone ID: LIB3050-012-Q1-E1-A2
ggcgtaggcaaagagagagagagaaaagcgtgaatcatgtcggacgaagagcatcacttcgattctcaggcggatgcgggagcgtccaagacgtatcctcagcaggctggtaccattcgcaagaatggctacatcgtcatcaaatccaggccttgcaaggttgtagaggtctctacgtcaaagacaggcaagcatggacatgcaaagtgtcactttgttgcaattgatatttttaatgggaaaaagcttgaagatattgttccatcatcccacaactgtgatgttccacatgtgaatcgcactgactatcagcttattgatatctctgaagacggctttgtgagtctgttgactgataatggaaataccaaggatgatctgaagcttcctactgatga

SEQ ID NO: 23295 - DNA, 322 bp, Glycine max
  unsure (1)..(322): unsure at all n locations
  Clone ID: LIB3050-012-Q1-E1-A3
ggcatcacaaactatatactaatctccatctaatagtgttaatttgtcgttctctatctctatcggtcatgggtgcttttgcttttgatgaggaaaactcctccaccgtggctccggcaacactctacaaagctctgacaaaagatgctgacactatcatcccaaagattattggggccatccaaactattgaaatcgttgaatgaaatggaggatccggatacgtcaataagataacagctagtgaatgtgatcaaaccagtttcgtgcntgcaaaagtggatgcaattgacgaagctaacttggtatacgactacagcat

SEQ ID NO: 23296 - DNA, 384 bp, Glycine max
  Clone ID: LIB3050-012-Q1-E1-A4
gtttgctatagttgtgagagacatacctcatgttcctcaaggtcagactatgaaggaacaggttgactcttactttagagacatctatcctgagacattttacagatctatgattgtaacagacaacaaagtggtgaacacgatttgggagtcattagaaaagtatacaaagaagcttgcccgtgctgaagcagtatatgcagggtcgaagacaactgccaaaccagaaggaacaagacctacaaacaagactggcttccttggacttgttggtaaaaaggtggataccatacaatattgcaacgagaagattaatgaacttgaggccagattggaatctgagcataacgtcactctcagagagaagcagcaagatgctgctgt

SEQ ID NO: 23297 - DNA, 389 bp, Glycine max
  Clone ID: LIB3050-012-Q1-E1-A5
gcacaaagtgatgacgaaaagcttgaatttgaatatgaatcagggaatactaacattttggcaaatcattatacatctcagcctgaggtttctcgtcaggttgagatattcattcggaagatgaattcaattcctgctttcactgccaacatgacagtggagtctttcaatagaagaaccttgtcttaaatccaacaatcaacttgtgtctaagtactggtattttttgctggcaactatcagctatgatgtatatatcttgcatcttcaatttcaggaatttggtcagctggtaaggctgttacgactggacacattttgtatccatacattggtaatggatggcttggatttgaaaaatgtcacattattttttttcaaataattga

SEQ ID NO: 23298 - DNA, 286 bp, Glycine max
  Clone ID: LIB3050-012-Q1-E1-A6
acaccaatttgttttaagtcaaaaaaacaaagaccaccttgttcggttgtttttgttgttatgggtgccacctctatggtccgaggaggagtcacgaggtttctaccccgaagggaatatttggggtgcgagaaattacaacttggagatgtggagtttgaatttctcgatgatggtgagatcatgtcgttggccaaaagtgaatgttctggcgatgagtttcatcaatccaatgaaatggaattggatgatgaagatgatggtgagagggttgatggtggcagcg

SEQ ID NO: 23299 - DNA, 337 bp, Glycine max
  Clone ID: LIB3050-012-Q1-E1-A7
gaaaaaaaaaatggtatgttgctgccatttttgaaaagattgaagattcccgaagtaatgcctaaacctaatgattcaaagaaaagctaaaagatcatggaacaagtaaataccattttcaaattgtctcatcaattctattatcaaaaattataaaaaataaattataaagaaacgaaacacgggcaagaaaggggagtagagaccactcaataaatgaaatagctactaaaggctttgttctctttttagttatttgataattatccaatttgagttatggagttataaatatgaggagtttttttttcaaaaagaaaatacgaaagaaaaatac

SEQ ID NO: 23300 - DNA, 314 bp, Glycine max
  unsure (1)..(314): unsure at all n locations
  Clone ID: LIB3050-012-Q1-E1-A8
ggaagaccattttccatttgaacccttctggcaggtttgtcattggagggccgcatggcgatgctggtctcaccggccgcaagatcatcatcgacacctatggaggatggggtgcacatggtggtggtgccttctctgggaaggatcctaccaaggttgatangagtggtgcctacattgtgaggcaagctgcaaagagcattgttgcaaatggacttgctangagggcaattgtgcaagtttcctatgccattggtgtgcctgagcccttgtctgtgtttgttgacacttatggcactgggaagatccctgac

SEQ ID NO: 23301 - DNA, 339 bp, Glycine max
  Clone ID: LIB3050-012-Q1-E1-A9
cattgatttgattgtacagcatatccgcacaaagcttggtcagcatgacctgtgtaaaatatatcctaatttgtatgtcattcagtcaacttttcagatacggggtatgcataccctgatacgtgatgccaagacaacatagcatgattttatattttactctgatcgtttgattcgattggttgtggaacatggtttggggcatctgccatttacagaaaagcaagtaatcactcccactggttctgtatacactggtgttgatttttgtaaaaggttgtgtggtgtctctgttatcagaagtggggagagtatggagaatgctttgagagcatgctg

SEQ ID NO: 23302 - DNA, 121 bp, Glycine max
  Clone ID: LIB3050-012-Q1-E1-B1
tgggatatggcaatgctgttgccattgctggccttagcagtcaaaatccaggagctatcactattgcaaatgctttgtttaaagctaatccgcctacttcttctgaggttctcaccaaagc

SEQ ID NO: 23303 - DNA, 361 bp, Glycine max
  Clone ID: LIB3050-012-Q1-E1-B10
gcgagaagacgacagacgggggagaggcggccacgacgaactgaagagaagataagagaacggatttggatctgaaaagagaagatggggggaggaatggaagcacgcaagaacaagttcatagaggattggggcactgccacatagaatctggagttcaatttccgttggactcgccgcaaccttgctcttgttggcatcgtcggcatcgctactcccgtccgcgtcaacaaaggcatcttccgtgaattccatatacaacatcaagacactggtcgagcgtacaggaagttcatgtgacacagtattcagactcatttgtaataagtcatcacgttagaccttgatattatgacgctac

SEQ ID NO: 23304 - DNA, 375 bp, Glycine max
  Clone ID: LIB3050-012-Q1-E1-B11
gtccaatcagtgacaatgctggaggtattgctgaaatggctggtatgagtcacagaattagagagagaactgatgcccttgatgctgccggaaacacgactgccgctattgggaagggatttgccattggttctgctgcccttgtatcactggccctctttggtgcctttgtgggccgagctgctattacaactgttgatgtgttgactccaaaggttttcattggtttgattgtgggtgcaatgcttccttactggttttctgctatgactatgaagagtgtgggaagtgctgctctgaagatggttgaagaagtacgcaggcaattcaacaccattccaaggttgatggagggaactgctaagcctgactatg

SEQ ID NO: 23305 - DNA, 358 bp, Glycine max
  unsure (1)..(358): unsure at all n locations
  Clone ID: LIB3050-012-Q1-E1-B12
ggcacaaggaaagctgcttcttctttgcaaaggcggcgaggcaccaacgctctctagctccggtctctttgtattttgaggtagataacacaatgtcgctgaggcgtttcttaggctattctgatggtgaggtcatgaggtctgatgcaaaaccttgttccaggctaatgaggcacacagctgcaatctttagtgttggtggagcattaggattttgggtcctttgccgaatgcactatggtcctcgaattacaaatcctaggagtcttcgttgggcagcatgtggagctgtaactgcgagctcaggcacggctttgctggttcgtntgtttaatcctgaatgtgagccccagaatat

SEQ ID NO: 23306 - DNA, 201 bp, Glycine max
  Clone ID: LIB3050-012-Q1-E1-B2
gtttcacagaataagtaggacatttttttttctctcgtcatattaccctcttgttactcctctaccacttggtttgatggaaagatgtttgtacaacatattattttagcttatatcaacaggcagaagtttagactaatttattgcaggattgttgtttatgcatgtaattattagctagttattattcgctcatccatt

SEQ ID NO: 23307 - DNA, 279 bp, Glycine max
  unsure (1)..(279): unsure at all n locations
  Clone ID: LIB3050-012-Q1-E1-B3
gagaacacaaagatttggtttttattctacctaacaccacatggatacgttgccggaggattgtgtttccaaaattctgtcttacacatctccaccagacgcatgtagattctctatggtctcttcaaccctacgctcttccgctgactctgaccttctctggcgaactttctttccttctgattactctgacattgtctcaagggctctcanacccctctcccttaattcctcttcttcatacaaacaccttttctatgctctttgtcatccactcct

SEQ ID NO: 23308 - DNA, 310 bp, Glycine max
  Clone ID: LIB3050-012-Q1-E1-B4
gggacaagatttggaaggcctaagtatcagagagctttagaatttggagcatcagcttgaaagtgctctcatacacattatatgactgaagaagcaactgatcgtggaatcgatttcagagcttcataaaaaggataaagccctacaggaacagcacaacactctcgctaagaagatatatgatatatagaaagcactagtccaacaagcacaactggagcgactctggtgatgaactggatctgacttcctctgcccttgttccccaaacactggtgacatcacacattacaacctcctcacatgtcat

SEQ ID NO: 23309 - DNA, 193 bp, Glycine max
  Clone ID: LIB3050-012-Q1-E1-B5
ggcagttcaattccaatatattccattctctctgtgtatttccctacctctcccttcaagatgcagatcttcgtcaagaccctcaccggcaagaccatcacccttgaggtggaaagctctgacaccatcgacaaagtcaaggccaagatccatgacaaggaacgaatccccccggaccagcaaagtcccattt

SEQ ID NO: 23310 - DNA, 369 bp, Glycine max
  Clone ID: LIB3050-012-Q1-E1-B6
ctccaactactggcagggttcctttgatgctcttcctcctgaatggatagatcagtttgagtcaggcattcagacaatcgctgtgattcaagctgggcatggccttctgcaacttggttcttgcaagattatccctgaagacctccattttgtgctaagaatgaggcacacttttgaatctctaggctatcaatcagggttctacctctcccaactcttctcttcaacaaggagcacatcctcttccacttccattccttcaaaaccatccaccattccaattaggccaccccctccactcctcaactggggtcagaggccacttgaatcttccgcttctatgctatcctctcctagctttcaacatgc

SEQ ID NO: 23311 - DNA, 362 bp, Glycine max
  Clone ID: LIB3050-012-Q1-E1-B7
ggagcatacgtggtggtgacagattatggcgagggagacagaacagacttcataatgagtccacgtgcctactcaagattgggaagtaacgcagatgcatctgcagaactattcaaatacggtgtagtggatgtagaatacagaagggtcccctgtagatacggtggctataacctcttggttaaggttcatgaacagagcagaaaccctcactacttagccattgtcattctctatcttggtggaacctacgacgtaactgctgttgagttgtggcaggaagattgccaagagtggaggcgaatgcgcagggcatttgggacggtgtttgatgctgagaaccgccacggggcgacataaag

SEQ ID NO: 23312 - DNA, 207 bp, Glycine max
  Clone ID: LIB3050-012-Q1-E1-B8
gaagcgcggcgggatcagcacaagattgcaaaatgaagttcaacattgcaaatcccaccactgggtgccagaagaagctggaaatcgatgacgacctgaagcttcgagcattttgggacaagaggatctcccaggaggttcttggtgatgctctgggtgaggagtttaaaggatatgttttcaaaatcaccggtgggtgtgacaaac

SEQ ID NO: 23313 - DNA, 380 bp, Glycine max
  Clone ID: LIB3050-012-Q1-E1-B9
gttcctcaacgggcatatacatgtttgggaaccctaagggatcaaattatatatcccctttcctgtgaggaagcagaggttaaagtactgaagatgtatggaaaagatgaaaagcatgctgacagtagaaatttgtgagacacacggttaaaagctatcctaaatagtgttcggttgaattatcttctacaaagggatggaagcaactgggatgcgaatttaaaatgggaagacattctttctcttggagaacagcaaagattggggatggcacgcttgttctttcataagcccaaatttggtattcttgacgagtgcagcaatgcaactagtgttgatgttgaagaacacctatatgggcttgcaaaagatatgggaat

SEQ ID NO: 23314 - DNA, 308 bp, Glycine max
  Clone ID: LIB3050-012-Q1-E1-C1
gttcaaataaaattcaagtatcgaagaagaagatggctttaggtgttcctgctcttccgttgacatacgtggctcacgttctggcagttgttgccagcgtcttggtcgtggtctgggtcgtcaatttcaggggtggcttggcttgggattctgataacaagtccctcatcttcaacattcatccagttcttattgttattggcttactagttcatgggggtgaagctattataagttacaaagcttttcccctaaagaaggaagtgaagaaattgatacaccttgttttccatgccatcgcattaata

SEQ ID NO: 23315 - DNA, 343 bp, Glycine max
  Clone ID: LIB3050-012-Q1-E1-C10
gacattattcaggtaccctctaattcttttaatttatagctatcgtctttaataagataagatctcatccttcactaccattcaagatgaccatggtcactgccctatttttcagcttagtactctgctccatgctcgtccatgccatgtccatacaccttgaaccagcttttcacaaagaatccttagccaaaccgcatcaacagagcgttgaagcggttgatgagagctgcgaatgcgttggcgacgatgcatgcgtgatgaggagatcacctgccgctcatgttgactatatttatactcataagcataataatccttgaaacatagtactcgtagttag

SEQ ID NO: 23316 - DNA, 328 bp, Glycine max
  Clone ID: LIB3050-012-Q1-E1-C11
gacagacaaacaaacaatttaccagctatacttgttccttttgaaggttagaagtgctacaatacaaacaatggcagctactcaggaagatgtgaagcttttgggtattgtgggaagcccatttgtgtgcagggtccagattgcccttaagttgaagggagttgaatacaaatttttggaagaaaatttgggcaacaagagtgatttgcttctcaaatacaaccctgttcacaagaaggttccagtgtttgttcacaatgagaagcccatagcagagtctcttgtgattgttgaatacattgatgagacatggaagaacaaccccatc

SEQ ID NO: 23317 - DNA, 272 bp, Glycine max
  Clone ID: LIB3050-012-Q1-E1-C12
ggagcaaagcagtgtccatatctgacaatgatgaacgtttcaaggctgttgaacgtgacagagatcgcatggatatgtttgacagcatcatggaggaacttcgaaacaaggaacgagcaaaggtacatgacgaaagaaagcgacatataatggaatacacaaagtttttggaatcttgtgactttataaaggctagtacacagtggcgacttcgctcaagatcgcttagacgctgatgagagatgttctcgtcttgaacaaattgatcgctt

SEQ ID NO: 23318 - DNA, 346 bp, Glycine max
  unsure (1)..(346): unsure at all n locations
  Clone ID: LIB3050-012-Q1-E1-C2
ggagttgccaatttaattcttgcgaaaaatgttggaactaccattcaacatggcacttcggtttcccaatttggatttcaagtctttaccctttgctgagaacctcaacactgaattgctaggtggcgtagttgctcttgttgccgttggctttacggttgcatatatttattatcgcacaaaacaccccaaaggaggcttggacccgaaaaatttcaaagaatttaaactcataaagaagactcagctcagccacaacgttgcaagattcagatttgcccttcctactccttcttcagtattaggccttcctgttggaaaaaacatacttgctanggggaaagat

SEQ ID NO: 23319 - DNA, 390 bp, Glycine max
  Clone ID: LIB3050-012-Q1-E1-C3
ggtgcaccagactaatgggttctaagagtagtaggtggtcggttacttgggtggttctttttatttgtttgctgttatgtttttctgccaaagcaatagcaacaagaaaccttgctggttatgcagatgaaaagggtccgagtaggagactccttggccgttctccatgcaagaggggaagaatgacttctgaagtggttcaaggagacaggaagcagcaaagggaggacagtccacgttgcaacaattatctgtgatttgcaagctggggttgtttgtatgtgttgcaattgcaaggatcaactacacgaattttttttaataaaatggacacatgagatgtcactgtttgttggtttagtttcatgaaatttgtgttcacagaatttc

SEQ ID NO: 23320 - DNA, 380 bp, Glycine max
  Clone ID: LIB3050-012-Q1-E1-C4
gagtgatggaagaggaagaatacaactatagataagtggggcttccttctctgatagcagtggtgggcgagccagagctggggatggaaacacgggaaaggagaagaggaagggacataataatagccatagatcatgggcccaataccagacatgctttcgattgggctctggttcacctttgcaagctcgctgataccatccatctcgttcacgccgtttccgacttgcataaccaagttgtctacgacataacccatggtcttatggagaaattagccattgaggcttttcaagtactagtggtgataacagtagctcgaattgtggaatgtgatccaggaaaagtaatttgcaaggaatcagatacgatcaaacct

SEQ ID NO: 23321 - DNA, 286 bp, Glycine max
  Clone ID: LIB3050-012-Q1-E1-C5
agttcaagaaatatttgcatcataacagcaggtggagccatatctaatgtgagacttcgacaacctgcctcatctggtggaactgtgacttatgaggggcgatttgagatcctatcacttggaggttctttttttcttgctggaactgaaagagctggggggctgactgtgtccttgtcagggccagatggccgtgtgttgggcggcggagttgcacgtcttctgatagctgcttcccctgttcagaatgttttggcgagctgtgtttctgatgttcgcaagcact

SEQ ID NO: 23322 - DNA, 223 bp, Glycine max
  Clone ID: LIB3050-012-Q1-E1-C6
tcagtggtgctgctacaagaagacaaaagggagttcaggatgtaattacaccatagaagggggttcaactgtgtgattgtttgttgttgtaaatcgtgcttcatcttttgtagttctgtgtatgagtgtgtattttctcatacatgaaaatgtcgtgctgcggtgcttactgtagttgaggaagctcctgcacttactgcatccgttgcaggggctgcaagat

SEQ ID NO: 23323 - DNA, 390 bp, Glycine max
  unsure (1)..(390): unsure at all n locations
  Clone ID: LIB3050-012-Q1-E1-C7
gactacaaatcagttttctacttgaatcttcgttatccttctttttttctccttgaactcgaatattcactatggcagatgaggtggttctgctagatttctggccaagtccatttgggatgagggtcaggattgcacttgctgaaaagggtatcaaatatgagtccaaagaagaggacttgcagaacaagagccctttgctcctcaaaatgaacccggttcacaagaaaatcccggttctcatccacaatggcaaacccatttgtgaatctctcgttgctgttcagtacattgaggaggtctggaatgacagaaatcccttgttgccttctgaccctttacagagagctcaggctanattctgggctgactttgttgacaataagatat

SEQ ID NO: 23324 - DNA, 340 bp, Glycine max
  Clone ID: LIB3050-012-Q1-E1-C8
gagcaaatccgcgaaatgcattacctgaacgcggcgattcacgacagcatgaggctgttcccaccgattcagttcgattcgaagttcgccacggaggatgacgtgttgccagatggcactttcgtgagaaagggcagtagggtaacttaccacccttacgcgatgggccgaatggaaaatatttgggggcccgattgtcttgacttcaggcccgaaagggggctgcgtgatggggtgttcgtgccagagtgtccctttaagtaccctgtttttcaggctggtgtaagggtgtgtttggggaaggacttggctttgatggagatgaagtccgttgtggttg

SEQ ID NO: 23325 - DNA, 325 bp, Glycine max
  Clone ID: LIB3050-012-Q1-E1-C9
cagttgatgaggcaaacttgggatacagctatagcgtagttggtggagttgggttgccagacacagtggagaagatcacattcgaatgcaaattggctgctggcgccaacggagggtctgctgggaagctaactgtcaaataccaaaccaaaggagatgctcagcccaacccagacgacctcaaaattggcaaagtcaagtctgatgctcttttcaaggccgttgaggcctaccttttggccaatcctcattacaactgatccaattcgatcttcagtattcagtgatctgcaaagaccttgttttatattatatacaagagttt

SEQ ID NO: 23326 - DNA, 383 bp, Glycine max
  unsure (1)..(383): unsure at all n locations
  Clone ID: LIB3050-012-Q1-E1-D1
gagactcaacaagcattccactcacacctcatcgtttctctctctagatctctgtttcttctttttctccaaccttcgttttaccaccacacttacattactttgtcgaaatggctccaccaattgagaccccaaacaaggtttccagctatcaacagtccccaaaccctcgtcttaacgagaggattctttcatccatttccgggagacacgttgctgcacacccgtggcacgatcttgagatanngaccgaagctccaaagatcttcaactgtgtggtcganatanggaaaggaagcaaggtgaaatatgaacttgacaaaagaactggacttattatggttgatcgtatactttactcatcagttgtttatcctcacaac

SEQ ID NO: 23327 - DNA, 336 bp, Glycine max
  Clone ID: LIB3050-012-Q1-E1-D10
gatatcagaagcgcagacctaggatttcggccgtttgctccccaaggaaagaagcagagtgtttcttttgaaatcagctagaaaagatgtcaggtgaagaggtagctgttgcagctgaggcacctgctgcttcaattccaggtgagccaatggacatcatgactgctctacagcttgtgctgagaaaatctctggcctatggtggtcttgcacgaggtcttcatgaaggtgctaaggtgatcgagaagcatgctgcacagctctgcgttctagcagaagattgtgaccaacctgattatgtgaaactggtgaaggctctttgtgcagagcacaatg

SEQ ID NO: 23328 - DNA, 341 bp, Glycine max
  unsure (1)..(341): unsure at all n locations
  Clone ID: LIB3050-012-Q1-E1-D11
ggcttaggtgaggatttcatattcattcgtcaaaacaaagtgtctggtttgctttctagttgtgttgacaccgatgcattcccatcattctccgacgatgagttacctctatttggcttacccaataacaccaaaggaatcataggcctttcaaagtcacaacttgcattaccaattcagcttgcatcggcaaataaggttccttcaaagttcagtctttgtttgccttctttaaacaaccaaggtttcactaacttgctcgttagagctggagaagaacatcctcagggaatatccanatttctcaaaaccactccgctaattgtcaacaacgtttccac

SEQ ID NO: 23329 - DNA, 251 bp, Glycine max
  Clone ID: LIB3050-012-Q1-E1-D12
gaggacaaaaaccatgaaaggaattgatttgttctgttcttcctctggttccacagcagtaacttctagcatgcaccatcgttctacgttacaacgaagcaccagaagcttcgaccatgatcgaaggaaaagccaacttcatgtcccttgttcatcccaattgcccattaatcctaagccttacttcgagaagcacagaaagagttcagctgataagcaaaactgggacatgcgtagaaaaagttctgctg

SEQ ID NO: 23330 - DNA, 391 bp, Glycine max
  Clone ID: LIB3050-012-Q1-E1-D2
ggtggtagtgtggcagcgacacgtatcaacttcaataatcgcatcgcagaagcagtttccggtgcatctcatcgtctccgaaaatgaacgacgcagatgtctcgaagcaaatccagcagatggtgcggttcatccgccaggaagctgaggaaaaggccaacgagatctctgtctccgccgaagaggaattcaatatcgagaagctgcagttggtcgaagccgacaagaagaagatcaggcaagaatacgaacgcaaagagcgccaagttgaaattcgcaagaagattgagtactcaatgcagctgaatgcttctcggattaaagttcttcaagctcaagatgacgtgatcagttccatgaaagaagctgcatccaaaggaacttttgactg

SEQ ID NO: 23331 - DNA, 347 bp, Glycine max
  Clone ID: LIB3050-012-Q1-E1-D3
ggggaattgggagtttcattttcattaatttttatttctccccttttctcaatgcttttcttaatgttgaatctttcacaaatcgtcaagagttagcccaaccagaacaacaacgcgtttcagctggccacacacattcttaatttttttggctggcctatagtaaaaactcatatcaatgtcctcaagaacgttgaggagaagactccatcatggggatgttgatggcaaaaggcaagagcatttggagacttcgggattagattcgttgagtgagcccttgctggcagatgatgattatattgagaataagaagatatgtactcttgaagatctatgggatgatg

SEQ ID NO: 23332 - DNA, 393 bp, Glycine max
  unsure (1)..(393): unsure at all n locations
  Clone ID: LIB3050-012-Q1-E1-D4
nagggacagacaaacaaacaatttaccagctatacttgttccttttgaaagttagaagtgctacaatacaaacaatggcagctactcaggaagatgtgaagcttttgggtattgtgggaagcccatttgtgtgcaaggtccagattgcccttaagttgaagggagttgaatacaaatttttggaagaaaatttgggcaacaagagtgatttgcttctcaaatacaaccctgttcacaagaaggttccagtgtttgttcacaatgagcagcccatagcagagtctcttgtgattgttgaatacattgatgagacatggaagaacaaccccatcttaccttctgatccttaccaaagagccttggctcgtttctggtccaaattcattgatgata

SEQ ID NO: 23333 - DNA, 321 bp, Glycine max
  Clone ID: LIB3050-012-Q1-E1-D5
ggttgtagggcctcttttgcaagcagagcttaacactagtgctgctagtattttcaacctaataaatggttcagaaactttttcagatgatacatatggatggatcaatgtcaaagatgttgcaaactcccatatgtcaggcagatgagattgcttcagctagtggaagatatcgtttagttgacagagtggcacactacgctgaactcgccaggattttacgtggacagtacacgacatatcagattccacacaagtctgcacaccatatgccttatgtcccagcattgcaagtttccatagaaatggcattgaccttgg

SEQ ID NO: 23334 - DNA, 386 bp, Glycine max
  Clone ID: LIB3050-012-Q1-E1-D6
gagggatgaaaaaaagagaactggaaatacgaaaccctaaacccatcatcgctcccagaaagttgtatcggtttctcttcttaagttttcttcaccatctcaagattaagctttttgggttcattacaggaaaatgttgaaattcttgtcgagagtgaaaatcgagttcaacgcgttggacccgcgaacggcgtcgtgtatggagtttctggcgcaatgcaactcgcggaaggcgaaggagtcgaacccggcgtgcgaagtggaggtgaagcgcgtgagggaagagcgcgcgccgcagataacggtgacgttcgttaacggcgttgaggaagtgttcgacgcgacggcgacgccggctcagagcatacgaaaactgattctggaaa

SEQ ID NO: 23335 - DNA, 234 bp, Glycine max
  unsure (1)..(234): unsure at all n locations
  Clone ID: LIB3050-012-Q1-E1-D7
agggggagtccgcaacaattcaagtttcaaacaaccctaaccaatttaagggttccggtccctaacccaaccttggccttaccaaaccctaaatttgggaataagtccgaacaatctggttggtataacctttggtcctagagagtcaagttttatgtctggattagacgatcaaattcctactgccttcgattcntttgctgatgcaaatgctgatgactcgggtgctgggtc

SEQ ID NO: 23336 - DNA, 360 bp, Glycine max
  Clone ID: LIB3050-012-Q1-E1-D8
gagtgaagatgagaagaagaagcaagaagagttgaaggagaagtttgacaacctctgcaaggtgatcaaggatgttttgggtgacaaggttgagaaggttgtggtctctgaccgcgttgtagattcaccatgctgtcttgcgactggcgaatacggttggaccgcaaacatggaaaggataatgaaggcccaagctctaagggacaacagcatggcagggtacatgtcaagcaagaagaccatggagatcaaccctgagaacccaatcatggaggagctcaggaagcgtgctgatgcagacaagaatgacaaatccgtgaaggaccttgttctgttgctgtttgagactgctcttctcac

SEQ ID NO: 23337 - DNA, 366 bp, Glycine max
  Clone ID: LIB3050-012-Q1-E1-D9
ggtccgcacttaaaaaaaacgatctccaacggtcatgaacggcggcgctgaggcctccgtcaatcacaggcgcagacaccaagcagcttccgctaacggcgttaagatagcaaacggggccatggcgaagccgtcctcgacgctctgctacgacgcctcgttcatgaaatggaccgtggcggatgctgtccacgtggcgacgcatcattggatgccgtgcttattcgcattagggcttctcttcttcatggccgtggaatacacgctcctcatggttccgccgtcgtcaccgcctttcgatctgggcttcattgccacgcgttccctccacgcactcctcgagtcatcgccgaatctcaacacgct

SEQ ID NO: 23338 - DNA, 333 bp, Glycine max
  Clone ID: LIB3050-012-Q1-E1-E1
cactggtgaggctttggccacccttgttgtgaataagctacgtggtatccttaacgttgctgccatcaaagctcctggctttggtgagcggcgaaaggccctgcttcaagacattgctatattgactggtgctgagttccaagctagtgatctgggtctgcttgttgaaaacacctcagtggagcagcttggcttggctcggaaaattaccatctccaaggattctaccactatcattgctgatgctgcaacaaaggatgagctgcaagccaaggttgctcagtttaagaaggagctgtcacagacagactcagtatatgatactgagaaaac

SEQ ID NO: 23339 - DNA, 362 bp, Glycine max
  unsure (1)..(362): unsure at all n locations
  Clone ID: LIB3050-012-Q1-E1-E10
gagaaacgtttcatcttgaccagtcattttaatggcaccatatgccagctgcacttgaagcgttctgaaggagagaatggagaatctaccaatcttctaaagggtagtctgttgaaaaccataattttcttagctgagatggtggggggtggtgtatagccttcaatagtgattaaaactcgtcttttgagcaaacaaatctttggttgttaggaggttgaatttgaaattcccttgtcatttggtacataacattttggggttgggttttgtgtagaaggtatangaatgtaggtatagttaaactcttttctatggcccatttcaccatagtgggatcnttatttgcttcagttggtgaa

SEQ ID NO: 23340 - DNA, 321 bp, Glycine max
  unsure (1)..(321): unsure at all n locations
  Clone ID: LIB3050-012-Q1-E1-E12
cgggccctggattgttgtctctgattgaacatccctgcagtactttatggatttgagcttgttctctctgtcttttgttattttctttagcagattaattttgtatttgtctacgctaataaggatatttgtgtcctaagggacagcaaaatgtatttatgtgacggaattttgtatcttgttgatctttttgtactttgtggaaggtaactaatcacatggaccattattgcaattagaaaccataacggttcacatcaataaaaccactttatttaacangggangggtgggggtagaaaaaaaaaaagcggccgctct

SEQ ID NO: 23341 - DNA, 347 bp, Glycine max
  Clone ID: LIB3050-012-Q1-E1-E2
gagtcaaaactttcatcgttgtcatccacttaacccaggtgtaaaaatgtcagcagtgaccatgtccactatgagacttccaagagcttccttgtctggaacaacaccagctaggagatcatgtgctcttacaaagagtccatcatctttgaggtctgtgaagaatgtgtccaaagtgtttggattgaaatcatcttcctttagagtgtcagcaatggcggtatataaagtgaagctgattggaccggacggtgaagagaatgaatttgaagcacctgatgacacttacattctggattcggctgaacatgctggagtggagctaccttactcatgcagagctggtg

SEQ ID NO: 23342 - DNA, 381 bp, Glycine max
  Clone ID: LIB3050-012-Q1-E1-E4
gatgaataagatcttcagattttgttacagtttttcaaattattctgtggcaaggagagaagaaaagatcatagaaagtggtgattcttcgaatattgaagagagaaatatggggttgagattgaaggagacattctacttgtcccatggagcaccaactcttgccgtagatgattcaatccctgcgtggaacttcttcaattcgtggaaggagcagtttccgacgagaccctcttccattcttattatctccgcccactgggacacccatgttcccaccgtcaacgtcgttcaccagaatgataccatctacgacttctatggcttccccaaatccatgtacaagctgaagtatccagcaacaaggggctcacacttagc

SEQ ID NO: 23343 - DNA, 318 bp, Glycine max
  unsure (1)..(318): unsure at all n locations
  Clone ID: LIB3050-012-Q1-E1-E5
ggatacatgtagtaattgtcagttggcagttttttcttagaatgaaaatgtcgtctaaggtcactagtgccaccctttgcctagcagtcttattcctcttcttaaccttcacatatgcaggcagacttggccctgcatcttcctctatcacttcaatcaaaactcaacatggggttttggaagaggagaagttggacgtggaggaaacttgtgatggtattggtgaagaagaatgcttgatgagaagaacacttgtggctcacacggattatatctacacgcagaagcacanaccatgagattatcatatatagctgg

SEQ ID NO: 23344 - DNA, 316 bp, Glycine max
  Clone ID: LIB3050-012-Q1-E1-E6
gaagttgatgggtatcagcctcatcttatagctccagaacaaggatatcgtcgtctaattgaatcttctctaataactattacgggccctgctgatgcagctgttgatgcggttcactcgctgttaaaggacttggttcacaaagctatcagtgagactttggacttgaagcagtatcctggtctccgggttgaggttggggctgctgctgttgaatcactataaagaatgatggatgaaagcaaaagatcaacactgcagctagttgatatggagtgtggctatctgactgttgatttctttcggaagcttcctc

SEQ ID NO: 23345 - DNA, 295 bp, Glycine max
  Clone ID: LIB3050-012-Q1-E1-E7
tatggctgagcaagccaagcagaaacgtgaagggggggtggatgtgtcatctggttctcaaccagctaaagatgtgaaccgcagatctttatcaacatctggaagaagtacaaacgataatcatgaaggggagaaaaacagttcatctacttttatagcaagttcagtggctagaaaacttggcgggagtcatgccatggcatctcaaactatagtatctcgatacatctctgtaaacgatgtgattgcagtcctgcagaaggaacccacatgtctagattctcactcattcatc

SEQ ID NO: 23346 - DNA, 322 bp, Glycine max
  Clone ID: LIB3050-012-Q1-E1-E8
aggaggaaacggcaggatatggttgggtcgggcatggagaccttactctcgtgttgtttttgccttctcaataatgtcagatatcattgcccctgaaggttggaatgatttcaacgacccttcaagagatcagactatcttctacggagaatacaattgcttggggcctggggctaatacgaacttcagggcaccttatgtacagaaattaaatgaaacacaagctttggcattcctcaacacaagttttattgatggcgaccaatggttggaaacttccaaataagcttagcttcgcatacctgaatccatttcctatttg

SEQ ID NO: 23347 - DNA, 368 bp, Glycine max
  Clone ID: LIB3050-010-Q1-E1-F4
gaaaagtaagaggagagaaagatggagaagcaacaacaacaagcaccatctaaggaaacaaaggcacagagtgatgaatcagttaaagaaagcagcactgaagggcttccaatggaggatagtccctatgtgaaatacaaggatttggaggattataagcgtcagggttatggtacacaaggtcatcaagaaccaaagacaggtcgtggagctggagccactgaagcacccactctctctggtgctgcagtttcatctgatgcacaagtcgctgccactgatgccattaacagtaaaggagtcccttaattattcacacttcctagaatagatcgttcctttgccaataagaaatcgttttcctaatt

SEQ ID NO: 23348 - DNA, 325 bp, Glycine max
  unsure (1)..(325): unsure at all n locations
  Clone ID: LIB3050-008-Q1-E1-F7
agaacaagaggaacagagaatgtaaagaaggaggagggaaggagaaaatatagaggggtgaggcagaggccgtggggaaaatgggcagcggagataagagacccattcaaagcagcaagagtatggttaggaacatttgagacggtagaggcagcagctagagcctacgatgaagctgcccttcgttttaggggcagcaaggccaaactcaacttccccgagaatgtcactctccgacaacctcaattcactgtttccacatcaacagacccatttcaactctcgggtaccaacctttatgatcatangatgtttctgacttcta

SEQ ID NO: 23349 - DNA, 384 bp, Glycine max
  Clone ID: LIB3050-008-Q1-E1-F8
gaacgcagccaagaaaagaaaatcctcacccattttcttcgtagccaaacactctgaaattctcagttatgtcgtggcaagcgtatgtggatgatcacctactgtgtgaaatcgaaggtaaccacctcactcacgccgctatcatcggccaagacggaagcgtttgggctcagagcaccaacttccctcagttcaaacctgaggaaataactgccatcaataatgactttaatgagcctggatcacttgctccaactggattgtatatcggtggcaccaaatacatggtcatccagggtgagcctggtgctgtcattcgagggaagaagggtcctggtggtgttactgtgaagaagaccggtgcggccttgatcattggcattt

SEQ ID NO: 23350 - DNA, 378 bp, Glycine max
  Clone ID: LIB3050-008-Q1-E1-F9
agggttagccccttgcatcttgactcatattcctcacgggatggtaccaatcctcctctatgttgtttacgacatctggttctttgggggttataattgatggttgtttctcaattccatctttattacagaactgtacatgagattttcacctcatacggctcctcactaatgaagcaattcatatagatatctatctatatatatagataatctatttaatctactcgataaaataatatgcactaatattcatatgtttaatgaagaattgaataccgggattttttgagatttcataaaatctattccaaatttttacactttgttttgacttaaaattgaataagtaatcctgataattaaccagtttttttt

SEQ ID NO: 23351 - DNA, 357 bp, Glycine max
  Clone ID: LIB3050-008-Q1-E1-G1
aggggtgttcagggatttagatgggccatagacaacgataaatggcaggctcgagttaatagtacaaagcctctttttgaggtggctcgtgatgatttgggtaaagatgttattgacaaagaagtggtggagaaggtgtgggacagaatagctcctggtttagcttcccaatttgattcaccctattcaattccaactatcgcaccgcgtccattgcatatacttggtggtgcggaagatcgtcggtgtcatgttgcatgcttggaaattccaaggtcaatggcaagccaggcatatggagagtttcaatgtttagataatttaaagcaagagttttcatgagcgagattacagtgt

SEQ ID NO: 23352 - DNA, 261 bp, Glycine max
  Clone ID: LIB3050-008-Q1-E1-G10
ggcctagcccgccgagaaaaccctaattcgctcgcagtcacccaagaggcgaatccttaccattgctcgagatgggtgaagaagtgaaggccgtggttccagagtctgttttgaagaagcagaagagagaggaggaatgggcgttggccaagacgcaagacctcgaggctgcgaagaagaagagagccgagagccgcaaactcatctacaacagagctaagcagtacgctaaggagtacgatcaccaggagaaggaattga

SEQ ID NO: 23353 - DNA, 369 bp, Glycine max
  Clone ID: LIB3050-008-Q1-E1-G11
gacggttgggccatcttgtccatctatcccacaactaatttttgattttccttgtttatttatcttcttcctcccttgtttgtttgtttctttgtttctttggcttgacaagaagaagatgatgatgatggacaagggggtgttggatgatgtgataagaaggcttctggaagggaaaggagggaaacaggtgcagctctctgagtccgagatccgtcaactctgcgtcaacgccagacaaatcttcctctctcagccaattcttctcgaccttcgtgctcccatccgcgtctgcggtgatatacatggtcagtaccaggacttgctgaggctttttgaatatggtggctaccctcctgcggcaaacta

SEQ ID NO: 23354 - DNA, 377 bp, Glycine max
  unsure (1)..(377): unsure at all n locations
  Clone ID: LIB3050-008-Q1-E1-G12
ggcactacggtttcaactacaccgattgggccttcaagaatgcaccattttacctcaatgatactctagttttcaaatatgatgctccaaatgccaccagtttcccacacagtgtgtacatgatcaaaagttttgggagcttcatgaagtgtgacattgaaaaggctaaaatgttagcaaatcccacgcaaggtacaggagagagcttcaagtttgtgttgaagaggtggcagcctcactactttgcctgtggtgagcgaaacggcttccattgcaacaacggcaccatgaagttcgctgtgatgccaatgcttcgtcncttctggcggtggccatgataaaaaaaatgcacaacgcaattagttattaggtttttt

SEQ ID NO: 23355 - DNA, 347 bp, Glycine max
  Clone ID: LIB3050-008-Q1-E1-G2
ggggttacagatttgctgagcatgcagacaaggattagagcagttgaaaagttaatgatggaagaacttgaaagacatgtggaggacgaacgtttgaccacaaatgtcaaagcagaagctgttacagaaatgactgagcattcaaatttggaagttggcacgtatccagaaattgacgacagaaaagtggtgatgaaaattaagaaagacaacagcaaacgtggcaataatgcatggagaacaaaatctcagaaaaggttgataatgatagacattcctcttgatgactacaacgatgatccagactccaacaagtattgcaagagagatcacactaggtgcaatga

SEQ ID NO: 23356 - DNA, 390 bp, Glycine max
  unsure (1)..(390): unsure at all n locations
  Clone ID: LIB3050-008-Q1-E1-G3
gataaaaagaagaactacttttctgttgctgttgcggatgagggatcccagccgttgttgcttcatgctattgaagagttttcttgcaagtctacttcaaatgctttgaaggaggttgccctggttctaaaggcactctacgatgctgatgtgttagaggaagaacacatagtgcagtggtatcaaaagggactgaagggtgataacaagaactctaggatttggaagaatgctcaacctttcattgattggcttcagaatgcagaatcagaaaccgaggaagaataatttgtcctacattctccgttacttatgtntgcttgcttgtgttatgtcctttatttccaattaagggtcttgttggccccatgtgttgttcaactactatac

SEQ ID NO: 23357 - DNA, 361 bp, Glycine max
  Clone ID: LIB3050-008-Q1-E1-G4
gattacagtgaaggagatgcactggatgcattgggactggttcggtattgttgtatgcgcatgcttatgagccacgttgatctcattgagaagttgctcaattacaatactttggacaagtctgatctcaattaagaagaaggcttgaggaataacagatgaccaagatgcttctgttgtattccatgccctatggcaatgcatcaatttttcttttcttttatgaattgctttggtacaagcaggtcatgtttgtgtgctggatcaggtcaagtgtgtttgttatcagttctgacgagctatgacaagacacagcttatgttaatatctcatatgatgatattacatgacagaccaaact

SEQ ID NO: 23358 - DNA, 403 bp, Glycine max
  Clone ID: LIB3050-008-Q1-E1-G5
agagaaaacagagacaaaagacattttaacatctccattgaaatatagacatgagtgggagctcatgttggggaaaattagcaaaggcaacgtttgtgttgttggagatgcatttcaccccatggcccctgacctagggcaaggtgggtgctgtgccttggaggatgggattattttagccaggcatctagccgaggcattcaccaaaaaaactggcaaacatgttgctaaagagatgggtgaagaggggtgatttgaaattggtctcacattttagggacaaacttttccctgctttcctagctgagctgctgttgaagaaatcagattttgattgtggaaaacttaattaacacgcctaattgatgtggaataacgtaattaaccatgcatgcatgccctc

SEQ ID NO: 23359 - DNA, 402 bp, Glycine max
  Clone ID: LIB3050-008-Q1-E1-G6
ggaacaaaacaagtgtttcgaatagattatcctaagtctttgggaatagtgctgcaatggcttcaagtcaggaggaggtgacccttttgggagctactggaagcccatttgtgtgcagggttcatattgccctcaagttgaagggagttcaatacaaatatgtcgaagaaaatttgaggaacaagagtgaactgcttctcaaatccaacccagttcacaagaaggttccagtgtttattcacaatgagaagcccatagcagagtctcttgtgattgttgaatacattgatgagacatggaagaacaaccccatcttgccttctgatccttaccaaagagccttggctcgtttctggtccaaattcattgatgataaggtttttggtgctgcatggaaatccg

SEQ ID NO: 23360 - DNA, 288 bp, Glycine max
  Clone ID: LIB3050-008-Q1-E1-G7
ggaagcaggtaccgttcctgttttggtagagcttcttctcgattgcaaggagagaaagccttgcgagatgatgctggtgttgttggaaattctatgccagtgtgctgagggaagagcagaacttttgaatcatgcagcaggtcttgccattgtgtccaaaaagattctaagggtttcgactttggccaatgatagagctgttaagattcttctgtctgtttcgagattctctgcgactccacatgttgttcaagaaatgcttaaacttggtgtggtcgcgaaattgtg

SEQ ID NO: 23361 - DNA, 393 bp, Glycine max
  Clone ID: LIB3050-008-Q1-E1-G8
ggccacactcatcatattccataagcatcttcttccatcaccgcattattcatcttttctcttctcattcaccaattcacaattcattttatttcttaagatgccaactgacacgtcatcagtttccggcgaaatcgtgtgtgtgaccggtgccggcggtttcatagcctcttggcttgtcaaacttctcttagagaaaggctacactgtgagaggaaccgtgagaaatccagatgatccgaagaatggtcatttgaaagagttggaaggaggcaaggagaggctaactctgcataaagttgatctcttcgatattgcctccattaaagcagctcttcacggttgccacggtgtcttccacaccgcttctccggtcaccgacaaccctgaaga

SEQ ID NO: 23362 - DNA, 378 bp, Glycine max
  Clone ID: LIB3050-008-Q1-E1-G9
ggttgaacggtgttgagatattcatatagtcaaagtgcatagaggaattactatcctctcacacttgttatctgttaatttctattttttgttttgcaggacacttgataaagaggcacatgttcttaaaaatattttgactagatttgatgcatcatcaggcctacttgtgaatttgctatccacatgggtggtgattaaagatggcattagacaacgtttgggtgatggaaatacaatgaatatttggagggacacttggatgtatacaagtgatagtccatatattaaaactactcctattcaacgactagaacatctcaaggtttatgatttgattgagagtaagtacatcatgaagtatgaacttagtcatga

SEQ ID NO: 23363 - DNA, 315 bp, Glycine max
  Clone ID: LIB3050-008-Q1-E1-H10
gcaagatggaggatacaaccaagatgtacctcaaggccgtggtcgtggccgtggcagggggggatatcgtggaaggggtcgtggcttcagatccaatgggccaattcaagcagctgcctgaggcaaccagtaggctgccattggtgcagtgcagatgacttgactagtgaaagaaagccatgtctaatctatgctttcttttatttgttcaattttcttcatttcccccttctttttctctggggccctgaagaactgtaaggcattttcttacagttttatgtacacttttagttttcaaactgctgcccgcat

SEQ ID NO: 23364 - DNA, 397 bp, Glycine max
  unsure (1)..(397): unsure at all n locations
  Clone ID: LIB3050-008-Q1-E1-H11
agggaggggttgaaatatgactctaacaaccaggagttgcttgaaggcatcagaacatgcatacaacaaattaacaaggctagccgtggagacttaagtcctgacgaattggaggagcgacaggccaaggcaatgcaggatccagaaattcagaacatccttcaagaccctgttatgagacaggtattgattgatttccaggaaaatcccaaggctgcacaggaacacacgaagaatccaatggtgatgaataagatcanaagctggtcagtgctggaaattgccagaagaagtaagtttgttgcaaggtgcaattcctgtgaaaaagcaatcaagcaatcgataatgatgtctcagtgtgactattttgacatttaaatagatgtgactgggaaaa

SEQ ID NO: 23365 - DNA, 382 bp, Glycine max
  Clone ID: LIB3050-008-Q1-E1-H12
gaaaagtgaagaaaacagaccaaaaatagaaagaaagagaaataccaaaaccttggcgcatcatattctttattccctcacttggatcgttaattccgcgaacgagcttctgcccttcaaattaaccatggagaatattggtgaggagtacggctactggccggagaacgacatgcttttccaaaacgaagaccttggcagctgggcgataatggatgaggcagcgttatcagggtcagggtactatgattcaagctccccggacggtactggtgcctcttcatcggtggcatctaagaacattgtctccgagaggaatagaaggaagaagctcaacgataggctttttgctctaagagcagtggtccccaacattaccaag

SEQ ID NO: 23366 - DNA, 345 bp, Glycine max
  Clone ID: LIB3050-008-Q1-E1-H2
ggaagaaaaagacttactcaagaagcttcgagaaaatgtctggaaaagcgaagaggtgagatgacgacggtgcttccgacgccgactctgaaggccacgcgccgcccaagaagtcccccaagaaggattccgatgacgatcccgactctattaccgtttgcgagatttcgaagaacaggagggttgccgtgaggaactggaaaggcagcattatggttgacattcgcgagttttacgtcaaagatggcaagcaattgcctggcagaaaaggtatctctttgaccatggatcagtggaatgtgcttcgtaatcatgtttaagaaattgacaaggcaattaatgaga

SEQ ID NO: 23367 - DNA, 351 bp, Glycine max
  Clone ID: LIB3050-008-Q1-E1-H3
gaaccatataatttaatttaatttgtgtccacatgagaacgtcgtgacctgcattttctatctcgcaacaccgcgataatggtataaaatagtttcagatacgttgcgttgattgattggtatgaagtgattgactttttttcttcttctattctcacacatacccatctactccttccctcatggctgaacaatcttccaactccatttacgatttcactgtcaaggacatcagtggaaatgatgtgagtctgaatgattacagcgggaaggttctactgattgtgaatgtcgcctctcaatgtggtttgacacagacaaattacaaagaattgaatgtattgtacgaga

SEQ ID NO: 23368 - DNA, 449 bp, Glycine max
  unsure (1)..(449): unsure at all n locations
  Clone ID: LIB3050-008-Q1-E1-H4
ggtcatggattccgggtcgatcagtcgtgcttccagatgacaacagaagggggatagaagaaaggcatagcatanggcggttgactcaagtaaacagcgttccaacgctgtttcctttctgtttcttttttcttcttccttcttccttccttcgttgttgttgttgctgcgattctctagatcttgaacagtgttttcgtgttcggtgagatggaagaaaggaagcaatcgcgttatgtgaagttgactaaagatcagacacctctcgaagatattacccctggcgaactcaatcagccaattcaggttcctcagttggatgttcgtaagtgccctgaatgtagacagccgctacctgaaagctatgctcctcctgctgatgaaccttggatgactgggatctttggatgtgctgaagacagagaaagctgctttgacggactgttttg

SEQ ID NO: 23369 - DNA, 400 bp, Glycine max
  unsure (1)..(400): unsure at all n locations
  Clone ID: LIB3050-008-Q1-E1-H5
cacaagagccttgttgatgctgtgaagcaggttgatgttgtcatcagtgccatctctggtgttcacatcgggagccacagcatcactctgcaactcaaacttgttgaggccatcaaagaagctgggaacgttaagcgtttcttgccttctgaatttggcccagacccagcaaggatggggcatgcattagaaccaggaagggtaacatttgaagacaaaatggctgtaaggaaagcaatagaggaagctaatatccctttcacttacatctccgcaaacctctttgctggatactttgctggcagcctctctcagatggggtcttttgtgccaccaaggggcaaggtacatccctttggagatggcacactcanagctatttttctggatgaagatgatg

SEQ ID NO: 23370 - DNA, 171 bp, Glycine max
  Clone ID: LIB3050-008-Q1-E1-H6
gatggcaagtcaatatacacttcgttcatcaaaggctgcaaataatgctcaagaggtggtttaagaagaaattcatgcctaagtagttaattaattagcctttcggttgcccaaatcaatgttgtattatagaatagtattattatacaactatatatttgtggaattgag

SEQ ID NO: 23371 - DNA, 386 bp, Glycine max
  Clone ID: LIB3050-008-Q1-E1-H8
gagagaagatggggttgtcgttcacgaagctgttcagcaggttgtttgcgaagaaggaaatgaggattctgatggtaggtctcgatgctgctggtaagacaaccatcttgtacaagctcaagcttggagaaatcgtcaccactatccccaccatcggatttaatgttgagactgtggagtacaagaacatcagcttcactgtgtgggatgttggtggtcaggacaagatccgtccactgtggaggcattatttccagaacactcagggtctcatttttgtggttgatagcaatgatagagatcgagtggttgaggcaagggatgagctgcacagaatgttgaatgaggatgaacttagagatgctgttctgcttgtttttgccaac

SEQ ID NO: 23372 - DNA, 227 bp, Glycine max
  Clone ID: LIB3050-009-Q1-E1-A1
caacacagagagggagatgcgaagagacaacgatgtgaaaccgtggtcatagtactacggcagggaacagcttccacatgtcgctgggtcggtcagtcgccgagacggtgaactgcggcctacgctccgaggcgacgacactctggttcagctccgatgaaaggactcaagctctgtcaacagtctacccacggcctacattggcgacatagtgatagccaccgtta

SEQ ID NO: 23373 - DNA, 390 bp, Glycine max
  Clone ID: LIB3050-009-Q1-E1-A10
ggcaaaaacgtaagagaaaaatggggtgtttccatctcacagtgactagtctgtgctttgtagtggttgtggttggagtgcttccactctccttagatgcacaactagatccctcgttttacagagacacgtgtcccaaggttcactccattgttcgcgaagtggtgaggaacgtttccaagaaagatccccgcatgcttgccagtctcattagacttcactttcatgactgttttgttcaaggatgtgacgcatcagttttgttgaacagcactgccaccatagagagtgagcaacaagctctgccaaacaacaactctctaagaggtttggatgttgtgaacgacatcaagacagcagttgaacaggcttgccccggcgtggtttctt

SEQ ID NO: 23374 - DNA, 374 bp, Glycine max
  Clone ID: LIB3050-009-Q1-E1-A11
gtgactcgacatccaaatgaaatttcatttagctagcccagactgtcaattcgatgatccgcaatagtagtggtgtaaatgattctattctccataaatgcaaaaatagatgtctgcatgaaccaataatcgagacgaaaggtacactcgattgggttatatatagttacgaggattcccaaggtttatccccacaagcttactagactcatgatacttcacatacatgactgttatgttagtcgatgtaactcacgcagttttgttcaatatcactgctaccataggacagtaatcaccatcctctgcccgtcaacaacgctctaagaggtttggatattgtcaactacatcatcagatcagttgaacacgct

SEQ ID NO: 23375 - DNA, 295 bp, Glycine max
  Clone ID: LIB3050-009-Q1-E1-A12
ggcaaaaacgtatgataaaaatggggtgtttccatctcatagtggacagtccgtgctttgtagtggttgtggttggagtgcttcgagtctcgttacgatgcacaactagatcgctcgttttacagagacacgtgtcctaacgttcattccattgtgcgtgaagtggtgaggaacgttttcaagatagatcccggcaatcgtgcgattcgcaggagacgtcagctttaggagtgctttgttcagcgatctgacgcatcagttctgtggaacagcactgctatcatagatagtgagg

SEQ ID NO: 23376 - DNA, 375 bp, Glycine max
  unsure (1)..(375): unsure at all n locations
  Clone ID: LIB3050-009-Q1-E1-A2
ggcagttcaaagcgaagaaagattcgaaacgaagaaagaaagcgttgtgaagaatggcggaagagggacaagtgatcggtgtccacagcgtagaggagtggaaggaacatctcaagaagggagaagagtccaagaaattgattgtggtggattttactgcttcttggtgcggtccatgccgtttcattgccccaattcttgcagagtttgctaaaaagttgccgaatgtcaccttcctcaaggtggatgtggatgaattggagactgtttccaaggagtggggaattgaggctatgccaaccttcctgttcttganagaaggcaagccggttggacaaaggtggtgggtgccaagaaagaggagctgcaattgac

SEQ ID NO: 23377 - DNA, 414 bp, Glycine max
  Clone ID: LIB3050-009-Q1-E1-A3
gaagacgaaagaaggggaccctttttcgtttttctccttattacagacccccctaattgatggtgctctgtatcccctttttcttctgcaagaactacaccaactaaaacctccttcttcttttttttttggaggctggtgtgtgtttttctttttcttcttcatcttcttccaatccttaaggaaaaaactaaagaaaaaaaaagtgagccatgtcaggcttgtataatcccaacttctctcctgctagagcagcttctcctcaaattaggagcaatccaaaagtggaaaatcagtacctaacaaagttgctggcaaaacatcagaagcttggaaccttcatgcaagtgcttcccatatgcagccgcctcctaaatcaagaaatattaagggtttctggaatgttgttcaatc

SEQ ID NO: 23378 - DNA, 411 bp, Glycine max
  Clone ID: LIB3050-009-Q1-E1-A4
gcagaagaaccgtgctttctaatcttgtaattttctgcgttgcttcgtggttaattcatcgtgttcttgtgatctttctgttggagtatttacaacactcctttgtaagtttaactaaagaggctaattaattttcaattggaccacagcagatggctgaggagggtcacagggttactctaaatgtttatgacttgagccaaggtcttgcacggcagctttcaatgtcctttttggggaaggctattgaaggcatatggcacacaggagttgttgtttatggtaatgagtattactttggtgggggtattcaacactctcctgctggattcaactcatatggaactccactaagagtggtagacttacgtgtgacacatgttcccaaggatgtctttgacatgtatttgc

SEQ ID NO: 23379 - DNA, 204 bp, Glycine max
  Clone ID: LIB3050-009-Q1-E1-A5
gaggatatattcgattttgtgaaatgctgatgactgtgcaactagatgtagacttgccattatttattggacattagtatcatctacagcctcgtatatagttttgacttcagatgctttctaactttagtcagtagcaactccatcttcgagcaaaattttttattttgtcagatcccttggtctattgtacatattgctact

SEQ ID NO: 23380 - DNA, 340 bp, Glycine max
  unsure (1)..(340): unsure at all n locations
  Clone ID: LIB3050-009-Q1-E1-A6
ggaagaagagagtagcaagcaccagcaatgagtcctctaaacttgatcgcaaaaccattgaaaggaaccgcagaactcacatgaaatccttctgccatcagctttcttctcttattcctcccaatctcaaaccagtcaaacccaagttgatgccagggctgcaggaccagctggatcttgcagcaaggtatataagacaaatgacagagagagtagagaaactgaagaggcagaaggagcangccatgtcaaacaaaagcaatgatggtagagacatgttcaacaataatgttgagtccacattgtcaatacttgagctaatggacttgggttccggcat

SEQ ID NO: 23381 - DNA, 225 bp, Glycine max
  Clone ID: LIB3050-009-Q1-E1-A8
tgggacagcacaagttgtatatcggaacgttgccacaaacgttgtagttttcagatcagcacctaactaactatctatcggtctcgatccctgaatacaaccgaacgctacgccgaaactatgagcacagctcgagtaccagcgttgaaccagtaccagtcgctgctgtggctacggtagaacccaaggaaacggctgctaaagcaccaccgctcggatcagact

SEQ ID NO: 23382 - DNA, 381 bp, Glycine max
  Clone ID: LIB3050-009-Q1-E1-A9
caggggggataccacgagtcatagccaaaacagtttccatctctcgcacagcatgatgtcaatatcaaattgctcccttctcttgaacttcctcttcctctccagccgccacataacttcaactctctcaacccgcaccaacttcatcaattcctcctgcagcaccaatcaatatccagccctctgcatctagtcgatcaccgtctacgcctccaccatccagcaagaccccgactagctcgtccagacagccctctcactctccctcaaccacaccgaggccaccaaaaccgtcgtcgcaaaatgcaacaaatgtcagatgcctcaaaccgagagaatacgctgccttgaatgactgcgctgaagaaatcagtgacagcg

SEQ ID NO: 23383 - DNA, 344 bp, Glycine max
  Clone ID: LIB3050-009-Q1-E1-B1
gagacatatctctaattaacactaataacagcaaactaaaggtgaagtttgccagaaacaagatgggaaggaaccattttcagcagcaacactgtgctgatgggagcatgtggatggagagtcagggtcagcaacagagctatgccttccaagaagagtcttggagccctgataacaactatggccacaaccacaagcaattcccaggcatgcacatgaacatgaacaacaacaacaacaacaaaaggcttggtgcttttgctgctgtggactctgacttctcaatgcaaaaacatcatcatgggcatggcaacggcgtaggagccatgcacatgaacatgaac

SEQ ID NO: 23384 - DNA, 406 bp, Glycine max
  Clone ID: LIB3050-009-Q1-E1-B10
gtcagggcaggggagagaggacaataggggggcggaaaaggatagaaatggacgtgtgaaagaccatcttcctcctggatcagttgagagttcaaggagaggcagcggtgcaattgcactgtacttcagaggagcatggaatgaaaagtttgactcttcgataggtaaagactatgattttcaccttcatgacggccgttcattcagggttcccttcatgaccagcaggaagagtcagtttattagggcttatgatggtttcaatgtccttggtcctccctataagcaaggtgaagataagcgccaattgagtatggtacgttttccttccacaaacatgagatgggctgttagctttggcggacaagttggcttctgaatctgggttcttggaacgcaagcttcg

SEQ ID NO: 23385 - DNA, 325 bp, Glycine max
  Clone ID: LIB3050-009-Q1-E1-B11
gtacggaggagagatctctgacgagggagagatggaaggagacattgacatgtccgccgccgacgatgacgccgccgtcaaggagctcgacgagatgaagcgccgattgaaggaaatggaagaggaagccgcagcgcttcgcgagatgcaagccaaggtcgataaggagattggcagcgttcaagatcctgctaattcagctgcttctcaggcaaacaaggaggaggcagattctcggtctgtttttgttggcaatggtcattcttattactcaggttctataattagccctgggaatctgggatgcttacattgtattttgtgt

SEQ ID NO: 23386 - DNA, 176 bp, Glycine max
  Clone ID: LIB3050-009-Q1-E1-B12
gcaccgagaggggaatacgacggggtacggcatcttgcgtcgactcggaagatggaacaggaagagcacgacgtgtactgacgatagatccctgatgacggagagatggacggagaccttgacatgtctgccgccgacgatgagcccgccgtcaaggagctcgacgagatgaaacg

SEQ ID NO: 23387 - DNA, 353 bp, Glycine max
  Clone ID: LIB3050-009-Q1-E1-B2
gggaggagccacacgatttagtgatgttctttggaaactgaaagtgatagtttgccaaaagtccaagtcgcaggaatcacttccatcagcatcattctgatgatgagaacagattcactgataatcacggactgcctgtgagctataccctcaaggggaaatcttggatccgctgaaccaacgaaaggaacaaccataaacaagtcccaagcaatgacattagcaatccacgacatactggacactacgaggctaggtgcgtttgcagctctggactcaggtgtcacaatgcattggcatcatcatcggcactgcagacgactaagacccatgcacatgaacatgagcatcca

SEQ ID NO: 23388 - DNA, 307 bp, Glycine max
  Clone ID: LIB3050-009-Q1-E1-B3
ggagaaaataaagagtggtgaatgggaggtcggttacaatgctatggtagacaggtatgagaatttagtggaggctggagttatcgaccctgccaaggtaacaaggtgtgcattgcagaatgctgcttcagttgctggaatggtgttgaccacacaggccattgtggtggaaaaacctaagcccaaggcacctgtagctggtgccccacaaggccttaccgtttaatttttaagttattaaggctacggcaaagaacagttttgtgcacaaaattgaaagagcctaagtgttagaaatctgttcaat

SEQ ID NO: 23389 - DNA, 378 bp, Glycine max
  unsure (1)..(378): unsure at all n locations
  Clone ID: LIB3050-009-Q1-E1-B5
gccaatatggaaacttagatgagctttctgcaatatgctctgccatggaaggtgttaaagtagttaacggattggaatgtaagatagcttgcagctcatccaagatttcatatgttcttgacacacaagattttttcttccgaccaagaaagaaacgacggacgccatcagggaccacaacctcccagtctcgtagggacagagaggaaagattccgcaaattgttggcacactcgcaatttgtatcttcatgaatagctgttctctaacatcttctaaaacagctgagactcaaatacataatgtgagtcttggtgtagcaacctaggaaccctttgggtttacaattttacttgttgtcaaagtacntgaattttc

SEQ ID NO: 23390 - DNA, 395 bp, Glycine max
  Clone ID: LIB3050-009-Q1-E1-B6
gaacgaatcaaggaggattttaccaagaaatatgctggaggaaaagcagcaacagcggctgctcagagcctcaacagagagtttggacctaagttgaaggagcagatgcagtactgtgttgatcacccagaggaaattagcaagcttgcaaaagtgaaggctcaggtttcagaagtcaaaggagttatgatggaaaatattgagaaggttcttgaccgtggggagaaaattgagcttttggtggataaaacagagaaccttcgctctcaggctcaagatttcaggcagcagggaaccaagattaggagaaagatgtggttccaaaacatgaagataaagctaatcgttctgggtatcataattgccttgattcgtaatattgttccttccgtttg

SEQ ID NO: 23391 - DNA, 377 bp, Glycine max
  Clone ID: LIB3050-009-Q1-E1-B8
gggctgaaaaggagacaaatggacttgttaaagaccttcttcctcctggatcagttgacagttcaaccagactcatctttgcaaatgcactgtacttcaaaggagcatggaatgaaaagtttgattcttcgataacaaaagactatgattttcaccttcttgatggccgttcaatcagggttcccttcatgacgagcaggaagaatcagtttattagggcttttgatggtttcaaagtccttggtcttccctacaagcaaggtgaagataagcgccaattcaccatgtactttttccttccagaaacaaaagatgggctgttagctttggctgagaagttggcttctgaatctgggttctttggacgcaagcttcct

SEQ ID NO: 23392 - DNA, 386 bp, Glycine max
  Clone ID: LIB3050-009-Q1-E1-B9
ggagtgagtagtgagaatggagtttcaagggttaccggaaggttgcattgctagtatactctctcgcactacgccggcggacgtgtgtaggttttccgtcgtatcaaagattttccgttcggccgctgaatcggacgctgtgtggaaacgttttctcccttccgattaccattccatcatttcccagtctccttcgcctctcaactatccttccaagaaggagctctatctcgctctctcggatcgccctatcatcatcgatcagggtaaaaaggtatgtagcgtgttgtgtgtttcgcatcccttaaaaccttttctgttgatttaatttgatggttaattctctgatgtctggaacgcagagctttcaattggagaaaaagagt

SEQ ID NO: 23393 - DNA, 267 bp, Glycine max
  Clone ID: LIB3050-009-Q1-E1-C1
agaccaccgaaagggtgactcgaacaccagatgaaatttcagtgagttggcctgacaagtcaattggatcatcctcaatagtatgggtgtcaaggacaatattaaccatcacccagaaaacacatgtaagcacgatacaatgatctagtatcaagagatatatcacatgcggtaatatcaattgtcttggactcatgacgtttaccccaatgatgatagtatattcattggtgtgtcgaaagacgcaggcacactgtactcaaagaa

SEQ ID NO: 23394 - DNA, 390 bp, Glycine max
  Clone ID: LIB3050-009-Q1-E1-C10
gactgcgaaccagtagggactcccattccgactcttatccgccgatctctcagggcttgcatcttctcaggtaagctgtgaagatgtacacatcaaggaagaaaatccacaaggataaggatgctgaaccaactgaatttgaagagtcagttggacaggcattgtttgatctggaaaataccaatcaggagcttaaaagtgatctgaaggatttatacataaactcagccctgcaagttgatgtttctggaaaccgcaaggctgttgttattcatgtcccttacagattaaggaaaggtttccgtaagattcatgttaggcttgtcagggagcttgagaagaagtttagtggcaaggatgtaatcttggttgccacccggatgattttga

SEQ ID NO: 23395 - DNA, 384 bp, Glycine max
  Clone ID: LIB3050-009-Q1-E1-C11
ggagtaggtttgaggaggagcaagaagaattggcctttgaaattgaaacagctatattgcatagtttggttgctgatcttcttgacctggatggttaatacttaatagtttttcttttcaaagttcaaatcaagttctggcaattgcttcctccacagttgtttcctgcaccttcctaagcttacggaacacctaattgggaatgtaaaattacattccgttaggtgcaggaagcaattgtctcaattttcaatttcttttaagatctctgggcctttagcctcacttttctcaacagaaattatctggcccactatagcacttgaagcccaaatcagaaaagtaggtctcctcctacagcatccatttagacctaccaaccac

SEQ ID NO: 23396 - DNA, 395 bp, Glycine max
  Clone ID: LIB3050-009-Q1-E1-C3
gaatccaagaagcgaagtgatgaagaagctgaacaaatccaagttccttgatgaactggggcaaaaatggatctatctgacagttgaagaggctgttggtgcgtgcaacttcaagccccattcctacaaaccgaaccccatgaaggatgaatcaaaacgttggaacaatgcctaataaaataaagcattgttaaccttaattacagtaagtgacgttagaatttgagaatcatgctgcagaaagttttagagtgatagttgcatgaatactttaattcctcaagaaactgaattggaagaaagtttccaacgtaagctgttgaatctttatatatcatgcatacttaataatctattcaaatagaaagtggctgcaatggaattgagaagtgttc

SEQ ID NO: 23397 - DNA, 400 bp, Glycine max
  Clone ID: LIB3050-009-Q1-E1-C4
ggactttgaaactgcgattcagaaagagtcatcgaagaaaccggtccctggcggtggtgttcaccctctcacgcgctacgtgatgaactacctcacgttcctcgccgattacagcggcgtgttggtcgatataattgccgatttgccgcaatctccgttgccggagtcgtactaccgcagcccgatgcgcgaggaaaacccgccggcttcggagctatcggagcgaatcgcgtggatcatactcgtcgtgctctgcaagctcgacggcaaagcggaactctacaaagacgtggcgcactcgtacctgtgtctcgcgaataacatgcaatacgtcgtcgtacaggtgcgcaaatcgaacctagggtttcttctcggcgaatagtggttggcgaagcatgaa

SEQ ID NO: 23398 - DNA, 399 bp, Glycine max
  Clone ID: LIB3050-009-Q1-E1-C5
ggagagaaaaaatggccaaatcaatcaaattctttgagttgaacacaggggccaagattccttctcttgggttagggacttggcaagctgaacctggtgttgtagctgaagctctcaccacagccattcaggttggatacaggcatattgactgtgctagtgcgtataagaatcaagcatagattggttctgctcttaagaagctttttgatgatggtgtggtgaagcgtgaggacttatggatcacttccaaactctggtgttcagatcatgcaccagaagatgtgccaaaagcattggataaaacattacacgaattgcaacttgactatcttgacctctatctgatccactggccagtccgcatgaaaagtggaacatttggactcatataagaat

SEQ ID NO: 23399 - DNA, 328 bp, Glycine max
  Clone ID: LIB3050-009-Q1-E1-C6
ggcatcaatcaggagatcttcattccttgttccatcagtagatggctatgccaaagcaggtgtcaaatggataagctatgagcctcgttgcacatcatattggccgcatactcttcattgggctgtggcatgctcattgcccgagtttgtatgttgatgcttggctcctgtggttttgcttgggtattccagcgaggggacagcgcatagagtccatgaagaatgaatcatatgatgctatggttctgatgtgtacgccaatagacgctatccagctgaatatatatatcagaattgtagctgattaaagaattcgaagtacctgctg

SEQ ID NO: 23400 - DNA, 377 bp, Glycine max
  Clone ID: LIB3050-009-Q1-E1-C7
ggagttggttggtgtttgtttttgttgttggctgtgcgatcactcatctcatctcttctcatcaacactgcgatagacactggagctgacaccccatcatctgagccaatacaacggcacggacccatcaaaaccgatctacgtgtcggtaaatggccgcgtccacgacgtcactaccggaaaatccttttacggccccagaggcccctacgtcatgttcgcaggcaaagacgccagcagagtcctggcgaagatgatcaggaacgacgacgacatcacactctccctcgatcgcctctccgacaacgatatcggcgttctcaatcactgggagaacacattctaagcttagttacctgtcgttgctagtgttctca

SEQ ID NO: 23401 - DNA, 327 bp, Glycine max
  Clone ID: LIB3050-009-Q1-E1-C8
ggattttggtctttctttgatttggatttctcactttttgtggttattcccttccgagctatgcgtgttaattatgattctaagcacacgcaagctacgcatgtttattaattttgaatttggtagaccattttattaatattcatgtgaatgggattatacaccgtgaatataagatattttaaaaaaggagatggaattataatatgctttagcaattttgactagttagtaccttttgataaggaagatgggatgccattatgatgtgctcactatctgtttgataaaatgctccagttgaatccttttgtataagatgtggtt

SEQ ID NO: 23402 - DNA, 205 bp, Glycine max
  Clone ID: LIB3050-009-Q1-E1-C9
gatgctctatcggagacctgaatctctcggattatgtgggtaattcccttgcgaacaagggatttcagatacgattccaatcataatccatctacccatgtatgatagtttagaaggtagatgtatgacttgaaagtgactcatgtaacatgagactatggccacgtgaatatgacctttttcaccaatggatatgcatttatga

SEQ ID NO: 23403 - DNA, 316 bp, Glycine max
  Clone ID: LIB3050-009-Q1-E1-D1
gaattaaagaaagagaaaggtattcagacaaagatttcgggttctgggggccaatatggcataagggtcacaacaatttcaggggaaaataaatgtgcatgcatgcaaataaccaaatcccacaataaaccctatcccaaaatgacatctctgtatgctaacaacaatgtgcagtgcctgaacaactcaatggtgttgcacagtaatttaacacaccatgatccacgagtgtaccttgttatcccaaaaaagccattatgccaaggattccacctcaaggaacctgatggtactgctcaacgcaattgatttcatt

SEQ ID NO: 23404 - DNA, 375 bp, Glycine max
  Clone ID: LIB3050-009-Q1-E1-D11
ggcattgtcaaatcagcagagaaccatttcactattagagagacataggcataatattgagagataatggagggttgtacttactgtgtgaagttgctatgccttgttgggtttgtggtgcttgtgagtacaattgcaggggtggagagtgctggtgaatgtgggaaatctaccaccccagataatgaggcttataagcttgcaccatgtgcctcagcagcacaacatgagaatgctactgtgtctcagagttgctgtgctcatgtgatgacaattgggcagaatccaagctgcctctgtgcagttctgcactcgaacacagctaagttggctggcgtctaccctcaggttgctgtcaccatcccgaaccgttgc

SEQ ID NO: 23405 - DNA, 211 bp, Glycine max
  Clone ID: LIB3050-009-Q1-E1-D12
caaggcttgggggatggaacgtgagagacacatcttgttcacactgtccaatcgtgctgctttaactctagtcattgccggcacctctatctcatcacctaggttgttgagtgataagagtctggttgtgtctgacagtactctggtggctgtgggaatcattcgtgcacgtcgtgaagatggtacatccttttctccttctgataatcct

SEQ ID NO: 23406 - DNA, 387 bp, Glycine max
  Clone ID: LIB3050-009-Q1-E1-D2
ggcagccaaagaaaagaaaatcctcaattttctgagcagccaaacactctctctcggtcccccgaaaattccaattttgccaaaaaaaccgaaaccaggcccggcaaacctatgtccaacattaacctctgtgtgacaaccaaagggaacaactcaatcacgctgggaacaacgggcaaaacaggaacgtttgggctcacagtatcgacatctcccagtttaaacctgaggagataactgccaccacgaaagacatttatgagcccggatcacatgctccaactggagagtatctcggtggcaccaaatatatggggatccacagtgaacccggtgctgtcattctacggaagaagggtcctcctggtgttactgtgaagaagaccg

SEQ ID NO: 23407 - DNA, 407 bp, Glycine max
  Clone ID: LIB3050-009-Q1-E1-D3
ggactaggtggcagagcagcagaggaagttatttttggtgagtctgaggttacaactggagcagtcggtgatttgcagcaaataaccagtttggccaagcagatggtaaccacatttggaatgtctgatattggtccttggtcactcgtggactcatcagctcaaagtgatgttatcatgagaatgatggcaagaaactcaatgtcagaaaagcttgctgaagacattgatgctgctgtcaagagactctcagatgaagcatatgaaattgcgttgagccaaataaggagcaaccgcgaggcgattgacaagattgtggaagttctattggagactgagacaatgtctggagatgaattccgacctctcctgtccgagtttgttgaaattcctgctgaaaatcgggt

SEQ ID NO: 23408 - DNA, 393 bp, Glycine max
  Clone ID: LIB3050-009-Q1-E1-D4
gagagagagagagaaagcaaatacaagaaacttctctgtggaaaaaagctttgtgttcgttctcttcagcacgtccacgttgacgcttttctgaagaatcacaaaggctcgagaaaagaaataactttgttacacaaagcatttttctctatctttcttcgaaattcagagatacttggcgatcactctgatttggctcctccgaagtgatcctcttcgcggaggcaggggtttggattcaagcttcgcgttgattcgtcgcggttagatctgaactgtgctcgctgatcttgctcgattgagaagcttgagttttgaggattttgaattcattcagagtttggaagcatgatttgttgtagaagatagatagagagagtgtatgtttctgtg

SEQ ID NO: 23409 - DNA, 207 bp, Glycine max
  Clone ID: LIB3050-009-Q1-E1-D5
ggaagttttgtggtgtggtttagtgtcaaatggcggcgagtagaagcacttttcctctgatgaaatacttgagagtgcgcgtcgacgctcttccccgcaacactcccttaaccctcgctcccaactttttgattcgccgcttctgtgaagaggttacgggttgttttctcgacaagtctgacgtcacagatcgcgtcatttcctgcg

SEQ ID NO: 23410 - DNA, 357 bp, Glycine max
  Clone ID: LIB3050-009-Q1-E1-D6
gagaatatggtgatattgtgagtgctattcagtctgccatgcctggagctgtgctagttggggactatgctcttgagaacggagatggtattggtaggttacaagatgaacgtgttgaaggcaacattgacaatgctaacaggccttggttagccaccactatcttgtttcagatgatggatagcaccattgaaattgttagggaaccaagagcacattcgagtgcatggacaaggcaccgtcgttcatctgaacgtcggcgctatctgtggggtgagagtttactgggtcttcatgataatgacattgacgatgatctacgtatatttacggatgcacgtgaagatgcatctcctg

SEQ ID NO: 23411 - DNA, 80 bp, Glycine max
  Clone ID: LIB3050-009-Q1-E1-D7
tactgctgccagacgaccacggaacggttacgctgcgagaacactactcatgggtacggctacgataatactacgtaacg

SEQ ID NO: 23412 - DNA, 391 bp, Glycine max
  Clone ID: LIB3050-009-Q1-E1-D8
gaacacaacctggggtgttaaatagaaaagaggagtttgagaatggcaacgatcagcgcggttcaggtggagttcctggagtttccagcggtggttacttcaccagcctccggcaagacctatttcctcggcggcgcaggggagagaggattgacgattgaagggaagttcataaagttcacaggcataggagtatacttggaggataaggcggtgccatcactcgccgctaagtggaagggtaaaacttcagaggagttagttcacaccctccacttctacagggatatcatttcagggccgtttgaaaagctaattagagggtcgaagattctgccattggctggcgctgaatactcaaagaaggtgatggaaaactgcgtggcacaca

SEQ ID NO: 23413 - DNA, 258 bp, Glycine max
  Clone ID: LIB3050-009-Q1-E1-D9
tcgtgagggcagcggagctcatgctcgagcagcctatctatctcctcgtgatgactcgtgctttggataaatgatagaaattctcatgctctcggtgctgatgaagacttggagtctggcaatgtgtatacgttctatcgagatgaggagagtgaacgtcgttggcatcttcaccgatatagctgtactcgttttggccgcgagatccaccgcgatgagattgtctggtggaaatgcacgtgttctccttgacaactg

SEQ ID NO: 23414 - DNA, 376 bp, Glycine max
  Clone ID: LIB3050-009-Q1-E1-E1
ggtgcaaatagcgacgtcaaaatttgttctttgccccgcggcgacggccagttctaagaagaatgccatcatcaatttcagttccaatttcaaaggaactctcaccaaaatccatgccatttccccaaatggctctgcctctagctgcacttcgcgtgtgtctgtgtcaagtttaaagacagacaagaacaaaggcagaagtaatcttgaatccctgttttgttatgataaggctattccagaagaaataattgagaaacctgttgggttatctttggaagagaaagctattggtaacaattcgcgatgcactgattgccaggccaaaggtgccgtgctttgtgccacttgtgctggttctggtctatatgttgac

SEQ ID NO: 23415 - DNA, 350 bp, Glycine max
  Clone ID: LIB3050-009-Q1-E1-E10
ggtaggcaaagagagagagagaaaagcgtgaatcatgtcggacgaagagcatcacttcgattctcaggcggatgcgggagcgtccaagacgtatcctcagcaggctggtaccattcgcaagaatggctacatcgtcatcaaatccaggccttgcaaggttgtagaggtctctacgtcaaagacaggcaagcatggacatgcaaagtgtcactttgttgcaattgatatttttaatgggaaaaagcttgaagatattgttccatcatcccacaactgtgatgttccacatgtgaatcgcactgactatcagcttactgatatccctgaagacggctttgtgagtctgttga

SEQ ID NO: 23416 - DNA, 353 bp, Glycine max
  Clone ID: LIB3050-009-Q1-E1-E11
ggtaggcaaagagagagagagaaaagcgtgaatcatgtcggacgaagagcatcacttcgattctcaggcggatgcgggagcgtcgaagacgtatcctcagcaggctggtaacattcgcaagaatggttacatcgtcatcaaatccaggccttgcaaggttgtagaggtctctacgtcaaatacaggcaagcatggacattcaaagtgtcactttgttgcaattgacatttctagtcgggaaaaagcttgaagatattgtttcattgtcccagagctgtgatgttccagatgtgaaccgcactgactatcagcttagtgactatccccgagtaccgctttgtgagtctgttgac

SEQ ID NO: 23417 - DNA, 168 bp, Glycine max
  Clone ID: LIB3050-009-Q1-E1-E12
ctgggagagaaagagagacagcgacgtcggagcctggtcatggtggttcggcggtcaacaagttccgcatgtctctgggtcttccagtggcggccacggttaactgctccgaggtccacgcggcgatgaatctctacataatgtcggtgacagggatcactggccgtt

SEQ ID NO: 23418 - DNA, 402 bp, Glycine max
  Clone ID: LIB3050-009-Q1-E1-E2
gaaggcacccacgtagagaacctctaaaaacaaaaataaaaacattctctcccattcctcccccccttagcccttccttccttcattttttttctctttcttttgttggtttgtttgttccttttgttgtacgttctcctttgttctcttcttccgcatttggtacatgcggtgttctacttctctcttggtttgataacaggatttgacacaagtgttgtggtctcccatttcaggagaatcactcactggcataatatagagcttgttaaaagcaaaaaaaaaaagtgaagtgttttgagatctggcatgttatccttttctctctagctttaatttctttgtcggggtgtgtatgtgctagagtaactgacattccagctctgcctcctttgttttgcc

SEQ ID NO: 23419 - DNA, 403 bp, Glycine max
  Clone ID: LIB3050-009-Q1-E1-E4
ggagtcaagagtttatcaatcaccctgtgatcaaggagggcctgcctcctagagatgaattgtttgctttcttccaagcttctgctaaaaagtagagccgttttagaggtaggattcctaataagttagcatgattttgttgggaaataatgataatcttgttgtgagtaaaagattgttctgttttaaatttaattgactgtggtattggttgagggtattggctattttaattttaactataaaaaactggtgttctgtgttgttgcctgatttctcaacaaaattgaaccaagctaagaagttgcccgaatgggtgtgcagtatacgattttggtgcaagaggaatgagtgttgtgcttaaacctttcttcattattaatgttcctatctcccccatctc

SEQ ID NO: 23420 - DNA, 390 bp, Glycine max
  Clone ID: LIB3050-009-Q1-E1-E5
gaacttttggttggaaaggctttgaagcagctgcccagagaaaagattcagatagccacaaaatttggtattgcttcacgaggttttcctgatacgaagatcaagggttcgcctgaatatgtgcgatcatgctgtgaagctagcttgaagcgtcttgatgttgaatacattgatctctattatcagcacagagtggacacatctgtacctatagaggaaacagtgggtgaacttaagaaattggtcgaagagggtacagtcaaatatattggattacctgaagccaggccagatacaataaggagagcacacgcaattcatcccatcacagctgtgcacatagagtgggtcttgtggacccgtgacattgaagatgagatagtccctctc

SEQ ID NO: 23421 - DNA, 313 bp, Glycine max
  Clone ID: LIB3050-009-Q1-E1-E6
actgagaaaacaaagcccgtgaaagcaaagcaccccagcgcgctctttgcctaaccgactcactcccatggaatccgatctaaacgacgccgtttttcccgaagaagatctcgacgacgacgacgaaactccagaggatgaagaggaggaggaggacgacgacgtcttacatgacgatgaaaccgaaccccctccctccgtcatcgccgtcgcgccgcccgcgtcccacaccgctcgacaccgcgttaagtccgatctccgccgtcgcggatgcctcgccgaacccgctgcgcacggagctcatcgaggacac

SEQ ID NO: 23422 - DNA, 401 bp, Glycine max
  Clone ID: LIB3050-009-Q1-E1-E8
gaaagagctgatggattagccacttgttcagaaaagaagatctatgaacgatcagtaggttgtgttcgtagcaaatacaagacagacagatcaagagccacagggttctcaaccgcttgagagaacaacaagatctagaggagtgacagtttctgccactaccaaaaggcaaacatgtggcaacatcaaagacaacccatacaggtccaagtgattcacatccagcatcacatgcaccaactggaaaattttccacaccaccaagagtcagggcaacggcaacaccaaacttgtacacaaatgttcttggaagtgtagactctcttgacgtatccattaatgcatcgcgaactgacaagattgccgaagtcacaatgacgatctgcgaagatcctttttca

SEQ ID NO: 23423 - DNA, 182 bp, Glycine max
  Clone ID: LIB3050-009-Q1-E1-F10
aaaaagagaataacggggaggtttttgttagaatacccaacgccagggctaccatgcgtcacaggatatttcaatcacctgctgccgcggctgctgcggcttctgttacttctgcttatgtattgtctaagtctgataagttggatttcatgcaactggacgagatacattccaagttatct

SEQ ID NO: 23424 - DNA, 387 bp, Glycine max
  Clone ID: LIB3050-009-Q1-E1-F11
ggttctgagtcaaaggagataccaaaggaggagaatattgcagctcccgttgttcctgttgtaagcacggattccctccggaacattgatctgaatgccatcacgaatgaaaacgatgacaaaaaggctagtgcagaagctgatgcctccgcctcggtgcctgaacctgatgcctcattgcctgaacccccaacagagagcaagcatgaagaaattccggggtggtcactttctgatgtggacaagatggccattgattcgctgcagcttgtacaacttggtaggccactagaagaggaggaggaagactatgatgaagaggaggggttaaatattattagtcctttggtgattagattagtgaaaaattcaaccatgataactgta

SEQ ID NO: 23425 - DNA, 260 bp, Glycine max
  Clone ID: LIB3050-009-Q1-E1-F2
ggagcgatgaaatggccacagcaatcgaattcattgagttgatcacaggggcgacgattccatctcttgggttacggacctggcaagctgaacctggtgttgtagctcaagctctcaccacagccattcacgttggatacaggcactatctgacatgtgctaatgcgtaaaagaatcaagcagagatagagatcatgcacataagatacattctgatgattgtgtggtcaaacgtgaggacttgaggatcacctccaaac

SEQ ID NO: 23426 - DNA, 399 bp, Glycine max
  Clone ID: LIB3050-009-Q1-E1-F3
ggggaactccggacagtagcaggtggtaagaacggacacaagactagcaattaaatcccaaacactagaatctggtgtgagatatttgtccatttagctttgattttcatcatggaattatgttcaaacaaatctattgatttttttttcatttacatgatatccagagtttagtattatatccaatactcagatgtccaatgattaattataccttcagctacaagaaagtacaaagccttttgtaccatatatatgtaattctaacttgcctgtttgcaacgattgggttcacagatacattcaaagaaggggtttatattggaacatgaatttagacatatgattataaacttttgtttgtcatttagtggtaaatcttgttgtaaattccataac

SEQ ID NO: 23427 - DNA, 386 bp, Glycine max
  Clone ID: LIB3050-009-Q1-E1-F4
aggggtggtgaatgctttaagtgtggaaaacctggtcattttgctaaggagtgccctagtgaatggtccaggggaggaaagtatggtggtatggaaagtacatatggtggaagcactggtggtggttatggaccagatagagcagatcgttcttcatgggggcgcagcacgggatggttgtagtcatggggattctggaagtgatcgattttatcgtgatcgttcaagaccatatgagcgagagcgacggggattaggacgctttccttgatatcatgtactctttcaatgagatgtgacattgacgacgttgctgttaatgcttcaacttcccttttcattcgcacttgacaatgctctgtggacgtctgggattgttgtttgga

SEQ ID NO: 23428 - DNA, 401 bp, Glycine max
  Clone ID: LIB3050-009-Q1-E1-F5
gagacacgaataacacacaaatcattaatcaaccaccaccttaacacaacaacacgatgatgtccatcttcagccacttcgagatcgcgcaggcccagaactggagcttttctttgctcccagtaaaaagcacgaattcgaagcccaacacagaagccacttcctcctccgctgagtccaaaaccgccagaaaagtttccaatctatcacaacccggtggatccaagcaaaacccgccccgtttgaggcccagatttgcgccggagttggacgggttacactgctttgaatccattgtaccctgctagatggatttcttcagttctcaatctcaattcagatggcataaaaatcatacgcgattcaattcaatttatttttactgaatagtttaattagta

SEQ ID NO: 23429 - DNA, 281 bp, Glycine max
  Clone ID: LIB3050-009-Q1-E1-F6
gagacacgaataacacacaaatcattaatcaaccaccaccttaacacaacaacacgatgatgtccatcttcagccacttcgagatcgcgcaggcccagaactggagcttttctttgctcccagtaaaaagcacgaattcgaagcccaacacagaagccacttcctcctccgctgagtccaaaaccgccagaaaagtttccaatctatcacaacccggtggatccaagcacgaaccgcccgcgtttgaggcccacatttgcgccggagttggacgggttacg

SEQ ID NO: 23430 - DNA, 370 bp, Glycine max
  Clone ID: LIB3050-009-Q1-E1-F7
gttcctaatgttggacaatttattgatttgctgatctcaattcctgcggaaggacatggtaattcctttgcttatataatgtcagaatggactaagcagcaaggggagatacagggggcatatcaaataaaagtcactacaagtgccctggccttgttgctaaccagtaggcacaatgaattggcaaatatacatgtccagggctatcttattaagtctggcgagggaataactacaagatcaaaagctaaatcagccccagattaatgggtaatgttgccactttctacaaagatagtggctttattggcagatgcattaactgagatacaagaacaagttttggccgctgaatatgatgatagtgact

SEQ ID NO: 23431 - DNA, 392 bp, Glycine max
  Clone ID: LIB3050-009-Q1-E1-F8
gaggcaaatggcagcatcgtcaccatcgccgccgctgaaggcggtgcaggaccgcgtccaagcagccgccgaacgctctggccgtaatgtgcaagagattcgtgtagtggctgcgagcaagacgaagccagtttctgctctccgtgaggtatacggcgccggccttagatgcttcggcgagaactacgttcaagaactccttcacaaggcaccacagcttcccgacgatatccagtggcatctcatcggaaatttgcagagcaacaaagtcaagcctcttatcgctgctgtgcccaaccttgcttgtgtggaaactgtggatgataagaagatagcaaattttcttgatcgtgctgtagcatatgttggcaggaaaccgttaaaggtttttg

SEQ ID NO: 23432 - DNA, 193 bp, Glycine max
  Clone ID: LIB3050-009-Q1-E1-F9
agacgactacaaaacgaggaccattgggaaacacagcacctgagtatgcactgcaaggtcaattatcagacaaggctgatacctacagttatggtattgtacttctagaaatcataagtggtcaacacagtaccaatgtgaataccgatgatcagggtcgtgagtaccttcttcacctggcatgcacactgtc

SEQ ID NO: 23433 - DNA, 391 bp, Glycine max
  Clone ID: LIB3050-009-Q1-E1-G1
gagcactaatttatatagcaagctagctaggttgaaaatagtttggttttgtagtaagtgaggtgaggtgccaaaatggtgaagataactcttggtactttcgatgactcttttggtgttgcctctcttaaggcttatttggcagagttccatgcaactctgattttcgtgttcgctggtgttggttcagccatcgcttacaacgagcttacaaaagatgcagccttggatccaacggggctggtggcagtagctgtggcccatgcatttgcactgtttgtacgtgtctccgtcgcagccaacatctcgggtggccatttgaacccagctgttacttctggattggccattggaagcaacatcaccctcattactggttttctatactgga

SEQ ID NO: 23434 - DNA, 389 bp, Glycine max
  Clone ID: LIB3050-009-Q1-E1-G10
gatgaagaaaaagaagggaaggatcgtcaatattgcatcagttgttggtttggttggcaatgttggacaagccaattatagtgctgcaaaagcaggagtaattggcctgacaaaaactgttgcgaaggaatatgctagtagaaacatcactgttaatgcagttgctccagggtttattgcatctgacatgactgccaagctaggacaagacattgagaaaaagattttggagacaatcccattaggaagatatggccagccagaggaagttgctggactggttgaattcttggctctaatccaactgccagttacaccactgggcaggttttcactattgatggaagtatggtgatgtaaattagcaatccttttaccttgcaacatga

SEQ ID NO: 23435 - DNA, 380 bp, Glycine max
  Clone ID: LIB3050-009-Q1-E1-G11
gaaggtaagagggtcatcgtggaaggatttgtaaattttctcaactcaactctcaccatgaggaccagttgcttcctaagccttcccccttttacttcaaaccaaccttccattcccccaaaacatcctcaactttcatcggtgaagaacgaagcatgttggaagaggcaatgcgttgtgatgggagtggcatccattattggactagaaatgtgcaattcagtggcaatggcccacgaagcaattgaaatcaagaccatgccatttagtaaccaagtagtatcaaatagcaattcttacggtggcgccaaatggagcgagaaaagaatgtgcccaccttggcaaggcaattcgctcgaaacgatcgtgccggagaatct

SEQ ID NO: 23436 - DNA, 354 bp, Glycine max
  Clone ID: LIB3050-009-Q1-E1-G12
agaaggggcgtttcaggtgaaggaaggggagatgctgttcgggtaccaaccattcgcgacgaaggatcctaggatcttcgagagggccgaggagtttgtcggggacaggttcgtcggggaggaaggggagaagctcctcaagcacgtgctgtggtccaatgggcctgagactgagtctccaacacttgggaacaagcaatgcgccggaaaagacttcgtcaccttggtttcgaggcttttcgttgtggagttctttcttcgctatgattccctcgagattcaagtgggaacttctcccttgggttcttccgttactattacttccctaaagagagcaagcttttagttagttag

SEQ ID NO: 23437 - DNA, 397 bp, Glycine max
  Clone ID: LIB3050-009-Q1-E1-G2
ggcacatccgtcatgcagcaatgccgtcatttcgggtggacagtgtcgtccagagatgcagagtctagcccagaaggcttccgaatggagcggtgtatccatacacgacgctttcggcatcgacgacaccaatcacttccagaaactcagcgaccacaccttcattaacctctccatcaatttctatggcatggtttacgataacgatgaagaatggtttcgtgcaatagacgcgaattctgataaggagaatgccattcacaaccaacatgagttcttcgtgcagcaaatgggtagtcatccacgcattacgcatagaagaggacaccgtgctcgaattgctcgacatcgaccatttcctgtcacgcatcaagctgtatagaggtggttacatcac

SEQ ID NO: 23438 - DNA, 187 bp, Glycine max
  Clone ID: LIB3050-009-Q1-E1-G3
cacaaaaggggacaaacaacaacaatttaccagctatacctgttccttttgaacgttagaagtgctacaatacaaacaatggcagctactcaggaagatgtgaagcttttgggtactgtgggaagcccacttgtgtgcaaggtccagattgcccttaagttgaacggagttgaatacaaatttttgg

SEQ ID NO: 23439 - DNA, 374 bp, Glycine max
  Clone ID: LIB3050-009-Q1-E1-G4
ggcattgtggaattaatagagagacataaaaaataaacatatatcgagaatggagggttgtgtgaagaagttgctatgccttgttgggtttgtggtgcttgtgagtactattggtggggtggagagtgctggtgaatgtgggaaatctacaacccctgataatgaggcttataagcttgcaccatgtgcctcagcagcacaagatgagaatgctagtgtttctcagagttgctgtgctcatgtgaagaaaattgggcagaaccctagttgcctctgtgcagttcttctctctaacacagccaaaatggctggcgtcaaccctcaagttgctgtcaccatccccaagcgttgtaacctggctaatcgccctgttg

SEQ ID NO: 23440 - DNA, 366 bp, Glycine max
  Clone ID: LIB3050-009-Q1-E1-G6
gacagcacaaaaaataaagttgtcaacatcgctcctctcattcttccccccaaagaaaacatggctcctctcccgccagtgtaagctagattattagttttttagtgaggtgctgctgaaatccctaattcggctttccacttgattacgatcccttcacccttcttaggatggcaaatgctgcagaagatttctcccaattcgggatttcaaaggaggaaaaggataagcttgttggggaattgattaggtacatgcttttcaaaacccatcaaaattcagggtgccccattaagagagaggaactcactcaacttgttacgaagaactatcatcagcgtaaccttcctacctttgtgattaatg

SEQ ID NO: 23441 - DNA, 132 bp, Glycine max
  Clone ID: LIB3050-009-Q1-E1-G7
aacaccaaaaaagatgctttagtcttcagattcccacccatggaaccatggcctccgtgtatagctctactgactgcggattcagcctgaatacttaactccgcacatacgtactctccagacctctacttc

SEQ ID NO: 23442 - DNA, 112 bp, Glycine max
  Clone ID: LIB3050-009-Q1-E1-G8
ggacactatttttctctaataggactacgaggttattttagatatacactgttactctgccttcatctacctgctctattcatgtgttaaggccttacactagagacgatgc

SEQ ID NO: 23443 - DNA, 124 bp, Glycine max
  Clone ID: LIB3050-009-Q1-E1-G9
gatgccaatgacagaatagaagccaagtgagagtgagaaagactacaaatcattgagcagaatgtcagggatcattcagaggattggggagacccttcatgtgggagggcgtaggaaggaggat

SEQ ID NO: 23444 - DNA, 393 bp, Glycine max
  Clone ID: LIB3050-009-Q1-E1-H1
gaaggaagtcttacctttctgtcagcaaagttcgatggaatactgggacttggatttcaggagatctcagttgaaaatgctgtgcccgtatggttcaaaatggtggagcaaaaacttatcagtgagaaggtgttctctttttggcttaatggggatccgaatgcgaaaaaaggtggtgaattagtttttggtggtgttgacccaaagcacttcaaaggaaaccacacttatgttccaattactgaaaaaggttactggcagattgaaatgggagattttttcgttggaggtgtttcaacaggtgtttgtgagggtggctgtgctgctattgtggattcaggaacatctttgcttgctggtccaactcctgttgtggctgaaatcaaacatgcc

SEQ ID NO: 23445 - DNA, 293 bp, Glycine max
  Clone ID: LIB3050-009-Q1-E1-H10
ggtcccaagttcttagaccatccggagaatgtcacaaaaaaagctacggaagagatctaatcctaaaatcctacaggggcgacctcagctccatgaccacataaccatgtccagaaacatgcgacatgttccttctgcagtacccagcttcctcgatggctcagaagcacaagcgatacacgtcgtaggtgatgccacaggctggattatcgctcccggcggcgccgctctatacaccacctacgcttccaatacaatattcaccgtaggcgacactctcgtgtctcacatca

SEQ ID NO: 23446 - DNA, 177 bp, Glycine max
  Clone ID: LIB3050-009-Q1-E1-H11
tgctaaaacgcaaactcaagggtcaagcattctccttacctagtaagcaacttgctcatattttatgctttgttatacttcctttgatctgtgtactatgtgatgctactgaatgtacttcctggttatgtattcatctaagtattctggttttattgtggctggcttataccttct

SEQ ID NO: 23447 - DNA, 371 bp, Glycine max
  Clone ID: LIB3050-009-Q1-E1-H12
ggacgttccaatttgcgtgagaacgaaaaaagaaaagaaaaaccctaacgcactcgagaccctgagatttttcatcttcgtttctcattctctttttgatcatggacgtcgaggtgcggcagatcttcaacaagttcgacaagaacggcgacggaaaaatctcggtaacggagctgaaggacatgctcgcggccctcggatccaaaacgacggacgaggagttgaagcgcatgatggaggagctcgaccagaacggcgacggtttcatcgacctcaaggagttcgcggattttcactgcaatggcggtgccggaaaggacgactcgaaggagctccgcgacgcgttcgatctctacgacgtcgaacagaac

SEQ ID NO: 23448 - DNA, 398 bp, Glycine max
  Clone ID: LIB3050-009-Q1-E1-H2
ggtgggtgcgggtgctgcgaaaccgagctagaccctgatcggtgtcggcacaccgccggagaacaagatgatcgtctgcgtcgccgtcgtcggtcaccagaacaatccgctgtacattcagagcttcacggaggccgacgatgctcttaagctccaccacatcgtccattgctcgctcgatgtggtcgacgagcgagtgaacaatcctaaaaattcggaaccaatcctaaataaaactttttgggaacggcttaacccaatgaaaaccaccaagtttaaggaaaaccgaccaataccaaggggaaaattaacctggtgaccacggatctggaagttaaagatgccgatgtaaggaattttttcaagaagttccattctgcatatgtagatgccgtttc

SEQ ID NO: 23449 - DNA, 308 bp, Glycine max
  Clone ID: LIB3050-009-Q1-E1-H3
gattcttacagagctggtgctgattttgtccgtggatacccttttagtcttcgtgaaggtgccccaactgctgtttctcatggcctgtggcttaacatacctgattatgatgctccaacacagcttgtcaaacccctcgagaggaacaccaggtatgttgatgctgttcttaccattcccaagggaacattgttccccatgtgtggtatgaatctggcattcgatcgtcagctgattggacctgcaatgtattttggactcaagggttgatggtcaacctatacgacgatacgatgatatgttgggct

SEQ ID NO: 23450 - DNA, 370 bp, Glycine max
  Clone ID: LIB3050-009-Q1-E1-H5
gggggaaatgggcagcagagataagggacccattcaaagcggcaagagtatggttaggaacatttgacacagcagaggcagcagctagagcatacgatgaagctgctcttcgtttcagaggcaacacagccaaactcaattttcctgagaatgtcactctccgacaacctcaattcactgtttccaatcctccatcttctcttgtatctattacaacatcaatagacccagttgttcacagtactcgacctctccttcttccttctcaggcttcaactgcgaccaatgtttacgagtattttcaactctcgggcttccccaccaacaccaacctttatgatggtaataggatgtttgtgacgtctaatgc

SEQ ID NO: 23451 - DNA, 229 bp, Glycine max
  Clone ID: LIB3050-009-Q1-E1-H6
ggttctagtgtgtgattgtttgttgttgtaactcgttcatcttcttttgttgttctgtgtttgtgtttgttttttctcacacctgaaaatatcatgctgcggtagtaactgtggttgcagaagctcctgcaagtgcggcaacagctgtagatgctgcaagatgtacccagacttgagctacactgagtcaaccagcaccgagaccttggtcaagggagtggcaactgtt

SEQ ID NO: 23452 - DNA, 272 bp, Glycine max
  Clone ID: LIB3050-009-Q1-E1-H7
cagtgcatcagggacaccttatcatgatggcttgtttttctttgatatatgcttccctccagagtatcccagtgaaccccctatggtgcattataattctggcgggctacaattaaatccaaatttgtacgagtcagggaaagtctgtccgagtctcctaaacacgtggactggtacagacaccgaagtgtggaaccctggagcttccacagttcttcacgttcttctttctctgcacgcccttgtccttaatcacaagccttatttcaatc

SEQ ID NO: 23453 - DNA, 320 bp, Glycine max
  Clone ID: LIB3050-009-Q1-E1-H9
gagattgaaggggtagtatttttgcttttgcatgcatcaatcagaaacgagggattcgatcgagtagctaactaaaacaagctttttgattgcgtttacacgtgtctgttaaaggtggcaaatcctaaagagaagaagggatacgaggttgacaatatattactccatgaagggatgatgaacaaccctgcattattgtcaaggctgtttccgggtatcactagggagagggagatgtctgccatggtctcagccttgacccacgttgtctccggataggtccatacggtgagtcatcttcagtccttcatcatcaagct

SEQ ID NO: 23454 - DNA, 381 bp, Glycine max
  Clone ID: LIB3050-010-Q1-E1-A1
gctctctaagtaaaatcttaaatttctgaacattgaacaactcttcacacaacaaaacttttttctggcattgtagcatcatgactggcagagaaatcctccatatgatgaaggtgaaagcagggtttggaacaccagacacagggaatggaaaaggcaaaatatcaaaacacattacacatggctttcacttgatgaagggcaaatcagcgcatcctatggaagattatttagtttcagaatttaagcaagaaaaggacagagaattaggcttgtttgcaatatttgatggccacttaagccatgatgtagcaagctatttgcagaaccaccttttccaaaacatcttgcaacagcatgacttttggactgagacagaaa

SEQ ID NO: 23455 - DNA, 195 bp, Glycine max
  Clone ID: LIB3050-010-Q1-E1-A10
gatcacaacagtgtcacagaggaaacgtacttttttttttacacaaattatcatatttgagtgtgatcgatggcagacccagacgcttatccggcgcatccgtagccctccacctccgtgccgatgccggcggtgcccagtgccgtgatcggcgtccacttctgtgcgccctagccgctggatctggccgtggtg

SEQ ID NO: 23456 - DNA, 199 bp, Glycine max
  Clone ID: LIB3050-010-Q1-E1-A11
cgggggagttcagtgtggcatagaggatcaatccactatgctataggataattatctcactttagtgttatcaatcgcggagacacacagttaccccgcgcagccgtaccagtaccacttagtaccgacgcgagcggtacccactaccatcattcgtccttagcaccctgcgtgttagccgcagaatcagtcgccggtg

SEQ ID NO: 23457 - DNA, 156 bp, Glycine max
  Clone ID: LIB3050-010-Q1-E1-A12
ggaatctgtaaggcagaaagtagggttaaacaatttaaaagtcaaggagttgccattggtatgccatgagaaggccgacagggaggatcaaccacttggggttggtggggcagtgcgactctgtctggggcgccgcctgacacggaagccttaccc

SEQ ID NO: 23458 - DNA, 291 bp, Glycine max
  Clone ID: LIB3050-010-Q1-E1-A2
caagttcttgcaggaactgccagaatcgcagagagaagatgctgtgagcagcatggtttatgaggcaaatgcgaggatcagagacccagtttatgggtgtgctggtgcaatatgccaacttcagaagcaagttagtgagctacaagcacagctggccgaagcacaagctgaggtagtgaacatgcagtgccaacaagccaatttagtggcgcttacttgcatggaaatgagtcaatcacaggagcagcacgtgcttcagcctcaaactcacgttgatatgagctgcttcat

SEQ ID NO: 23459 - DNA, 376 bp, Glycine max
  Clone ID: LIB3050-010-Q1-E1-A3
cacaaaggtgctttcttccagaatgaatctgatgaccgagctgccactgttggatctgatggtatttttgctcgtgatttctctgctccaactggggaggataaaatggacaagacaatattacctaaggttatgcaagtcaagcactttggtcgtagtggaagaaccaagtggacccatcttgtcaacgaggatactactgattggaataacccgtggacttacaatgatccacttcgtgcaaagtataatgacaaaatggcagcaatgaacgcacctatagtgaaacctaaaggaagcaggaaattaaaggattgggaatctcgatgaacttgaagttacaaagtatgcatgaagatatcatcctttcagttat

SEQ ID NO: 23460 - DNA, 380 bp, Glycine max
  Clone ID: LIB3050-010-Q1-E1-A5
gggggaaaacagagtactatacggaatttgaaaaccaaggctcaagttttaataagagacgtggagctctctgtggttgcaagaaacatggaagaagttgtgttgctggttgatgatttgagatcactttctgggatttctcgctgtagaatatgtcatgaagacgactttgagagctctaaaaccttggaagctccttgtgcttgttctgggagagttaagtctgctcatagagattgcattcagacttggtgcattgagaaaggaaatacaacttgtgaaatatgtctctagcaacatgaatccggatatacagcagccttagagagatcgcaagtagctgatgcagcactgatcattagggacagcatgcaaatttc

SEQ ID NO: 23461 - DNA, 363 bp, Glycine max
  Clone ID: LIB3050-010-Q1-E1-A6
gggttcagaacatccaaggtttcatgtgggatgaggagaaagtgaacaatgagctaaagacctacatgaccaaaggtttcatagatgtgaaggaaatgtgcaaaacccatgaatgtgatcttcgtatgggagccttcaccctggcagttaaccgtgtcgcacgtgctactgtccttaggggctgggaagcttgacatccattgcttctgctttcaataaattaattaaagagctcccactctcagcaacacttcacaaagtttttgttgctttcaactaatgtgttgggtgaatcgtattttcacgccaaattttctttcaataaattagtatagtatataaatctttttgtaactacatgtg

SEQ ID NO: 23462 - DNA, 272 bp, Glycine max
  Clone ID: LIB3050-010-Q1-E1-A7
gggtgcagaacatccaaggtttcatgtgggatgaggagaaagtgaacactgagctaaagacctacatgaccaacggtttcagacatgtgaaggaaatgtgcaaaacccatgaatgtgatcttcgtacgggatccttcaccctggcacttaaccgtgtcgcacgtgctactgtccttaggggctgggaagcttgatatccattgcctctgctttcaatatattccttaacgagctcccactctcagcaacacttcacaaagtttttgttgctt

SEQ ID NO: 23463 - DNA, 395 bp, Glycine max
  Clone ID: LIB3050-010-Q1-E1-A8
gggcatcacaaactatatactaatctccatctaatagtgttaatttgtctttctctatctctatcggtcatgggtgcttttgcttttgatgaggaaaactcctccgccgtggctccggcaacactctacaaagctctgacaaaagatgctgacactatcatcccaaagattattggggccatccaaactattgaaatcgttgaaggaaatggaggacccggaaccgtcaagaagataacagctagtgaaggtgaccaaaccagtttcgtgctgcaaaaagtggatgcaattgacgaggctaacttggtatacgactacagcatagtgggagggacggggttgcatgaaagtctggagaacgttacattccaaacaaacgtggttccctggcactg

SEQ ID NO: 23464 - DNA, 355 bp, Glycine max
  Clone ID: LIB3050-010-Q1-E1-A9
ggcattgtgaaatcaacagagaaacatttcactaatagagagacataagcataatattgagaaataatggagggttgtacttattgtgtgaagttgctatgccttgttgggtttgtggtgcttgtgagtactattgcaggggtggagagtgctggtgaatgtgggaaatctaccaccccagataatgaggcttataagcttgcaccatgtgcctcagcagcacaagatgagaatgctagtgtttctcagagttgctgtgctcaggtgaagaaaattgggcagaacccaagctgcctctgtgcagttctgctctccaacacagccaaaatggctggtgtcaaccctcaagttgctg

SEQ ID NO: 23465 - DNA, 377 bp, Glycine max
  Clone ID: LIB3050-010-Q1-E1-B1
gttggcactttcattcttgtctacaccgttttctctgccaccgatgccaagcgtagcgctagagactcacacgtccctattttggcacccttgccaattgggttcgctgtgttcttggtgcacttggccacagtcccaatcactggaactggtatcaaccctgcacgaagtctcggtgctgccatcatcttcaacaaagaccttggctgggatgaccactggatcttctgggttggacctttcgttggtgcagctcttgcggctctttaccaccaagttgtaatcagagccattcccttcaaatccagttaattaattggattacaacgattcgtggtcaatcaagttgggtaaattaaaagaccaaaccaagcaag

SEQ ID NO: 23466 - DNA, 80 bp, Glycine max
  Clone ID: LIB3050-010-Q1-E1-B10
tacagctgtcagactacgacatatgggtccggctgcgaaaagatcacagaacggtactgctgctagactactactgattg

SEQ ID NO: 23467 - DNA, 372 bp, Glycine max
  Clone ID: LIB3050-010-Q1-E1-B12
gacaataaatccctattccaattccaaattttcagtttcttcctcgcttttctgcaaaatcatctaaatccgtttctgatcctgaatcatcagtttttcccttgaaagatgggaggtggcaaggacaaacacaatgaagaagagaaaggagttttctcacatctggctcatggagtagctcaagctgctcatggttaccctccaggggcataccctccacctcctggggcataccctccttaccaagggtacccacctgctcatggctacgctccacaaggtggctatcctccggctggttatccccctgctggctatcctcctgctgctggtggttaccgccctgctggttagcctccacatggttatcct

SEQ ID NO: 23468 - DNA, 372 bp, Glycine max
  unsure (1)..(372): unsure at all n locations
  Clone ID: LIB3050-010-Q1-E1-B3
ggatgaagcanaaagcaacgaaccctgcctagaaaaaaaaatggagtactctaatggattccctagaaaaagagatgtttctcttcaggaacttagcaaaaggcttgctgagtttgctgaagtaagaggatgggatcaatatcacagtcccagaaatcttcttttagctcttgtgggagaggtgggagagctttctgagatcttccagtggaaaggagaggttgcaaagggattgcccaattggagttctgatgataaggagcacttagaggaagagctttcagatgttttgctttatttagtgcgtcntgctgatgtttgtgggctagatcttggacaggctgctctgactaaaatagtgaagaatgctca

SEQ ID NO: 23469 - DNA, 269 bp, Glycine max
  Clone ID: LIB3050-010-Q1-E1-B4
agactcgctcaacccgggcaaagtatcgcggtgtgtgtcaacttgctctgcacatttgtcattgcgcaggcctttctctcaatgctgtgtttcttcaagtttggcatcgtcttgttcttctctggatgtgtcctgctcatgtccacctttgtgcttttccttctccccgagacaaagaatgtcccattgaagagatgactcagagtgtgtggaagcaacattggctgtggaagacgtttatttaagatgattgtgttaaagaagagaaa

SEQ ID NO: 23470 - DNA, 241 bp, Glycine max
  Clone ID: LIB3050-010-Q1-E1-B5
ggggggacctcccgcaacatcataaccataatgcctacgtgtaccggcacagacgacatcatcaccagcagggccgactacagcagcgacactgtcactttcaagtccgaaagccctacagaagcacgccgatttctgacgttcgacatgaagctgatggacattcataatgaacacattgcgattccggaggcacagtatcaagctactgttaacatgagatcctctgagtttgcaacga

SEQ ID NO: 23471 - DNA, 398 bp, Glycine max
  Clone ID: LIB3050-010-Q1-E1-B8
gaggagagagagagacacgcatttgtaacgacaaagaagcagaaggtgtagtaatactgagtggtcaaattaaggatcgggattcaggaatttccattctgagacacacagaagaacggaaagaaactccttttaattttcaatttcaagtcaagatcgatccgacatcatagaaaatgaccatggatgtcgttcagctgcagaggaagctgcgcgaacaccaagccgctatgtttcaacagggttttttggatgatcagttcagccagcttcagaaactgcaagatgagagcactccagattttgtgattgaggttatcactatgttctttgatgattctgagaatctcctaaaaaacatggcacgttgtctagaacaagtgccacctgaattcaaa

SEQ ID NO: 23472 - DNA, 219 bp, Glycine max
  Clone ID: LIB3050-010-Q1-E1-B9
cggggaggaagccacatagagacacattacagagtgagttgttgctccttcgccaaaactctctgggaggatgggtaccttacgagattcgatgcacaagaggcgtgccactggtggcaagaagaaggcctggaggaaaaagagaaagtatcgagcttggtcgccagcctgctaagcactaaactgtcaagcaacaagacagttatgaggatgcgtgtt

SEQ ID NO: 23473 - DNA, 369 bp, Glycine max
  Clone ID: LIB3050-010-Q1-E1-C1
gcgtgaaagatgaatgggcgaagctttcagggtctccaaggctcgacgttgctattgacatgggcaatccatttctcaatctcactgttggtggtttccttaagatcggagctgtcgcagccacgcgatcagctgctgaagatacttatcatattatccaaaaggggaatatctcaagtcatgatttcgagaaaacgttgaagaagatgtgcaaagaaggtgtatattggggaactatagctggcgtttatgttggaatggaatatggggtagagacgattcgttggcacagagaatggaagaatggcatgattgggggtgcagtaactggggccctggtatctgcagccagcaacaacaagaaagaca

SEQ ID NO: 23474 - DNA, 350 bp, Glycine max
  Clone ID: LIB3050-010-Q1-E1-C10
gaaggaaaagtagctgtattcacgaaattgacacatgcatagtatttcaggatcttcttcaacagacagcctgatgagacgattatccacaatgtcaaaatcagctccatcatctgtaatgtccatgcaatgcttcagtaccattgcaagcattcctcccgatcagcagcatatgattttcgccctgaaacaacttgcccatggaatgaccctggacgactacaacatccagaaggaatcaacccttcatcacgtcctcatgctgcgaggtggcatcattgagccttccctcacagctttggctcccacatacaatcacgacagtatgattatgccgcaagtgctatccc

SEQ ID NO: 23475 - DNA, 329 bp, Glycine max
  Clone ID: LIB3050-010-Q1-E1-C11
gaccgtggagatagaaggagcttgagggattcacatcactgtccacagagaaatcgtagattgcgagaaagattctgaatcatgtcgaggacagcctatgtctgagattaacttctgtgtgacaatctatagtaagcatctcagtcatgcggatagcatcagctacaacagggacgtttaggctcatagtaacggattccctcagttgcaacctgacgagatagctgccatcatgaattactttaatgagcctagatcacttgctccaactggattgtatctcggtggcaccaaatatatggtcatccacggtgaaacccgtgctgtca

SEQ ID NO: 23476 - DNA, 320 bp, Glycine max
  Clone ID: LIB3050-010-Q1-E1-C12
gggaactgaaattggtgagcttgatttggcaaatattcgagaactctgtgaccaggttttgtctctctcggaatacagggcgcaactctatgattatctgaagagtagaatgaacaccattgcaaccaatttgactgcaatggttggggagcttgttggtgctcgcctcattgcccatggtggtagcttattaaatcttgcaaagcagcctggtagtactgtgcaaattcatggtgctgagaaggctctctttagggcactgaagactaagcatgctactcccaagtatggtcttatataccatgcttccttggttggtc

SEQ ID NO: 23477 - DNA, 384 bp, Glycine max
  unsure (1)..(384): unsure at all n locations
  Clone ID: LIB3050-010-Q1-E1-C3
gttgatggtaaggctgagagtgaaggtgaagctgaggggatttgtgatgcacaggtcggaggagatggcacatctttgccattgtcagagaggttcctttcatccgtgaaacccctcacaaagcatgtatcagcagtttcatttgttgaagaaatgaaggattcaagggtgttctatggaaatgatgacttctatgtgctttttagacttcatcaagctctttatgagaggatcttatcagcaaaaacacattcaatgagtgcagaaatgaaatggacagcaaaagatgctagttcaccagattcttattcaagatttatgaatgcattgtacaacttgcttgatggatctgccgaanatgccaagtttgaagatgaatgccga

SEQ ID NO: 23478 - DNA, 340 bp, Glycine max
  Clone ID: LIB3050-010-Q1-E1-C4
gattgcattgtgaagtcaacagagaaacatttcactaatagagagacataagcataatattgagaaataatggacggttgtacttattgtgtgaagttgctatgccttgttgggtttgtggtgcttgtgagtactactgcaggggtggacagtgctggtgaatgtgggaaatctaccatcccagataatgaggcttataagcttacaccatgtgcctcagcagcacaagatgagaatgctaatgtctctcagacttgctgtgctcacgtgaagaaacatgggcagaactcaagctgcctctgtgcagttctgctcctcaacacatccaaaatggctggtg

SEQ ID NO: 23479 - DNA, 277 bp, Glycine max
  Clone ID: LIB3050-010-Q1-E1-C5
gattgtccactccaattcaaaccttctctgcaatcacagaggactacataacctatctaaagccatggggaactgcatacttctacaacattacgtcattcgggtcattaacactaatcgcaacatcctagaatacagcgcacacaatcatatcgatcaagtccttatcaactttccgggccacacctcaaccctcaccttaccagtcatacctctagctatgcctttttcatatcacatatcggccagttagtctaccgcgtgcctacgcgtgtac

SEQ ID NO: 23480 - DNA, 261 bp, Glycine max
  Clone ID: LIB3050-010-Q1-E1-C6
ggcagacaacaccaagtctcaccttctcacactcatcatcatacaccccaacccttttccacataggcgtatgcacatggggtgtcatattgaccaagatggtgggtgacccctgtggcacatgctactctttagcgagcactagttacagatgcagaacatgtcatcgaaaaggcaccagacctccatacgcatgtcgacaacattgaggcaaattgtggcttatgcattacagatatcattatgatcctgtatgatgga

SEQ ID NO: 23481 - DNA, 363 bp, Glycine max
  Clone ID: LIB3050-010-Q1-E1-C8
gagggtttagggtagatccgtggctggtttctggaacttttgcatccgaatcgccgtatgttttggcagaagcacatgttctccgcgtcagccatggccgatgacatcgacatcgcggatagagttcctccttcactcgatagcgtgggaaatgtgatcaaagattctggatccaaagggtacaatccaggattaattgtcctcctggttgttggtgggttgttgttgacagatctcagtggaaattatgtgctctacaattacgcacagaataccctctctcctagaaaacagaaccctgtttcatagaacacgatgatcctggagagaacgacacaaggtgtctctgcacctggacagtag

SEQ ID NO: 23482 - DNA, 350 bp, Glycine max
  Clone ID: LIB3050-010-Q1-E1-C9
gaaaggaggtgagtagtgaatagggtttttgattgattgagaattgaaattgatggatcgcagtgtgtcgcgctcacgctctccttcccgcagaagaagatactctccatccaccgtttctcatcatcgccactccagaacttcccacaggcgccgccgaaggcacagaacctcttcctccccctctctttcacgcagccccactcccaagcccaagaaagatcacaagagaagcaagcgtcaccacgaggaagagttgaaactattggaagaagagactgcaagaagactggaagaagcaattcgaaaaaatgttgaggaaaagcttaacacagaggaagtcaagttag

SEQ ID NO: 23483 - DNA, 352 bp, Glycine max
  Clone ID: LIB3050-010-Q1-E1-D1
cgacaagaaggggatctacactcagaaccacattacactggtcaaagtgctacagataactaaccattcacaccacaactccacactacttagcacaattcacttatgctgggattggcagctttgaaatcaactagaacaatcaacagtcgattccgtgtctcacaggtggacgaggaggatgttgaccttcaactacgacagctttgagtcaaaagaatactcacgaatcgacctccttttgagtcagatgaagagtacgtggctctttgcctcagtcagtcttacacataaccgtaacgataacaacacaccaataccgtcgtcctcacagtcacactgataagcctca

SEQ ID NO: 23484 - DNA, 340 bp, Glycine max
  Clone ID: LIB3050-010-Q1-E1-D10
ggaagtttgaaagacaaatacaccatggcagatatcctgagtgaagaacagattgttgattttaaagaggcctttggcttgtttgacaaacatggggatggttgcattactgtggaataacttgccactgttattcagtcgttggatcagaaccccaccgaaggaagagctccaagatatgataagcgaagtggatgcacatggcaacggaaccattgaattcgatgagttcttgagcttgatggccactaaagtgaaagacaccgatgcagaggatgagctcaaacaggctttcacggtttttgacaacgatcaacatggctacataggagctagtgag

SEQ ID NO: 23485 - DNA, 315 bp, Glycine max
  Clone ID: LIB3050-010-Q1-E1-D11
ggtatttgtgagtgtgtgagagagagagcgagcagtttcagacacagagagaggggtttgggattggagggattgacgctgcgtctcttcctcttctccttcgatccatccctcattcctaatcctccaatccaaccacctcagcctcacactcacatatacacatatctgaacgcgtatcgtccctcctatggcttcaaagcgcatcctcaaagagctcaaggacctgcacaaagaccaccaacttcttgcagcgctggtccagtagctgatgacatgtttcattgccaagcaacactcatgggtcctgctgat

SEQ ID NO: 23486 - DNA, 84 bp, Glycine max
  Clone ID: LIB3050-010-Q1-E1-D12
gaagacgacataagggggtatttgtcactgtgttcaaacgacatcgagcattttcacccacagaaataggggttcggcattgaa

SEQ ID NO: 23487 - DNA, 326 bp, Glycine max
  Clone ID: LIB3050-010-Q1-E1-D2
gatcaaagcagctgcggatcatgctggacattcagcacaactggggctttagaagcatcctatgcataagcatttgggaacagtatcgctctttctgagcagcagctagtggactgtgctggccctttcaacaactttggctgccatggtgggttgccatcacatgcctttgaattcattaaatattagtgtatactatagacagaggaagcatatccctacacatgatcagatggtgtctgcatattctcagctgaaactgttgctgttcaagtccttgactctgtgaatatcaacttgggtgcagaacattaacttcaacatgc

SEQ ID NO: 23488 - DNA, 368 bp, Glycine max
  Clone ID: LIB3050-010-Q1-E1-D3
catgagattgttgagcacaatgttagaagtcgtcgtcaccctgttggacatccggggaatcttgttcctgcacagaatctccggtttttactcaagaaccagtcggcaaggaagcaaatgggggtggtaggaagaaagaacgtgcagaagatgtatttgaagcaacagatgtataagaattttgtagaggttattgctacgtgcatgagaagcagataagtgaaagaactgcatggtacttgcaatgcaatgctctcattcgtttactggattgcacaaacccgtgactgtgactttcattgtactactactactgagtccaatttatgagaaagattaccggcacctttgttttctttcacttggac

SEQ ID NO: 23489 - DNA, 413 bp, Glycine max
  Clone ID: LIB3050-010-Q1-E1-D4
caagccttcattcaggcgccaaaaaaacaacagaagggggataaagaaaagggtaacaacgttgaccagatttacagacagcatcacacgttgtcaatgccaatgatgttttctggtttgaacagagagaaggagatgtcagccatgatctctgctttgacacatgtggtttgtggagaagatgagcatcatggtgctgattactctcttcttaatcacaagattaagaatacgaatagtgcagttgttggtgatgatgattttactgtaacatcaaatatggcttctggttctatgccaccttcttctacctgttcatctcaaggtggcaactctgttctcaagagaagacgggaatatgataatacaaatgatttctcacgtggaggttcactccctgctatttcaacaag

SEQ ID NO: 23490 - DNA, 387 bp, Glycine max
  Clone ID: LIB3050-010-Q1-E1-D5
ggataaacacaagcactatcaacaccaccaccaaattaccattatatcaatagccttgttgagaaagagttattgccacttccaaccccttcaattccctaagctttctacaacacaaaacaaactccggagacactatatactaattttagttcttttgcggcttcctgactcgaaattcagagactaatctcttgaggttggaggtatgtggcgccttgtagctgcgttgaccaggaaacttcaaaacacaaagaagggttcaagggtggccgatgagaacatgtttgaggctgcaaatggggtcgagctagtcatgtctcgacacgatagaggaagaagagaccatggttggagtggaatctcacttatatatggcattcttca

SEQ ID NO: 23491 - DNA, 386 bp, Glycine max
  Clone ID: LIB3050-010-Q1-E1-D6
gagtaaaagttcttcaattggaaactgcagctggtgcagcagtaaggttctttgacaaagctattggcattaatgtgcctcgatctcgcttccttcgcgtgaaggcaacttcagacttgcatcttgtcgagtcggacctttacactttacaagatggattggttattaggaaccaatctagggcaaatcctgaaaatccttccattgaattggggccagaatttaagaatgttagcaatttcttgagccggttcaagtcaatccccagtattgttgagcttgacagtctaaaagtggcaggcgatgtatggtttgaacctggtgtaatccttacaggacaagcaagtattcttgcataaccgggtgtgaagctggaaatacctgac

SEQ ID NO: 23492 - DNA, 225 bp, Glycine max
  Clone ID: LIB3050-010-Q1-E1-D9
ggtttcgctttttggttgcacactgtatagccagaggagcgttcgagtgagcgagagaggttttcttctttccggttgttgtcgcggcggaactctagctagtccggtggtgcgagaaagagtgtgtgagagagagagacgatgagtgggaacggcggtggcagccacacaaatggcggcggcaaggcgctgtcggcgacgattccggcgtcatctcggaagatg

SEQ ID NO: 23493 - DNA, 228 bp, Glycine max
  unsure (1)..(228): unsure at all n locations
  Clone ID: LIB3050-010-Q1-E1-E1
ggaggaagcanaccactgcatgctcatccattcattgccggcccacaccagacagagcaagcatagaaagaaatagcacacagagagagagagatagtttatagagagaactgactgaaggagaaagggtttgtctgtctgtgtgaaagagagagagaggatgcatactgagtgccagcccgaccagttagttggtcatacttcggtgaggcagcccgtcctttacca

SEQ ID NO: 23494 - DNA, 412 bp, Glycine max
  Clone ID: LIB3050-010-Q1-E1-E10
cgacctacacgtcagtgcactcctacgtgacgacgcaacgtggcgcggacacggatcattctcggtaggcattataccaggtgcaaccctatacacgaactaatcgcatcctcgatgttctgtgatccatggagttaagtggtccacatgagtgttgctccatgtagactcttttgagaaacatgtgggagctagaggtgattgttctgataatcatgtgagctgtgcagagatggacttcacttggagaatgcacttatgatcctgattatactattggatcctcagacattccaggctattctagctaaagctgcatagcgtgttacaaactttactgactactttcctatatagtacatgccactctcttcctcgggtttcacgtttcaatctcattcttgattttttt

SEQ ID NO: 23495 - DNA, 373 bp, Glycine max
  Clone ID: LIB3050-010-Q1-E1-E11
gatcttaagcttgttctctctctctctcttgttacacattctacattctctctctattatttttcaccctttttctctcttttgcaaagaaaacaatttaattaagtcaatttgtaccaaaatggcttctcaagtttgtgaaactttggctttcatcaacggtgatgatgggttgaaaatcaacggtgctcttctaatgtccctgatggaagagccatcaccaagtgatgagagtgatgatgatcgattggatagcttgattaggtcctttgaggctgaaattagtggaagcaagatgggggatcatcatgattcatcatccatacggttagaaatattgatgagcaataatattatagaagagtgtgcatct

SEQ ID NO: 23496 - DNA, 360 bp, Glycine max
  Clone ID: LIB3050-010-Q1-E1-E12
gacttattaattgtgttaagaaatttaagtgaggagctagagaatgatgatgaagtctgctatgtgtgcagtggtggttgtagcacttcttcttctggcggaggtggggcccatggctgatgctgtgacatgcaccccaacagagttgagtccgtgtcttccagcaatcacttccggtgctaaaccttccaatgcttgttgcacgaagctgaagcagcaaaaaccatgcttatgtggctgcctcaaaaacgctagcttgaagcagtatgttaactctcctaatgcccgaaaaaccgatgcttcttgtgggattcactttccaacttgtcaattaattaagccttcttagaattaaagtgt

SEQ ID NO: 23497 - DNA, 381 bp, Glycine max
  Clone ID: LIB3050-010-Q1-E1-E3
gaacatcatcatcgtcatctacaactagtaacaaagatccaacaagcagatcaatctctctctctgtctcccaatcaaaacagacatgggtttgaaggaggattttgagcagtatgctgagaaagcaaagactttgccaccgactcaatcaaacgaagacttgcttatcctttatggattgtacaagcaggccaccgttggacctgtcaacaccagccgtccgggaatgttcaacatgagggacagagctaaatgggatgcatggaaggctgttgaacggaaatccaaggacgaagcaatgagtgattacatcactaacgtgaaacagctgctggaagcagccggcatgcctgcttgataacattgtcatgccttgctttc

SEQ ID NO: 23498 - DNA, 285 bp, Glycine max
  Clone ID: LIB3050-010-Q1-E1-E4
gtatgccaagagggcctttgttcactggtatgttggtgagggtatggaagaaggagagttctctgaagctcgtgaggatcttgctgctcttgagaaggactatgaggaggttggggctgaaggagcggaagatgatgaggaaggagaggactattcacaaatgaaggttttattaccaatgtaattgtttcgagtaaaaagggtatatgcttcgttacattaccctgaaccagtattgtccgttcctttttgtctttactcctgtgtgatacagttctccattat

SEQ ID NO: 23499 - DNA, 374 bp, Glycine max
  Clone ID: LIB3050-010-Q1-E1-E5
cttcacgagaaaattacatctgctcagctggtgtcaccaacgctgattattataggaaaagttgttgaactatcaccattttggccaattcctacaaaagaagaatcatgtttaatgcaggcatgatggatgttgtcaagaaatattattgtgaagcttggtggcaatgaagggttaccttggtaatgaaagcttgcacagaacaaggggtaatgataaatgtaatttggatctattcaggacgggggaaagtaagcacgctatctgatgtttatggaaatgtagaacttctgccctgcttttgggctatctattggagtgtttggcatgggcagagctgtttcaagaacaattttgaatttccatgttccaga

SEQ ID NO: 23500 - DNA, 66 bp, Glycine max
  Clone ID: LIB3050-010-Q1-E1-E6
cggcgtcacgacatgtctagatccgctcaagtagttacatcagcgctgttggtgacgggaaaagtg

SEQ ID NO: 23501 - DNA, 363 bp, Glycine max
  Clone ID: LIB3050-010-Q1-E1-E7
gagccatggttacaaaaggcctcattgaaccaatttcaaacaccactgtgaaccttgtgaatgcggatttcatagccaagcagaaagggcttcgcataagtgaggaaagagtggttgttgattcatctcctgagctgcctgttgattcaatccaggtacagatatctagcgtggactccaaatttgcgagtgctgtatcagagagtggtcagataagcattgacggaagagtcaagtttggagaaccccacctgacatgtgttggatctttcgatgtggatgtgagcttagaagggaatctaatcctgtgccgacaggtggatcagcccggcatgattggtcgtgttggaaacatactgggtg

SEQ ID NO: 23502 - DNA, 394 bp, Glycine max
  Clone ID: LIB3050-010-Q1-E1-E8
ggcttctaggggtttgaatccttatgctcctaattccttgatgtcaacctcagatcattccctttatacaactggctatcccatgcaggaaattaaaccaaaccttagcttttcagttgatgatgggtttggaaatatatcatatggggttcaagagaatggtggtgggaggcttttgttcccttttggagacatcaagcacctttctgcgggtgttgaagtggaacacattaaagaacgaggaaacaattcaactggatattggactggttggtgaagggtcttcatggcaaggaaattatgagaagaaatattgagaggacatataaaccttcactgttttctttatcttcactgtttcgatctatcctttctcacatggattattatgatc

SEQ ID NO: 23503 - DNA, 376 bp, Glycine max
  Clone ID: LIB3050-010-Q1-E1-E9
ggcgcattgaacgaaaattagggtttgtagtgtagcaggaacaagcagcaatggcgccgaaggtaacacgcaaggttagcagaaaccccgaattgataaggggaattggaaagtactcgaggtcgcagatgtaccacaagaggggcatttgggctatcgaggccaaaaatggtggcgttttacctcgccacgaccctaaacccaaacctgaaacacccgctgaaaaaccacccaaattttaccctgctgatgatatcaagaaccgccttgtcaacaaccacaaacccaaacccgctaagctcacggctagcattactccgggaacagtgttgattcgtcctgctggtagatttacagggaaagacggtactctttt

SEQ ID NO: 23504 - DNA, 276 bp, Glycine max
  Clone ID: LIB3050-010-Q1-E1-F1
ggaaccaaacaacaaatattcatggctttctttattctctccttcctcttccttcttcttgtttcatctgccactgcttgtgatcgctgcttgtatcaatccaaggcttcctatttctccaaagcttctgctctttcatctggggcatgtgggtatggctctttggcactagacataagtggtggacaccttgcagctggtgtggattctctcttcaaaaatggagcaggttgtggtgcctgctttcagataagatgcaagataccaactctatgt

SEQ ID NO: 23505 - DNA, 324 bp, Glycine max
  Clone ID: LIB3050-010-Q1-E1-F10
ggaaatcaacagagaaacatttcactaatagagagacataagcataatattgagaaataatggagggttgtacttattgtgtgaagttgctatgccttgttgggtttgtggtgcttgtgagtactattgcaggggtggagagtgctggtgaatgtgggaaatctaccaccccagataatgaggcttataagcttgcaccatgtgcctcagcatcacaagatgagaatgctagtgtttctcagatttgctgtgctcaggtgaagaaaattgggcagaacccaagctgcctctgttcagttctgctctccaacacagtccaaatgg

SEQ ID NO: 23506 - DNA, 345 bp, Glycine max
  Clone ID: LIB3050-010-Q1-E1-F11
ggctgtgagtgagacaccgatagatagagagcgcggcataacctaaagctatctttcttctctctctgtgtgtgcgcttcaacggcaaccagaagcagccatggccactgcaaggactgtgaatgatgtttcacctcatgagttcgttaaggcgtactcctctcacctcaagcgattcggcaagatggagctgccagagtggactgatattgtgaaaactgcaagatttaaggagttggctccttatgatcctgactggtatcatgtcagagctgcttccatggcaagaaagatctacttgagacgaggacttggtgttggtgcctttcagaggatttatggtgg

SEQ ID NO: 23507 - DNA, 397 bp, Glycine max
  Clone ID: LIB3050-008-Q1-E1-F6
ggacgggacatggagagttacgggtcgggtcatggttcgggtcaccgtccgcacggaggtggccgtaagatggaggttgtgagcggcaaaagccacggttggagttctactaaatcaccggattcaactcaggcgagtgaaatgccgtggagattcggcgatcctgaagcgaagaggaagaaaaggatagcgaagtacaaggtttacggcgtagaaggaagggttaaggctacgctcaagaaaggtcttcgatggatcaagaaaaagtgttctcagatccatggctactagtagaaatactcagaagccagccacgtcaaatgctgacgtgtcagtatctaaatgttgggatgctactcctcatatcatatcacatgcaaagggtcaattctttgtt

SEQ ID NO: 23508 - DNA, 95 bp, Glycine max
  Clone ID: LIB3050-010-Q1-E1-F12
ggctgtgagtgagacagcgatagatagagagcgcggcataacggaggggtatctttcttctctcactgtgtgtgggcttgatcggtaatcagaac

SEQ ID NO: 23509 - DNA, 336 bp, Glycine max
  Clone ID: LIB3050-010-Q1-E1-F2
gatgtctcaaaagatatccctccctttgattgcatatatctgagaatcacccttttattgattcaaactttggaaatctcaatcttcacccttatgattgaaattaacatgaagcatcaaggcaagcttagagtgtttcttccaaatatgataatacttgtaaccatccttctccattcaacaacatggattagtgcacaggaagttgaggatgaaagtgagtttgattacataaaagggagtgagaagggtccctcacactggggggaactgaagaaggaatgggaaacatgtaagagtggcaaaatgcaatctccaattgatttgtcaagccac

SEQ ID NO: 23510 - DNA, 389 bp, Glycine max
  Clone ID: LIB3050-010-Q1-E1-F3
gactcaaaattaaccacaagcataagcacaagcacaagcacaagcacttctctaattccctttcacactctattacagatttcacaagtgcttacacttcaaatggctttggaagctcttcaatcacccaccacagccactccatcgtttagtccctttgaagaaaccagtctcagttacttagagacaccgtggacgaaaggaaagcgttctaagcgtagccgcacggagcaacaactgcaacacccttcatgcaccgaggaagagtacctcgctctttgtctcatcatgctcgctcgcggcggcgccggcagtgtctccaccgccaaacccgctgtctccgacaacaattctgcgccgctatccgccgccaaactgagctacaaatg

SEQ ID NO: 23511 - DNA, 398 bp, Glycine max
  Clone ID: LIB3050-006-Q1-E1-G10
gagtgagagagagagaaggcaagatgtcgaagagaggacacggtgggtcggcggggaacaagttccggatgtcgctgggtctgccggtggcggcgacggtgaactgcgccgacaatacgggggcgaagaacctctagatcatatcggtgaaagggatcaaagggcgtttgtaccgtctcccctcggcttgcgttggcgacatggtgatggccaccgtgaataaggggaaacccgatctgagaaagaaggttttgccagctgtcattgttcgccagcgcactccatggcgccgaaaggacggcgtctacatgtatttcgaagataatgctggtgttattgtcaatcccaaaggagaaatgaaaggttctgctatcactggtcccattggaaaagagtgt

SEQ ID NO: 23512 - DNA, 370 bp, Glycine max
  Clone ID: LIB3050-006-Q1-E1-G11
ggtgattatgacttcaaagttgattacttccaaaagggagcctcaatggatgatgctgaagagagcaagagtgaggatgattatgaacaagtcaactccgaggtgcctatgaatgagtgatgggggaaatggacttgccataatttatgggagaaatgaatgatgaacaggccaacatagccataattttaaacatgatgtaagggttttgccttttaatttcaatttttgtttcggagattttaaatttctgcagttgatccattatgtatatattattttgggatggcacgaacaaagttttggatacgtcattgtccaattgaggcatatgattatgcaattttatttccaaaaaaaatacactcac

SEQ ID NO: 23513 - DNA, 400 bp, Glycine max
  unsure (1)..(400): unsure at all n locations
  Clone ID: LIB3050-006-Q1-E1-G12
gactcacaaataaacataattacttgccttgaggaacgttccagaccacatacagaggtttctctagtgatcttcgttcttctgtggagatcttgttttttcatctcacttttcttctaattaaggaacaagctttccgcagttgaaaaccctagctagctagcttccaccaatttgaatcaccaatggctcgctctttctctaacgtcaaggttctctctgctcttgtggccgacggattctccaacactctcaccaggcgtgggtacgcagcagcgacacaaagcgcaacaagaggaggagctgcctccatcagcagcaagatagctcccaagtcaggggaagacaaggtangaggaggtgctgaaaaggtttcgtgggccccagaccctgtcactgg

SEQ ID NO: 23514 - DNA, 273 bp, Glycine max
  unsure (1)..(273): unsure at all n locations
  Clone ID: LIB3050-006-Q1-E1-G2
gagcattgcatagggagggattattttattccctccattggccgtagcagcagcgttgtgtggcggtgacaaccatggccgactcatctcaagaccttgaccaactcctcgatagtgctttggatgattttcagtccttcaacctcaatcctccccctccaagtggggaagcaagtgcgaacaanaagaaggagagtccttctttggcgtcgggggtgcaaggattgggcatgggtttacccgatttgagaacgaagaaaaaggggaaacaga

SEQ ID NO: 23515 - DNA, 407 bp, Glycine max
  Clone ID: LIB3050-006-Q1-E1-G3
ggggcagagagatggtggtgactactggacttctgatgccggtccattagaggcatttaagaggtttggaaagaagcttgaagagattgaaaagaagcttatagagaagaacaaagatgagacattgagaaaccgctatgggccagctaaaatgccttacactctgcgctatccttctagtgaggagggattgactttcagaggaattcccaacagtatctctatctaaggaccctatggttgcttaagtactggtcctggttttaaataaatgtgaaattgaaggaaccagattccttaatcagttgtgtatgcttaagtcatgtatttggagtggctgaatgtatttgtatttgtcattaataaagagagttgtgttagtataatggaaaccaaaataataaatg

SEQ ID NO: 23516 - DNA, 219 bp, Glycine max
  Clone ID: LIB3050-006-Q1-E1-G4
gatcaagtatttacctgacttggtgggtgattctccctgaaggttacaaaaaacaagtctcaattgggtaggaatgcctgaagaaaacaacggttttaatccatgggttaaggagaactatcccaagaagaataccaagtttgagactcacaacgcccccgttgtgccggaacaccatttcgccctttctgcctgggtgtctaaaaatgttaaagagga

SEQ ID NO: 23517 - DNA, 367 bp, Glycine max
  Clone ID: LIB3050-006-Q1-E1-G5
ggcagttcaattccaatatattccactctctctgtgtatgtccctacctctcccttcaagatgcagatcttcgtcaagaccctcaccggcaagagcatcacccttgaggtggaaagctctgacatcatcgacaacgtcaaggccaacatcgaggacggcgaaggaatccgccctgaccagcaacgtctcattttcgccggaaagcaacttgaggacggccgtacccttgctgactacacgattcacaatgagagtactcttcaccgtgtcctccgtcaccgtggtggcatgcagatcttcgttaagacactcaccggcaagaccataaccctagaagttgaaagctccgacaccatcgataacgtca

SEQ ID NO: 23518 - DNA, 382 bp, Glycine max
  Clone ID: LIB3050-006-Q1-E1-G6
gacccaaaattgaacaagaagtcctgagaaggcatctagaacaaagctctgaatctgattttgaaaactggaacgcgtaaaatgaacggtacccctccctcataaataaaatctactactaaacgctcttctcttctgcaatcaatttgcaaaccagacacaacacaaggacaagaaccagatctctctttctcaaatcaccaagaatagttgaaaatggggctgtctttcacgaagctgttcagccggctctttgcgaagaacgagatgcgtattcttatggtgggtctcgacgccgccggtaagaccaccattctctacaaactcaagctaggagagatcgtcacaaccattcccaccattgggtttaatgttgaaactg

SEQ ID NO: 23519 - DNA, 346 bp, Glycine max
  Clone ID: LIB3050-006-Q1-E1-G7
gacactccctttttaaaaccgttgtcttctcacttcgtcaaaaccaacgaggggcgtccccaagtctcaagccaaccatgtcttccttcaagagcaagtaccaggatgaactcattgccaatgctgcttacattggcaccccagggaagggtatccttgcggctgatgagtcaactggtacaagtcgcaagcgattggccagcattaatgtcgagaatgttgaagcaactaggcgtgctcttcgtgaactcggattcagcacacctggtgcttttgagtgcctcagtggtgtgatcttgtctgacgaaaccctatgccaggagacagcttcaggaaaacccttcgt

SEQ ID NO: 23520 - DNA, 308 bp, Glycine max
  Clone ID: LIB3050-006-Q1-E1-G8
ggaagaagaagaagaagaaagagaagcaaggagaaagagaacggttagaaggccaagaagcatggcttcactcaagaacaagaaaccctaatacccgcttccgttaaatcccaaccaataccaactccttatcaaaagggtaaaatattctcctcctccaagagaccgcagagaggtacattttccgctcttttctcggaaaattgacgctttgtgctcatattgtgcgcgatatcacccaatttaccctgtgcaggggttttatatcttcacactgtagccttttctctctctctctctatctctct

SEQ ID NO: 23521 - DNA, 404 bp, Glycine max
  Clone ID: LIB3050-006-Q1-E1-G9
ggaactatgaactgtgaatatcatcatcacaattaagatgagtagtgcaacaagcaaggcttggatattgtgacagccagtgttggagccgtggaggctttgaaggaccaattgggtgtgagcagatgaaattatatatgctttgaggtgtgctcagaagcacatgaaaaaccatgttagatccttgtctcaagcgttaaagaatgtttcttcttctggtctgttagcaaattaaagggtgagaaggccaaacaggctaaagagtccttgagggctgtcatgtacttaagctgttgcggtcctaactgatcttaaaggagacaactgatttgaaatgaatattgctttatgtgtaaatagagatgatagattgtatgaaaattgtaattccaaacggcaatatt

SEQ ID NO: 23522 - DNA, 345 bp, Glycine max
  Clone ID: LIB3050-006-Q1-E1-H1
gcagttcaattccaatatattccattctctctgtgtatttccctacctctcccttcaacatgcagatcttcgtcaagaccctcaccggcaagaccatcacccttgaggtggaaagctctgacaccatcgacaacgtcaaggccaagatccaggacaaggaaggaatccccccggaccagcaacgtctcattttcgccggaaagcagctcgaggacggccgcaccctcgccgactacaacatccagaaggaatcaagccttcacctcgtcctccgtctccgtggtggcatgcagatcttcgttaagaccctcaccgggaagagcattaccctagaagtcgaaagct

SEQ ID NO: 23523 - DNA, 401 bp, Glycine max
  Clone ID: LIB3050-006-Q1-E1-H10
gaaggatctacatcaacttccatggctagagagatttgtgtctgtgataagtgacaactactatgatgattacattcaatgaatgaaactgtgatagatcatagactacctaataagttcatcaactttcaatctcaactaaattttgaaaggaggatgcagaaagagtttgtgactctgtccacttttcatcaagaggtgaagcaacatttacatcatgaaattccttgtttgttccccgcttggatatatttaaccaaaggtggaggatctgttcatgattattctctctaaggaaagaaaaaaagaaaaagtgatatttgggagtgaaaacattttacttgtggttgggaagaatacaattttaggcaattaaaagaattccggatttttaattttgc

SEQ ID NO: 23524 - DNA, 341 bp, Glycine max
  Clone ID: LIB3050-006-Q1-E1-H11
ggaacatattgtttcagcttataagaggaccaagcaccgagcaattcttttggattatgatggcactatggtgcagcctgggtcgatgagtttaacacctaatgctgaagccgttagcatcttgaacatcttgtgcagggacaccaagaattgtgttttcattgtaagtggaagggagagaaagactcttactgaatggttttcttcttgtgaaaggatgggaatcgctgcagagcatggttattttgtgaggacaaatcgaaatgcagaatgggatacttgtattccagtacctgattttgagtggaaacagattgctgagccggttatgcatttatata

SEQ ID NO: 23525 - DNA, 345 bp, Glycine max
  Clone ID: LIB3050-006-Q1-E1-H12
gcagacctcgcagagcagagcaactaggacgttcatggattatgaatccataactcaggccatggatggcatatgtgcactgtatgaaaggaaactgaaggagttgaacccgaccataagaaatctctcgtatgacattactgatctctacaacttcatagatggtcttgcagacatgagtgccctagtgtatgatagttcaattcacgcttacatgccgcacgatcgacagtggattaagcaacgaactttccaacatctgaagaaattagcacactgattaatcccttaacttttggcaatttaatgtaaagaaaatcgacaatggccgagagcctgtctgtt

SEQ ID NO: 23526 - DNA, 364 bp, Glycine max
  Clone ID: LIB3050-006-Q1-E1-H3
ggcatccatcgtaatcaaaacttaattcacatttttgtttgggttttttcatcacagtgcttttctttccttccttctgagattgctgaagagagaaaagcaaaatcgaaagaactgaattggatttcattggcggagtgaaagtgaagtgttgcgcaaatctgattggcaagaatggcgccagtgtcagctctcgcaaagtacaagctggtgttcttgggcgatcaatccgttgggaaaaccagcatcatcactcgcttcatgtacgacaaattcgacagcacttatcaggctacaatcggtatcgattttctgtcaaaaactatgtatcttgaagatcgaactgttcgactgcaattgtggg

SEQ ID NO: 23527 - DNA, 367 bp, Glycine max
  Clone ID: LIB3050-006-Q1-E1-H4
gcatctcagagattagtcagcctttttgatatgctttcacgcaagtataacaaattagctgaacgcagagataataagctccatattgcaaaaggaaactcagttgaaggaaacaaccttgtagaagatatgtcaactgaattgcacatttatactgacttcttgaggcttgtactagaaataataaatgtaatcctgacttatgcactacctcggaatcctgaggtagtgtatgcaataatgcacaggcaggaagtctttcagccattcaagaatcatccacgtttcaatgaactgattgataacatttataccggaataaattttttcaaaagtcgaatggatgctcaaagagaggatggtgact

SEQ ID NO: 23528 - DNA, 389 bp, Glycine max
  Clone ID: LIB3050-006-Q1-E1-H5
ggcattgtgaaatcaacagagaaacatttcactaatagagagacataagcataatattgagaaataatggacggttgtacttattgtgtgaagttgctatgccttgttgggtttgtggtgcttgtgagtactattgcaggggtggagagtgctggtgaatgtgggaaatctaccaccccagataatgaggcttataagcttgcaccatgtgcctcagcagcacaagatgagaatgctagtgtttctcagagttgctgtgctcaggtgaagaaaattgggcagaacccaagctgcctctgtgcagttctgctctccaacacagccaaaatggctggtgtcaaccctcaagttgctgtcaccatccccaagcgttgcaacctggctaatcc

SEQ ID NO: 23529 - DNA, 342 bp, Glycine max
  Clone ID: LIB3050-006-Q1-E1-H6
ggaagggagaattaggtttttagggtttacaccgagcagcgacacctccctcccgcagtagccatggttctcaaaactgaactatgccgattcagtggtgccaagatctaccccggaaagggcatcagatttgttcgtggtgattctcaggttttcctgtttgccaactcaaaatgtaagcggtatttccacaaccgcctgaagccctcaaagctcacctggactgctatgtacagaaagcaacacaaaaaggacattgctcaagaagctgtgaagaagaggagacgcgctgccaaaaagccttactctaggtccagtgttggtgccactctgggagttatc

SEQ ID NO: 23530 - DNA, 414 bp, Glycine max
  Clone ID: LIB3050-006-Q1-E1-H7
gtacgaggaaaatgtgtccgttgataagaagaagacttatttgatgatggtcggggacggtataaacaagacaattatcacaggcaatcgtagtgtcgtcgatggctggacaaccttcagctccgcaacacttgctgtggttgggcaaggattcgtgggtgtgaatatgaccatccgcaacaccgccggggccgtgaagcaccaagcagttgcacttcgaagtggagcagatttgtccacgttctacagctgcagcttcgaggggtaccaagacacattatacgtacattccctgagacaattctacagcgaatgcgacatctatggcacggtcgatttcatcttcggaaacgccaaggttgtcttccaaaactgcaaaatgtacccacgtctccccatgagtggtcaattcaa

SEQ ID NO: 23531 - DNA, 402 bp, Glycine max
  Clone ID: LIB3050-006-Q1-E1-H8
ggtcaatggatgggataaagattgtacctctctgaatggacaactctatgcagtaggttgcccggatggatgcaagctcactgtatatgatagagcaacagattcatggagaaagtttattgatagcaagcttcatgtgggtaaatttccaactctagtagctgctgcacctgtttcccttaatggaaagctctgcattatccgccacaatatgaacatcagtttagttgacgtttcaagtcctaacaaccaagtggaaagcaatcctcgggacctttgggaaaatattgctggaaaaggtcatcacattcgcaggtctttagttagaaagttatggtcaactataacaaggcgtggttgttcaaaaagttgcattgtttgctgtcaggtgctacaagcctg

SEQ ID NO: 23532 - DNA, 339 bp, Glycine max
  Clone ID: LIB3050-006-Q1-E1-H9
ggtggtttaggtcatgagaggcagggaatattggattggttcaatcttgagttggaatggcgtttgaagactttgatcctatcttcagtaaacccaaagtgaagtgggattctgaaagttgttcttcctcgtgtccctttttccttcatgcctatgcccctgattcttctcaccttgtaattcatgtcaccaatatctacgatgcctgggaaactcgtctttcgctctccatgcttgaggacattgtcagcattattattattctctgttcaagaacattaattttatgatttttgtttataataatatcggttcccttttttgaaaaggaatattgtt

SEQ ID NO: 23533 - DNA, 342 bp, Glycine max
  Clone ID: LIB3050-007-Q1-E1-A1
gctctctgatctgattcaattgaatgggccttaaccttttcgttctccctccatggcaatggctaactctttctctgccgtgatcctccaccgccctcccatcaccgccctcgatcttctcctcatcttcctccataccctcttacagctctcacccgacaaagcaaaaatagcaaacttttttttttcattctgttttcggtttttttttaaggatacaaaaagcagaacgaaaatcgattttgattgtggttccggatacccttttggattccgatggcgtcggtgttcgtgtaccacgtggtgggcgatctgacggtggggaagccggatctggcggag

SEQ ID NO: 23534 - DNA, 375 bp, Glycine max
  Clone ID: LIB3050-007-Q1-E1-A10
gtggtgatcgtattgctcttatatcacgcacacctgaacaaaagcgtgctgctgaaaacttgatccaggcttttataatggcaacctgaattattgaaattctttcccggggtattgaaggtgaaaagtttaattcttgaagtatgttcttgttcctccttattctgttacgttggtcctggagagacaatgttctccagtgtctatcagcttgacacctgcttcttctacaacagtggctaacaagaccgtgcctgaggatccattgctggattcttatgtggaaattatagttcctttccttatgtgtcctcttaatcgactctcaactgggttttatcttactcatctacgatctctctgtcctttcaagat

SEQ ID NO: 23535 - DNA, 384 bp, Glycine max
  Clone ID: LIB3050-007-Q1-E1-A11
gaaggcaccagtaattaataacaagctagctattagttcgattttgtagtaagtgaggtgccaatatggtgaagatagctcttggtactttggatgactcttttagcgctgcctctcttagggcttatttcgcagagttccacgcaactctgattttcgtgttcgctggtgttggatcagccatcgcttacaacgagcttacaaaagatgcagccttggatccaacggggctggtggcagtagctgtggcacatgcatttgcactgtttgtaggtgtctccgtcgccgccaacatctcaggtggccatttgaacccagctgtcacttttggattggccattggaggcaacatcactctcatcactggtttcttatactggattg

SEQ ID NO: 23536 - DNA, 362 bp, Glycine max
  Clone ID: LIB3050-007-Q1-E1-A12
ggaggaagaatgacgacaaagataactttagataaaatgaatagctctagcaggggtctgctctctgaattaatcccgacacgcgttcatgtctgcaaaacatttacccatcactgtcttcgcccatgatatgaatgctttcggtcatggcgtggatgctaatcagataacaaccactcttaagtagtgaccgcattcgatcagatcataaatagtgtgtcactactctgatacaccaactggctatggtgttagcgtagattcgtatctcttgattaggctactcctgatactggtggcacatcaatgcatctgtcgcaggaaaccactgttaccaggtagctcaatggcctatacacatg

SEQ ID NO: 23537 - DNA, 388 bp, Glycine max
  Clone ID: LIB3050-007-Q1-E1-A2
gaaagcaccagtaattaataacaagctagctaataattccaatttgtagtaagttaagtgccaatatggtgaaaataactcctgggaacttggatgaatcttttaaccccgcctcccttaaagcttaattcccaaagttccacgcaactctgattttcgtgttcgctggtgtttgattcaccatcgctttacacgagcttacaaaagatgcagccttggatccaacggggctggtggcagtagctgtggcacatgcatttgcactgtttgtatgtgtctccgtcgccgccaacatctcaagtggccatttgaacccagctgtcacttttggattggccattggaggcaacatcactctcatcactggtttcttatactggattgccca

SEQ ID NO: 23538 - DNA, 360 bp, Glycine max
  Clone ID: LIB3050-007-Q1-E1-A3
cttggggcagaaagatggtggtgactactggacttctgatgccggtccattataggcatttaagaggtttggaaagaagcttgacgagattgagaagaagcttatagagaagaacaacgatgagacattgagaaaccgctatgggccagctaaaatgccttacactctgctctatccttctagtgaggggggattgactttcagatgaattctcaacagtatctctatctaacgaccctgtggttgcttaagtactgttcctgcgtttaaataaatgtgaaattgaaggaaccagattccttaatcagttgtgtatgcttaagtcatgtacttggagtggctgaatgtagttgtacttgt

SEQ ID NO: 23539 - DNA, 415 bp, Glycine max
  Clone ID: LIB3050-007-Q1-E1-A4
aggggttcacattcaggaatccttttcttcagaaaatttgccatcgttgagggaagcgcgagagccttcgttgttcaagatgagagctaagtggaagaagaggcgcatgaggaggttgaagaggaagcgccgaaagatgagacaaagatctaagtaggtgcttgaacaaggagtggagatgatgtgcttttccatctgctaccagcttcatgacattttatgctgtcatagctcttatgatgatcttgaggtctagtggcgaggggagcttccatcttgactttagtttagctttactggtctaaagattgctgttttagtgtgggttaagttatgatattgagagttttgtgttatctaattatgtactggtacgtcttgtatactttttggtctatcttaatagcttaaatat

SEQ ID NO: 23540 - DNA, 395 bp, Glycine max
  Clone ID: LIB3050-007-Q1-E1-A5
gagaccaaacaatactcagaacctgattaatgagattatggcacagtttactggcaaaactttggagcagtggttggtagcaacactgctgattgccttgatgggtggtgcacacgctgttgtgttatgtatcatcgactcaagtcaactatacttgtgtcgtgctgcagttactggtcacaatcctccagtaccagatgagaaatgttgtgcagttactcgtcacgccaatttaccttgcctcagcaaatacaagtctatacgtccttgaattgggatataacccgaatatgctttggccttgcctgttaaatgtggtctccacacccctcctaattgttgactgtactgaagcaattaatgaaagtcttgttcattacaagcacctagtgttc

SEQ ID NO: 23541 - DNA, 399 bp, Glycine max
  unsure (1)..(399): unsure at all n locations
  Clone ID: LIB3050-007-Q1-E1-A6
agggaaagatgcaaccaatgattttgaggatattggtcacagcaccagcgccgtagccatgatggatgagttctatgttggagacattgatacatcaaccatccccagcaaggttaagtacactcctccaaaacaacctcactataaccaggacaagatgccggagttcatcatcaggatcctccagtttctaattcccttgtttatcttgggtttggcagttggtattcgtttctacaccaaatcaacataatcatttaactgcaagagcacatgaatataggcatttgcgatattgtgttggtgttgaaagaccccccagtttgttttaacttttttgtgctgcgatgacgacgggttgctangatatgccatatgaattgtgcctgtttccccttt

SEQ ID NO: 23542 - DNA, 328 bp, Glycine max
  Clone ID: LIB3050-007-Q1-E1-A7
agggaaagatgcaaccaatgattttgaggatattggtcacagcaccagcgccgtggccatgatggatgagttctaggttggagaccttgctacatcaaccatccccagcaaggttacgtacactcctccaaaacaacctcactataatcagaataatgatgccggagttcatcatcaggatcctccagtttctacttcccttgtttatcttgggtttggcagttggtattcgtttctacaccatatcagcatactcatttaactgcttcttcacatgaatatatgcatttgccatattgtgttggtgttgatagagtcccattttgtt

SEQ ID NO: 23543 - DNA, 256 bp, Glycine max
  Clone ID: LIB3050-007-Q1-E1-A8
acccacacgtccaccccgctgcgacaagataacggatcggagggacaaatacatccaatgattttgacgctaaagttcttcttcacgtgtctctagcaattatggctacatgcgattttggatatattgtgacagtgtggattgcagtccgtgctgcatatgctctacatagaccaccttgctatagatagggatggacgtcttgattcagaagcatgatcctatacatttctaatacacttggtcagtctatgtt

SEQ ID NO: 23544 - DNA, 311 bp, Glycine max
  Clone ID: LIB3050-007-Q1-E1-A9
caatgggaatcatatgatacaaccgtgggaggcatcggtttcactaatcttttgtttcgagtacatgatactggtatctacaatggtgtcaatttttgtacaaatatcgttactatgtcagttccacacttacggccggacattgcaaataaatgtcagtcttcacattttacctgcaacgattaggaacttgcatcacctgtctatgtctatgtgcgtccatcttgtagcttctgtaaagaatcgtattcccttgcatcatacacagaagcattatgaaaatttcatgaacgtcatggtccgtgctgcac

SEQ ID NO: 23545 - DNA, 405 bp, Glycine max
  Clone ID: LIB3050-007-Q1-E1-B1
gtcatcaactatgatatgcctgggaatattgaaatgtacactcaccggattgggcgtactggtcgtgcaggaaagacgggtgtggctaccacattcttgactcttcacgactctgatgtcttctatgacctcaagcagatgcttattcaaagtaacagtcctgttccacctgaactggcaaggcacgaagcttcaaaattcaagccaggaactattccagacagaccacctagacgaaatgacactgtttttgcgcattagacagatttttttttgagctagccacttctttagaaggcatcaactattcaactttgcaggtcatatcaagttttctggtgtaatgaacattttgccagtgaggccctagcagcctaatctgctttttgtggttatatggtcctg

SEQ ID NO: 23546 - DNA, 333 bp, Glycine max
  Clone ID: LIB3050-007-Q1-E1-B10
ggatccttctacactaactaaagccgagcagcgagagagagaaaccctagcaaaaatgccggctggtcacggtttgagatcccgcaccagagattccttctctcgtcccttcaggaagaagggtaccatcgccctcaccacatacctcagaacctaccacgtcggcgattatgtcgacgtcaaggttaacggcgccgtccacaagggaatgcctcacaagttctaccatggccgcaccggtcgcgtctggaatgtcaccaaacgtgctgttggggtcgaagtcaacaagcatgtcggcaacagaatcataaggaagacgattcacgtgcgtgt

SEQ ID NO: 23547 - DNA, 372 bp, Glycine max
  Clone ID: LIB3050-007-Q1-E1-B11
ggaaaattgaaggtgaaaatgagggtatgtctgcccctggaagtagaacagtaagagaacctagagttgtagttcagacaaccagtgacattgatatcctagatgatgggtatagatggagaaaatacgggcagaaagtagtgaagggcaatccaaatccaaggagttactacaagtgtacacacccaggatgtccagtgaggaagcatgtggaaagagcttcacatgacctaagggctgtgatcacaacctatgaggggaagcacaaccatgatgttcctgcagctcgtggcagtggcagccattctgttaacagaccaatgccaaacaatgcttcaaaccctaccaacactgcagccactgccataagtc

SEQ ID NO: 23548 - DNA, 371 bp, Glycine max
  unsure (1)..(371): unsure at all n locations
  Clone ID: LIB3050-007-Q1-E1-B12
gatgatatgtgggcaaaaacacttctagaatcgtctgagctagaggaagatgatgcaaagtcattgggatcatcatctccagattcaacaggatcagttgaaacttcgatatcatcccactttggaggaatgagctacccttcgctgtttagttcccggccacaaactacggataaggcaccagcaagccgaggctttacgtatgaaggttatggttctccaataagagaagagcctccgtcatactcatcctctgtcatacaaagacacgagtcatttgagaaccccctagcagggaatggatcacatagttntgggtctcaagatgatgagcacgtttcatctgcanatcctcaacatggaagtgcact

SEQ ID NO: 23549 - DNA, 408 bp, Glycine max
  Clone ID: LIB3050-007-Q1-E1-B3
tggggctcaaatcaaagaagattgatgtgaaactagaacaatcggtcgatttgagctcctcttctgaagaaaataagacatatcaaactccaaatggagagactataaaagcagatcttcattttctatgcacagggaaaccacttggttcaacatggattagagaaactcttctaaagaatgacttggatgctgatggaaggatcaaggtcgatgagcacttgagagtgaagggcaagagcaacatttttgcaatttgagatattacagatgttcaagaaatcaaacaagggatgtatgcaagtgctcatgcccaagtggttgccaagaacctgaagctattgatagagggaggaggcaaagaacgtaagttgggaacatacaaggaacagccacaaatatctatag

SEQ ID NO: 23550 - DNA, 405 bp, Glycine max
  Clone ID: LIB3050-007-Q1-E1-B4
ggaagaaccaaaacctaattagacataaactggccaactgttgggaacatccaaatacattagaatttcctgattcgagcaataataaattgtcaggcaagattccacagtccatgggtacacttgttaatttggaagctttggtcttaagacacaacaattttattggagacctaccattcaccctgaagaactgcactcgtttagatatactagacttgagtgaaaatttgttgtctggtccaataccgtcatggattggacaaagtttacaacaattacaaatcttgagcttgagtgtaaaccactttaatggaagtgttcctgttcatctctgttatttgaggcaaattcatatcttggatctttcaagaaataacttgtcaaaaggaattccaacttgtc

SEQ ID NO: 23551 - DNA, 354 bp, Glycine max
  Clone ID: LIB3050-007-Q1-E1-B5
ggaatcagcatgactacacctaatggacggttcatgacacataaaaagatctgtttgtcaacgagtgactttcatctagaaggttggaatcccatgtggtctgtatcatgcatattaacagggcttctttcattcatgatggataacagtccaaccactgacagtgtcaacaccaccactgttgagaagcatcgtctagcataatcttcgctttctttcaactgtaagaatgctacattcaggaagatcttccctgagtatgtggagaagtacagtcagcaatagctttctgaatatgctgctccacagagggtctcattggatacgtctcccgacaacagttcaaggccagtt

SEQ ID NO: 23552 - DNA, 393 bp, Glycine max
  Clone ID: LIB3050-007-Q1-E1-B7
ggattgaaggcatccaaggagagaaaaatgcacgatttctgcttcacgatcccctacggattgatgttagtgggtggtggactgttcgcctacataagcaaagggagcatcgcttctctcgccggaggcgccggctccggtttgcttctcatcgtcgccggctatctcagtctcaatgctttcggcaaacgaaaaaactcttacctcgctctctttctcgagaccgtttgtgcagccatactaacttgggtcatggggcagcgatatttggaaacatccaagattatgcctgctggtcttgttgctggaatcagtgctctcatgactctgttttatctctacaaattagcaactggtggcaaccatctccccaccaaggctgagtgatgatat

SEQ ID NO: 23553 - DNA, 380 bp, Glycine max
  Clone ID: LIB3050-007-Q1-E1-B8
ggtggcggcgtgtgacagtttgtggcgacgggagagaacgtgtgtgccacgccgtgtaagagtttatgggtgctgcgaaaggagagaacgtgtgtgcctcgccgtcgccggaaatctcgaaggaagtggaccccagccatgcctccgagaccttgcgcatcgtgaccgttatggaggctgctaccctcatgcccgctaactgcaacgcgcgtggcttctacgacgccttcctccgaagcttcatcaacgtcgatcacatccaacgctggaagactttcatgcactgtagttgccaaaccacccagctgtgatcgctatggcacactgcatggacgttccgttgggtccttgggtgagattttatccagggcatgtgctag

SEQ ID NO: 23554 - DNA, 319 bp, Glycine max
  Clone ID: LIB3050-007-Q1-E1-B9
ggaattgactgtggataactcaattcatggtgatcaatcttcaggagaatctataataagtttatgtccgtgtgcaatgtatcactacctcctgctataatttggattggaagttgtctctctttaagttttctcagtttttatatccgatattcctttactataactcaacagcatattgcatctccctgttgggtccaaagatactcaaaagaatcttttccaatttcacaagtatacacattacgtccactgacagatttactttctgctttgctttgcctattttaatcccaagttggttggctgtagtcatata

SEQ ID NO: 23555 - DNA, 333 bp, Glycine max
  Clone ID: LIB3050-007-Q1-E1-C1
ctttgaggtttcaacattgggattcggatgtatgggccttactggagcgtacaatgaccctttccaagaacaggatggcatatctgttatcaagtatgcgttcagtaagggaatcacattttttgatactgcggatgtttatggagccaatgctaatgaacttttggttggaaaggctttgaagcagctgcccagagaaaagattcagatagccacaaaatttgggactgcttcacgacgttttcctgatatgaagatcaagggttcgcctgaatatgtgcgatcatgctgtgaacctagcttgaagcgtcctgatgttgaatacattgatct

SEQ ID NO: 23556 - DNA, 342 bp, Glycine max
  Clone ID: LIB3050-007-Q1-E1-C10
ggcagtactttgttgttcataaatcgctgctgtgtttgtcttagtgtgtttgttattcactatcgtcattcctgttcctcaagctttgtagtgagcagatataatggctgttgaaaggtctggaattgccaaagatgttacggaatcgattggtaaaacccccgtagtatatctaaataaacttgcggatggttgtgttgcccgagttgctgctaaactggagttgatggagccatgctctagtgtgaaggacaggtaactagtttccattgtcatgactattgaatccttgagtttaagttaatgctttcattagcattatgctttgcatggcattttttt

SEQ ID NO: 23557 - DNA, 250 bp, Glycine max
  Clone ID: LIB3050-007-Q1-E1-C12
ggattgatctacttatactatcatatatgtttactatgacgttggctatctttactttgctatcgcttctgctcgtgatgccgtctctgtgacatggaatatcgttcacgagggaggcaggaccttgatctcatactttatttgtgttctgtttgtgatcgttacgttcgtgcgttatggtgatccaggtcatctcttaggtcacatcgtggttctcgctctgttcgcttggactcactcctttgctgcc

SEQ ID NO: 23558 - DNA, 348 bp, Glycine max
  Clone ID: LIB3050-007-Q1-E1-C3
gttggtatcatggaagaaaatcatgagaaccagaacgagttatgacgaatttgagagcagtatgctgattatagctgaattggctaaactgggcatctcatatatccatccatttgcaatcacgggtgttgttggcttcatagggactggacttcctccttctgttgcattaagagctgacatggatgctcttcctatgcatgaaattgtggactgggatcacaatagtacagtacctgaaaagatgcatgcatgcagtcattatgctcatgttgccatgcttcatgatgctgcaaagatcctcaaagagcatgataatgagatccgacgaactgttgtacctgtttt

SEQ ID NO: 23559 - DNA, 395 bp, Glycine max
  Clone ID: LIB3050-007-Q1-E1-C4
aaggggatagatataagggttttaatttatcgcagctttggttttattatgatcgccgtccctttcattacacaatgagcagaaacagtgatgaacctgcgatgactgaagaagcaccaatcagacagtcgcgagcgaacatcttcactttgttccgcaaaatcaattttcaactcactttcctctcacacaaatgtgaagaaccgaagcttgatgctcaagctcaacaggaaggtccgaagcctggccgtgtacagtttccgaaaagccaagtggcgctgattgcttcttcgcctctgcaagctgaatctgatgctgaccactctcccgctgccaagacaaccaatcctcttattctctggcagatttatgcaataggagcgattgcgatttca

SEQ ID NO: 23560 - DNA, 385 bp, Glycine max
  Clone ID: LIB3050-007-Q1-E1-C5
ggcggcacaaagcattcactgtgtcgggtaaggaagaagagaataaagatgagcgacggaggaaaacgataaggtggatgagcgttgccgccgccgccaagaggtcctccgcctcctcacccctctcgccctcgcctcgaacccgtcgatcgcgataagacatgtccgttactgctgcgagtgttcactaatattgggagtcatcattccatggtagattttgccgtcagatgcaaagagcccaaagacgaggttcagatttacacctggaaggacgctactctccgacaactcaccgatcttgtcaaacacattgctccggctgcaaggagaagaaacgccaaactctccttcgcctttgtattcccccacataaatggccgtt

SEQ ID NO: 23561 - DNA, 228 bp, Glycine max
  Clone ID: LIB3050-007-Q1-E1-C6
ggcggcacactgcattcactgtgtcggctatgtaacacgatattcttgatgatcgacggaggacaactatatggcgcctgagcgttgccggcgccgccactaggccctccgcctcgtcccccctctctccctcgcctcgaccccgtcgatcgcgatatgacgtgtctgttactgctgctactgttcactaatattcggagtcactattccatggtacattttgccgtc

SEQ ID NO: 23562 - DNA, 411 bp, Glycine max
  Clone ID: LIB3050-007-Q1-E1-C8
gatagcagcatcatacaaagcattgaattcaaaaacttaagttcattccttgtgttttgctttcttcctcaaaaccaaacatgtcgaacacatgcggcaactgcgactgcgctgacaagactagctgcaccaagggaaacagctatggtgttattgtagagaccgagaagagttacatcgagactgttgtcatggatgttccagcagctgagcatgatgggaagtgcaagtgtggcactaactgcacttgcacggactgcacctgtggccattaaggaatatgtatgaaaatgtaattgccatgtgtttggcaatacaaatatccaaataatgtaatcttcgtatgaataaatgtgtgtgctgttatcctacttcaggtctgtgtagtcatgcagtctgaatcatttcaag

SEQ ID NO: 23563 - DNA, 363 bp, Glycine max
  Clone ID: LIB3050-007-Q1-E1-C9
gagaaggatgatgacacaaactaccatatggatgtgattgctgggcttgccaacatgatggcccgcacttacagcattcctgaggttgacaagcttaaagccaactttagtgctggacggatcattcctgcaattgcaacctcgactgccatggcgactggtcttgtctgcctgtagctgtacaaagttttggatggagggcacaaagttgaacactacagaaacacatttgctaacatggcactgcctctcttttcaatgactgaaccagttccaccgaaaagtatcaagcatcaagatatgagttggacggtttgggataaatggattctcggagacaatcctaccctcaaggaacttcta

SEQ ID NO: 23564 - DNA, 360 bp, Glycine max
  Clone ID: LIB3050-007-Q1-E1-D1
gtgttaacttgtctttctctatctctatcggtcatgggtgcttttgcttttgatgaggaaaactcctccaccgtggctccggcaacactctacaaagctctgacaaaagatgctgacactatcatcccaaagattattggggccatccaaactattgaaatcgttgaaggaaatggaggacccggaaccgtcaagaagataacagctagtgaaggtgaccaaaccagtttcgtgctgcaaaaagtggatgcaattgaccaggctaacttggtatacgactacagcataattggaaggaccgggttgcatgaaagtttggagaacgttacattccaaacaaaggtgggtcctggcactgat

SEQ ID NO: 23565 - DNA, 256 bp, Glycine max
  Clone ID: LIB3050-007-Q1-E1-D10
ggaatagtttaagatggtccactattttattgtttatgctctctatgttgaacatatctatgttttatactaaatgaggtgtcgtgcctgcactgtcataataactcttggaagatttgattactcattagtcgtgtcctcacttaacgatttcttggcagttctcaatgcactatctattttcgcttaccttaactctagcacatactgctatcacagttttcttgtcaattattcatccttgattgttccgggg

SEQ ID NO: 23566 - DNA, 382 bp, Glycine max
  Clone ID: LIB3050-007-Q1-E1-D11
gacctcattcaaaagcagcaacagcagattattcttctttgtttctgttctttcttcatcagccgattcagctttgtccatggccatcgaaccaaaagcagccgccgatgacgtcaagatcgatctcttcgaagacgacgacgagttcgaagagttcgaaatcaatgaagagtgggatgacaaggaagaagggaaggaagtgactcaacagtgggaggatgattgggatgatgatgatgttagtgatgatttttctctccagttgagaagggagttggagagcaacaccgagaagaactaaaccacctgctagttattattgcttgatatgacatgcgctatgtcttgggttgggtgttcgacctcttggaaggagatgaaa

SEQ ID NO: 23567 - DNA, 378 bp, Glycine max
  Clone ID: LIB3050-007-Q1-E1-D12
ggagccagccccgacaatgcggcgtcgtataacggaaacttggttaagcgcgtcttgagtgggagtgggacacccttgaagcccaatgagtcactcgacgttttcctcttcgcgcttttcaatgagaaccagaaaacgggtcccacatcggagaggaactacggcttgttttatccaagtcagaagaaggtttatgatattcagctcacggcggaggcgccaccgtccggagttgggaagagccgggttccggtgagcggtgacgtgacgacgtcgtctaagggccagacgtggtgcgtggcgaatggcggttcttcggagaagaaactgcagaacgctcttaactacgcttgcggagagggtggggctgattgcact

SEQ ID NO: 23568 - DNA, 440 bp, Glycine max
  Clone ID: LIB3050-007-Q1-E1-D3
gcgtccataccgagcgagaagaacaacaaaagggggctccgaaattttgtaacaatggccaaaaacggtggcttccttgtcggaattcttgtcttggccttggacattgctgctggcatacatggaattcaagcagaaattgctcaaaacaaggttaacgacttgaaggtgtgggcacttgagtgtacggatccaagctatgaatctttcaagctacgagttgctgcttccattttcttggtctttgctcatgcaattgctcacttgcttggtcggtgcatttgcatgcaatccaaagaagaatgccaaggagccacagccaatacggttttagcagtgacttttctcattttatcttggatattattagggattgctttttccttgctgatattacgctcctcagccaactcaagatcaagagaatcgtgtgggatatc

SEQ ID NO: 23569 - DNA, 304 bp, Glycine max
  Clone ID: LIB3050-007-Q1-E1-D4
catcacatgctcgaacgctttactaggtttgtaaccaatggtcaccttttgctcgatggggttccgggtgtgtcaaaaccttactattaattcactgggcaagcgttcagcaaaattagccgtaacagttacgcccgatctgtagccagcgacctaattcgtctatgatctatttcagcagaccaatgaatttatacttcgcaacggtcccattttcgccaatttcgtaatggtccatgaaattaaccgcgccacagcacaggtgcacatcgccctgcttgaagccatgcacctcagccaactc

SEQ ID NO: 23570 - DNA, 364 bp, Glycine max
  Clone ID: LIB3050-007-Q1-E1-D5
ggtgacgggtggagcgaaccgtacaaagaagataacgctaacgcgttgtttctggattcaaagacacggagtcaatggttgacccctttttggtcgacgctctccagaaccctcgtcactgcctcaccattttgaggatggagctggacatccagaagtttttgaataatgctgatcagcagcattttgagtttcaacatttcccttcttcctaactccgactggctgcacaccgtgttgctcaacactacaacatgcaaacaatggttcaagataatggcttagatggccatcgaagtaaaattctggtgaggaagttaccacaaagcaagtatcctgtggttcgattatgtgagatacctgc

SEQ ID NO: 23571 - DNA, 409 bp, Glycine max
  Clone ID: LIB3050-007-Q1-E1-D6
gaccctagattgttaagagagctggttctgcatttttcgtgcgtcaaatctcacaatcgataactaaactcatcgcctttattcagaatgtcggaagcaccattcagaccacgagaaaagcttgctgagaagcaaaaatatttccagagtatccacaggcatacctacttgaagggacccatggataagattacatctgtggccataccactggctttggctgcaacatcaatttacatgattggacgagggatctataatatgtcgcatggaattgggaagaaagaatgacctggaaatttctgattgaggacgtttttccacacatagcctccttaatatggactagtggttttctttgcatttatgtttgttctcttaataaaattgcttagttgcagattttgac

SEQ ID NO: 23572 - DNA, 397 bp, Glycine max
  Clone ID: LIB3050-007-Q1-E1-D8
cacatggaagcacttattcttattcaaattcagacctcttctctccactatgcacttctacctactatccatctgcagcaccatcatgtccaactataactttggacttaacccaaacctctaagaacaacatgaaattcccaagtgctatttcttcataccatttgcaaccttttccactttcattgcatggtcaacctcaacaatctgagggaatattaccttcagagaaaaaccttgccttggtggatgttgtcagtgctgccataaccaacgatccttctcttaaggcagcattagaagcagctgtttcctcaatcattggagactctcagaaatcactgccaactttgtaggagtgataatgacccctcttctaagatgtctgcagtatcac

SEQ ID NO: 23573 - DNA, 394 bp, Glycine max
  Clone ID: LIB3050-007-Q1-E1-E1
aggggaaaacttccgggtctaatccccttgcaacatactactaagctagaaagacataaacaaagtgggttgatttagatttgaccaacagcttttgctacctctttgaattttattggaagacatggattgttcatcatggattaacacttccttggatctcagcattaatcctcgcagagttcatgaagaagctgttcccaaggtggtagaaagcaagcttttctctttgggaatgcccaagtttaacgtcgaagaagagtctactagtgacttggaggaggaactgaagccggtgagtgcagaaaacaagaagttggccgaaatgctctcagtggtgtgtgagaattacaacactttgagaagccatttgatggaatacatgaggaaaaat

SEQ ID NO: 23574 - DNA, 377 bp, Glycine max
  Clone ID: LIB3050-007-Q1-E1-E10
gacgatgtggaagaagagttcaatgaccttgttgcagctagtgaatcctccagaaaagtggagcacccgtggaggaacttgttgcaaagaaagtacagaccccacctcaccatggctgtgctgattccattcttccagcaactcactggaatcaatgtcatcatgttttacgcgccggtgttgttcagctccatcgggtttaaggatgattctgctctaatgtcagctgtgatcactggcgttgttaatgttgtggcaacttgcgtctcaatttatggtgttgacaagtgggataggagagcccttttccttgaaggtggagttcaaatggtcatttgccaggctgtaattgcagctgctatacgagcaaagtttgg

SEQ ID NO: 23575 - DNA, 380 bp, Glycine max
  Clone ID: LIB3050-007-Q1-E1-E11
gatggtgagtaataataagagcagaaattcagacaggcttttaaattgatgttatttgcaaatatgtgtctcctaacagcaactgacttgaagcgtatttttgagaaagtggacgtgaatggcgacggattggtgagccttgaggaactgaatcgattgcttcagatgacgggcaattcccaatatagcatagaagagttggaatcacttgtggaaaagaaaagtcttggtttcagtgatttcatgttcttttacaactcaatatcggagcagaacaagggagggagcaaaggaagtgagttggagagcgacctggccaagacgtttgaggtgtttgacttggacggagatggtttcatcacaagccaagaccttgagtc

SEQ ID NO: 23576 - DNA, 380 bp, Glycine max
  Clone ID: LIB3050-007-Q1-E1-E12
gaaggcaccagtaattaataacaagctagctattagttcgattttgtagtaagtgaggtgccaatatggtgaagatagctcttggtactttggatgactcttttagcgctgcctctcttaaggcttatttcgcagagttccacgcaactctgattttcgtgttcgctggtgttggatcagccatcgcttacaacgagcttacaaaagatgcagccttggatccaacggggctggtggcggtagctgtggcacatgcatttgcactgtttgtaggtgtctccgtcgccgccaacatctcaggtggccatttgaacccagctgtcacttttggattggccattggaggcaacatcactctcatcactggtttcttatactgg

SEQ ID NO: 23577 - DNA, 426 bp, Glycine max
  Clone ID: LIB3050-007-Q1-E1-E2
aaaagacgaacaaaagggtcatccactatgaaatgcctgggaataattaaatgttcactcaacgggattggcctactggtccttcaaggaaaaacggtttggcaacacattcttgactcttcacgactctgatgtcttctatgacctcaagcagatgcttattcaaagtaacagtcctgttccacctgaactggcaaggcacgaagcttcaaaattcaagccaggaactattccagacagaccacctagacgaaatgacactgtttttgcgcattagacagatttttttttgagctagccacttctttagaaggcatcaactattcaactttgcaggtcatatcaagttttctggtgtaatgaacattttgccagtgaggccctagcagcctaatctgctttttgtggttatatggtcctgtataa

SEQ ID NO: 23578 - DNA, 413 bp, Glycine max
  Clone ID: LIB3050-007-Q1-E1-E3
aggggatattaccatagacataactttaagaaatcaaagagacaggaagttgagagggaagtgttcacgtctttgagaaatgggtgcttcggcatccgtcacagaaaaatccatccatgaattcatggtcaacgatgctaacggcagagacgtgaacctcagcacctacaaagggaaggttcttcttgtacttaacgtcgcttcaaaatgtggatttacaaattccacttacacccacttaactgagctttacagcatatataaagacacaggtcttgagatactggcatttccatgcaaccagtttctgaaacaagagcccgggagtagccatcatgcagacgaatttgcctgtacaatgtacaacgctgagtatcccacttttggcaacgtacttgtcaatggacctgata

SEQ ID NO: 23579 - DNA, 397 bp, Glycine max
  Clone ID: LIB3050-007-Q1-E1-E4
agacgaacaaaagggggaagtcgccttttgttttcttttcgttcgcatcttctctctctcagaaagatgaatgtggtcgccgcgtatttgctcgccgtcctcggtggcaacaacagcccctccgccgatgtcatcaaggaaatccttggctccgttggagtagaagcagatgaagataggattgaatcgtttttgtctgaagttaagggtaaggatatagttgagcttattgctgccggtagggaaaagttggccacggttccttctggtggtggtggtgctgttgccgtcgccgcagctcctgcgggatgtgctgctgctgctgctcctgctgctgaggcaaagaaggacgaaaaggtggaggagaaagaggaatctgatgatgatatgggtttca

SEQ ID NO: 23580 - DNA, 347 bp, Glycine max
  Clone ID: LIB3050-007-Q1-E1-E5
gaggagggttgggcccaatgcgtcttccacacccaccactgatgaatgatccttttttcccatatgcatgtctcattagtcaaacattaaatttggatacatattccttgtaaggattcaaaccttggttacttgttacctctgttagatccaactccggtcgatactcatgactttttacgtcctttttttttagatttgtcttgggtcttcttatctcttagatttttcattttatgactgatgggcaattacggattttgatttgtaattgtcattggtcctccattggtcgattcaggtagttaaatattctggtggaagatgcgcacgtttctgtagggggt

SEQ ID NO: 23581 - DNA, 392 bp, Glycine max
  Clone ID: LIB3050-007-Q1-E1-E6
agagagtgagggaaagatgatgagatcaatggacttgttcggagagatggacgagcaggtatcgtcgatggcaatggacgtggacgacgtcgaccctctcgagatcttcgccgagggcgtcatcgccgccgacaacaaactcgccgacgccgatttcttcaacaatttccaagacgatttcgatgactctgatatcaactaaaacccctttcttcttcatgggtattctcggggttaaataatttctcggttagggtttcggtattttgtagtttcctcttcattatggagaaggaaatagaaaaaggaaaacaggttgtactttgtttctgggattttcttgttgatatgataatggctctttcgtgattaacaaaacctcaacaaccctg

SEQ ID NO: 23582 - DNA, 401 bp, Glycine max
  Clone ID: LIB3050-007-Q1-E1-E7
gggaatctggaaggcattactattgtgtgaccaagggagtaaattgtccttcaatgcctagaaaagataaatctagacgcgttgatgtgtactactctagttggtgcattagagcagtggaatcaaatagaggtaatggccagttaactgcctgtgaagtcttgctcttccatcatgaagaaatgggcattccatgggagattgcaaagcttggagtaaggaaaggaatgtggggaactgttcagaagattgaacccggtttgcgagcttatcaagaagcaagagcttctagtgctgcactctctcattcagcctttatggcccaagtcaacacaaaaataggccctgagtacttgcaatcgatcgggggcgatgacaattcagcggaagaatgaaagtgt

SEQ ID NO: 23583 - DNA, 406 bp, Glycine max
  Clone ID: LIB3050-007-Q1-E1-E8
gactacaccgagtcgcagaaaaagaaaaaagcgatcatagtttcacttcggccttatccagtttagggtttcggttctctaccctatctttcacgtatcgaaaccttaaatttacgatcaggtctgagcaatctggttggtagaacctttggtcttagtgagtcaagttttatgtctgaattagacgatcaaattcctactgccttcgatccttttgctgatgcaaatgctgatgactcgggtgctgggccaaaggagtatgtgcatattcgtgtacagcagcgaaatggtaggaaaagcctgacaaccgttcagggattgaaaaaggaattcagctataacaagatacttaaagacgtcaagaaagagttctgttgcaatggaacagttgttcacgacccagaac

SEQ ID NO: 23584 - DNA, 371 bp, Glycine max
  Clone ID: LIB3050-007-Q1-E1-E9
ggctgcaattgttgctatatttacagagacagatgcgggagcttggaaaataggactagatacagcattggcttcaatagtttgctctggaatttttggttcatttgtgaacaacgcagttcacacatgggtactacgtatgaagggtcctgtctatgtggcaatgttcaagccactctcaattgccatagctgttgccttgggagtcatgttcctgggtgatacactccaccttggaagtctagtgggagccacagtaatatcgatcggattttatacagtaatgtggggaaaagcaaccgaagagaatgtggacgaagatgtccctggtcagcaatcaccaccaaccacagagaatgttcctctcttgc

SEQ ID NO: 23585 - DNA, 296 bp, Glycine max
  Clone ID: LIB3050-007-Q1-E1-F1
tgggtaatctcaggagattctatgcacaagaggcgtgccactggtggcaagaagaatgcctggaggagaaatagaaagtatgagcttggtcagccaacctgctaacactaagactgtcaagcaacaagacagtcatgacgattcgtgctacacgtggaaatgtgacatggacggcattgacatttgatactggaaattactcctggggaagtgaagctgtaactcgcaagactcgtgtactagatgtggtttacaatgcctcatacactgatcttgtgcgtactcagactcttgtc

SEQ ID NO: 23586 - DNA, 247 bp, Glycine max
  Clone ID: LIB3050-007-Q1-E1-F10
cgacccaagcgtcagtggaggcgtgggcgaaaagacgacaggagggggtctgaaatagaagaagataacaaagatgagcgactgaggaaaacgacaaggtggaagaacgttgccgtcgccgccaagaggccctccgcctcatcccccctctcatccctcgcctcgaacccgtcgatcgctgacagacatgttcgttattgcttcgagtgtacactacgatttggacttcatatcctatggaacactt

SEQ ID NO: 23587 - DNA, 262 bp, Glycine max
  Clone ID: LIB3050-007-Q1-E1-F11
gactcgaagtgtaagcactaagtggttgaggaaatgggaacccttgggagagcgatctacagcgttggtaactggattcgagggactggacaggccattgatcgtcgcggttccctcctccagggcggttactacgtccaacagcagctgtccacgcatcgaactctgatggacatatttgatcacgctcctgttgttgatgatgatgtatttggcgcgccgactgcctccgtcactgcatacgtccaacttggcacaggat

SEQ ID NO: 23588 - DNA, 89 bp, Glycine max
  Clone ID: LIB3050-007-Q1-E1-F12
taccgctgcgagaataccaccgacgggtgtcgctgtcacatgattcccgacgggtatcgctgccataagaccacataatggtaccgctg

SEQ ID NO: 23589 - DNA, 374 bp, Glycine max
  Clone ID: LIB3050-007-Q1-E1-F2
gaacttaacacggtttacacttttcaccttcatccatacgttgttcatctgggttatgcctcctataggcatctaccctccttttgttcttggcttacagcaagtactttagcttaattatctccagcattttatttgtgcgtcatgtggtattcatctctcgatgagttaacacatccgtggatctcaacattaatctcacagggatcattatcaaattctcatataggacgtcgaaaacaactttttgtcaataagtttgcatgtgacgaaatcttccagtcataaagtctctgctgcctttttggcgtatgacttaatgtgtgtaaattcatgctgctctaagttaaccgaaatgctcacagatatgtatg

SEQ ID NO: 23590 - DNA, 361 bp, Glycine max
  Clone ID: LIB3050-007-Q1-E1-F3
acgaaagggaacaagggcacacaaaaaattccaattaccttccaaaactcaacctttcattatatattctccctatatagtattttcttaattaattaatggatagagttaaggacttggcatcaaagaacgctgctgttatatttaccaagagttcatgttgcatgtgtcacagcataaagcaacttttctatgagcttggagcaagcccagcagttcatgagcttgacaatgattcctatgggaaggaaatggagtgggctttgaggggtatgggttgtaacccttcagtcccagcagtgttcatacgtggaaaatttgtgggctcatccaaagatgttatatccctccatgttgatgg

SEQ ID NO: 23591 - DNA, 358 bp, Glycine max
  Clone ID: LIB3050-007-Q1-E1-F4
cgtcaatccgacgtcagtacagagcgaggggagacaggaagggacccaaagtattcttattggcttattcagaatatatcggcctgctcttccgccatagtaaatgcatcatcacatttcacaggcctataacgtgatctttggttgttttatccaaggatcaactctagccgattcaacttcaatatggtcggctgtttgtcacaatgttgaaacttgagaatttgttactccggattcaggaattaaatatgattcgcattacatctttgggtgataaactttaaagaatgcaagggcgaggaagaccatacatgggtgatatggaaggtaataaatagtatggctcataatggaa

SEQ ID NO: 23592 - DNA, 361 bp, Glycine max
  Clone ID: LIB3050-007-Q1-E1-F5
gggaacgatgtaactaacccagtcccgtgacttggctttctggttcgagtcgatgctattctcagagatgcataagggcttgatgcatagctatggccttgctgtaattgtattggccttgagtttgtgtttgggttcatcatcgggacaatgacattcacgagaatgcgagaatctcagtttcatcggacgcgctttgtgctcagagtgcacaatcctctgagaatacttcaaggacagtcagttggtatcggactgtttcaagctgatgcacggaagactgcgaacgatgccactactatggttacttactcgggagctgtcttgagagtctgcatcaggaaacttgttttctatcctg

SEQ ID NO: 23593 - DNA, 401 bp, Glycine max
  Clone ID: LIB3050-007-Q1-E1-F6
ggcatcacaaactatatactaatctccatctaatagtgttaatttgtctttctctatctctatcggtcatgggtgcttttgcttttgatgaggaagactcctccaccgtgactccggcaacactctacaaagctctgacaaaagatgctgacactatcatcccaaagattattggggccatccaaactattgaaatcgttgaaggaaatggaggacccggaaccgtcaagaagataacagctagtgaaggtgaccaaaccagtttcgtgctgcaaaaagtggatgcaattgacgaggctaacttggtatacgactacagcatagtgggagggacggggttgcatgaaagtttggagaaggttacattccaaacaaaggtggttcctggcactgatggtaat

SEQ ID NO: 23594 - DNA, 348 bp, Glycine max
  Clone ID: LIB3050-007-Q1-E1-F7
gagaagaagaaagaaacaaggtgctactgaaggtgagtcctccagtgttggaggtcagggtgaaatatctgcagaagaagctgctgagcaagcagctgtcatgagatcacaaattcacctcttctggggtaatatgcttttcgaaagatcccaagttgaatgcaaattaggaatgactggatggaaggaaaacctggatgctgcaactgaacgctttaagcttgcaggagcttctgaggcagatgtttcgatggttctaaagaatcattgctcaaatggagatgcaaaagatggagatgataaaaaggttgagaacccacagcacaataagactgttaaaccagagat

SEQ ID NO: 23595 - DNA, 410 bp, Glycine max
  Clone ID: LIB3050-007-Q1-E1-F8
ggaagcagtgtagtggtaactcttgtcaatctttccactttgacattgccgacgcctccagataaacaaccttaactttcccacaacaccacccatcattctttttctctctctagatttcatttagttgttgctgtcttcttctgtttgtgtgtgccaacacagagcgaaaaacatggctctgaaccaatcaaaagccgtgttgttgagggtgagtttggtggtggtggcgctcttcatagcagggtacatagtgggtccccctctctactggcatttcgttgaaggtttggctgcggtcaaccactcttcttctacttgtgccccctgcatctgcgattgctcttcacaacccattctttctattccacaaggactgagcaacacttccttcggagattgtgcaaagc

SEQ ID NO: 23596 - DNA, 365 bp, Glycine max
  Clone ID: LIB3050-007-Q1-E1-F9
gagaaacaccgaaaccgaaacccaagcctaaacctaaacatagactgaatttcccaaatcaccttcccaattttcgccatcacctaatactcccaaaccaatcttcgatcatggccgccgaatcacaacctcaactaatcgacgacagaatatatgagcaagaacttaagtacctggaatttgtgcaattcgcgaccatccatgccctgatgcgctgcgccatcctctactcctacgccacagagcacgcgggtcctctgatgcccggcgtcaacaccgtcgaggaggccgtgaagaccgtcgtggctccggtctacgacaggttccacctcgtcaccggcgatgtcctcaaatacgccgatcgc

SEQ ID NO: 23597 - DNA, 324 bp, Glycine max
  Clone ID: LIB3050-007-Q1-E1-G1
ccctgtggatcaattagattcactaaaggcaagaaacgccacaccttttagcaacactagcaatgatgtcaaactaacaacccactgggaaacctttgaatctggaatggaaagctcggatgcttcatccgacaactcgtcttcaacgatagtaacccaagattgggagcagtttgattaaatcttgtacatcatactactgtctcttcatcctttgttcgagattcatatatacattgacaggtcttggtacaaaaacataaccatttaaaatgccagtgttagagctgacgtggacaatctctcaaatatggtgacttccat

SEQ ID NO: 23598 - DNA, 380 bp, Glycine max
  Clone ID: LIB3050-007-Q1-E1-G11
ggagagaaaggctgcttgtctatgaatttgttcctaataagagccttgattacttcatatttgatccagtgaagaaaacacgattggattggcaaatgcgctacaaaatcattagaggtattgctcgaggaattctctacctccatgaggattctcgactgcgaattatacatagagaccttaaagcaagcaacattctcttggatgaagagatgcatcctaagatatcagattttgggatggcaagattggttcacttggattaaacacaagcatatacaaatagagttgttggaacctacggatatatggcacctgagtatgcactacatggtcaattttcagcagaatcagatgtgtttagtttcggtgtattggtt

SEQ ID NO: 23599 - DNA, 366 bp, Glycine max
  Clone ID: LIB3050-007-Q1-E1-G12
gttcgcagaggcacgtgcaagaatgagtggaggagccattacttctaagcagccggacgctcagcaaagtttagagagctaactttacgatacctttattttctgttgaagcatatggtagcacagctcttctcgtaatcttcccgatgcgatgttaatttagctcgaatttgcagaagtctccatccacgagtttgctggcttacgtgaaagtgctcgccacttgtgttcttttagtaatccataattgtaagttaaggtaattacatggagttcttctaaatcctcgtcgagttagaatagatgtatcttacttcagttacctgttgtagcgcctacatcagctactactggcgttattttgac

SEQ ID NO: 23600 - DNA, 419 bp, Glycine max
  Clone ID: LIB3050-007-Q1-E1-G2
ggcgagatcgagtcgtaagcagcgggtaccctaatcctctcctcttcctctctactaatttcagctatggccgacgaagctgtggttgttccagatcccacccagatcgatgtcaagctctttaaccgctggagcttcgacgatattgagattactgacatttctctggctgattatatcggagtggcgacatccaagcacgccacgtatgtgcctcacaccgccggcaggtactcggtgaagcggttcaggaaggcgcaatgccccattgttgagaggctgaccaactctctcatgatgcacggtagaaacaatggcaagaaactcttggctgttaggatcatcaaacatgctatggagattattcatttgttgactgaccagaatcccattcaggttattgttgaagctgttgtcaa

SEQ ID NO: 23601 - DNA, 401 bp, Glycine max
  Clone ID: LIB3050-007-Q1-E1-G4
gtccaaggatatacccgacatcgaaggagatacaaaatttggcatacgttcttttgcaacacgtttaggtaaaaaaaaggtattttggatttgtgtttccctattcgaagtggcttttggagttgtcctcctcgcaggagcatcatcttcttctcccctctggattaaaattattacgggtctaggaagtattattcctgctacaattctctggtacctgaccaaatatgtagatttgtcaagtccagattcgaccagatccttctatatgctgaactggaagttgttgaacgtagcattcttgttcctgcctttaattagataacgatgacactgaagaccaagacaatgttcgtaaagcgtacaacaaaatagtatagatcgtttgcacctaaatttat

SEQ ID NO: 23602 - DNA, 336 bp, Glycine max
  Clone ID: LIB3050-007-Q1-E1-G5
gaagatgatgttgctcatgcatgatcatcatcatcatcatcatatgtaacagatatatacctttcttaaagactagtagtaaaagtgtagcagatttcagtgcatgcatgcgcgtatgctcactaccgagaaattctcgacaattactgtgggatgattataaggagcggtttgctaccgggcacttgcaggaagaatttgctttgtggtttagtaacgatatgaatataagacattatggttacctacggtgatgatgcatctgaaggttattctcgtggcagcagaacatatgtcactagatatcatgtcgaagcttttgcatatcttttcagt

SEQ ID NO: 23603 - DNA, 410 bp, Glycine max
  Clone ID: LIB3050-007-Q1-E1-G6
ggaaatcaacagagaaacatttcactaatagagagacataagcataatattgagaaataatggagggttgtacttattgtgtgaagttgctatgccttgttgggtttgtggtgcttgtgagtactattgcaggggtggagagtgctggtgaatgtgggaaatctaccaccccagataatgaggcttataagcttgcaccatatgcctcagcagcacaagatgagaatgctagtgtttctcagagttgctgtgctcaggtgaagaaaattgggcagaacccaagctgcctctgtgcagttctgctctccaacacagccaaaatggctggtgtcaacccccaagttgctgtcaccatccccaagcgttgcaacctggctaatcgccctgttggttacaagtgtggaccttac

SEQ ID NO: 23604 - DNA, 405 bp, Glycine max
  Clone ID: LIB3050-007-Q1-E1-G7
gaagatgatgttgctcatgcatgatcatcatcatcatcatcatatgtaacatatatatagctttcgtaaagactagtagtagaagtgtagcagatttcagtgcatgcatgcgcttgtgctcagtaacaaaaaattcgcgacaattactgtgggatgaaaatagggagcggtttgctaccgagcacttgcaggaagaatttgctttgtggtttattaatatattaatataacacattatggttacctacggtgatgaagcatctgaatttttttctcgtggcagcagaacagatgtcgctatatatcatgttgaagcttttgcataccttttcagtggagaaaatttaatccgcttcattaccataacgttatcctatatcaaggacacgggtaatcacaaatgac

SEQ ID NO: 23605 - DNA, 407 bp, Glycine max
  Clone ID: LIB3050-007-Q1-E1-G8
ggaaatcgagagaaagagtgaggagagaattacagagcattttccaacacgattacacgaccgaatcaaaccctctctttctctccgaagctgcgtttaatatcttactcgccttagattgttcttctctttcattatactgttctcttttcgatttgagggaacagtacaagagtgtgaggatcggttaacccaactgcacaggtagtcactaaaataatggagtctcacgatgagactggatgccaggctcctgaacgccccattcttcgcattaataattgtggcttctttggaagagcagctaccatgaacatgtgctccaagtgttacaaggacatgctgttgaagcaggagcaggacaattttgcagcatcgtcggttgaaaacattgtgaatggcagttc

SEQ ID NO: 23606 - DNA, 309 bp, Glycine max
  Clone ID: LIB3050-007-Q1-E1-G9
caacggtcccgctgcaacaacacgacataacgggaaccacgaacggttttctgtgtgattctttctccattgtcgtctaacacgtttttcattcgtttctgaaccacgcaatccatcgaccaatgcccacagggttaccgaaggctaactcctccgtagcaccggacgaccagcgatggttgtggacgcagatcactgcggatgcgcaccgtgacaccgagttggagcccacgctggccatctacctctactcggcgatcctctcacactcgtcgctcatacgctcactgtcttttcacctcggaaaca

SEQ ID NO: 23607 - DNA, 445 bp, Glycine max
  Clone ID: LIB3050-007-Q1-E1-H1
gcgtccacgagaagacgacagaaagggaatctctgaagacacaattcacaaccgatacagtttcatctctcctcaaaaatgacaacaatatcaaattgctcccttctcttcctcttcctcttcgcctccaccctccacatagcttccaccctctcaacccccaccaacttcatcaagtcctcctgcagcaccacccagtacccagccctctgcatccagtccctctccgtctacgcctccaccatccagcaagacccccacgagctcgtccagacagccctctccctctccctcaaccacaccgaggccaccaaaaccttcgtcgcaaaatgcaacaaattcagaggcctcaaaccgagagaatacgctgccttgaaggactgcgctgaagaaatcagtgacagcgtcgaccggctcagccggtcgctgaaggaactcaaattgt

SEQ ID NO: 23608 - DNA, 386 bp, Glycine max
  unsure (1)..(386): unsure at all n locations
  Clone ID: LIB3050-007-Q1-E1-H10
gcattgaacttgtagtttccatcaacacattaattttccttgttccgtggtggcacacaccataatctcatggaaaaggaaaacatgctcaaaacgcctccaaaagttccaattcaagatcgaacacccgaacctgaatgcaaaacaccaactccagttcaacaacaagaccccaatgatcataactcctcaaatgaattgcgcaagcctgttaccccagatcgtcttagagtccccaaggcattcaaatacccagaaagatatacaagcccaacagatttgatgatgtcaccagtaaccaaaggccttcttgctagaactagaaggggtggtggtgcggtgttaccacctgngggtaaaaatcgaccaaagattctagacatgcc

SEQ ID NO: 23609 - DNA, 290 bp, Glycine max
  Clone ID: LIB3050-007-Q1-E1-H11
ggtgatagagaatgacgtaaccgtggtccaaaatcattggtgtcccgtggtgaatgcggggttttcttcgcccaagagagtggttgtggttggttacgctcttactactaaaaagattaagagctttttgcagcctaagcttgaaggtttagctaggtaaattattaaccgaaacattcctttcattaatcgcaaaccaaaaaccgctaattaaattcatcatatcttgttccgatttttaatttctttttcaaagaaaataaataaataattcactgaaaatcgtttta

SEQ ID NO: 23610 - DNA, 185 bp, Glycine max
  Clone ID: LIB3050-007-Q1-E1-H12
gggagtagaatggcgaaggagatagtgaaagagcttcttcctctaattcgagtgtacaaggatggcagcgtggagcgtcttctaagctctgaaaacgtggcagcctcccctgaagatccccaaactggagtctcatccaaagacatagtcatcgcagacaacccctacgtctccgctcgcatttt

SEQ ID NO: 23611 - DNA, 412 bp, Glycine max
  unsure (1)..(412): unsure at all n locations
  Clone ID: LIB3050-007-Q1-E1-H2
gacagataaacataattacttgccttgaggaacgttccagaccacatacagaggtttctctagtgatcttcgttcttctgtggagatcttgttttttcatctcacttttcttctaattaaggaacaagctttccgcagttgaaaaccctagctagctagcttccaccaatttgaatcaccaatggctcgctctttctctaacgtcaaggttctctctgctcttgtggccgacggattctccaacactctcaccaggcgtgggtacgcagcagcgacacaaagcgcaacaagaggaggagctgcctccatcagcagcaagatagctcccaagtcaggggaagacaaggtacgaggaggtgctgaaaaggtttcgtgggtcccagancctgtcactggttactacaaaccggag

SEQ ID NO: 23612 - DNA, 343 bp, Glycine max
  unsure (1)..(343): unsure at all n locations
  Clone ID: LIB3050-007-Q1-E1-H3
gagaagaagaaagaaacaaggtgctactgaaagtgagtcctccagtgttggaggtcacggtgaaatatctgcagaagaactgctgagcaagcagctgtcatgagatcacaaattcacctcttctggggtaatatgcctttcgaaagatcccaagttgaatgcacattacgaatgactggatggaacgaaaacctggatgctgcaactgaacgctttaagcttgcangagcttctgaggcagatgtttcgatggttctaaagaatcattgctcaaatggagaatcaaaagatggagatgataaaaaggttagaacccacagcacaataagactgttaaaccaga

SEQ ID NO: 23613 - DNA, 416 bp, Glycine max
  Clone ID: LIB3050-007-Q1-E1-H4
gggctctacgatcatgagcatttccatgggtttaggaccggatggtgagctacgttatccatctcacccccagctgccgagtaatggaaaaactcaaggtgctggggaattccagtgttatgaccaaaacatgctcagctttctcaagcaacatgctgaagcatctggaaatcctctgtgggggcttggtggtcctcatgatgcacctacctatgaccagcccccatacaatggcttcttcaatgatggggcttcttgggagtccacatatggggacttcttcctctcttggtattccaatcagctcatagctcatggagattgcctcctttcattggcatcttcaacttttggtgactctggggtgacaatctatggaaaactcccacttatgcactcttggtatgggactcgat

SEQ ID NO: 23614 - DNA, 407 bp, Glycine max
  Clone ID: LIB3050-007-Q1-E1-H5
ggttctagtgtgtgattgtttgttgttgtaactcgttcttcttcttttgttgttctgtgtttgtgtttgttttttctctcacctgaaaatgtcttgctgcggtggtaactgtggttgcggaagctcctgcaagtgcggcaacggctgcggaggctgcaagatgtacccagacttgagctacactgagtcaaccaccaccgagaccttggtcatgggagtggcacctgttaaggctcaatttgagggtgctgaaatgggtgtgcccgctgagaacgatggctgaaaatgtggaccaaactgctcctgcaacccctgcacttgcaactgaggtgttgggagagcaagcttcaagcagagatagcccttaattacgaataatgataaactattaatgtgtagctaaaaac

SEQ ID NO: 23615 - DNA, 408 bp, Glycine max
  Clone ID: LIB3050-007-Q1-E1-H6
gactacaaattagttttctacttgaatcttcgttatccttctttttttctccttgaactcgaatattcactatggcagatgaggtggttctgctagatttctggccaagtccatttgggatgagggtcaggattgcacttgctgaaaagggtatcaaatatgagtccaaagaagaggacttgcagaacaagagccctttgctcctcaaaatgaacccggttcacaagaaaatcccggttctcatccacaatggcaaacccatttgtgaatctctcgttgctgttcagtacattgaggaggtctggaatgacagaaatcccttgttgccttctgacccttaccagagagctcaggctagattctgggctgactttgttgacaataagatatttgatcttggaagaaaga

SEQ ID NO: 23616 - DNA, 416 bp, Glycine max; identical to SEQ ID NO: 23613
  Clone ID: LIB3050-007-Q1-E1-H8

SEQ ID NO: 23617 - DNA, 365 bp, Glycine max
  unsure (1)..(365): unsure at all n locations
  Clone ID: LIB3050-007-Q1-E1-H9
gaaagcaaaaaataaagaaccctgcctagaaaaaaaatggagtactctaatggattccctagaaaaagagatgtttctcttcaggaacttagcaaaaggcttgctgagtttgctgaagtaagaggatgggatcaatatcacagtcccagaaatcttcttttagctcttgtgggagaggtgggagagctttctgagatcttccagtggaaaggagaggttgcaaagggattgcccaattggagttctgatgataaggagcacttagaggaagagctttcagatgttttgctttatttagtgcgtcttgctgatgtttgtgggctagatcttggacaggctgctctgactaanatagtgaagaatgc

SEQ ID NO: 23618 - DNA, 368 bp, Glycine max
  Clone ID: LIB3050-008-Q1-E1-A1
gagactacagcagattcaaggaacatgcttagaaaactgccaagcccacccatattctctcaaaactttcaaccatgaactgaacaacaacaacaacaacaacagggccacccgtacagacccacctccaaagagatcatttttattaccaattttccgatttcacagagaaaattctttgtgggcatctcttcaaaaatgtcaagcttccccaacacggtggcggaaggccgcaggtccggcaaggcaccggaaaaatccaccttttctcagacttgcagcctcttgagccagttcttgaaggagaaacgtgcttctgctgattccacccttggaattggtggaaaaatggaacctaaagcgaatac

SEQ ID NO: 23619 - DNA, 329 bp, Glycine max
  Clone ID: LIB3050-008-Q1-E1-A10
cagcacgctctacaaagaagaaaccgacgccgatcagtacaacctcgtctttgccaactgccactcgccgcaactcaaagtgaccatggacgttaaatctgccatgtataatctcgacggaaagagcgacgtccgcgactacctctctgccggcagaaccatccttccgagggtttatttcctcttctcgcttgtgtatttcaccctcgcagctctctggatcagcgtcctctacaagaagcgcttgaccgccttccgcatccattacttcatgcctagccgtggttatcttgaaagccctgaatccctttggccaaggcgaaggacaa

SEQ ID NO: 23620 - DNA, 365 bp, Glycine max
  Clone ID: LIB3050-008-Q1-E1-A11
gtctttctccaattttcataagtgcccagttatatctacttaacttcagttcatttttctttggcttactaattagaagtaagaatttttcttttgggaaactgattgaactatgtctcttgttatgatgcagggtcagtccattcctgggttcactttttttattttgtgatatcttttgttgaggaggtggattgagtttaaggatttagttaagggaaacaccgtagaggaaataattttgcacggtacgtaacaagaagggataaaagttggattagttttgtttttatcaattgtgggtttgagatggatcataagagtgcaaagggtgaggatgctgaagttgatcttgaaagtgggtt

SEQ ID NO: 23621 - DNA, 339 bp, Glycine max
  Clone ID: LIB3050-008-Q1-E1-A12
ggaaactttcgggtcttatctccaattgcaacatactaagtgggttggctggtttagatctgagcaacagcttttaattttctacttgcttgaattttattggaagccatggattgttcatcatggattaacacttccttggatctcaacattaatccccgcagagttcatgaagaagttcccaaggaggtagaaagcgagcttttctctttgggaatgaccaagtttaacgtggaagaagagtctactagtgacttggaggaggaactgaagcgggtgactgcagataacaagaagttggccgaaatgctctcagtggtgtgttgagaactacaacac

SEQ ID NO: 23622 - DNA, 332 bp, Glycine max
  Clone ID: LIB3050-008-Q1-E1-A2
ggagaaggagaaggagaatgagaagataccagaacctgtaaaaaagaacgcctcaggtggatcccttgatagagacattgctcttgcagaaatagagaaagagaaacgattgtctaatgtgaaggcttgggaagaaagtgaaaaatccaaggcagagaataaagcccaaaagcagctctctgctgttgctgcttgggaaaacagcaagaaagcagctcttgaagctccgctgagaaaaattgaggaacaactagagaaaaagaaagcagaatatggtgaaaaaatgaaaaacaaaatagccttagttcacaagcaagcaagaggagaagaga

SEQ ID NO: 23623 - DNA, 356 bp, Glycine max
  Clone ID: LIB3050-008-Q1-E1-A3
ggaagtaagagcagcgcacaacgtgttggaagcatgtgctcagacagaaactatggataaagtggttttcacatcctcagctaccgcagttgtttggagagaagatcgcaagaccatggaactagatctagacgagagacattggagtgatgttaatttctgtcgcaaattcaagttatggcatggggtgtcaaagacaatggcagagaagagcgcgtgggccttggcaatggacagaggagtgaacatggtgtccatcaacgcaggcttaatgatggcgcatgatctctccatcaaacacccttacctaagaggagccgctgagatgtacgaagatggggttttcgtgaccgttg

SEQ ID NO: 23624 - DNA, 371 bp, Glycine max
  Clone ID: LIB3050-008-Q1-E1-A5
tacgctggaggtagagtcctctgacacaatcgataacgtgaaagcgaagatccaggataaggaaggtattccaccggatcagcaacgtcttatcttcgccggaaagcagttggaagacggcagaaccctcgccgattacaatattcaaaaggaatcgacgcttcatctggtgcttcgtctccgcggagggatgcagatcttcgtgaagacgctcaccggaaaaacgattactctggaggtggagagttctgatacgatcgataacgtgaaggcaaagattcaggataaggaggggattccaccggatcagcagcgtcttatcttcgcagggaagcagcttgaggatggacgcacgcttgcagattataata

SEQ ID NO: 23625 - DNA, 401 bp, Glycine max
  Clone ID: LIB3050-008-Q1-E1-A6
ggtctcgtggaagtgtaagcaagcaaaaccctagcggcgcctgctttctttgttcgtgttttgcatcaggatggagtctcaggtgaagcacgcacttgttgtcaaagttatgggtcgtactggatccggaggacaagtgacccaggttagagtgaagtttttggatgatcagaaccgtcacatcatgaggaatgtgaaaggacctgtgagagaaggagacattctcaccctactcgagtctgaaagggaagcaagaagattgcgctagatggtctcttttttttggcttgcctccaaattcgaacaaaagcaatatttttcttgatatttatggtagttagtcggtgctaaaggggttatagcaccctatcttattgttttggatctattttcattcgaat

SEQ ID NO: 23626 - DNA, 385 bp, Glycine max
  Clone ID: LIB3050-008-Q1-E1-A7
ggccacgccttgttgaatccctgaagggaattccttgcaaacaagttgcagcggggcttaatttcacagtcttcctcaccagacaaggtcatgtttagacatgtggaaccaacacacatggccagcttggtcatggtgatactcaggacaggccaacccccaaaatgattgaagtccttagctctgttgttcagattgctgcgggaccaagctatatcttatccgtaacagaaaatgggacagtatactcctttggatcaggtgctaatttctgtcttggccatggtgagcagcatgatgagttgcagccacgtcctatacataaattcagagggaaaggtactcatattgttcgtgtatctgcaggggatgaacatgcaatggc

SEQ ID NO: 23627 - DNA, 388 bp, Glycine max
  Clone ID: LIB3050-008-Q1-E1-A8
gacgcaactcaacaacaaaagcctttttttttaaaaaaaaaattcctttaaaaaatgaagaatactatcttcttcgctctctttcttgtttgtgccttcacctcatacctaccttcagccaccgctgatactatcttcgacataaatggtgattttgtccgaaacggtggcacatactacatcttgccagttataagaggagacggaggtggaatagaattcgccgcaacaggaaacgaaacatgccctctcactgtagtgcaatctccccttgaggtctctaagggtctaccactaatcatttcatcaccattcgaaatccttagcatccaagaaggccttattttgaacattgggttcacttttgtgcccccctgtgccctaattc

SEQ ID NO: 23628 - DNA, 381 bp, Glycine max
  Clone ID: LIB3050-008-Q1-E1-A9
gggtttgtggacttggatgagttcatgattgtcatgaatggcatggaagaagaaaaagaagagaaatttggaagtggcgtggagcatgatggtggttacctcatggatgcttttcttatctttgacactgacaagaatggcctgatttcagccaaggaactgcagagagttctgatcaatctagggtgtgataattgtagtcttagagagtgcaagcgtatgataaaaggggttgataagaatggagatgggtttgtggattttgaagaatttcgattcatgatgtaaagtggatttgctaattagagcttgaaatgggtttttgctgtatttcaatattattaatttcttttgttttttctttcttttttctgtacacaa

SEQ ID NO: 23629 - DNA, 263 bp, Glycine max
  Clone ID: LIB3050-008-Q1-E1-B1
gggcctcaggttgacaagagacaacttgcaacgattctttcctaaatccagcaagtatagaaagaaagtgcagcccttttgacaaagggcagaataatgggcaacaacggttactacattgagcccacaattttcaccaatgtcaaagagtgacagcctatcctataagaagacacatttggaccttgtgatgcttctgatgaatttaagactagttaaaattcaatcaagattgccaaaaatagacagtaaggcctagcatc

SEQ ID NO: 23630 - DNA, 379 bp, Glycine max
  Clone ID: LIB3050-008-Q1-E1-B10
gagagaaagagagagaaagatgtcgaagcgtggtcgtggtggttcggcggggaacaagttccgcatgtcgctgggtcttccagtggcggcgacggtgaactgcgccgacaacacgggggcgaagaacctctacatcatttcggtgaaagggatcaaaggccgtttgaaccgtcttccctcggcctgcgttggcgacatggtgatggccaccgtgaagaagggaaaacccgatctgaggaagaaggtcttgccagctgtcatcgttcgccagcgcaagccatggcgccgaaaggacggcgtctacatgtacttcgaagataatgctggtgttattgtcaatcccaagggagaaatgaaaggttctgctatcactggtcca

SEQ ID NO: 23631 - DNA, 274 bp, Glycine max
  unsure (1)..(274): unsure at all n locations
  Clone ID: LIB3050-008-Q1-E1-B12
gggcgaatgacaatgcaatgctcgtgtcgttttggtgtcactgagtcagtctgagtaggaagaggaagccatgggcaacacatcctccatgctcacccaatacgacatcgaagaggttcagcaacattgcaaaaacgcttttacgcaacaggagatagtttctctgtaccaacgcttctgtcagctggatcgcaacaactgcggtttcatcncttccgatgaattcctctccattcccgaattcgccgtcaatcctctctctcagagtttgttg

SEQ ID NO: 23632 - DNA, 339 bp, Glycine max
  Clone ID: LIB3050-008-Q1-E1-B2
gaggtattcagatcatcaactgaagacaatgacattgggccagttgtcgcagagaactcacatgaatttgcgcaagagtagcagcaaaaaccggaatttgcggagctcatgctatcactgggcgcactgggagatggcaaccaatatgaaggtataccctctgcagaggaatgggaggcagcatatttatacatgtcagttgcacagagaatgcgacgtcaacctgacacaacgcagcagagtggcagaaggaagcgacggtcaatgcacatgttagacgaagacatcatgtacattaccactgatgactagacgtgaataacaaacagctagtgactg

SEQ ID NO: 23633 - DNA, 405 bp, Glycine max
  unsure (1)..(405): unsure at all n locations
  Clone ID: LIB3050-008-Q1-E1-B3
gtcttgtcctagaaaaaacgcattattcttttcatctgtctttctttttctttctctctgcctccatcaggaccattcaatttacctcaaaataaacaattttctcttgttatggctcttttggtgtatcttgtgcttttcctagccttcacttatcattcaagtgctctttactgtatatgcaaagatggtgtgagtgatcaaacccttcagaaagcaatagattatgcttgtggaactggagctgactgtacccctattctccaaaatggagcttgttaccaacccaacactgtgaaggatcactgtaactatgcagttaatagctattaccaaagaaagggtaatgctcctggaacctgtgattttgcanngtgctgcacaactaatgcaaatccacctact

SEQ ID NO: 23634 - DNA, 406 bp, Glycine max
  Clone ID: LIB3050-008-Q1-E1-B4
gacgcaattccagggcaataatcagatgatgtcgccgccgcaggacatgttcatgtactggcccaacaagcccttctgaacaaaccgatccacgccgcccattcgcatttgcacggtagcacgagactcaaggtctatgagtgtgcctgtgcgaccacacacagacgattatttatcaagttagcttagctagggcaaagaaagataaaaacattgaagctggaaacgcatgtgtttgttgggtccaccgtctgcaccggttctttttggtgttctgctatgtgacgacgacgacgacgatgacgatccaacggtgcatgtttgttgacctgtcactagtagtagtagcatgtgtacagctattgtatgtaaaatgtagataggtacactactacacgttgttgtc

SEQ ID NO: 23635 - DNA, 337 bp, Glycine max
  unsure (1)..(337): unsure at all n locations
  Clone ID: LIB3050-008-Q1-E1-B5
ggaacaaaggaaggaaagcttagggtcctccagtatgacggtgctcatgcagtgaatggcactggaccaagttactttcctgaggagaccatcgttggtgtcagtcagtgagcaaggtttagacgaatgattggacatgtaattcaaacatctacttcacattacttactgtacaactcatatgctgtctctgctgatgatctgcacanacatanatgctgagcccatgcaaccgatggtgggacttcactcactgcaatagcaaaatgtaaatttttgtattatccacgtatgaatatgtactaacattttcctttgttaacatgttttcctattt

SEQ ID NO: 23636 - DNA, 410 bp, Glycine max
  Clone ID: LIB3050-008-Q1-E1-B6
gacccagagaggaggaagctttgagagagagagggaggagggagagtgttgacgctccatcaagatgggtatttctagggattccatgcacaagaggcgtgccactggtggcaagaagaaggcatggagaaagaagagaaagtatgagcttgggcgtcaggccgcaaacaccaagttatcaagcgacaaaactatccggaggattcgtgttcgaggtggcaatgttaaatggagggcattgaggttggataccggcaattactcatggggtagtgaagcagttactcgcaagactcgtattctagatgttgtttacaatgcctcaaacaatgagcttgtgcgaactcagaccctggtcaagaatgctattgttcaagttgatgctgctcctttcaagcagtggtaccttc

SEQ ID NO: 23637 - DNA, 391 bp, Glycine max
  Clone ID: LIB3050-008-Q1-E1-B7
gggccacgttctttgcagtaatcagaggctcagagactaactcatccttctccattaattttattacttcactttcattggtgaactttctctaaggcaatttgtatgatcatccagatcctctttcaaagattgctcatcactgaaatatatatagcagagggagacaaactcaaaccaaccaaagactaaagaaaagaaaaaaaagagcttccacaatggtaagcgctgcaattgctcgtaacgtcgtcggcgtaataggcaatatcatttcctttggcttgttcttttcacctgctccaactttctatggaattgtaaagaagaagacggtggaggagttcaagccagatccttatatagcaacggtgttgaattgtgcgttttgggt

SEQ ID NO: 23638 - DNA, 402 bp, Glycine max
  Clone ID: LIB3050-008-Q1-E1-B8
gagagaagaaccaatttaaaagaagagcagcggagctaaagaggggagaggagagaggagaagagaagctaaagaaagaaaggagatgggagtggagaagcagttgttgaggtctggcaccggtccgaagccaattcccggtcagaacgtaaccgttcactgcactggtttcgggaagaacggtgacctttctcagaaattctggagcacaaaggatcctggccagaacccattcactttcaaaatcggccaaggttctgttatcaaaggatgggatgaacgtgtgcttggcatgcaaattggtgaagttgctcgtctccggtgctctccggattatgcttatggtgctggtggctttcctgcttggggaatacggcccaactctgtcttggaatttgaaat

SEQ ID NO: 23639 - DNA, 369 bp, Glycine max
  Clone ID: LIB3050-008-Q1-E1-C1
ggacattgagtgttccatccatcccttcttcatcttctacttctatctccctacatactcattcaaacagacatgaaaattatggaatcattagctcttatcttctacagtactcttgttttagctacgatttcagttccagcaactaactccagaatcatccatcaaaaaaacaatgccaatctgattgaagaaacttgcaagcagacaccccatcacgacctttgcatccaatacctctcctccgaccctcgcagcaccgaagcagatgtgacagggctggcacttattatggtcaacgtaatcaaaatcaaagcaaacaatgcattggacaaaatccaccaactgcttcagaaaaaccctgaacct

SEQ ID NO: 23640 - DNA, 271 bp, Glycine max
  Clone ID: LIB3050-008-Q1-E1-C10
gaatatcaaatgcaaacatgcaatggccatcttttagatatgcctcaaagcacctcctctactgcacacgtggaaattccagccactgcaccctcaagtgctaaatctttacacgaaacatttgatccattttcaagctcaaatgcatacaggcaatggccatcttttgaaatttctagtgtcagtgtaccttcttcagttacatctaatttatggcatgatggtgtgtgcaatggagaagaacaagtttctgctatggcagcaaacactc

SEQ ID NO: 23641 - DNA, 383 bp, Glycine max
  Clone ID: LIB3050-008-Q1-E1-C11
ctacctcaaatgcaaacatgcaatggccatcttttgatatgcctcaaagcacctcctctactgcacaagtggaaattccagccactgcaccctcaagtgctaaatctttacacgaaacatttgatccattttcaagctcaaatgcaaacaggcaatggccatcttttgaaatttctagtgtcagtgtaccttcttcagttacatctaatttatggcatgatggtgtgtggaatggagaagaacaagtttctgctatggcagcaaacactcaaccatggaatgcatttgaagattctggtggccatcatcctgtggattcccttagtcaaggattacaattgcacaattttccatcagctgataatcatattttgggtttaaga

SEQ ID NO: 23642 - DNA, 184 bp, Glycine max
  Clone ID: LIB3050-008-Q1-E1-C12
tcaaaggggaactcacgttttgcatcttttaatatgcctcagaacacctcctcaagagaacattctaaagctccaacctctgcaccctcaagatctgctctttattgcacatttctcatttcactgccatctcttaccactgatacgtttcccttcagctctttactctcattttcaatatgca

SEQ ID NO: 23643 - DNA, 382 bp, Glycine max
  Clone ID: LIB3050-008-Q1-E1-C2
gatacaaagttacaactcaaatttctattttcatacaaagttacaatttgttacttacactactacactttagttgttccaacacaagtgtttgtggcaacaactttgatttgaggttctactttttttgtgtaatcaagaatatttaaggtttttatttgatattcgtcgagtcagtccattttttgttttttgagtaaagtgatatcctccgcttcttcattcttaactccaaactttagacgctccaccgtgtttttttgttacctatactacaccctttaagtgtttgtagcaaggacttttgtgtgaggtttgtcataatcaagagatatctaatccttctatttgatactcaattactcttctggtcagcctattt

SEQ ID NO: 23644 - DNA, 189 bp, Glycine max
  Clone ID: LIB3050-008-Q1-E1-C3
gaaaacggaaacggatacggcgacggcgacggtgtttttgtctccgacggtccggtgcttcctccgccgacggagatggagccggaggaaggttacgctcttcgcgagtggcgccgtcaaaatgccattcagctagaggagaaggagaaaagggaaaaagaaatgagattgaagatattgaagaagctg

SEQ ID NO: 23645 - DNA, 390 bp, Glycine max
  Clone ID: LIB3050-008-Q1-E1-C5
ctacctcaaatgcaaacatgcaatggccatcttttgatatgcctcaaagcacctcctctactgcacaagtggaaattccagccactgcaccctcaagtgctaaatctttacacgaaacatttgatccattttcaagctcaaatgcaaacaggcaatggccatcttttgaaatttctagtgtcagtgtaccttcttcagttacatctaatttatggcatgatggtgtgtggaatggagaagaacaagtttctgctatggcagcaaacactcaaccatggaatgcatttgaagattctggtggccatcatcctgtggattcccttagtcaaggattacaattgcacaattttccatcagctgataatcatattttgggtttaagagagtctg

SEQ ID NO: 23646 - DNA, 404 bp, Glycine max
  Clone ID: LIB3050-008-Q1-E1-C8
caatgagttctccaacaagcaatgttgttgttagcaatagtaaccgtggtgatggtggggctgtgaatatggatcatggacgtttctttccaaacacttcttcttcttcttgattgatgaatctgaatctgaatctgattaaagaagaagatgaagaaattaagcacttcattattctccagtaggaacacgggtagcagttttttttgtttttgtttttctttggtccgcatgctgaggctcgaaagtgacataaagcagacagttaggtgctaacttggccagaattgttgaccaaccaatgtaaaatactattattataatagtacactcttctttaggtttttaattacttttattattactactgttatttacttttttttttttttacttttagtttt

SEQ ID NO: 23647 - DNA, 347 bp, Glycine max
  Clone ID: LIB3050-008-Q1-E1-C9
gaaccattggctgacaagatacaagatcttgcacgccactatcctaccattaagtcattgagaagctgtgatttattaccagtcagttgggtgtctgtggcatggtatcctatatatcgaatacccacaggcccaactttaaaagatttagatgggtgctttctaacgtaccatacactccatacacccttgacaggaagtggtcgtactcatgctccaacactggtttatcccagtcagatggatgttgtaccaaagatttctatgcctacttttgcaatggcttcctaaaagttaaaagggtctatttggatgaaaaaaggagttagtgaatctcaacaacttag

SEQ ID NO: 23648 - DNA, 394 bp, Glycine max
  Clone ID: LIB3050-008-Q1-E1-D1
gatgaacgagaagttagatttggagagaatcctccagaaggaaaagcacagaatggtaaattcacataatgcaaatacaaagttgctgcatgactgtgcaatccttcagaagaggcttcgggagtgtactgtaaatttccttgttgaagaggaagataaactaaatatcgacactttgccagctgatgctctggatttaatagcaacatcagataatcggattggtctcttgcttgcagacgcacagctcttggcacaagatgtacaagatactgttgttgctgttgaagagacccgggatataaccacagacaatactgggaaaactcatgatgaattgagaaagatgctggcacatatgtttgttgacaatgccagtttaaagaaacaaatc

SEQ ID NO: 23649 - DNA, 353 bp, Glycine max
  Clone ID: LIB3050-008-Q1-E1-D10
ggagctttagattcttttcccctagattcagccacagttggaaaaaaaaaagttgttcgagatggcacgtacgaagcaaactgctcgtaagtccacaggaggaaaggcacctaggaagcagctcgcaaccaaggctgcacgtaagtctgcaccaactactggtggtgtgaagaagccacatcgttatcgtcctggtaccgttgctcttcgtgaaattaggaaataacaaaagaattacgaacttttgattaagaagctccccttccaaaagctggttccttaaattgctcaagacttcaagactgatttgcgtttccagaaccatgctgtgcctgcattgcaagaagctactg

SEQ ID NO: 23650 - DNA, 337 bp, Glycine max
  Clone ID: LIB3050-008-Q1-E1-D12
gatcatcacaaactatatactaatctccatctaatagtgttaatttgtctttctctatctctatcggtcatgggtgcttttgcttttgatgaggaaaactcctccaccgtggctccggcaacactctacaaagctctgacaaaagatgctgacactatcatcccaaagattattggggccatccaaactattgaaatcgttgaaggaaatggacgacccggaaccgtcaagaagataacagctagtgaaggtgacaaaacagtttcgtgctgcaaaaattgaatgcaatgaacaaggcaactttgtataacaacacagcataattggaaggaacggg

SEQ ID NO: 23651 - DNA, 333 bp, Glycine max
  Clone ID: LIB3050-008-Q1-E1-D2
gatgagtgttttatttataattttcttcttttccttttatcgccgctgactgtcctattaaatttcatactaagtgaccaatcagttaattttgcatagcaaaacatttttaaattcaattaccacatctctactacctttcatttaaattcaaatgaagtcactcggttctcaatagttatgccgctgatacttaagtgagagttgagttagtcaagtaaaactattgtgtaatgtgggattagatacaggggcaacaaaataattcaaaatactaaaatgaccaagaataattttggcattttatgttaggtatgagtatgattgaacacg

SEQ ID NO: 23652 - DNA, 399 bp, Glycine max
  Clone ID: LIB3050-008-Q1-E1-D3
gattgcattgtgaaatcaacagagaaacatttcactaatagagagacataagcataatattgagaaataatggagggttgtacttattgtgtgaagttgctatgccttgttgggtttgtggtgcttgtgagtactattgcaggggtggagagtgctggtgaatgtgggaaatctaccaccccagataatgaggcttataagcttgcaccatgtgcctcagcagcacaagatgagaatgctagtgtttctcagagttgctgtgctcaggtgaagaaaattgggcagaacccaagctgcctctgtgcagttctgctctccaacacagccaaaatggctggtgtcaaccctcaagttgctgtcaccatccccaagcgttgcaacctggctaatcgccctgtt

SEQ ID NO: 23653 - DNA, 392 bp, Glycine max
  Clone ID: LIB3050-008-Q1-E1-D4
gagagggacacgaactcaaaccgtttaagcttctccgagttttgacctacaacactctcgaatcccctcttgtgtgttgtagccgccccgtgaccatcaatggcggaaactgctgtcgacaaatcccaatctctcgctgaggaatattatgtgaaggataagcaaacagctgtagttgaaaaacctgttgaggtcaaagaagttgaaaacccagaggaggctgcttctgaggaacccgttgctgagaaaactgtggaagaaacaactcctgttgcccctgcagttgctcaggaaagcagtgaagtcacccctcctcctgctgaagaaagcactgaagagcaaagtagtggaaatgttgaagaaaactctgacaatgaagatgcagccgaaga

SEQ ID NO: 23654 - DNA, 368 bp, Glycine max
  Clone ID: LIB3050-008-Q1-E1-D5
gatcatcacaaactatatactaatctccatcgaatagtgttaatttgtctttctctatctctatcggtcatgggtgcttttgcttttgattaggaaagctcctccagcgtggctccggcaacactctacaaagctctgagtaaatatgctgacactatcatcccagagattattggggctatccagactaatgaaatcgttgaaggaaatggaggacccggaaccgtcaagaatagaacacctagtgaaggtgaccacaccagtttcgtgctgcagaatgtggatgcaattgactaggctaactttgtacacgactacagcatagttttacggactgggttgcatgatattttggacaacgtcacatt

SEQ ID NO: 23655 - DNA, 408 bp, Glycine max
  Clone ID: LIB3050-008-Q1-E1-D6
actcactcaaaattaaccacaagcataagcacaagcacaagcacaagcacttctctaattccctttcacactctattacagatttcacaagtgcttacacttcaaatggctttggaagctcttcaatcacccaccacagccactccatcgtttagtccctttgaagaaaccagtctcagttacttagagacaccgtggacgaaaggaaagcgttctaagcgtagccgcacggagcaacaactgcaacacccttcatgcaccgaggaagagtacctcgctctttgtctcatcatgctcgctcgcggcggcgccggcagtgtctccaccgccaaacccgctgtctccgacaacaattctgcgccgctatccgccgccaaactgagctacaaatgttcggtttgcaacaaa

SEQ ID NO: 23656 - DNA, 404 bp, Glycine max
  Clone ID: LIB3050-008-Q1-E1-D7
gtagtgaaggatgatggtgcagtcagtagtataagcaaagggaaaccttccaagaaaagtgttgggcatagtgctcacgagaagcaagtctgggtccataaatcttcttcagggtcataaaatatctgcgtcagggcatcattcctgctatggtctccgtataggacgtaattctcaactaattcaggtcaacctgagtctgagcgacttgaaagagcctctgcacaataaagggaatgcaaagttacagacctcgttgacatgattattactgaaaacagattggcattgttaaccatgctgatggatttagacccattacggttcgtgtctccttaaattgaatatttcagtgttgggaaatattgtgtttgggatgtaacggtaaagttcttggtacataa

SEQ ID NO: 23657 - DNA, 401 bp, Glycine max
  Clone ID: LIB3050-008-Q1-E1-D8
gaattcattttcattccacgaaatatggcttcaactcatctgcttcccctagcaaccttcttcttacttctctccgcttcttatctccagattgctggggcggaagcacaaccgttgactagtctcaagcttaactctcatattcttcaggagtctactgctaaagagattaatgaaaatcccgaggcaggatgggaggctgctataaatcctcgtttctccaattatacagttgaacaatttaagcgccttcttggagtcaaaccaatgcctaagaaggaacttagaagtacacctgctatatctcacccaaagacgttgaaattgccaaagaattttgatgcgaggacagcttggtcgcagtgtagcactattggaagaattctagatcagggtcactg

SEQ ID NO: 23658 - DNA, 102 bp, Glycine max
  Clone ID: LIB3050-008-Q1-E1-D9
gaacaacgaaagggggaaacagcatcgtcgaacggagactctccactctgtacatacaattcctgagcctagctctactcgtcacatgcaccggtatcttca

SEQ ID NO: 23659 - DNA, 380 bp, Glycine max
  Clone ID: LIB3050-008-Q1-E1-E1
ggaataagacaaaggaatatgatgatattgctatgaagtatttgttctatgttttatttctccttgttgctggcttttctgtttactcactgatgtatgagcgtcacaagagctggtattcttggattttgtcttcgctcacaagttgtgtatacatgtttggttttattatgatgtgccctcaattgttcatcaactacaagctcaaatctgttgctcatctaccttggaggcaaatgacttacaagtttctcaacaccataattgatgacctttttgcctttgtcattaaaatgccaacactccatcggctttctgtcttccgtgatgatcttatctttgtcatatacttataccagaggtggatttataaagtggac

SEQ ID NO: 23660 - DNA, 387 bp, Glycine max
  Clone ID: LIB3050-008-Q1-E1-E10
gactacaaatcagttttctacttgaatcttcgttatccttctttttttctccttgaactcgaatattcactatggcagatgaggtggttctactagatttctggccaagtccatttgggatgagggtcaggattgcacttgctgaaaagggtatcaaatatgagtccaaagaagaggacttgcagaacaagagccctttgctcctcaaaatgaacccgggttaaaagaaaatcccgggtctcaaccacaatgggaaaaccaattgtgaatcccccgttgctgttcaatacattgaggaggtctggaatgacagaaatcccttgttggcttctgaccctttacagagagctcaggctagattctgggctgactttgtttgacataaga

SEQ ID NO: 23661 - DNA, 226 bp, Glycine max
  Clone ID: LIB3050-008-Q1-E1-E12
tgggatgtctcagagagtgacccgtatgcatcatgtccgatgacgagcatgacttcaattctcacgcggatgcgggggcgtccaacacgtatcctcagcaagctggtaccattcgcacgaatggctacatcctcatctaatccagtccttgcaaggttgtagaggtctctacctcaacgacaggctagcatggacgtgcacagtgtcactctgtttcacttgatat

SEQ ID NO: 23662 - DNA, 404 bp, Glycine max
  Clone ID: LIB3050-008-Q1-E1-E2
tggggacatggaacttagttttaagcagcaacttggccttgcatgtgttgtacttcttttacctgcattgtgtagctcacaggactcttttactgactccagagcaacatattatggtagccctgattgctatgggaatccaaggggagcttgtggctttggcgaatatggaaggactgtgaatgatggaagtgtggcacgagtgtctaggctatggaggaatggaagtggttgtggtgcatgctatcatgcaaggtgcaaaataccacagtactgtgatgaacatggagcatatgtggtggtaacagactatggtgaatgagacagaacagacttcataatgagtccacgcgcctactcgagattgggacgcatcgcggatgcatctgcagagttgttcaaat

SEQ ID NO: 23663 - DNA, 405 bp, Glycine max
  Clone ID: LIB3050-008-Q1-E1-E3
ggcaccgcttgagcagacttaacaacagcacaaagcgggttactgtctgttcaagctaccatctctctctctctttcttagtgcctccttgccagaagttaaaatggcccaagaaactttcctattcacatctgaatcagtgaacgaggggcaccctgacaagctctgtgaccagatctccgatgctgtgctcggtgcatgcttggagcaggaccctgacagcaaggttgcctgtgaaacctgcaccaagaccaacatggtgatggttttcggagagatacaaccaaggccaacgtggactatgagaagattgtgcgtgacacatgcaggaacattggttttgtctctgatgatgttggtcttgatgctgacaactgcaaggtcctcgtcaacattgagcaacag

SEQ ID NO: 23664 - DNA, 393 bp, Glycine max
  Clone ID: LIB3050-008-Q1-E1-E4
gaagaaaggaaagggaaaagaggaaaatggtgtgcataaggaaggcgacggtgaaggaccttctggcgatgcaggcgtgcaacctgttctgcctccctgagaactaccagatgaagtactacctctatcacatcctctcctggccccagctcctctacgtcgccgaagactacaacggccgcatcgtcggctacgtcctcgccaagatggaggaagaaaccaccgactgccacggccacatcacctccctcgccgtcctccgcacccaccgcaagctcggcctcgccaccaagctcatgaccgcagcccagaacgccatggaacacgtgtttggtgccgagtacgtgtccctccacgtgcgcaagagcaaccgcgcggccttcaatttgtaca

SEQ ID NO: 23665 - DNA, 369 bp, Glycine max
  Clone ID: LIB3050-008-Q1-E1-E5
gatgcgacaatggttgtcccccttaggcagtttcgtgttttctcactcaccctcacatccatcagcttccagcagacatggaacgttcactgaacaatcaatactcaagttagccacagagcaaccaatggtatagaaactgacccacttgcattttttctaccacgacatcttataaggcaagaacatcacggtggtgaaaatcatcgagccatcatcgagcaaggtacgtgaagcaactgggtatggaaccacttacatgatggacaatgttttgacacgggtctagagctgagctcgaagcacgtagggagggctcaagggcagtatggcttggcctctttggaggactctggaatgatgatgctc

SEQ ID NO: 23666 - DNA, 354 bp, Glycine max
  unsure (1)..(354): unsure at all n locations
  Clone ID: LIB3050-006-Q1-E1-G1
gtanggagcatgctgaagccaaacaccctaaatctgatgtttatgcttgttttcctcatctcaaaaagtgaacatattggagagtgcaaatggagaaaaactttatatcatcatggcctcttccttaaacctattgacagagatcttccccattttctatctatatgaaatgtgtttttctgtgtttgtaccttgggaatttaggagggacaaggagaggaagactattttattatgatttcccttgatgacaggacaagaaactgtgtgatgcttgtcaaggtgtaactgtttaatgatggttcgtgttaatattaaagtgttacagaaacttaaattccagtcttatcagac

SEQ ID NO: 23667 - DNA, 400 bp, Glycine max
  Clone ID: LIB3050-008-Q1-E1-E7
ggggttgggagaggagagagagtgggagtcagagagcaaagtaaagcagccgattggactttgacagaacagaagaaacacgttcgtttcgtttcgttcccatggcggtctccgtttccgcgtcctccgcgattgcttctttgaactccgaactctccacgcgcttgccaccctcactcgcctccgcatcttcttccgccaagcaatcctttctgcaattcccgtcgtgcgcgcgccttcttcggattagcactccacgcgctcccgctccatcgcgacctcgattccctcctctggttcaagcgaagaaacaaacctataactcgtttgacgatttgcttgccaattctgagaaacctgtgttggttgacttctatgcaacctggtgtggtccttgtca

SEQ ID NO: 23668 - DNA, 407 bp, Glycine max
  Clone ID: LIB3050-008-Q1-E1-E8
ggagttggcggacgttgaagtggggaaggaatacgaactggtgatcacaacctatgcgggactctatcggtaccgtgtgggcgacattctccgagtcaccggtttccacaactcggcaccacaattccacttcgtgcgcaggaagaacgtgttgctgagcattgactcagacaaaacagacgagtcagagttgcaaaaggggattgagaatgcctcaaagcttttatcagagttcaatacaagcgttgtggagtacacgagttatgcagacacaacaacgattccgggtcactacgtgatttattgggaattgttgaccaaggactcgacgaactcacccagtcacgaagtgttgaatcggtgttgtttggagatggaggagtgcttgaactcggtgtatagacaat

SEQ ID NO: 23669 - DNA, 320 bp, Glycine max
  Clone ID: LIB3050-008-Q1-E1-E9
gatataactgttgagaaaggaataccaagattaccaccacaaagcaatgggcggtatactttctgcgcttcttggcggcgacgcggcggcggcggcgtcttcgccggagagttctacttctagagtctcctccttccactcgtcgccgcgctggcagctctacttcaacgagatcaaagataccgataagctcgttgtgatagatttctcggcgtcgtggtgcggtccttgcaaattcatagagccagcgattcacgccatggccgacaagttcaacgacgttgaactcgtcaagatcgaagttgacgaattacctgatg

SEQ ID NO: 23670 - DNA, 311 bp, Glycine max
  Clone ID: LIB3050-008-Q1-E1-F10
atagcaatgaggtttttgttatgagacccaaggccaaggataccatgcgtcccaagatttttcaatcacctgctgccgcggctgctgcggcttctgttacttctgcttatgtattgtctaagtctgagaagttggatttcatgcaactggatgatataaattccaagttatctgtaaatggtcatcataaagatgatgtggtggataaagttaaagccattaaaaaagaaaaccggtaattggaattgccatttccaaaattcagggttaaaattccaaaccttggaggcaaattaaagaaattaattata

SEQ ID NO: 23671 - DNA, 384 bp, Glycine max
  Clone ID: LIB3050-008-Q1-E1-F11
gaacgctagaaagaatgtaactaaaactattctaattgcgtctcagtttctctcaggttggcttcccctctcccctatcgctctctccctaatcgcatctcaacttgtcgtcgtcggtgattcattctccctaatcataaccctaatcgcatcttaaatcgaactcaatcagagacaaaacaaagttgttgattctgttacaaaacatagcacggtggacaaacgttaaacaaggctacagatctttgattcagttgaaagcagattgaaggggagtaaaacaggaacagagcaacctgcagaattactctatcaaggtgccataaacttgctatatccgtgtctccaatctctttgaaccgtgagagaacagccatggacaga

SEQ ID NO: 23672 - DNA, 151 bp, Glycine max
  Clone ID: LIB3050-008-Q1-E1-F12
acccacccgtccagcccatcaaccattcttgtgtcacttgccttcaatgaccctgggtcaggtattgttcctgctgctatctccctgctaccactttcgagcgagtacgtgatcccacacctgggactggatctggaacatcggttctcaa

SEQ ID NO: 23673 - DNA, 159 bp, Glycine max
  Clone ID: LIB3050-008-Q1-E1-F2
gaacaaaacaagtgtttcgaatagattatcctaagtctttgggaatagtgctgcaatggcttcaagtcaggaagaggtgacccttttgggagctactggaagcccatttgtgtgcagggttcatattgccctcaagttgaagggattcaatacaaatat

SEQ ID NO: 23674 - DNA, 324 bp, Glycine max
  Clone ID: LIB3050-008-Q1-E1-F3
tacggctgcgaaaaaccaccaaaaggttccgcctccaaaaaaccaccaaaaggttccgcctccaaaaaaccaacaaaaggttccgcctccaaaaaaccaacaaaaggttccgcctccaaaaaaccaccaaaaggttccgcctccaaaaaaccaacaaaaggttccgcctccaaaaaaccaacaaaaggttacgcctccaaaaaaccaacaaaaggttccgcttccaaaaaaccaactaaaggttacgcctgaaaaaaccacccaaagggaaatttctccaaccaaaaaaaaaacaccacaaaaaaaaaaaaaaaccgccgctct

SEQ ID NO: 23675 - DNA, 407 bp, Glycine max
  Clone ID: LIB3050-008-Q1-E1-F4
gatgtccccacttatctaacccagtaaacgtggaacacacctgacacctgatccgcgagcgagggtttgtgaagatgacgacgattcgcaggttttgctgcaacgattttcttcgctttgccgccgtcaatctcgaccatctcaccgaaacattcaacatgtccttctacatgacttatcttgcaagatggcctgactatttccacgttgccgaaggccctggaaatcgaatcatgggttacattatgggtaaagttgaggggcaaggagaatcttggcatggccatgtaactgcggtgaccgttgctccagagtatcgaaggcagcagttagccaaaaaacttatgaatctgctggaagacatcagtgacaatattgataaggctttttttgttgatctctttgtg

SEQ ID NO: 23676 - DNA, 392 bp, Glycine max
  Clone ID: LIB3050-008-Q1-E1-F5
ggaaggcaaattcgcggcctcgagtcttttctttttctgtatcgtttttactttccatcacttccattttccgtcatcatggaggatgctgctgcttctgctaatgtgttggaagccaaagatggaactatttctgttgcttcatctggcaaggtatgattgatactttctgcttcatctgcaactgtccagcatagagaccacaagatccacacaaggccagtgttggggagacttgaggggagtaaacaccggatagatttatccctgtggagggaccacgtaaagaaacctgatattacactttaatcaaaaaccttatgactcaaatttataagttttcttcttacttatatggtgttcaatcttttcacttctattcgatgcgggaa

SEQ ID NO: 23677 - DNA, 409 bp, Glycine max
  Clone ID: LIB3050-004-Q1-E1-E8
ggaacaaaacaagtgtttcgaatagattatcctaagtctttgggaatagtgctgcaatggcttcaagtcaggaggaggtgacccttttgggagctactggaagcccatttgtgtgcagggttcatattgccctcaagttgaagggagttcaatacaaatatgtcgaagaaaatttgaggaacaagagtgaactgcttctcaaatccaacccagttcacaagaaggttccagtgtttattcacaatgagaagcccatagcagagtctcttgtgattgttgaatacattgatgagacatggaagaacaaccccatcttgccttctgatccttaccaaagagccttggctcgtttctggtccaaattcattgatgataaggtttttggtgctgcatggaaatccgttttcac

SEQ ID NO: 23678 - DNA, 395 bp, Glycine max
  unsure (1)..(395): unsure at all n locations
  Clone ID: LIB3050-004-Q1-E1-E9
gagaataaggttaaataaattctcgtagcagcgttttgtttcccatcgcccccttttgctctccctctgtgcagacatggtacagattcgtttctttgttttctgttttctgtttcctgattttcgtttgagtggtgaaaattgggtgggttgtggtggcagttgttcttctcgtacttcaaggatttggtggggagggaagtaatcgtggagctgaagaacgatttggccatcaaaggaacattgcattctgttgatcagtacctcaacatcaagctcgaaaacactagcgtcgtcgatcaaganaagtacctcacatgctttctgtaaaaaactgcttcatcagaggttcggtagtgagatatgtgcaattgcctccagaaagggtggacatt

SEQ ID NO: 23679 - DNA, 238 bp, Glycine max
  Clone ID: LIB3050-004-Q1-E1-F1
gaccaacaaactaacaatttaacaactatccttgccccatttgaacgtccaaaatgccatcctccaaacactggaagacattccggaacacatgaaacttatggctactgcgggaaacccatttgggtgcagggtccagattgcacttaagttcaaaggagttgaacatcaaattctggaatcacaattgggcaacaatagtgacatgcatcacaacaatcatcctgttcacaacaac

SEQ ID NO: 23680 - DNA, 388 bp, Glycine max
  Clone ID: LIB3050-004-Q1-E1-F10
gtagcagggtggacaccactgagagacttttatcatctgaccggagatcatcaagtgtcgctaacccattagggtaagagtcgtattctttctcaccactaccacgagccatcgccttccatgctcattcacaagatgacactcagtataccatcacgtgccaaattctgtcactttcaatgtgtaactcactccgcacagacttacctgcaacagcctagaagttccaagcatcacgtactacttttctaacgacaaaggccagactcatgcgtattcggaggatgttatcgaatgccggcttgtgtccaatccctggatagatacagttaatagtggacctggatgatcacatgtttgctacaccctgtcctacatagctgaccac

SEQ ID NO: 23681 - DNA, 409 bp, Glycine max
  unsure (1)..(409): unsure at all n locations
  Clone ID: LIB3050-004-Q1-E1-F11
gggaaatctgagtggtgatccttacatagttcatactaatgtgtacacacaaggcaagggtaatagggagcaacaattttatctttggtttgacccaactgcagattttcacacctattcctttctctggaatcctacacatgttgtattctatgttgatggaagaccaattagggagttcaagaacttggagggagtgggtgttgaatacccaaagaagcagcctatgaggttatatgccagtctatggaacgctgatgactgggcaacgagaggaaggctagtgaagacagattggagtcaagcaacattcactgcttctttcaggaacttcanagccaatggttgcgtttggtccaatggggtttcttcatgcaactccacctcctcttctgaaaaagcttggcta

SEQ ID NO: 23682 - DNA, 240 bp, Glycine max
  unsure (1)..(240): unsure at all n locations
  Clone ID: LIB3050-004-Q1-E1-F12
ggaaattctttattcataccattttcgttgggcttcagttttcatagagagagaaagagaggaagaggaaatgggagtgctgtccaatatgatcgatcgggaacaactgaagcccggtgatcacatttactcttggaggcaagcgtacatctatgcacaccacggaatatatgtcggtgatggaatggtgatccactttaccagangagcangtcaagaaattggaacaagaactgtgtt

SEQ ID NO: 23683 - DNA, 358 bp, Glycine max
  Clone ID: LIB3050-004-Q1-E1-F2
gacagacaaacaaacaatttaccagctatacttgttccttttgaaggttagaagtgctacaatacaaacaatggcagctactcaggaagatgtgaagcttttgggtattgtgggaagcccatttgtgtgcagggtccagattgcccttaagttgaagggagttgaatacaaatttttggaagaaaatttgggcaacaagagtgatttgcttctcaaatacaaccctgttcacaagaaggttccagtgtttgttcacaatgagaagcccatagcagagtctcttgtgattgttgaatacattgatgagacatggaagaacaatcccatcttaccttccgatccttaccagagagccttg

SEQ ID NO: 23684 - DNA, 356 bp, Glycine max
  Clone ID: LIB3050-004-Q1-E1-F3
ggcaaatttgagttatctggaattccgcctgcgccgagaggtgttcctcagatgaccgtttgctttgacattgacgccaacggtatattgaacgtgtctgcggaggacaaaaccactggacataagaacaagattacaattaccgacgacaaaggaaggctttctaaggaggagattgagaagatggtgcacgaagctgagaagtacaaggctgaggatgaggagcataagaagaaagtggaggccaaaaatacattggagaattacgcctataacatgatgaacacaattaaagatgataagattgcttccaagctgtctgctgatgataagaagaatattgaggatgcaattga

SEQ ID NO: 23685 - DNA, 63 bp, Glycine max
  Clone ID: LIB3050-004-Q1-E1-F4
gagtgctgcgctaacacggcagtagggctccggttacagcatagccatcagtgtggcagcatc

SEQ ID NO: 23686 - DNA, 427 bp, Glycine max
  Clone ID: LIB3050-004-Q1-E1-F5
aggcgtcagtacagcagcgaaaggagtactgaatggggctgctcctagacgaccttcgaccttcctaacgtgatcggtcacttgctctcgcagcaattccgccttgtacatcagtgagaagttcctatctgcaaaagcatctgcaacaccttaagattctcactgatgattgggcacacgtatctgtggttgatcctttgcttgatggatttatcatgcgaaattctgtcatcattctcctttagactaatcagaagtggtctaaacaagacatatctatatcatgatagtatcagagcagctagagtgctacgagaaagtcaaacattacgtagaggtctgttgtgttcgtatgatcagcatccttgcaaacgaaataaccaaggacatactaccatgtaaaaattatgtgcatgctcatcattat

SEQ ID NO: 23687 - DNA, 333 bp, Glycine max
  Clone ID: LIB3050-004-Q1-E1-F6
ggtgtctgaaatcactttaatggcagacatggagtcaaggcccaaaaactcaccatgagatacaaaatgtgaaaactccaagcatttttgaacgagctaaggaggagattgatgcattgtatcatcgctacaaatcgcgacactatcacaaagagactcatggggcaagtgatgacatatgaagagggaacttcacctgatgaaatcagagcgcctgatgtgtttgaacgggtgaaggatgatattgaatctgttgctgaggccattcatcccatgatagaatctgaatcaggcattcgtgaagtgtcgtcacaaagttatgtctaggatctg

SEQ ID NO: 23688 - DNA, 413 bp, Glycine max
  Clone ID: LIB3050-004-Q1-E1-F7
ggcaccaatattatccaaattcgtgagagctaattcaatcaaaatgcctcccaaatacaagctagtgctgttgatagcattggttttggttgcaacctcccttgctggtcgcacaaaggaacatcctaagcatcctccatcccttcaagaacaacaacacaccccacaccttgatagctacccgcataaacacataccacctcatcctgtacatggtgccggggaggaaccaacctccattccacgaaagaagggaccaagaaggcccccgaactgataagtgagtcaaaggtttccgattgtgcatgcgtcagatggtttaactttgactcgatctctaccaccacaacatcacgatatgttgttacaaccataatcgcaatttgaaaccttgggctagctaaaactatttt

SEQ ID NO: 23689 - DNA, 375 bp, Glycine max
  Clone ID: LIB3050-004-Q1-E1-F8
agaaggggtctagctgtgggtgtggaagcagctgcaactgtggcagcaactgcggttgcaacaagtactcttttgacttgagttacgttgagaagacaaccacagagactctagttttgggtgttgggtctgtgaaggcccaattggagggtgctgaaatgggtgttgcatctgagaacggtggctgcaactgtggatcaagctgcacctgtgacccatgcaactgcaagtaaggtcaagatgtataaccttgaagcagagatagctgtaatatatgtatcaacaaataataagaagtagaagttgcgtttggagctttagaataaagtgtttgctatgtgttttgttggtcttttataaatatgtaatttgaat

SEQ ID NO: 23690 - DNA, 386 bp, Glycine max
  Clone ID: LIB3050-004-Q1-E1-F9
gacagaaattaacaaccatatctattcttacaagttacatccattgagaaacatgaaggtctcccccttagcattttcaatcctttttttgtccttcaccatagaactcttcattggcattgcttcagcagcacaagaaccagtgcttgacacctcaggccagaagctgagaacaggtgtcaagtactacattctaccagtcttcagaggcagaggtggaggcctaacagtttcaagcagtggcaacaacacatgccccctctttgtggtgcaagagaagcttgaagtctcaaaggggcaccctagttacttcacaccctacaatgcggaaagtggtgtcattctaacctcaaccgatctcaacatcaagtcctatgtgaaaagca

SEQ ID NO: 23691 - DNA, 314 bp, Glycine max
  Clone ID: LIB3050-004-Q1-E1-G1
gaagctgaattagctaaactggaatctgagtttgggaaggttagtcaggattattcaactgaggaaattggtgattgggaatttgatgagcttgaaagagaattgagcaagtagttaggttgaatcttatttctgagtaattaatgcttgctgttgtatttttatgattaagtgcaagtatcatataaatttgtaagccatacagatcggctgttgatgaagctataatttggattagattcctttgaatttgtgaacattaccaagcatgatttctttattctgtaaattaacgagtttgcaacttgcagcac

SEQ ID NO: 23692 - DNA, 397 bp, Glycine max
  Clone ID: LIB3050-004-Q1-E1-G10
ggtggtagtttggcagcgacacgtatcttcatcaataatcgcagaagcagtttccggtgcatctcatcgtcttccaaaatgaacgacgcagatgtctcgaagcaaatccagcagatggtgcgtttcatccgccaggaagctgaggagaaagccaacgagatctctgtatctgccgaagaggaattcaatatcgagaagctgcagttggttgaagccgaaaagaagaagatcaggcaagaatacgaacgcaaagagcgccaagtcgaaattcgcaagaagattgagtactcaatgcagctgaatgcttctcggattaaagttcttcaagctcaagatgacgtgatcagttccatgaaagaagctgcatccaaggaacttttgaatgtcagtcatcacc

SEQ ID NO: 23693 - DNA, 360 bp, Glycine max
  unsure (1)..(360): unsure at all n locations
  Clone ID: LIB3050-004-Q1-E1-G11
cacaacctgtcatatataatccacaggcggcacaaatgccatcccaaccatattttcatccaaatggaccacagtatggacaacttggtcatcctaggcaagttttatacgtgccaagttacctccctgagatgccatataagggacgggattattgaccacttatagtcgaatgcattctcggcaacttcgctctttgcctgaaaagaatgaactgagtggatgacttaaagagttccaaatgacaagaatatcttcagcttatgggaggatttccatanaanaaaaatgataatttctaagcaagcaggcttattatgggatataagttaatttatctaatattcactcatacgtctt

SEQ ID NO: 23694 - DNA, 415 bp, Glycine max
  unsure (1)..(415): unsure at all n locations
  Clone ID: LIB3050-004-Q1-E1-G3
cacttaccctaccaagatcactactaccaagcccctatctttgcttggccatggaatcaccgacatggagattcacttcatccatgtgaaattctattcaatcggggtttatttggagccagaagtagtaggccacttggaccagttcaaaggaaaatctgcaaaggagctggaagataatgaagagttcttcaatgctctcatttctgctccggtggagaagtttattagacttgtggtgattaaagagatcaagggtgtacagtatggggttcagattgagactgcggtgagggatangttggcagctgaggacatatatgacgaggaagaagaagaagctttggaaaaagttattgaatttttccagtccaagtacttcaagaaactttcagtgatcacataccattttcca

SEQ ID NO: 23695 - DNA, 258 bp, Glycine max
  unsure (1)..(258): unsure at all n locations
  Clone ID: LIB3050-004-Q1-E1-G4
ggatctggtangtgttaccgaatgtcagttttgggatgagcaacttgatggtcttccagaaccaaatagcctataaatacaatgtgtttggattgttagctaattaaaaaaatcatggtgttccaccatgatattttaccacaccagaacatgatccaccacatttctaaacactcaattgcaatgtttggattagctttatgatgattaataatcaattttttttttttggtggaaacaaagcaacaaatatttgtt

SEQ ID NO: 23696 - DNA, 402 bp, Glycine max
  Clone ID: LIB3050-004-Q1-E1-G5
ggcactacaaatcagttttctacttgaatcttcgttatccttctttttttctccttgaactcgaatattcactatggcagatgaggtggttctgctagatttctggccaagtccatttgggatgagggtcaggattgcacttgctgaaaagggtatcaaatatgagtccaaagaagaggacttgtagaacaagagccctttgctcctcaaaatgaacccggttcacaagaaaatcccggttctcatccacaatggcaaacccatttgtgaatctctcgttgctgttcagtacattgaggaggtctggaatgacagaaatcccttgttgccttctgacccttaccagagagctcaagctagattctgggctgactttgttgacaataagatatttgatcttgg

SEQ ID NO: 23697 - DNA, 400 bp, Glycine max
  Clone ID: LIB3050-004-Q1-E1-G6
agggagattgaaggggtattaatttttcatgcatcaacgagggatcatctaattaaaccagctttcatcatggtgtgggtgatttactgtaagctttttcgtagtaccgtcgaatgtgtttacacgtgtgtgtgagacgtggcgaatcctagcgagaacggaaatgaggttgatgactgtatcgaattgatattattcgatgaacggataatgaacacccctacattgtcgatgctatatccgggtttgactagggacaaggagatgtctgcaatggtctcagctttgaccgacgtggtccacggagatgtgcaaataaccggtgatacatcttcttcgtcgtctttggatcttcatcatcaacctcatgatgataccgtgattgttatagcaaccatgc

SEQ ID NO: 23698 - DNA, 366 bp, Glycine max
  Clone ID: LIB3050-004-Q1-E1-G7
gatatcagcgaggtcttgatcaagaacagacgcaagaaggagaaggcggtggaggagttgtttgagacgttgaagctgagagcggagatgaatgagaagagtggtgttttgaggggaaaaaatgtggttgaagaggaggaagaagaggaagagcaagagaagagggctttggacagtgagagtcctaagcaggagtcagagattgaggacaattgcaaggaggaggaggaagaaaagaagatcaagtgatatatagtgatgtgataataatgttgtttgttcccccgtccaatggagagaatggatcctatccaagtgtagtactcgatcatcatcaacaattttttttacgggggatatcagata

SEQ ID NO: 23699 - DNA, 432 bp, Glycine max
  Clone ID: LIB3050-004-Q1-E1-G8
gaaagacacagaaggggaagcaatgatgttggtaaatcccaaaatcctcaagaaaactggtgtcacaagccagggcaaagcttcttcttgcaacggttggtattggcctcacaaagatcattttcttggtcatggctttgtttttgcttgacaaagttggtacaaggcgtcttttacaaatcagcactgggggaatggtttgtgggctcacacttttggggtttagtttgaccatggtggatcgttctagtgaaaagctcttgtgggctttgagccttagtattgtggccatttatgcttatgttgctttctttaatgttgggcttgggcctgttacttgggtttatgcgtcggagatttttcctttgaagttgagggcgcaaggggctagtataggagttgcggtgaatagaaccatgaatgctgtggttt

SEQ ID NO: 23700 - DNA, 385 bp, Glycine max
  Clone ID: LIB3050-004-Q1-E1-G9
gggcaagaactggttgtaactacgaaggaacatcgaactgaacctgtctacaaaataaatccaagcttggttgctgatctatacagtgattggatcatgccattgacaaaggaagttcaagttgcctatctgttgagaaggttggattgaacataacaaaaagtaccttttcaattacagtgtttatagggttatttatcttttctaggaaatgatacttgcaatgggtaatttctcttgaatcatgattcatgactataaacttgagcttttgtaactaacatatgaggaagctgatattgggttcttatataataattaatggcatcttttatgttgttccaaaaaaaagacatggactaatccaaaaaaaagcggccgctct

SEQ ID NO: 23701 - DNA, 387 bp, Glycine max
  Clone ID: LIB3050-004-Q1-E1-H1
accacaccgagtcgcagaaaaagaaaaaagcgatcatagtttcacttcggccttatccagtttagggtttcggttctctaccctatctttcacgtatcgaaaccttaaatttacgatcaggtctgagcaatctggttggtagaacctttggtcttagtgagtcaagttttatgtctgaattagacgatcaaattcctactgccttcgatccttttgctgatgcaaatgctgatgactcgggtgctgggtcaaaggagtatgtgcatattcgtgtacagcagcgaaatggtaggaaaagcctgacaaccgttcagggattgaaaaaggaattcagctataacaagatacttaaagacgtcaagaaagagttctgttacaatggaacag

SEQ ID NO: 23702 - DNA, 364 bp, Glycine max
  Clone ID: LIB3050-004-Q1-E1-H10
ggaacctttcatctccaaagggatccacaggccgaaggagaaatggggctgacattcacaaagcttttcagtcggcttttcgcgaagaaggaaatgcgaattctgatggttggtcttgatgctgctggtaagaccactatcctgtacaagctcaagctcggagagatcgttaccacaattcctaccatcgggttcaatgttgagactgtggaatacaagaacattagcttcactgtttgggatgttggtggccaggacaagattcgtcccttgtggaggcactacttccagaacacccagggtcttatttttgttgtagacagcaatgatagggacagagttgttgaagccagagatgagttgc

SEQ ID NO: 23703 - DNA, 258 bp, Glycine max
  Clone ID: LIB3050-004-Q1-E1-H11
gattcagctctgcgcctccatgttctcctgggatacatactcaaatgatccatgacacccaaagtaatggggctatctcggtgacttcagattcttcaaccgtcatgtgtatcagccatactgacgtacactctcgccgtcctgcgtcaccatacagtactcacaaacagcatcatcactcgcttcatgtactattgattccattcttcatatcacgctacacttggcaccaatcttcaattgttgctcacgtcactc

SEQ ID NO: 23704 - DNA, 362 bp, Glycine max
  Clone ID: LIB3050-004-Q1-E1-H12
gtacgaggactcgtgataacaatttgcttggcaaatttgagttatctggaattccccctgctccgagaggtgttcctcagatcaccgtttgctttgacattgacgccaacggtatattgaacgtgtctgcggaggacaaaaccactggacagaagaacaagattacaattaccaacgacaaaggaaggctttctaaggaggagattgagaagatggtgcaggaagctgagaagtacaaggctgaggatgatgagcataagaagaaagtggaggccaaaaatacattggagaattacgcctataacatgaggaacacaattaaagatgataagattgcttccaagctgtctgctgatgataag

SEQ ID NO: 23705 - DNA, 399 bp, Glycine max
  Clone ID: LIB3050-004-Q1-E1-H2
tgtgaagagtatgattctggagtggatagtttttcggggcctacaaagtacatcatttggagcaatcgcatgaacactcatgttttgcctgcgtatgttgtaagcttcagagtttcttccttcaaagggatggagaagagtgaagaagaacctttgagacctacttcgccttggatgccattcccaactctgatttctgcgctttccaaggttttgcctccatgtgatattgccctcatctccaagttctacaaagataaacaagacaagaagattttacgacatgaattgatacaaagagtgagagaaatagctggagataagttgctagttgcggccatcagatcttatagagacaacaagaagaaaccaagctttctacaatcaaggtcaaagaat

SEQ ID NO: 23706 - DNA, 407 bp, Glycine max
  Clone ID: LIB3050-004-Q1-E1-H3
gtaatggaagtggttctcttctagcacgcaatctggccattattcgatggaagacactttcaactcggaaagtaaatgcaacaagtggagcagcatcagtaccggatgaagttttccatagatccaaaggggttcaattgtgcaacactcaagcataccaatgcactccagccttttttgctgattcttattttctcaacaaattctcttctgatgtcattgcagaaagagctcaagtgcctgccactgcaagggtcatatgtgaaaggcatgcaatctcagttgtgccagtaactcgtgtcaccatggctcatcgtcgacaatccttcagtttctacattatagaatatggcagagaggtgtattcgaaggattattaccctgctaaatattgttggggcctgtgt

SEQ ID NO: 23707 - DNA, 392 bp, Glycine max
  Clone ID: LIB3050-004-Q1-E1-H4
ggcattgtgaaattaatagagagacataaaaaataaacatatattgagaatggagggttgtgtgaagaagttgctatgccttgttgggtttgtggtgcttgtgagtactattggtggggtggagagtgctggtgaatgtgggaaatctacaacccctgataatgaggcttataagcttgcaccatgtgcctcagcagcacaagatgagaatgctagtgtttctcagagttgctgtgctcaggtgaagaaaattgggcagaaccctagttgcctctgtgcagttcttctctctaacacagccaaaatggctggcgtcaaccctcaagttgctgtcaccatccccaagcgttgtaacctggctaatcgccctgttggttacaagttgtggcctt

SEQ ID NO: 23708 - DNA, 404 bp, Glycine max
  Clone ID: LIB3050-004-Q1-E1-H5
aggaactctgataagaaaacataataatgggttcacaaaattgtatggataggaagcactatgttctggtgcatggggcatgccatggagcttggtgttggtataagctcaagccacgcttggaatctgcaggccataaggttacagtacttgaccttgcagcttctggaaccaacatgaagaaaattgaagatgttgatactttctcagagtattctgcgcctttgttgcagctaatggccacaattccctcaaatgagaagttagttctagttggtcacagccttggagggctgaacatagcacttgcaatggagaaattcccagaaaaggtagcagttggtgttttcttaacagcttttgctccagacactgaacaccacccatcttatgtcttggaaaag

SEQ ID NO: 23709 - DNA, 395 bp, Glycine max
  Clone ID: LIB3050-004-Q1-E1-H6
gacctacgtttttctttttctctttctctttctcttactctttctctttctcttacgctcttcaagactttcacaaatcccttccgtcttcgctcttgtcttctcgttcagaaatgcaaagtatcagagtcttgtttggacttgacgaggaaagcgatgctggcgtgatccgtttagaatttcagtgacttagatgcctttgacgggtgaccgagatggttgttttgcaacaaatgaagtctggtcgtatgacgcagtagtacggcagtggtctccccgtgcggcaatgctcgtctcacgttctatgtttgcatgctgtgttatgattggaataatacttgtagctgggggcttaagtagctgcagaaagtcaatatctcaagcagaaatatatg

SEQ ID NO: 23710 - DNA, 413 bp, Glycine max
  Clone ID: LIB3050-004-Q1-E1-H7
ggagagaaagtgagagagaattacagagcattttccaacacgattacacgaccgaatcaaacccctctttctctccgaagctgcttttaatatcgtactggccttcgattgttctcctctttaatacatactgttctctcttcgatttgagggaacagtacaagagtctgagcatcggttaacccaactgcacaggtagtctccaaataatggagcctcatgatgagactggatgccaggctcctgaacgccccattctttgcattaataattgtggcttctttggaagagcagctaccatgaacatgtgttccaagtgttacaaggacatgctgttgaagcaggagcaggacaaatttgcagcatcatccgttgaaaacattgtgaatggcagttccaatggcaatggaaag

SEQ ID NO: 23711 - DNA, 389 bp, Glycine max
  Clone ID: LIB3050-004-Q1-E1-H8
ggaagaagatcaagaagacaacaacatcatcaccctcaccaaacaagcttatggagatttgccgcaacatcattttccccctcaggcgtctctgccttgctctctctgctcgcctcaagcctcgcaaaaacggagctggactgctcaagcttcaggatgatgtacagacatgcggatatcaagatgtacaagtgatgtgggaaatgctacagagaacagaaggtgaagttatagaaaaccaccatcataagcgcaagcaattgcccttctggaggatctttgtatggtccaaccatactgaatctgcaaatcatgcttaatgttaaaaccagacacaggttttaagtttacaaataaaacctctactgcaactggcaagccaccctcct

SEQ ID NO: 23712 - DNA, 412 bp, Glycine max
  unsure (1)..(412): unsure at all n locations
  Clone ID: LIB3050-004-Q1-E1-H9
ggtgagagagcgagcgagcgagcagtttcaaagagaggatttgggattgggaaggcgagggattgcgctgcgtctcttcctcttctctttcgattcatccctcattcataatcttccaatccaacaacctcagccccacactcacacatacacacatctgaacgcgtatcgtccctcccatggcttcaaagcgcatcctcaaggagctcaaggacttgcagaaagacccaccaacttcttgcagcgctggtccagtagctgaggacatgttccattggcaagcaacgattatgggtcctgctgatagtccttatgctggatgtgtattcctagtcactattcactttcctccggattatcctttcaaaacctccaaagttgcctttangactaaggtgtttcatccgaacat

SEQ ID NO: 23713 - DNA, 234 bp, Glycine max
  Clone ID: LIB3050-005-Q1-K1-A1
tataagggggaagtagggttaattatgcatgtgtgggatccttaacagaagcggttgcaagtcttgaggagctcacacaagaacagcagtcaacagattgggacgagggtgctccactggctgaaaggattccacctgcgaagaaactccgcagtgctgggatctacttccaaccagctaaaagtggcgccatctcatctattgatttcgttgaagaaagttgcattttctact

SEQ ID NO: 23714 - DNA, 283 bp, Glycine max
  Clone ID: LIB3050-005-Q1-K1-A10
caacgggttggaataaacatacaacacgaaatgtcatagaaagcgtaagaatctgcaacagatagggatggctgctcttgaggaccaatcataggaactagccatggctgcccaacctaaacctcaaaaccgactcatctttaacatcgtcatcatcattgctatgcacactgaagcacttcccattgctaacagattccaactcactgatgaccctgacaccccgtttacacaatgggttccttgtatccattatcatgtcacatacaaagatcttaatata

SEQ ID NO: 23715 - DNA, 261 bp, Glycine max
  Clone ID: LIB3050-005-Q1-K1-A12
gggaaaagacggagttgaaatcatgggaattgcggggggtgaccggtttggagtgtatggaactgattttggttggggaaagcctgctaaggtggaaatagcatcggtggatagagccttaaccattgggtttgcagagagcaaggatgggaatgatggtgttcaagttgggctcgtgctgaagaaacatgtcatggatctcttttgtactttgtttcgtcaaggaatgttagatgattgatcctaaattctgaacatgca

SEQ ID NO: 23716 - DNA, 318 bp, Glycine max
  Clone ID: LIB3050-005-Q1-K1-A2
tggcaagcacttgctgatgagtatggtatcagatgctttgaaactattgcaagaaccaacatgaacgttgaagaggtcttcttttcaatagcaagagatattaagcaaaggcttgcatacacagattcaagggctgagcctcagactatcaatattaaccaacctgaccaggcaaccagtggtggtcaacctgcgcaaaagtctgcttgctgtggttcatgaaaagaatcattatctgtagaaaaaagtgcacatgtttctgcaataacactcatctgggtgcttaatgtattctgatgacattataaattagagcat

SEQ ID NO: 23717 - DNA, 368 bp, Glycine max
  Clone ID: LIB3050-005-Q1-K1-A3
ggggagcacaaggagggacttgtggataagggcgggacaagatccatggtgagggccatgacaagggtgagaaaaagaagaagaaggacaagaagaagaaggagcatggacatgaccatcatggtcatagcagcagcagtgacagtgattagatcttatatgttaagcaggtgtacggtacgatggtagtgaggagccagaatccctcttcctgctttatgatataatacaaataaaatagcgattccggaaatcatgtctgtaactgctctttttatttatgtgataaatgtaaaacgctttggtttggcttggccgttgtgcattaagttgaaaaaataaatgttataattactcagaatcttaaa

SEQ ID NO: 23718 - DNA, 306 bp, Glycine max
  unsure (1)..(306): unsure at all n locations
  Clone ID: LIB3050-005-Q1-K1-A5
aagaagcacaagggaatttgagcttgaatgatattaatatggggaaggctcancaattcaaacctctttaataagaccacatctatcaaatgatacatgaattgctacattactggtctattgagctatgctctctgattccaccactaactctttgaactcacattcatcaaacatttttattgttacttcacattcttactctgctaatttaatcaactcattctcttagacaatttcagtctctattattattaaatgctttaagttctagactatactatactatactatttctatcttcta

SEQ ID NO: 23719 - DNA, 243 bp, Glycine max
  unsure (1)..(243): unsure at all n locations
  Clone ID: LIB3050-005-Q1-K1-A6
tggtgttctagtgtgtgattgtttgttgttntagctctttcttcttcttttggtggtccgtgtttgtgtttgttttttctctcacctgaaaatgtcttgctacggtggtaactgtggttgctgaagctcctgcaattactgcaacggctgcggaagctgcaatatgtacccatacttgagctacactgattctaccaccaactatacctttatcattgtaatatcacctttttaagctcaatt

SEQ ID NO: 23720 - DNA, 138 bp, Glycine max
  Clone ID: LIB3050-005-Q1-K1-A7
acataaccatcattactatttcacctccaatgacactgattatatcttatatataaatcatatatactgttctattgttttcattacccatattctctattactactttatcatataattcaaatacaatatctattc

SEQ ID NO: 23721 - DNA, 259 bp, Glycine max
  Clone ID: LIB3050-005-Q1-K1-A8
acccactcgtccgcccacgcgtccggaatacgacagatagtgtaacaaagagaggtaaatgagactggtatgccggtttccatcttgtttgtgggccgggtttcggcataattgggttcgactcccatagtcccgctgcattccccctgacctctatataaaatgataaaacggactataaacactttgattgttaatggttccattattctcatttctaagggaatttttattgtaactggcttctattccctttata

SEQ ID NO: 23722 - DNA, 302 bp, Glycine max
  Clone ID: LIB3050-005-Q1-K1-A9
tggggaatgacaaatgggttggatgtgatgaacaattctggtacattgctcgatttgttgtttcccttgtttgttatgtggcaacatctgcattctcaagaattctctttcacttcttcacgccatcttgacaagactgtggactcaatgtctttttcattactatgaccatgattcttgcatttgtttttgtcatagtggcattgcatcctgcagtaaatggaagtgttttgcctgcttcagtaatatcattatactgcacttatctctgctatagtgcactggctattgaacccatagat

SEQ ID NO: 23723 - DNA, 172 bp, Glycine max
  Clone ID: LIB3050-005-Q1-K1-B1
tctctctcaaaactgaaaaattaaagctaaagactgtatgtttggaattggcgattatgattatcctcatcacgaatattatctaagttgtgttgaactatcgatttgggaataatgtgctccttaattgcaacaactatgactccatcttataccttaataatctactagc

SEQ ID NO: 23724 - DNA, 402 bp, Glycine max
  unsure (1)..(402): unsure at all n locations
  Clone ID: LIB3050-005-Q1-K1-B10
tcgttcacgaagctgttcatcaggttgtttgcgaagagggaagtgangattctgatggtgggtgtcgatgctgctggtaagacaaccatcttgtacaagctcaagcttggagaaatcgtcaccactatccccaccatcggatttaatgttgagactgtggagtacaagaacatcagcttcactgtgtgggatgttggtgatcaggacaagatccgtccactgtggaggcattatttccagaacactcaaggtctcatttttgtggttgatagcaatgatagagatcgagtggttgatgcaaaggattagctgcacaaaatgttgaatgatgatgaactttgagaagctgttttgctttgtttttgccaacaagcaagatcttccttatgcaatgaatgctgc

SEQ ID NO: 23725 - DNA, 286 bp, Glycine max
  Clone ID: LIB3050-005-Q1-K1-B12
cactgagagagatctcgaagacgaattccgcgtgttcggagttattcggagtgtgtgggttgcacgtagaccacctggttatgcttttattgactttgatgaccgcagagacgcacaggatgatatccgtgaattggatggcaagaatggttggagggttgagctttctcacaactctagaggtggaggtggtggtcgtggtggtcgctctggtggttctgatttgaaatgttacgagtgtggtgaacctggtcattttgctcgtgaatgcctcatgcgtggtggt

SEQ ID NO: 23726 - DNA, 189 bp, Glycine max
  Clone ID: LIB3050-005-Q1-K1-B3
tgattcatgcattgtactttgaagccgactccaaaatatggtggatggtgaactatactggacgcaattactgttctaataataacgatcatttgtgcaacaatgttattgatcaagaatcaaatcaagtattgggcatttcacaaattcactgtattctgcattgtatctatgtgaaaacctatatat

SEQ ID NO: 23727 - DNA, 404 bp, Glycine max
  Clone ID: LIB3050-005-Q1-K1-B6
gtatctacaatttctcttctagcaatcaggcagctttggatcaaccctcgcgatgtgtttacaatatggaacagaccctctcctttgaatttgagcatgaatttgttcaaaacacggcaagagtgaaatctgttgatatgcatccaactgagccatggattctactgggtttgtattcaggaactatttctatttggaactatcagacaaagactgaagagaagtctttaaaaatcagcgaatctccagtgagatcagcaaagttcattgctcgggaaaactggattgttgcagctacggatgacaaatacattcacgtctacaattatgacaaaattggaaatatagttaaatttgcggaacataaagaatatatcatgaatttaactgttcatcctgtcctt

SEQ ID NO: 23728 - DNA, 169 bp, Glycine max
  Clone ID: LIB3050-005-Q1-K1-B8
tgttggctggggtgctcatggtggagatgccggttcatttaaagaccctggcggtgttgacagaattggttcctatattgtaaggcaagctgcaaagagtgtcatggcaaatggccttactagaaagtgccttgtgcaagtttcctatgccattagtgtccctaaaccc

SEQ ID NO: 23729 - DNA, 213 bp, Glycine max
  Clone ID: LIB3050-005-Q1-K1-C1
aggtagataaagagagagaaagatgtcgaatcgtggtcgtggtaattcagcgggtgacaagttccgcatgtcactgggtcttccagtggcggcgacagtgaactgctccgacaacacatgggcgaagaacctctacatcatttctgtgaaagggatcaaaggccgtttgaaccgtcttccctctgcctacattagctacattgtgattgccac

SEQ ID NO: 23730 - DNA, 297 bp, Glycine max
  Clone ID: LIB3050-005-Q1-K1-C10
taggggaaaaaaaaaaacattttcatcatcttcttctgctttggcatcaatcatcaccagtggtgtttttccttctgagaagatcgaattgtgttttgcaaaaatgggagttccagacaaagaccctctttcccaattgagtttgcctcctggttttcggttttaccccaccgacgaggagcttctctttcattatctgtgccgcaaggtcgctggccaccatttctctcttccaatcattgccgaaattgacttgtacaaattctacccatgggttcttccaagtaaagctatttt

SEQ ID NO: 23731 - DNA, 267 bp, Glycine max
  Clone ID: LIB3050-005-Q1-K1-C11
gaacttcatctatattgaaaatcagtatttccgtggagtctcttttgcctggagtgctgatgatattaagcctgaagacattggtgctttgcatctaatcccaaaggaactttcactcaagattgttagtaagattgaagctggggaaaggtttgctgtgtatgttgtagtcccaatgtggccataaggtgttccagaaagtgcgtcagttcaagcaatattggactggcatattagaacaatggagattatgtacaaggacattat

SEQ ID NO: 23732 - DNA, 308 bp, Glycine max
  Clone ID: LIB3050-005-Q1-K1-C6
tggtctctcaaagggttgaagaaaataataagggtgtcataataattaagccgaagggttcatagatatggagggtcttctgtctcttgtttataaagcaatcaatagaaacaaaacacgaaggcaatacaagtgtctttcatcatgaacttctctagggtacaacatcatcatggcctatatgtaccctcaaactcaggaacatgtccttcataaccatacacatgcccataaagtgtttcaccaccaccataatgaaaatcacaaaatttgtcacaagagatataactcttattttcgatcaattc

SEQ ID NO: 23733 - DNA, 205 bp, Glycine max
  Clone ID: LIB3050-005-Q1-K1-C7
tgttacggctatgaaaccacatatatacacagtacatagttagttattgcgcctgctccacaactctctaccaacatatgtatctccagatattctatacacaatatgcctaccactaatagcaataataatgcctttatcaaatatctacattctgatctttctctccatccttctaacactaatctttcattcaacaatacat

SEQ ID NO: 23734 - DNA, 130 bp, Glycine max
  Clone ID: LIB3050-005-Q1-K1-C8
tggctatgctctaaaattttcacccagcagattgtattgttcttgaaggataaggtgcttatagtctttacttcatcttttacggatatgctaatgtttttatctctgctaatgcttactattattatca

SEQ ID NO: 23735 - DNA, 323 bp, Glycine max
  Clone ID: LIB3050-005-Q1-K1-C9
tatagggagacattaccgagcgtaaaggggagatgatgatgagaaatgagaggtgttgatgatggataagcaaatgagtattatgataagatcttagtatttgggattagattagattcatctatcacatgacacaacacaactcatcgattatcactttcccgcactttgctctcccatttggtgtcgtttgtactttttatgttatgctgctttttgtcattccctttgaatgacttttgtactacttgtcctataatctataataattattcaattacaattaaatatttatctttataataattataattaatctaata

SEQ ID NO: 23736 - DNA, 250 bp, Glycine max
  Clone ID: LIB3050-005-Q1-K1-D1
tgcctggtgatgggcccgggccaggaattggctgcgttttaacaaatccgcgaggggcattacctgaacgctgcgattcacgacagcatgaagctgttcccaccgattcaattctattcgaaattcgccactgatgatgacttgttgccatatggcactttctttataaaaggcactatggtaacttaccacccttactctattggccgaatggaaaatattttggggccctattgtcttgacttcatgc

SEQ ID NO: 23737 - DNA, 295 bp, Glycine max
  Clone ID: LIB3050-005-Q1-K1-D10
tagggacatttcttttgacaagcgaatcttatctcgaagatggctaaaactggtgccacggtgaaacatactcccacccgctaatttatcgtcacattagccgctcacttcaaaaaatctggaaagatcgagcttccatcatggcatgatcttgtaaagacaggtgttgcaaaagaactctgcccacaatatcctgattggtactatgttcctgctgcctccattgcccgtaaaatctacctccgtggtggtacaagggttggctgtctcatcatagtctatgattcatgctatc

SEQ ID NO: 23738 - DNA, 331 bp, Glycine max
  Clone ID: LIB3050-005-Q1-K1-D11
gttattaattgaagtttttgaagggactatgaggttagagaatgttcaagttttgccagatgatatatatgtgaacgacattgttgatactgcaaaattagtcagcaagtcctcgttgcagtggtttatacataaagttcaagatataattatactaagcacacttaggcatcttgtagtaaatgatgctaataaatcaagatattctcttgaatacttggacaaagataagactattgttgctcatatggctggaagaattgatgcttacataaagatgtcacatgattggcctatattttgttcttcatataatctgttattttctaaa

SEQ ID NO: 23739 - DNA, 403 bp, Glycine max
  unsure (1)..(403): unsure at all n locations
  Clone ID: LIB3050-005-Q1-K1-D12
tccgagggggccaacaaatactgaagcttggcattgctgaaatggaatgcaagagagtaccttgggatggcaaaaatcagaatttggccgttcgagttgaagaatcaagcaagaagcctgattacttggcaattaaatttttgtaccaagggggacaaacagagatagtagccgttgatgtggctcangttgggtcttcaaactggagcttcatgagcagaaaccacggggcagtatgggacacaagcagggtaccccaaggcgcattgcaatttaagttagtggtaacggcatggtatgatggcaagtggatttgggcaaagaaggtcctacctgctgattggaaaaatggacttatatatgattctggccttcagattactgacattgcacaagaagcttg

SEQ ID NO: 23740 - DNA, 309 bp, Glycine max
  Clone ID: LIB3050-005-Q1-K1-D2
tagggattgtgcccatttcttccgttgttttcattacatacgcagaacccattttactccctctttcacaaaagaacaatatctctattttccaaactacacacatcatttacaaccatgtctttctctaccaaattgcctttggtcctattattttcatcccttttcatccatgcatctttggctgatatggtgtgtgaggacctgccaaaggaagtgtgtgctttctcagtagcttcatcatggaagaggtgtttgttggaaacttatatagcagccaactgttgcatctaataccaatgcctgaca

SEQ ID NO: 23741 - DNA, 182 bp, Glycine max
  Clone ID: LIB3050-005-Q1-K1-D5
ttcttctgcgataagactacagaatgtgatgcacgattttcaaaggaagttgagtaccttcttaagaaaggatggattccttgcttggaattctattttgatcacggtttcatgtaccgtgtacacaacaagtcacctatatactactattgactctactggaccatgtgtaatctgcctat

SEQ ID NO: 23742 - DNA, 352 bp, Glycine max
  Clone ID: LIB3050-005-Q1-K1-D7
acccactcatccgcccacgcgtccatacttctgctattaatctacagaatgggacacatcacaacaacgacgacaacttaaaaagacttgaacgtcttccttctctcctttgctgtgttttctttctcaaaaatgggtcttacctatgttcttatgatggttgctgcattgttattgatctccaccatggctcaatctccatcttcttcaccagctttgtcccccacccacactcctgtagccactccacctatgacgtcattttcaccttctccatcgtctgtttcaccatcatcttcaccctccaccagatattctcctctaacactacctacttcttcttctttttaat

SEQ ID NO: 23743 - DNA, 149 bp, Glycine max
  Clone ID: LIB3050-005-Q1-K1-D8
ccaaagaaaataaaatcctcagtgttggtgatcatccaaacacggtctgtctgtctctcgaaaattctcattttccatataaaatctgaatcatctcttgtcaaccttatttttacaattactttcttattaactttaaatttaaccac

SEQ ID NO: 23744 - DNA, 337 bp, Glycine max
  Clone ID: LIB3050-005-Q1-K1-E1
acgcatccgcccactcgtccgtactgcttctaaaacaccacatagagactacacaaactctcttatctgtggccacataaacatgtatccttccttcccctttttctcattaaaatcacatcttactgaatattacatgtcttcaccattattttatcaacaggattgtatactatctttacaaaaccatgctcctatgttgcataaacatcttcaatctttctgcctaaactttcatatactggtcacaattgcctcacttaaaaactttcatctaatcgcttcttcataaaactgaccttctataccataacaccattacatcatcctccaattt

SEQ ID NO: 23745 - DNA, 176 bp, Glycine max
  unsure (1)..(176): unsure at all n locations
  Clone ID: LIB3050-005-Q1-K1-E10
tanagggctaattaaattataaaaaaaaaactctcactctatatgagtggatttaatccctggcggggtggtcaaattctacttgtaattgtcattatatcactaaaactattcgattctattccttgttttcaatggacacctttttcaattctcaatcttcttcttcttcaata

SEQ ID NO: 23746 - DNA, 330 bp, Glycine max
  Clone ID: LIB3050-005-Q1-K1-E12
acaacaattgaagaaaataaagttcttaaggaaggggaggatggcgagcatgcagagtcggtggatggaacagttgcacagaacttggatcatggaaaggaggaaaaccatttactggagttgcctgttgaattgcctgaatcccctgttgaaaaatttgagagttcagattctgtggaacattctcaagagaaagagattgctgatccgggaacctctgggaatccaatggcagtgcaatttatgccttctaatcttggggacaatgtaattgatggtattactagggaatctgattaatcacatgacattaatgatgggcatgaaaaa

SEQ ID NO: 23747 - DNA, 270 bp, Glycine max
  Clone ID: LIB3050-005-Q1-K1-E2
ttaataatatgaccaccagtgcagggaagttggtgtgtgtcaccgatgctggcgggtatattgcttcatggattgtcaaattcctacttgaacgtggttacactgtcagggccactgttctaaacccaaatgatcacacaaaggtataacatttgctaaaacttgaatgtgcaaaggatagactgcacctttttaatgcatgtctttttggtgaaaattcttttgactccattgtttatggctgttatggcgtctttcatacttcttctt

SEQ ID NO: 23748 - DNA, 219 bp, Glycine max
  Clone ID: LIB3050-005-Q1-K1-E3
agtttatactgctcttgatagtggtgatggaagcagtcatcataacatgagtgatgatgggtcaatgatacatttctctgctacaatgtcattggcaatgccatcatctttacataataaattgattcctaatccaactcactataccatcctctataatgtgaaaatgtttatctatcaatgaattcctacataaaaagttctataaataatatttat

SEQ ID NO: 23749 - DNA, 287 bp, Glycine max
  unsure (1)..(287): unsure at all n locations
  Clone ID: LIB3050-005-Q1-K1-E4
acgcgtccgcccacgcgtccgcgataagacgacagaatggtgacggaaagatgatgagatcaatgtacgtnttctgatagatggacgagcaggtatcgtctatggcaatggacgtggacgacgtcgaccctctcgagatcttcgccgagggcgtcatcaccaccgacaactaactcgccgacaccgatttcttcaacaatttccgagactatttctatgactctgatatcaactaaaacccctttcttcttcatgggtattctcggggttaaataaatttctctgtt

SEQ ID NO: 23750 - DNA, 398 bp, Glycine max
  Clone ID: LIB3050-005-Q1-K1-E6
tagtaagggaattcaacttcactttcaacaacaatctctctgttttccattctcatgcctgggggcttcttgtaacacacccttttctcttttctctctaactcccctccaagaaattctgagagaatagaatagaaaagagggtgagtggttttttgagttttgatagaatatctgcatgggggagctggttgatattcttgactaaggggtcaagattgctgcaaggtttcactctaattgcccccaaacatgccttaagtactaccaccctccatccctctccgacaaccactgccaccactaccatggtggtgccaacacaatcagcggcctaatcaaataagctgtagtcataaataacctttacttaaatcttatatattcttaacataacc

SEQ ID NO: 23751 - DNA, 407 bp, Glycine max
  Clone ID: LIB3050-005-Q1-K1-F1
taaataagcaaggcgaggcaagggttttcactgttgcataaaagtctaacggggagcgtagtcgcaagagacgcaacagaatagaacgacgaataggcgtgcagggaaaccatttcattttcgagcgcgtcgctttcgaatccaatggccttcaacaacgcactgagatctgccgcgaagctcgtcgcttcttccgaatcttccttctctaactcagtgagcagaggttttcattcaactggcatgaagaggatgggaggttgacatggtcatgatgagccctactatcttcatgcaaagcacatgtacaacttggacaatatgaagcaccatgggttgaaaatgtcccttgctgtgttcactgctttcaacattggtgtttgcattttctgtatattctgtcattt

SEQ ID NO: 23752 - DNA, 295 bp, Glycine max
  Clone ID: LIB3050-005-Q1-K1-F10
gggagaaaggaatggatcccaggggctctgggatgggatcagcagatagagattgaacatttgcagcgaaaagggaaagaaagagaaaatcatgtcaacagcagaagctcctccttctttccaagaagcatcgcgatgcgttgtctgcaattgcagtttcaacactttcagaagaaggcaccactgtcgatcctgtgggagaacattgtgtaatgaacattcatcaaatcaaatggctttaccacaatttggcctttactcaaatgtccgagtatgtgctgattgtttcaacaac

SEQ ID NO: 23753 - DNA, 257 bp, Glycine max
  Clone ID: LIB3050-005-Q1-K1-F11
taggctctctatttaaacaacttgttttttatattctgttctgtttcacttttgcgaggggcatatcctggaattcatgacctgcgcttcttccaattaatacataaagcttctgctaacattgcaactttagtttcagattattttccttatcttgaaaagggacaaatccctcccaacgtatcctatcttaatgtgaaaaccatataattctactatgcatttaaaccttattgtctaattattctaatttatta

SEQ ID NO: 23754 - DNA, 214 bp, Glycine max
  Clone ID: LIB3050-005-Q1-K1-F12
tatgggctgtcgtgagctggacctggaccagccactggatctactgggcctgccctctcatctgaggtggaattgctgggcttatctactatgttgtcttcatcaaccacacccacgagcagctttccatcactgactactagaggggaaaaatgaaataataaaaaataaaaaaatgtgtattattgaattactccggaatcatctactgtgt

SEQ ID NO: 23755 - DNA, 324 bp, Glycine max
  Clone ID: LIB3050-005-Q1-K1-F2
aagcataaatgagctaacaatcaacatactctactcaatattctcaagcctatccatacaaagaaaatttatcaatatataacactactctataacctttaatggcctccaaatattctctaacatcttcatataatcacatatcatcactctaaaactcctatcttaatatattaatctgacaacattacacatcttacattaatatatataacacttactaattataacatacactattacatatatcaacttcttaaatccttatattactatcattctcactccataattcatatatatctcaatctctataattttatt

SEQ ID NO: 23756 - DNA, 292 bp, Glycine max
  unsure (1)..(292): unsure at all n locations
  Clone ID: LIB3050-005-Q1-K1-F6
tgtgtaaaacaatagctcttagtgtaaggggggnaggcagatttggagtttaggcgtcccagagaccactgaagtgtgtggtatgtggcgctgaaaccgacttcaactatgactcagagaccgggttgacaaccttctccattccagtttctccagaggagatgtacagatggtcaatatagatccaagtttgagtcctttttaagacttggtgtttgatgcattgttgtatcatgagaaaggtttagttgtaattaagcattaaaggaattgatggattcatgcatatata

SEQ ID NO: 23757 - DNA, 211 bp, Glycine max
  Clone ID: LIB3050-005-Q1-K1-F7
cgggaatgaagccaatagggaagtacgtcactctggatacggtgagcgtaagggtacaagggaggcaaggcttcccactaaaattctatggatgaggagaatgcgtgtgctcaaacacttgcttcacaagtacaaggaatctaataagattgacaagcacatgtatcatgacatgtacatcaatgttaaaggtaatgttttcaataacaat

SEQ ID NO: 23758 - DNA, 226 bp, Glycine max
  Clone ID: LIB3050-005-Q1-K1-F9
tataggctcgatgcaaatttggagagagtaaggttttggacctgtgctgtgtgtgaaaacattcagtaccgaaaaagaatctattgaactatcaaatgacacacactacggcttatggtctgctgtaatgtcaaaagatctagaaagatgctatcgcatatcaaatgctattcaagctggaattgtatggataaattgtgctcaaccaatcttcattcaagctcca

SEQ ID NO: 23759 - DNA, 212 bp, Glycine max
  unsure (1)..(212): unsure at all n locations
  Clone ID: LIB3050-005-Q1-K1-G1
taatgggatacctatggtggctggggtgcgcatggtggaagtgccttttcggggaangaccctaccaaagttgacagaagtggtgcctatattgtaaggcaagctgcaaatagtgtcgtggcaaatgtccttgctaaaatgtgcattgtgcaagtttcctatgccattggtgtaccttaacccttgtcaatgtttcttgactcttatagaac

SEQ ID NO: 23760 - DNA, 164 bp, Glycine max
  Clone ID: LIB3050-005-Q1-K1-G10
tgatgatggaatgccaaactaccacaggcacttcctgaagggaaagctttacattcatttctcagtggaatttcctgataccctgagtcttgatcaggtgaaagctttggaagctactcttccactaaagcctacatcgcagttaacatacatggagcttgatt

SEQ ID NO: 23761 - DNA, 242 bp, Glycine max
  Clone ID: LIB3050-005-Q1-K1-G11
ccctctccgattacaatattcagaaagaatcgacgcggcatgttgtacttcgactccggggagggatacagatcttcctgaaaacactcaccgggaaaactattactctggaagtggagagttctgatacgatcgataacgtgaatgcgaagattcatgataatgaatggattccaccggatcaacaacgtcttatcttcactaggaatcaactctaaaactgacacactctatcctattac

SEQ ID NO: 23762 - DNA, 127 bp, Glycine max
  Clone ID: LIB3050-005-Q1-K1-G12
ttaaggttctgcttctagaagacgacataagggtacgtgtgctgtaagacgacagagaggggagggtattatgctgtttttatgtcatgaagtttaatcaccattgttggaatctatttctctctta

SEQ ID NO: 23763 - DNA, 298 bp, Glycine max
  Clone ID: LIB3050-005-Q1-K1-G2
cacctccccacctctacgctcaaaacacagaagggttactgaaaatatggcggatctatcaaactgtgggcgttctcatgcttctcattggaaaaccttcttggtttgctccttgtccggaaaattccctacaatccgccaaccgtaataatgctttcattcggtacaaggaaaagaagaaaacaccgattttttacaaaaaagttaagtattcctctctcaaagcaaaggctcatgtcacaaagcctgttaaaaggccgtttttcaaaacccgtgacctctattattatgacccttt

SEQ ID NO: 23764 - DNA, 349 bp, Glycine max
  Clone ID: LIB3050-005-Q1-K1-G6
gcgagaagaccaccgtaaggggattgataaaggatacagaagagaagggaaagttgaggtgaagaagatggtggcgtgcagtgatgctttttcttctcatttctacgcaaatgaagagcgttgagccggatgctgcggattgcttggatggttgcagtactgcctgtgttcaaagcgactcgaggcttcaagcacggtgtgaacgcaaatgcagcattatatgcggtccatattccacaatcaaggatgacatgagttgatttgagtatgtaaagtcacagcgcaagcaatcattgtttcatcaccatagtcttatttagtccttgcttatacatataataacatttta

SEQ ID NO: 23765 - DNA, 272 bp, Glycine max
  Clone ID: LIB3050-005-Q1-K1-G7
tgtgtatcaacccatcaaacaagatcacgatgttgttaaacatgtctggtggagaggaataaaactccctacatctcaaaattgcacacaagttttttaacgcaaactgcttaatgaactgtgaatttgcattgattctttatcacaactatcatcaactttaacatacatccgattatcccatgaatcaaatttctcatgtattttaaaagtcactacattatgttaatctcttcatccactttataaatccctattcttttatacaattt

SEQ ID NO: 23766 - DNA, 80 bp, Glycine max
  Clone ID: LIB3050-005-Q1-K1-H10
tgggtcaacaatccgtgcttgggcttggactgtggcagctaagtattaagtggtggaggccaggaaagatcatggtatct

SEQ ID NO: 23767 - DNA, 333 bp, Glycine max
  unsure (1)..(333): unsure at all n locations
  Clone ID: LIB3050-005-Q1-K1-H12
ctaaagggccctgttcaaagtgctggaccaatcattgtccagatcaatgagtctatgtcctggaatgtcccgaggacttcttgggcgatgacattcaaaagccagcgggtactcatgnttcctctataatagtcaactgatattctctacacaggacttctcaaagtaggatatgcctgtcgattatcgctacacaaggagcacaaggtggattctcagggaattttcttaaccagaattctcaagctggatattctcgctttggttctggaaatgactttatgtctcacgactacatgggccatggatcacaaagtcttttcactcagtggg

SEQ ID NO: 23768 - DNA, 367 bp, Glycine max
  Clone ID: LIB3050-005-Q1-K1-H3
gagaatccaaaaatctctcgtcgtccaagaaagaagcaccgggaattaattctcgtttcccattcccatccccatgccaactattttgcataggattttccttctttacaacctcgtacactcattcctcctctgtctggtccccaagaaggtgcgtcccttcctccccccttcttggttccaaaccaaaaccatcactgcaccttcttcttcttcttcttcttcttccagtgcccgcatcatcaagagaacaacaatggaccccaacgagctgaagcgcgtgttccaaatgttcgaccgcaacggcgacggaagaataacgaaaaaagagctgaacgactcgctggagaatcttggcatcttcatt

SEQ ID NO: 23769 - DNA, 266 bp, Glycine max
  Clone ID: LIB3050-005-Q1-K1-H5
atccaaaaatctctcggctgcctttataaaatcaccagaaagtaattcatattttccattcccatcctcattccaactattttgcataaaattttccttctttacaacctcatacactcattcctcctctttcttgtccccaaaaaatttcctcccttccttcccctcttcattattccaaaccataaccatcactacaccttcttcttcttcttcttcttattacatatccctcatctatcattataactacttatttaccccaa

SEQ ID NO: 23770 - DNA, 336 bp, Glycine max
  Clone ID: LIB3050-005-Q1-K1-H8
tggtaagacagattcatagatttataataggggatataacctaataaatccgctgggttggatcccttttactcttaaaggattatcccacgtactttattaaatattttaatgtaacaaataatttcattgattcattctcatttagtagtaatatttttatacttttattttaataacgattattttaaaatactcattattaaaattgatgcaaattgtagtaacggaaagaaatgaaaatagtcagttgataatccaaattatttttctttctattgcagttacttataccgttttcattttattgcaccaaattaatgtgagctatttctt

SEQ ID NO: 23771 - DNA, 191 bp, Glycine max
  Clone ID: LIB3050-005-Q1-K1-H9
ttgggggaaccagaatgaagccaatgcgaagatagtaattggtactggtgagtttatggcccctgaatatgcaatggaaggtctgttttcagtcaagtctgatgtatacagttttggtgtattactactatagatttttagtggcctcataatcactatctttcgtcactcagatgactcaaccctcatat

SEQ ID NO: 23772 - DNA, 232 bp, Glycine max
  Clone ID: LIB3050-006-Q1-E1-A1
aataccacacaacgggaactaaacatatgaagaatatggcgtccttaagctcctcattagtgctgctccgtgctgctccaagtgcaacccgccaagttccggctgactatgagatgcccataatttacaagccacctgcatacacacggccggtttataagcgcccagttgaagaactaccagtgtggctacctccagtgtagaagcctcgagttgacaaaccacctgttta

SEQ ID NO: 23773 - DNA, 402 bp, Glycine max
  Clone ID: LIB3050-006-Q1-E1-A11
gactcaaaattaaccacaagcataagcacaagcacaagcacaagcacttctctaattccctttcacactctattacagacttcacaagtgcttacacttcaaatggctttggaagctcttcaatcacccaccacagccactccatcgtttagtccctttgaagaaaccagtctcagttacttagagacaccgtggacgaaaggaaagcgttctaagcgtagccgcacggagcaacaactgcaacacccttcatgcaccgaggaagagtacctcgctctttgtctcatcatgctcgctcgcggcggcgccggcagtgtctccaccgccaagcccgctgtctccgaaaacaattctgcgccgctatccgccgccaaactgagctacaaatgttcggtttgcaac

SEQ ID NO: 23774 - DNA, 401 bp, Glycine max
  Clone ID: LIB3050-006-Q1-E1-A12
gaagaaaaaataaaaaaacacaacgtcacctgtgcgttcctggaatggtacatcagcatagggttctcttctgttctggttacgttatgctctatgcaaaacagtgccatggaagcctccaaactcagtagcagtgatcaaaacgttcgatgccatcactgcgcaggacccctttccaaagacatggaaaccagtcactggaccgtttcgcctctcattagggatagcttctccatgattggttctgccgttggcggcgttgcaagtgcattttatggattcaatcttgttatgccgattgtccaaagaacgatcaaaggacccatgtggttgcattttctcatacgtgcaccacctgtgatagtattctcttcagcctgtgccggactggcgggtggggc

SEQ ID NO: 23775 - DNA, 344 bp, Glycine max
  Clone ID: LIB3050-006-Q1-E1-A2
accactcctccataacgatgcgagggtccaatcaaaagtgagagagagagaatggagagattggaagaaatggtagggatgggcgtgacaatgccagtgtaatacggttgggattttgcataggactgggactcaaccctcctcacactctttatagggatcaagacggcattgccatccatcaagatatttataaggacgctcctgatccttccaattgcccttatcgcactcatagctctctgactatcattcaatcaaattccaatctggcaacatttgttagatacatgatcccattaagtcattaagtttgaattcggagaccttcaatggattgcctt

SEQ ID NO: 23776 - DNA, 347 bp, Glycine max
  Clone ID: LIB3050-006-Q1-E1-A3
catgatatgagtgctgaacgccctgagctggatgatgacaagacaatgatgaacatacacagggagcagaggaagcgtgaaagtagggagaggagaatgcgtgatcaagatgagagagaacatgatcttgataacaacagggatttgaacttgcaacgctttcctgacaaaaagaaatctgtcaagaaggctgaaggcatgtatagtcaagcattcagtttctgtgagaaagttaaggagaagttgagcagttctgatgattaccaaacgttcttgaagtgccctcatattttcagcaatggaataattagaaggaatgatttgcataatttggtaactgatttact

SEQ ID NO: 23777 - DNA, 410 bp, Glycine max
  Clone ID: LIB3050-006-Q1-E1-A4
gattgtgattgtgaacaaaaaagtgtagtgggaaatggcaggtgcgggtgcaggaggagggtatggggacgcgaaccagaggatagactacgtgttcaaggtggtgctgataggggactcggcggtggggaagtcgcagatactagctcggtttgcgaggaacgagttcagcttggactccaagtccaccatcggtgttgaatttcagacgaggactttggttatcgatcacaagaccgttaaggctcagatctgggacactgccggccaagaacgatacagagcagttacgagtgcatattacaggggtgctgtgggggcaatgttggtttatgacatcactaaacgccaaacctttgattcacatacacgttggttagaagaactgcgcaaccatgctgacaagaaca

SEQ ID NO: 23778 - DNA, 395 bp, Glycine max
  Clone ID: LIB3050-006-Q1-E1-A5
caaataacaatgggtttaggttttgttgtcggattcctcgggcttctgagtctatttcacgccgcatattctaccatccaatacaagggtttgttgaagattacggaggaagagttttcagggcctcctttgaatgtggtgattgaggtgactctagggttagtttttttgcatgtgggctgcactaaccgtgccaggaaagtttttgtcaatccaccctcactctgaagagaacagaattgtttctctaccttccaacgtggacttcatgatcttcaaccatcgatacaaagtctttcctgtggaaatggatgtgaagctgaagcattgagaacttttatataattggacggagtaacttcatttcttacacgaggaagaaagagtctttcctc

SEQ ID NO: 23779 - DNA, 397 bp, Glycine max
  Clone ID: LIB3050-006-Q1-E1-A6
gaagaggaagcagctttcgtgaaggtgagcatggatggtgcaccgtatctacgaaaggtggacataaagttgtacaagagctaccaggagctgtcagatgcgctggctaagatgttcagttccttcacgattgaaaaatgtgggtcccaagggatgaaggactttatgaatgagaccaaattgatagaccttttgaacggctctgattatgtacccacttatcaagacaaggacggagactggatgctcgtcggtgacgtgccctgggaaatgttcgttgaatcatgccagcgccttcgcataatgaaaggttctgaggctatcggccttgcaccaagagccgtggaaaagtgcaagaacagaagctgaagtgattttagggttcgggcacaacaat

SEQ ID NO: 23780 - DNA, 403 bp, Glycine max
  Clone ID: LIB3050-006-Q1-E1-A7
ggtgagttcattaacatatacaaattctctgtgttgtgttgtgtacttgtgttggttgtgttgttgttgtaggaaatttaagtgaagagagaatgatgatgaagtctgctatgtgtgcattggtgcttgtggcactggttgtggttgaagtggggcccatggctgaggctgcggtgacttgcaagccaacacagttgactccttgtcttccggcaattaattcaggttctgcaccttcgagtgcttgttgccagaagctgaaggagcaaaagccatgcttctgtggctacctcaaaaaccctagcttgaagcagtatgttaactctcctaatgccaaaaaaaccgttagttcttgtggtattgcctatccaacttgttaagcacctcttatatatatatatat

SEQ ID NO: 23781 - DNA, 385 bp, Glycine max
  Clone ID: LIB3050-006-Q1-E1-A8
cgcctcgccaatgttgaccgatctgcctccaagaaaaacaacaacaacttgaggcttgatgattgggtgttgtgtcgaatctacaacaagaaagggaagattgagaaatacaacacgaccgcaccgaagatgaatcttgaaatgattcatagttttgagcacgagaacgagacgaagcctgagattcataagcttggaaatgagcaattgttgtacacggagacttcagattcggtgccaaggttgcacacggactcgagcagctcggagcacgtggtttcgcccgatgtgaggtgcgagagggaagtgcagagcgaccccaagtggaataacgatgattatgatctgggcctacagctagaaaacgcgtttgattttcagttta

SEQ ID NO: 23782 - DNA, 406 bp, Glycine max
  unsure (1)..(406): unsure at all n locations
  Clone ID: LIB3050-006-Q1-E1-A9
gacggtggtggtggacaacacgttcgcgcccatggtgctttcgccagcgcgtcttggtgctgatgttgtcgttcacagtatctccaagttcatcagcggtggggccgatatcattgcaggagcggtgtgcggacccgcaagactggtgaacgcaatgatggatctgcaacaagggtcactaatgctgctgggtccaacaatgaatgcgaaagtggcattcgaactctcggagagaataccgcacctagggctaagaatgaaggagcatagcaaccgcgcactagagttcgcaacgaggctcaaaaggctangaatgagggtaatatacccgggcctggaggagcacccacagcaccagcttctgaaatcaatgcacaacaaggactatggctacggcgggctcatg

SEQ ID NO: 23783 - DNA, 391 bp, Glycine max
  Clone ID: LIB3050-006-Q1-E1-B1
gggcacaagaaggaggaggagcataagggtgagcaccatgctggagaatacaaaggggagcaccatggtgaacacagtagtgagtacaaaggagagcatcatggtgaacacaaagctggagagtaccatggtgagcacaagccagagcacaaagaggggttcctagacaaagtcaaggacaagatccatggtgagggcggcgccgccgagggcgagaagaagaagaaggagaagaagaagaaggagcatggccatgagcatggccatgacagcagcagcagcagtgacagtgattaagctgctgcatcacctatatatttaaaaggtttatgggaccatagtagcgaaggctgtgccttaatttctctccctctctctctctctctctctc

SEQ ID NO: 23784 - DNA, 397 bp, Glycine max
  Clone ID: LIB3050-006-Q1-E1-B10
gaacactgaaaagaaaggaaagtgaagttgagagtttaagaagaacaagaaatgggggttggttcccaggatgccatcaagcagttccaggcattcattgaccaagctgagcagcctttgcgaacaacgtttcagaatgttcatcaaggatttgtcactgcaactttaatgcggtttctaaaagcaagggactgggatccttacaaggcacagaaaatgttggttgattgtttaaattggagggtgcaaaatgagattgacaatatattatctaaaccaattgttcctgctgatttatacagagcggtgcgtgattcacaactcataggattatcaggttactcaagatagggtctgcctgtctttgcaattggtgttgggcttagcacatttgaca

SEQ ID NO: 23785 - DNA, 376 bp, Glycine max
  Clone ID: LIB3050-006-Q1-E1-B11
gagggttttacactgcggcagctacttcggctccatcttcttcgatctctcaaactctatcggcgcagaaccaatcctatatcactatggggaagacacatggaatgggggctgcccgcaagctgaagtctcaccgtatgagacaaaggtgggctgacaagtcatacaaaaagtctcatcttggaaatgaatggaataagccttttgctggttcatcccatgcaaagggtattgttcttgaaaagataggtattgaggctaagcagcccaactctgccattcgaaaatgtgccagggttcaactcatcaaatatgggaagaagattgctgcattcgtgccaaatgattgttgcttaaattacattgaagagaatga

SEQ ID NO: 23786 - DNA, 419 bp, Glycine max
  Clone ID: LIB3050-006-Q1-E1-B12
agaagggggaagaaaagacattcaacaaacaacgcaatgggtattccgtcggaactgatggacatgttgttgcccaacaaaaagggcgtcctcgttgcctctcccgcataggacaggaagactttgaggtccaagcaatgcactagggaaggtgtgcgagctggattcaaggctgcttccattgctggtgttgccagtgctgtgcctacattggctgcagttcgtatgattccatgggcaaaggcaaacctcaattatactgctcaggcacttatcatatctgctgcatccatcgcctcatacttcatcactgctgataaaactatcttggagtgtgcaaggaaaaatgccaagcttgaagatgctttgagacacaatcaacaatagttgtcttagaaactgaaataagtacccatcat

SEQ ID NO: 23787 - DNA, 387 bp, Glycine max
  unsure (1)..(387): unsure at all n locations
  Clone ID: LIB3050-006-Q1-E1-B2
ggttctagtgtgtgattgtttgttgttgtaactcgttcttcttcttttgttgttctgtgtttgtgtttgttttttctctcacctgaaaatgtcttgctgcggtggtaactgtggttgcggaagctcctgcaagtgcggcaacggctgcggaggctgcaagatgtacccagacttgggctacactgactcaaccaccaccgagaccttggtcatgggagtggcacctgttaaggctcaatttgagggtgctgaaatgggtgtgcccgctgagaacgatggctgcaaatgtggaccaaactggtcctgcaacccctgcacttgcaagtgacgtgttgggagagcaagcttcaagcagagatagcccttaattangaataatgataaact

SEQ ID NO: 23788 - DNA, 410 bp, Glycine max
  Clone ID: LIB3050-006-Q1-E1-B3
gacgccagccagatccacaaatcggaaagaatcagagcgccgtcaaaaaccgccgtccacggcggtgaaactcgccttcgaatccagagcctctctcggttcctcactcttctcacatcgagcgcaacgccaaaaaatcgaatttcacgatggaagagttggagcagtggaaggaacaactttctcacttcgctaacctagctttggatcgtcttctcgaggttcctccgaatcagctctacgcagctgctgcaatcgtgattttcacaacgctgcttcttctctcaattcggttgttcaagcgtgcgaagtcaaacactgttgtgttggccgggctcagcgggagcggaaaaactgttatcttctatcagcttatggatggctctactcatcacggtactgttacatca

SEQ ID NO: 23789 - DNA, 393 bp, Glycine max
  unsure (1)..(393): unsure at all n locations
  Clone ID: LIB3050-006-Q1-E1-B4
gaaaatgaagaaaaggagcctgaggacaaggagatgacactggaagagtatgagaaggtgctggaagagaaaagaaaggccctgcaggcacaaaaaactgaagtaagaaaggtggacatcaaggagtttgcatccatgcagccactgtctaacaagaaagaaaatgatgagatctttattaaattgggatctgacaaggataaacgcaaagatgctctagagaaggaggagaagtctaagaagtctgtcaacatcactgagtttctgaagccagctgaacgggaaaggtactactctggtgggcgcggtcggngacgtggccgtggttctagaggaggtacagtggaaatgcatacagcaatgttccagctccatcaattgaggatcccgggc

SEQ ID NO: 23790 - DNA, 409 bp, Glycine max
  Clone ID: LIB3050-006-Q1-E1-B5
gggttcattgcgggatggcagtggaagcattgcatgaacagcacacaggagtgcacctgaagaatatggctctgaagaaccgcactttgggcatcactttcaccgagataagtcccactgatcacgtcaccgggtttcacaagcgcaagagcaagcgaatagaggaagcccagaagcaacatatctgaggctctgctccacagacgcacctctgaccgcaaatcgacgaaattggtaagataccatgttcttaatggaggcctgccatcatctgatcatattgatggggaccaagcagaaaccttcgagcaagtgtaatctattgctgaaacaaagatcatacacaatgatcatctgaaagtcactgttgtcacaagtgagataaaccctgatgacggtagttatccta

SEQ ID NO: 23791 - DNA, 392 bp, Glycine max
  Clone ID: LIB3050-006-Q1-E1-B6
cttgtagccaatcaccgcttgaattttcagatacgccaacaaagttcacatttcgtgaggggatttcagcaacttattcagaaggattggattgacatgtttaatgaacatgaacttcagcttggatattgatgatctgcggctgcataccaactatgcaggaggctatcatggtgagcattatgttatggagatgttttgggaagttctcaaaggcttttcactggaaaacaggaagaaatttctgaagtttgtgacaggttgctctcgtgggccattgcttggtttccgatatcttgaacctatgttttgcatacaaagggcttccggtaatgccgctgaggaatcacttgaccgatttacaacatcggctacctgtatgaatctactaa

SEQ ID NO: 23792 - DNA, 397 bp, Glycine max
  Clone ID: LIB3050-006-Q1-E1-B7
gaaccacatgcatatttatctggggagtgtgttgaatgcatggcaacttcggacagtgttgtgcgagctggcctaactcccaaacacagagatgtccagaccctttgctccatgctcacatacaaacagggttctcctgaaatcttgcgtggagtatctgttaatccagatgtaaataaatatactccaccatttgaggaatttgagattgatcgttgcattcttcctcaaggggaaacagtggtgttcccagcagttccaggtccttcgatctttttggtcacagttggtgaaggaacaatgaatacaggattacccaaaggacatgtggtcaccgaaggtgatgttctttttgccgcagctaacactgagattagtgttactagtgcatccgagt

SEQ ID NO: 23793 - DNA, 406 bp, Glycine max
  Clone ID: LIB3050-006-Q1-E1-B8
ggaagcatcagcaacaaacaaactaattaagcaacacacacttcaatttatcagcatggcctccgttcagtgccacaaaacctgcaaagtgagctgccaacaggaaaaccagcacgcctcgtttgggcagaaagtttctgacttgttcaaagggcatcaacataatgaccacagctccaattatgccacccaaaccaaagtgctttcccagtcagggtcagggttaggccccttcaccaccaaaactcaaacacaatgcggttgcccccaaacacatctcagtaccactcatggctccaacacaaaaggccatggccatggccaacggagaattaagagggagcacaagagacggatgctgcagaacatcaaggatcgcttatcacgtgacaacagcaacgacagc

SEQ ID NO: 23794 - DNA, 399 bp, Glycine max
  Clone ID: LIB3050-006-Q1-E1-B9
gaacttaactcagtgaatcctctcttctcatttcctaggaatcccctaagccaccgcagcatcggttcctccacccaccgcgatggcgcacgtgccggcgagcgaagcgacggcgttctggacggacgagaagcacgtgcacttcctaaactccatggaagcctccttcgtccgcacaatgctccaaaacgaaggcaactcaaactcctccaccacgcgctactctctgcgcctcgaccgttatctccccgacacatccgaatccaccttggatttgaaaccaaactctcgctgccaccgcaccgtaaagcaccatgcaccctcagattcaatgggtccaacaaccagaagaacaaggatcaggacgagatcatctcagccctgcaattcgtcagagga

SEQ ID NO: 23795 - DNA, 314 bp, Glycine max
  Clone ID: LIB3050-006-Q1-E1-C1
gaacacagcagaaaccctgactactttgctgttgtggttctctatgttgatggaacatacgatgtcactgctgttgagttgtttcagcaagattgccaagaatggaagccaatgcgcagggcatttggggcaatgtttgactatagcaacccaccaaacggtgagatctacttgaggttccaagtgagtggcagtgcagggctttattgggtacagtccaagaatgctatctctggtgattggaaggccggagcaacatatgacaccaatgttcagcttaattaggaaggaaagaagcactttgagattccttg

SEQ ID NO: 23796 - DNA, 411 bp, Glycine max
  Clone ID: LIB3050-006-Q1-E1-C10
ggttctagtgtatgtgattgttgtgactcgttcttcttcgtcgttatcttcttcttttgttgtttgtgtgtttgttttttctctcacctgaaaatgtcttgctgcggtggtaactgtggttgcggaagcgcctgcaagtgcggcaacggctgcggaggctgcaagatgtacccagacttgagctacaccgagtcaaccaccaccgagaccttggtcatgggagtggcaccagttaaggctcaattcgagagtgctgaaatgggtgttcccgctgagaacgatggctgcaaatgtggagctaactgcacctgcaacccctgcacttgcaagtgaggtgttggagagctaaagcttcaagcagaaatggcccttagaaattatgataaaaactatatgtagtttcaaaacttc

SEQ ID NO: 23797 - DNA, 315 bp, Glycine max
  Clone ID: LIB3050-006-Q1-E1-C11
gaaatggatctccaccaatgttcaatcgactgtccgttctctccctccaactggtttgactgtggaaacacccttcattgataactctgaatctggtcagcaaaggttcaggacggttagtgaccatttcatacctgtgttccacaaaaaggcctacttgcattggcatactggataacgatacgattaaattgagtttactgaagctgatagcatcatcaatgaccgtgtgtgcgactatcatcactaccaacatgtaactgctgatcatgagggctatgactaccaccatgacgaagaacatcatgaacatca

SEQ ID NO: 23798 - DNA, 266 bp, Glycine max
  Clone ID: LIB3050-006-Q1-E1-C12
gacacagaaggggacggtttaacaccgatgcatgttcgtttgcactgttacctgtgataccgcacactcaatggaagctgctcaagccgacgagaaccatgtgggtcatgtatgtcgcagagtcgagtgcaaggtcgagctcgccctgtatgtcacaggagttgactatgcagtcttagatctcgttttcttgatcataagtgatgcggatctcaattgcaatcccgttcacagcaacgtgcatgtatctgttcacgatacgtatg

SEQ ID NO: 23799 - DNA, 170 bp, Glycine max
  Clone ID: LIB3050-006-Q1-E1-C2
gacatactcctccaaattctaatgcaaacccttcactactccaaattcgaggacttcagcatagtccatcttttcccacaacggtggcccgattctaagcctctaatgctcaggcacttgggaatgatcacctgcagtttgcaatggttgttcgttatagagtgttgtga

SEQ ID NO: 23800 - DNA, 381 bp, Glycine max
  Clone ID: LIB3050-006-Q1-E1-C3
ggagggaggggacagctgtgaaaattgtagatccgccattaaacaacaattcacgaaatgaaatgttgagatgtatccatatcggtttgctttgtgttcaagaaaatttagctgatagaccaaccatgacgaccattatgctcatgcttaatagctactctctcagtcttccaattccttctaaacctgcattttatgtgagcagtagaactggaagcatttcagccacgcagtcatgggggtatagttcaggggaatcaagatcaagagaattaacaattaaatcagctcaagaagcagaaaatgagtttactgatccataccttcgctagattttgctcatggaattgatattcattcaccatcgatgtcctggagttc

SEQ ID NO: 23801 - DNA, 295 bp, Glycine max
  Clone ID: LIB3050-006-Q1-E1-C4
ggctgtgagtgagattacccatagatagagagcgcggcataacctaaacttacccttcgtctctctgtgtgtgtgcgcatcaaacgcaaccagaagcagccatggccactgcaagaactgtgaaggacgtttctcctcatgagttcgtcaaagcttactcttctcacctcaagcgatctggcaagatggagctgccagagtggactgatattgtgaaaactgcaagatttaaggagttggctccctaagattccggactggtactatgttaaaagctgccttcaatgggcaagaa

SEQ ID NO: 23802 - DNA, 400 bp, Glycine max
  Clone ID: LIB3050-006-Q1-E1-C5
ggaaaaaagggcacatacttttttgaattctcgaggtctttgaggactatggatcatcttcaacaggacgtgcaatttaacattggtggatccagcaagatgtctgttgcattctggtatccagtagatggtcaaccttggcatggttctgggcactactctgtttactgtgattgggttcccagtgacgtatctgttggtaaatctttgaatggcaagtcagtagatgcagcatcaaatagctcgtggaatgttgctagtgccttttctgttatactatcagtagcagcactttgtgtgtctgtttttgtgagctatagggtgttcagccccaagagtgtctcttttacaccgatagagaacaacaacctttaaatattgaaccaagagcttgagtttg

SEQ ID NO: 23803 - DNA, 373 bp, Glycine max
  Clone ID: LIB3050-006-Q1-E1-C6
ggggcacaacacaacacaaaagtcacaatcacaaatctgagtatagtggagtagggtttttttgcgtttgagagaagcatgagcaggagtttgggaattccggtgaagctgctccacgaggcttcggggcacgtggtgacggtggagctcaagagcggagaactctacagaggcagcatgatcgagtgcgaggacaactggaactgccaactcgagagcatcacctacactgccaaggatggcaaaacatcgcaacttgagcatgtttttattcgaggaagcaaagtcaggtttatggtcatcccagacatggctgaagaatgcgtctatgtttaagcgtttggatgcaagaatcaagggcaacggtgcatca

SEQ ID NO: 23804 - DNA, 370 bp, Glycine max
  Clone ID: LIB3050-006-Q1-E1-C7
gacacatcacaacaacaacaacaacaaaaaaagacaaaaactacttccttcgctccgttgctgtgttttctttctcaaaaatgggtcgtacctatgttcttatgatggttgctgcattgttgttgagctccaccatggctcaatcgccagcttcgtcgccggctttgtcggccacccacacgccggtggccactccacctaggagggcgttgtcgccgtctccgtcgtctgtgtcaccagcggcttcacccgccaccggaaattctcctccggcaccacctacttcttctccttcggaatcgccacttccatcatctgctactcccaacatctctccctcgaccatctcgactcccccatctgaaggacc

SEQ ID NO: 23805 - DNA, 364 bp, Glycine max
  Clone ID: LIB3050-006-Q1-E1-C8
aggggaggagaggcggagacgaagaagtgaagagaagagaagagaagggatttggatctgaaaagagaagatggggggaggaatggaagcaaacaagaacaagctcatagaggattggggcactgctagagagaatctggagttcaatttccgttggactcgccgcaaccttgctcttgttggcatcttcggcatcgctattcccgtcctcgtctacaagggcatcgtccgtgaattccatatgcaagatgaagataatggtcggccgtacaggaagttcatgtgagagagtatggagagtcttttgtaataattcgtcaagttagaccttgatattatgacgctacaaaccatgttttttttt

SEQ ID NO: 23806 - DNA, 379 bp, Glycine max
  Clone ID: LIB3050-006-Q1-E1-C9
ggagaaaaacgagccaattcatcattttctctcttctctgcttcttcttgttcaaatcttaggagctgaggagaatcaatcgagagaaatatgtctggtatcgctcgtggacgccttgctgaggaacgaaagtcatggcgcaaaaaccatccacacggtttcgttgccaagcccgagactctacctgatggcaccgtaaatttgatggtctggcattgcactattcctggcaagaccgggactgattgggaggggtgatatttcccactgacaatgcacttcagtgaagattaccctagcaagcctcacaagtgcaaattccctcaaggtttctttcaccctaatgtgcatccatctggaactgtttgcttgtctatac

SEQ ID NO: 23807 - DNA, 367 bp, Glycine max
  Clone ID: LIB3050-006-Q1-E1-D1
gcctttaaggattacttcaagagacttttcaactttaaaaaggacaaagatggctactggaagtggtttgctgggaatttggcatctggtggggctgctggggcttcttccctcttatttgtctattctttggattatgcccggactcgtttagcaaacgatgcaaaggctgcaaagaagggtggtgagaggcagtttaatggcttggttgatgtttacaggaaaaccatcaagtctgatggtgttgctggcctttatcgtgggttcaacatatcatgtgttggaattatagtgtatcgcggtctttactttggaatgtatgattccctgaagccagtagttttggttggtgggttgcaggatagtt

SEQ ID NO: 23808 - DNA, 408 bp, Glycine max
  Clone ID: LIB3050-006-Q1-E1-D10
ggtacagaaattaacaaccatatctattcttacaagttacatccattgagaaacatgaaggtctcccccttagcattttcaatcctttttttgtccttcaccatagaactcttcattggcattgcttcagcagcacaagaaccagtgcttgacgcctcaggccagaagctgagaacaggtgtcaagtactacattctaccagtcttcagaggcagaggtggaggcctaacagtttcaagcagtggcaacaacacatgccccctctttgtggtgcaagagaagcttgaagtctcaaagggcaccccagttaccttcacaccctacaatgccgaaagtggtgtcattctaacctcaaccgatctcaacatcaagtcctatgtgaaaagcaccacttgtgataaacctcca

SEQ ID NO: 23809 - DNA, 352 bp, Glycine max
  Clone ID: LIB3050-006-Q1-E1-D12
ggcggcagcttcatctgtttttctgcatcggcgtgaacaatggcgacgtacgctgcgatgaagcccaataagcctggcttggaggagtcccaagaacagatccacaagataaggatcaccctttcctccaagcacgtcaaaaatctcgagaaggtttgtggggacttggttcgtggtgcaaaggataagaggctcagggttaagggacctgtcaggatgcccactaaggttcttcacatcactaccaggaagtccccctgtggtgaaggtaccaacacatgggacagatttgaacttcgtgtgcacaagagggtgattgacctctacagtttcccagatgtggttaagcaga

SEQ ID NO: 23810 - DNA, 373 bp, Glycine max
  Clone ID: LIB3050-006-Q1-E1-D2
gagcactaatttatatagcaagctagctaggttgaaaatagtttggttttgtagtaagtgaggtgaggtgccaaaatggtgaagataactcttggtactttcgatgactcttttggtgttgcctctcttaaggcttatttggcagagttccatgcaactctgattttcgtgttcgctggtgttggttcagccatcgcttacaacgagcttacaaaagatgcagccttggatccaacggggctggtggcagtagctgtggcccatgcatttgcactgtttgtaggtgtctccgtcgcagccaacatctcgggtggccatttgaacccagctgttacttttggattggccattggaggcaacatcaccctcatta

SEQ ID NO: 23811 - DNA, 389 bp, Glycine max
  Clone ID: LIB3050-006-Q1-E1-D3
ggaatagcatcggcagcaccacaacactgtgccctctttctctctttccttcgcagaagccatggcctcatttgcacgtggagccgcatctttaacccgcattggtctttccacttccaagactccccttcaactcatccaccgccgtggcctcgccgatcaccatggccctcgcaaagttgcctgctggaaagatccaatgagcccatctaaatggaaggaggagcactttgtgattgtctctttaactggttggggactactcatctatgggggatacaagttggccacaggaggcaagggcaagaaagaagacgaattggcaaaagcataacactgaggtttggagaatattaaacaatacaagtgttcttggtaataatgctgct

SEQ ID NO: 23812 - DNA, 311 bp, Glycine max
  Clone ID: LIB3050-006-Q1-E1-D4
ggggacgtattttgggctggtcagcatcggaagtctggtattggttatgctgctcgctacaacactgataagtcggttgctacagggcaagttgctagcactggaatggttcttctaagctatgttcacaaggtatctgagaaggtttctctagcatctgagtttatgtgcaactacttgtcaagagatgtcacagctagctttggtttatactacatccttagacagtgccgccttaggggaaagattgattccaatggctgtgtcgctgcttttttggaggagcggttaaatatgggtctgaatttaat

SEQ ID NO: 23813 - DNA, 377 bp, Glycine max
  Clone ID: LIB3050-006-Q1-E1-D5
ggatggaagacagtgacatacacaatttgcaaacagaagctttacatcaacaatacgaattggtcaaacaaaggactatgaatggaaattcaatttatggttcccacgtgatgcagtatggtgacatagggcttagcgagaacaatctcgtcttatatttgggtacaaatcctgctaatgataattttacttttgtgcttaaaactcattggtgccaccttcaaaagcagtcaaccaacgtgatgcagatgtcatccatttttgggataagttccgcaaagctcctgtgggttcttctaggaaagctgcagctgagaaacaaattcttgaagcaatgtctcacagaatgcatatagatgacagcatgaaacgtattg

SEQ ID NO: 23814 - DNA, 346 bp, Glycine max
  Clone ID: LIB3050-006-Q1-E1-D6
ggggaagacaccggcacaagttgcccttcgatggggcttgcaagcaggtcatagtgtgcttcctaagagcactaatgagtccagaatcaagggaaattttgatatctttggactggtctattcctcaagatttgatgaccaggatcgctgaaattaagcacgaaaggctagttaaggccagtttttttgttcacgagacctatggtgcctataggagcattgaagacgtctgggatggtgaactctgagcaatatgcatctttgagacgttgaaaaatacattgctcctagagcaaatttattctgccttatacccactagttgtagtgattcaagtgagattttg

SEQ ID NO: 23815 - DNA, 370 bp, Glycine max
  Clone ID: LIB3050-006-Q1-E1-D7
acagggatggaaaaagaggatggaacatcttggagagcttggtgagagtgtggagagtgctagtagaagaagatttatgatccttcagagagccaatgtgtcttcatagtttcagccctagcaaggtttcgtacgtcctggactcctgggtgtaactaactgggaagtaggtccatcctaggagaaattgttatatgggtctatgtggtctcggtcaatctttacatgatatgctttaactctttttcataaattgagaaatgtgattatatgtcccatatagatgcatcgggaccccatagttccggaccatgtaacaatttctctctttctcagctaatgatgatggatagacaaagcaaggaaagtt

SEQ ID NO: 23816 - DNA, 405 bp, Glycine max
  Clone ID: LIB3050-006-Q1-E1-D8
ggcagcagttgggaggaggcactgtggcagaagtcttaggagtgtaaaacagagacgcaaaatgaagacgattctatcgtccgagaccatgaatattcccgacgacgtgagcatcaaggttcacgctagggttatcgaggttgtgggccctcgtggaaaactcgtgcgagacttccaccatctgagcttggacttccaacttattaccgacgatggcggtaaaaggaagctcaagattgattcttgggttggttctcgtaaaacctccgccgccatccgcaccgccctcagccacgttgagaatttgatcaccggcgtcaaccaaggataccgatacagaatgagattcgtgtacgctcaatttccgatcaacgctagcattggcaacaacagcaagtccatcga

SEQ ID NO: 23817 - DNA, 407 bp, Glycine max
  Clone ID: LIB3050-006-Q1-E1-D9
ggagaggaagagagttttgtgggggtaaggagaaggaagatggagagggagaagcattggatatcgaaatcgaattcaaaggtgtgtaaaagatgcaagcaaaactatgagccggcttctaacacttgaacctcatgccgtttccacacttccttcttcgtttgtcgccgtcacgacgatcaaaagaggtactatgaattgggcccggatgatccaccttatgctgccaagttctatgactgttgtggggctgaagaccctgaagcttctggctgcacaaccaattttcatgtctcttatggctaagactgatgatataatatctcatcttactacttagtattggacaattaccatcatcatacttgtctcatttttaccaatatatatgttttcagattcttcat

SEQ ID NO: 23818 - DNA, 419 bp, Glycine max
  Clone ID: LIB3050-006-Q1-E1-E1
agaaggggacccaaacacttctctttttctctctctacactctattcaacccttcacattttctctcttctttatcttaaattacctttccatggaggaaagcaagaaacgagtccgggacgagtccagctactcacccgagtcccaaactcagctggtcgactttcccgagtctgaaagtcagcgggtcgactcacctgagtctaagattcgtcgagttgactcgtccgagtctcaactcgactcggtccttgactcggaggtgcgtctacaagacgacatttttaacatacttgacgacgccgataatgtgcctgagcgtgactcggtgcaaggtcttgactcagtgatcaaaagcttcgaagatgagataaacgctcctggttcggattctggttcgggtgaccccgaccaggaac

SEQ ID NO: 23819 - DNA, 401 bp, Glycine max
  Clone ID: LIB3050-006-Q1-E1-E10
gcattccactgagtgtagtaatcaatcagcttttgtttgttcttcagtactttagtgtgtgatttacttccaggattttgagaatgtctagctgtgggtgtggaagtagctgcaactgtggcagcaactgcggttgcaacaagtactcttttgacttgagctatgttgagaagacaaccacatagactcttgttttgggtgttgggtctgtgaaggcccaattggagggtgctgaaatgggtgttgcaactgagaacggtggctgcaactgtggatcaagctgcacctgcgacccatgcaactgcaagtgaggtcaacatttataaccttgaagcagagataactgtcatatatgtatcaacaaataataagaattacgtgttgtgtttaataaagtgatc

SEQ ID NO: 23820 - DNA, 379 bp, Glycine max
  Clone ID: LIB3050-006-Q1-E1-E11
gagagcaaagtaatcgcaaaatctagggtttgttcgttcgctcgttcgcaacaatggcgctgaggagattctacaacgagatcaaggggaagagggtgagcgaggtccctgagcacgtgaagccgatgctgtccctgagctacatcaagaaagcgattcagagaggcttcgacaattaccatgccaagtacattgaaaccagttcccctgatcccatcttccatgtctgctacggcggcatgatcttctcctacctcgtcgctctcccccacgagcgccgccacctcctccacgcccaggagcacgctcagcagcatcactgattccatccaccttcagcaggatcctggttgaattggaggtggttggcttgcttgat

SEQ ID NO: 23821 - DNA, 408 bp, Glycine max
  Clone ID: LIB3050-006-Q1-E1-E12
gacttttcattcattttttttccaattattttatcattcctctgactgagttagagctgcacatctccgttacattactttcccatttcattattcgatccccaattcctctcccacgcagaagaatcatcaccccaaaacccaaattaaaaaaaaacccaaataatacaactgaagttattttaattttcttagtaaaaaaaaaaagagaagaaaaatgacttcgattcatttgataaacactctcgctgctccgcttcgttctttttctcctccgtcgctttttccgcaatgccattctcctctccgttcttccgctgccccgaaacggcgtcgtttcgctaactcctctgggttccgccttgcttcaagccaaaccgtgaattcggttccgcgtgggaatggaac

SEQ ID NO: 23822 - DNA, 299 bp, Glycine max
  Clone ID: LIB3050-006-Q1-E1-E2
gagcgccaatgtttttttcagaggagtttcatcttgtaatcaaaagagtttatcttatagtaagaaatcgatgtcttactccattttaaggaacaaaacaagagaacaatagcctgacaaagggtttagccataaaatcgaatccatcattgatttgggatattgataaggtgaatactcatttctcgtcaatgctaggcataatgcgggtatagggacctaaaaaagattatcttttcttcctatcttatgaactttaaggtgtatgaagtgtcatttcctatcttagattttaaatt

SEQ ID NO: 23823 - DNA, 306 bp, Glycine max
  Clone ID: LIB3050-006-Q1-E1-E3
gacaatcagggagcccagctaccgtgcgcagggtgggtacaacgcgcctccttacggcgtgagggattattcccctgcgccgcaggggtatggtgggtatcctccatatggggccccaccacagcaggcgtattagtccgctccaccaggtgggtatccttataatgcgcgacggcagccttagtagaggccgcctcacagtggctacggctataatgcgctgccgcaaacggcgtcctatgggcaggggagcggttacgggtacgcgccacaagacgagaagaagaagagtaagtttggtgggat

SEQ ID NO: 23824 - DNA, 248 bp, Glycine max
  Clone ID: LIB3050-006-Q1-E1-E4
gaagatgaaagggaacgaaaggaatggaaggaggtggtgtcgttgacgctgctgaggtggccaggccgtggacgaggatgggcccacgcgccgaggtatgtcgcaagggcccccaagtttgtcgggcccaaggtgggcgcacggcgcattcaccagcccaggtaggcgcaggccgcggcattcccgacgagctagagctgtgtacataagcgcagatgacttcagagccttccttctttacattttcc

SEQ ID NO: 23825 - DNA, 363 bp, Glycine max
  Clone ID: LIB3050-006-Q1-E1-E5
gcttgcaaccaccacaacaagaggaaataatcaggaacaggcagcggctgttaatggttcttctgctgctacagtcatatctgctgcttctgcaccaccaaagaaggaaggtggacaagcaaaagctcatgcggacaagaagaagatagatgccacaaagaagagtttgaaaagattgtaataaagatcttcaatcattgaagttttttatttgtgttttagttttacattttgatagagaaggacgggagggagtggggatgtggtctcctgggttaaacatatgctttataaaacgactgacgtattttccttaggagttaatcgatgaaattgaacttcatgttgtctttgaacatgtgc

SEQ ID NO: 23826 - DNA, 370 bp, Glycine max
  Clone ID: LIB3050-006-Q1-E1-E6
gggagaccctgttgcaattcccaatgatgttgagatttataagcatcctgagagaagaaagaagagcccgaacttggggaaccactgcccctggcctaccctatgttgaacaaactataaccaatgctggaaattggttgattgggggtgacctagaggtcattgagcgaatccagtacaatgagcgacttgatcattttcggctgtctccagcagaactccgtgcagagttcacaaggcgcaatgcagatgctgtgtttgccttccagctccggaatcctgttcacaatggccacgctttgctaatgacggacacccgtacgcggcttcttgagatgggttataagaatcctgtcctcgtgcttcatcc

SEQ ID NO: 23827 - DNA, 395 bp, Glycine max
  Clone ID: LIB3050-006-Q1-E1-E7
taatgaagaggctgagggcattgagaatgctaaatggatttccatcaaagcagttctgcgtctgctattgggtacgattattgctgctgcgtttgctgatcctctggttgatgcagtggataacgtttctgacgctacgagtattcctgctttcttcatttccttcatttttctgggcttagcaaccagttcaagtgaagcagtgtcagctataatttttgctagtcgtgataagaggcaaactgcctcattaacgttctctgagctatatggagcagtgacaatgaataatgtgctttgcctatcagttttcatggcccttgtctatgcgaggggattgacatgggacttctcttcacaagtgttggtaaatcgcgtcgtttgcagtgtcgttg

SEQ ID NO: 23828 - DNA, 366 bp, Glycine max
  Clone ID: LIB3050-006-Q1-E1-E8
ggcggcagcttcatctgtttttctgcatcggcgtgaagaatggcgacgtaggctgcgatgaagcccaataagcctggcttggaggagtcccaagaacagatccacaagataaggatcaccctttcctccaagcacgtcaaaaatctcgagaaggtttgtggggacttggttcgtggtgcaaaggataagaggctcagggttaagggacctgtcaggatgcccactaaggttcttcacagcactaccaggaagtccccctgtggtgaaggtaccaacacatgggacagatttgaacttcgtgtgcacaagagggtgattgacctctacagttccccagatgtggttaagcagattacctctatcacg

SEQ ID NO: 23829 - DNA, 347 bp, Glycine max
  Clone ID: LIB3050-006-Q1-E1-E9
tcagaaggtgtttgatctcttgttggaggtggctgtgagtgggaatctgaagcctgatcagatgatcaagaggttgtttgtgtttagtgacatggagtttgatcaagcatcagcaaacccttgggagacagattaccaagcaatcactagaaagtttggtgagaaagggtttggtgatgcagtgcctcagatagtcttttggaatctgagagactcaaaggctaccccagtgccagccactcagaaaaggaatggcactgccttattggttttcctaaaaattgccgaacacggtcctgggtaaaggaggggaacctaacccctgaaaaacccatggaaccaccaat

SEQ ID NO: 23830 - DNA, 385 bp, Glycine max
  unsure (1)..(385): unsure at all n locations
  Clone ID: LIB3050-006-Q1-E1-F1
gggatagattgggaaagcttttatgaactggaaaagcaagctcaaggaaaaggttatgcagatgaaatgcaaggctataaatcagtgaaaggtctaagggatcagatactggctggttctaggcttgcatcttccagaggttatgccagtccaactagacaattttcccagccatggccatcacgagatcttgcaaataacttccaggaaagacctgctacagcacagggcaatggtctaaaatcaaggttacgggaagccaggggtgagggccagaatgtaaggaagtccaaaaggtgagttaatgctcataacttttgagacaatgctttgtttgtgaaggtccatacccgtntgcttctgctaccatgatggctggtaaaaa

SEQ ID NO: 23831 - DNA, 388 bp, Glycine max
  Clone ID: LIB3050-006-Q1-E1-F10
aatcaaatgtttaaggaagaatttctatgacgattcgcaaccccatgcgacgaatccgtctcctccactccttctccgtcgtcttcctctactggttctacgttttctcatgaactaactccctctcattcccctaccctaattcctccaatttccccattttttttctaattaatcagatttgcaaaatcctaatttctctatcctaacataaaccccaaattcaaacaaatccaatggcttcgattccgcgtccggcgagttcgggatcttcggagggaggaggagatccggctgcgatggacgagagacagaggaagcggatggagtcgaacgcgagtccgcacgcgatcgcggttgagaaacagaagctgctcgaagacctatc

SEQ ID NO: 23832 - DNA, 417 bp, Glycine max
  Clone ID: LIB3050-004-Q1-E1-E6
taaaaaaagaacagaggggaaacgcaatcttgcaatcatcttcggctcaaggctcttcgatccttcgaatcattccagttcctccaaaatggccaaatactcacttcgcgttctcgtcactggagccacagggcaaattggatctgctcctgtcgctatgattgctaggggagtgacgctgggtcctgaccaacgcgtgatgctcaacatgcttgagattcatccaacagtagactcgttgaatggggttaaaattgaatttgtggatgcatgacattccctcttcctaaacgtgattttgctacagatgatgtagttgaagtatgcaccggtgtcactattgcagtgatagttggtggattcactagaagagaaggtctggatatgaatgatgtgattactaagaatgtctccatt

SEQ ID NO: 23833 - DNA, 406 bp, Glycine max
  unsure (1)..(406): unsure at all n locations
  Clone ID: LIB3050-006-Q1-E1-F11
ggaggaagaagaagaagaaaaaaagatgaacttgagatggatggaagcggtgttgccgctgggaatcatagctggaatgctctgcgtcatgggaaacgctcagtattacattcacagagctgcacatggcagacctaagcacatcggaaacgatatgtgggatgtggcgatggagcgaagggacaagaagcttatcgagcaagcctctccctccaattaacatcgttgttttgccgatgtcattgtgaagaaaataaactgctcacctggatttacggctgtgttcttgggaggcanggttaatcacaagaatcaaattccgtctgttttcttgtatgcaattcaacataagatttataaatatacctatgctccaatcacaattacttttgctaagcttggcttg

SEQ ID NO: 23834 - DNA, 394 bp, Glycine max
  Clone ID: LIB3050-006-Q1-E1-F12
cacttgaagagtgataaagaagtggctaacctgtggaatgggatgagcaagtccttgagattatcaagggtgccattattggataatgtcattgaagatgttaacaagtattacaatggtagaacgaaggtcaaaatttggaaattcatgaaggtttatgtgttcagttcttggcagtttttgacattcctagctgccatatgcctcttgctcttgatggctttgcaagctttctgctctgtctacacttgtagtcgctttttccgatctgcactaaattcccagtgattgatatgcatgatgtcaactattcacacatggactctatttagtaagtgataacccaaattcacgatgcggtgttggttgctactgaaacgtaccctttgtgatg

SEQ ID NO: 23835 - DNA, 374 bp, Glycine max
  Clone ID: LIB3050-006-Q1-E1-F2
ggaagtttgaaagacaaatacaccatggcagatatcctgagtgaagaacagattgttgattttaaagaggcctttggcttgtttgacaaagatggagatggttgcattactgtggaagaacttgccactgtcattcggtcattggatcagaaccccactgaagaagagctccaagatatgataagcgaagtcgatgcagatggcaatggaaccattgaatttgacgagttcttgagcttgatggccaagaaagtcaaagacactgatgcagaggaggagctcaaagaagctttcaacgtttttgacaaagatcacaatggctacatatcagctagtgagttgagacacgtaatgatcaatccaggggaaaaact

SEQ ID NO: 23836 - DNA, 407 bp, Glycine max
  Clone ID: LIB3050-006-Q1-E1-F3
ggctttagattcttttcccctagattcagccacagttggaaaaaaaaaaaaagttgttcgagatggcacgtacgaagcaaactgctcgtaagtccacaggaggaaaggcacctaggaagcagctcgcaaccaaggctgcacgtaagtctgcaccaactactggtggtgtgaagaagccacatcgttatcgtcctggtaccgttgctcttcgtgagattaggaaataccagaagagtaccgagcttttgatcaggaagctccccttccagaggctggttcgtgaaattgctcaggacttcaagactgatctgcgtttccagagccatgctgtgcttgcattgcaagaagctgctgaggcataccttgttggactctttgaggatactaatctgtgtggcattcacgct

SEQ ID NO: 23837 - DNA, 400 bp, Glycine max
  Clone ID: LIB3050-006-Q1-E1-F5
agaccaaacaatactcagaacctgattaaggagagtatggcacagtttagtggcaaaactttggtgcactggttggtagcaacactgctgattgccttgttgggtggtgcacaagctgttgtgttatgtaacatcgactcaagtcacctaaacttgtgtcgtgctgcacttactggtcaaaaccctccaccaccagatgagaaatgttgtgcagttattcgccaagccaatttaccttgcctctgcagatacaagtctattcatcctttaattggaataaaacccgaaaggctttggccttgcctggtaaatgtggtctccaatcccctcctaattgttgagtgtagtgaagcaattcatgaaggtcctgttcattacaagcacttagtgttcacgtgtt

SEQ ID NO: 23838 - DNA, 354 bp, Glycine max
  Clone ID: LIB3050-006-Q1-E1-F6
gagggaacattcatgtgtagtggtggctttactacgaagttgggaatggaagctgtagctgaaggccatgctgacttggtatcctatggtcgacttttcatctccaatccagacttggttttaaggcttaagcttaatgcacctcttaccaagtataacacgaagacattttacacccaggatcctgttataggatacacagattatcctttcctaagcaaagaaagtgagacaaaggagccaagggcacgcctttaactgtaatgttctttgactttttgaatactcatattgtcgtcatatgtataattaattggagtatcccaatctcaagtgaatgtcctcattatgaaa

SEQ ID NO: 23839 - DNA, 388 bp, Glycine max
  Clone ID: LIB3050-006-Q1-E1-F7
ggagagaaagtgagagagaattacagagcattttccaacacgattacacgaccgaatcaaacccctctttctctccgaagctgcttttaatatcgtactggccttcgattgttctcctctttaatacatactgttctctcttcgatttgagggaacagtacaagagtctgagcatcggttaacccaactgcacaggtagtctccaaataatggagcctcatgatgagactggatgccaggctcctgaacgccccattctttgcattaataattgtggcttctttggaagagcagctaccatgaacatgtgttccaagtgttacaaggacacgctgttgaagcaggagtaggacaaatttgcagcatcatccgttgaaaacattgtgaa

SEQ ID NO: 23840 - DNA, 381 bp, Glycine max
  Clone ID: LIB3050-006-Q1-E1-F8
ggatcacacacaacataaaaacaaactcttaattaattgcttcacctccaaaaaatggccaccaccaccaccacctatgcttatggttcctcttctcaaagatcactgggcatggtgctggctctagtctcagcagtggtgttgtctcccttatatgccaattcaaagagtgataggaggtactatgagtcaaaatggagctctggtgggtttgttctgcctatggttcttgctggactcataattgccataagaacaacctcttcatcaccatcaccaagagcttgttcatttctaccatctcctgagccttcgtgggtgctcagaattggaagctcttcttggggtttggcggggattctcgttatacttatgcttgtt

SEQ ID NO: 23841 - DNA, 390 bp, Glycine max
  Clone ID: LIB3050-006-Q1-E1-F9
gagagaatgtaggaaaggaaagggttttgtagagggagagaattccaaaccaaaaatccgaaataaataattttttttttaaaaaaaaaaagaaccgggtgtgggtgttgttggtgttggcggaggcagatcggagatctgtgatagatatagatggagggagttggggcccggcttgggcggtcctcgacccgctacggaccggccacggtgttcactggaccggtccggaagtggaagaagaaatggatccacgtgtccccttcttctgcttcctctaattccaacgccaataatcatcacaaccacgcttcgcatgcctctcatcttctcctctacaagtggacgcctctcaaccacaagcagaacaccgcaactactaacaacgct

SEQ ID NO: 23842 - DNA, 360 bp, Glycine max
  Clone ID: LIB3050-002-Q1-E1-F11
gtctgggataatcccctaaaacatccaatcccaacccatctttctctttttctcgctctctcccccccaaaccctagctttcaccatgcggttccaatcgctctaactctaactccctctctccatcaccgatcttcgatccgcatcgccgttcctttgaatcgcttcagattctccgctgcttccatcacgaggaggagtctttcgcgattcgcgctcgaatcttccgttgccgccgatcgaagagattcgctccgaatcccatagccctgcccttcaagtttttccccccaattaccccatcctgtagtcgttcttcgtctattcgattggattgccctgttttgccctaaactgttc

SEQ ID NO: 23843 - DNA, 323 bp, Glycine max
  unsure (1)..(323): unsure at all n locations
  Clone ID: LIB3050-002-Q1-E1-F12
ggggttaggtatgaaattgaaaacaaggaagggtaattgtattcacattttgtaaagggcaatttccaaaacccggtcttgggggcacaattcaattgtggccccattaaagggcgtagtggtgaaggagccgaagtggatggtggcggctgcggcgacaacggaggagaagcataatgagaatttgagcagcgaagggagtttggaggacgatgattcgtggagagtcagaatcttcaatgggcgcaagggaaagtangggaagatcgtgttcgtgttgtggtgtttgangaacacgattgggtttttgtggggacctatga

SEQ ID NO: 23844 - DNA, 418 bp, Glycine max
  unsure (1)..(418): unsure at all n locations
  Clone ID: LIB3050-002-Q1-E1-F2
gaaaagagaagagaataatacgaagagccagggttttgcctcagaaagggttcacccatttgcaaagtgcctcgagagttgagatcacatcggaacaaaacttggagaattattacaatttacaaggtgacaaaagtgcatggcatagatttttttttatctgtataaatcaaggtaccagagaatttataacaactcagacacttttctcaattgagacctcttggtaaatggtatgtcatagataaagctacatgcgtgctcaacaaagttcttattctcaatcccccttaaataagttgggaactttccccacttgcctcaaccttcttcatangaagaccaaattcctcctcaacaaaccaagaatcaagganaatattggtgcatgctgcaagagaagacaatccaacataaa

SEQ ID NO: 23845 - DNA, 326 bp, Glycine max
  Clone ID: LIB3050-002-Q1-E1-F3
ggagaacagcaaagattggggatggtatgtgaatctaatctcttgtaattttagacggaattttttaattttcctaaatatttttgttcatactgcacgccccttaaaaagactcaaatccctaaagaacattggtaaaaattaaaataatccccttaaagggttttaaacttgggcaatccggtccggtaaggcaccctggtcctttaacaagcccaaatccggaacccttgacaattgaacaaattaggtagaatttgccttggcctttccctttcaagagaaattatggttccttattcattgttaatcttgtttcatttcct

SEQ ID NO: 23846 - DNA, 262 bp, Glycine max
  Clone ID: LIB3050-002-Q1-E1-F4
gggccaagagaatcatcagcgaggttttgtgccgtctagggtggtggctcctcatattttcttgagggacaatgggcttcttcaggacattgttccaacgcagatggggaatgaggagaatgaagatcgtgtgtacgtgatgatcatcataatatatagtcatattttgggttaattaattaatcatagaacttaattatgacaaattagtttattttaattattttgttgtatattaattatatgtatctttgtatggtat

SEQ ID NO: 23847 - DNA, 412 bp, Glycine max
  Clone ID: LIB3050-002-Q1-E1-F6
cacaacgagacagtcaagcactggacttataccatagatggtaaggttacaacatgtctggagagtattgagtccattgatgcacagagcaaaacaatcacctacaagctcttcagtggtgacattgatcataattataagaactttaagttcatctttcaagccattgatgataatgatcatggcggtactattatcaaatggaccgttgaatacgagaggcttcgtgaggaggttgatcctccatatggccacattgaatacctgcacaaatgcactaaagatattgatggtcatcttctcaaagcatagctagctctaaaagttatgcactaaaaaataatgggcttgacctttggataagtgcttatatgtataataaaatcggtgtgaagtttgacgagaagaatgc

SEQ ID NO: 23848 - DNA, 411 bp, Glycine max
  unsure (1)..(411): unsure at all n locations
  Clone ID: LIB3050-002-Q1-E1-F7
gaggtttgtgattgtctttgcctcactttgctgccgtacctaatcggagagctcccgctgactgcgatcggatttcatggctcctaagaaagacagggctcccccaccttcatccaagcccgccaagtctggtggtgggaagcagaagaagaagaagtggagcaagggaaagcaaaaggagaaggtgaataaccaggtgctgttcgatcaggctacctatgacaagctcctctccgaggcacccaaatacaaactcattactccttcgattctctctgaccgtttgaggattaatggatcacttgcaacgaaggctattanggaattgatggccagaagttcaataaggatggtgtctgcccatgctagtcagcagatttacactacagcgacaaacacctagatgtactg

SEQ ID NO: 23849 - DNA, 402 bp, Glycine max
  Clone ID: LIB3050-002-Q1-E1-F8
ggaacgaagacagcgaaggagctacgctgcgagatttagaaattgaatccctaatttcgaggttccgactcctgtggagtgatcatatagcgaattttgtgttagcgaatcaatttgcagagtaaggaataaggatgggaaaaaaccaagcctacaaagctatgcagagagccaggctcggcggcgcctccgccggccccgacgaggttgaagacggcatggtggatggttcatttcattcaccagaatggcatgcagctcgtttggctagccttaacacctctcacaccattatctgggaggagtacaaaatgaagcaaaaggaagaagaattgagaaaaggggaattggaagcagatgcagataggatgatgagagagtacagagctcaactagatgctg

SEQ ID NO: 23850 - DNA, 385 bp, Glycine max
  Clone ID: LIB3050-002-Q1-E1-F9
gatagcgaaacagagagtggtttcagtgagtgatcggtgttcacttgatccttcataagtcgtcatcatcatcgtcatcatcaccgttgattgaagaagatgccgatcagaaacatcgccatcggaaggcctgaagaggctactcaccccgacacgttgaaggcggggttggctgagttcacctccaccttgatcttcgtgttcgccggttcaggttccggcatcgcctacaacaagctcaccgacaacggcgccgccactcccgccggcctcatctccgcttccatcgcccatgctttcgccctcttcgtcgccgtctccgtcggcgccaacatctccggcggccacgtcaacccggcgttaaccttcggggccttcgtgggcg

SEQ ID NO: 23851 - DNA, 353 bp, Glycine max
  Clone ID: LIB3050-002-Q1-E1-G1
gggtgagaatcacttgtttgttcatagtccccccgtatatatccgttcttttttcttccttccttccttccttccttcaacgctcagcactcaaatcctctgagagaaaaaaaaattagggttttgcatttcgggtcagacagactcagacatgggaggaggcaatgcccagaagtcaaagatggctcgcgagaagaacctcgagaagcagagggctgccgctaagggaagccagttggattcaaacaagaaagccatgtctattcagtgcaaggtgtgcatgcaaacatttatatgcaccacatcagaagtgaagtgcaaggagcatgctgaagccaaacaacccaaatctg

SEQ ID NO: 23852 - DNA, 297 bp, Glycine max
  Clone ID: LIB3050-002-Q1-E1-G10
gtctggatcattcatgcctactgataaccaaggaacaagaagcaggactggtggaatgtcggtctcgttggctagccctgatggccgtgttgtaggtggcggagttgctggtcttcttgtagctgccagccctgtgcaggtggtggtgggaagctttttaccaagcagccagcaagaacagaaaataaagaagtcaaagtctagcgattatggagtagcaactgttactccaaccattgcagtgtctcctacaccaccacctccaaccaatgccgaaaaagaggatgtgaatgttat

SEQ ID NO: 23853 - DNA, 403 bp, Glycine max
  Clone ID: LIB3050-002-Q1-E1-G12
gggttgcactttggtaaggtgagagaataggaaaaagggaaatatggcatttgcaggaacaactcagaagtgcatggcttgtgacaaaacagtttatctggttgataagttgacagcagataaccgagtgtaccataaggcttgcttcagatgccaccactgcaaaggaacactcaagcttagcaactataactcttttgagggggttctttactgcaggccacacttcgaccaactgttcaaaagaactggtagtcttgacaaaagcttcgaagggacaccaaaaattgctaaaccagaaaaaaccggggaagagaaacctgcagcaaccaaagtctcaagtatgtttggtggaactagagataaatgtgccggttgtcaaaaaacagtgtatcccactgaa

SEQ ID NO: 23854 - DNA, 405 bp, Glycine max
  Clone ID: LIB3050-002-Q1-E1-G2
gagagaaagagagagaaagatgtcgaagcgtggtcgtggtggttcggcggggaacaagttccgcatgtcgctgggtcttccagtggcggcgacggtgaactgcgccgacaacacgggggcgaagaacctctacatcatttcggtgaaagggatcaaaggccgtttgaaccgtcttccctcggcctgcgttggcgacatggtgatggccaccgtgaagaagggaaaacccgatctgaggaagaaggtcttgccagctgtcatcgttcgccagcgcaagccatggcgccgaaaggacggcgtctacatgtacttcgaagataatgctggtgttattgtcaatcccaagggagaaatgaaaggttctgctatcactggtcccattgggaaaagagtgtgctgatttgt

SEQ ID NO: 23855 - DNA, 387 bp, Glycine max
  Clone ID: LIB3050-002-Q1-E1-G3
tgaggatgattcaccaatatttaggaacaaagagaagctattggtcacttgctctaggcgcatcaattacaggtaccggcatttgatgttgaatttggtcacacttttgcctcattgtaagaaggataacaaagttgaatcaaaggaaactaaaggagccaccctcaacgagcttgttgagctaaaaaattgttcctcttgtttattttttgagtgcaggaagcataaagatctttatctctggatggcaaaatgccccaatggcccatctgtaaagtttctagttagtgccgttcacacaatggaggaattgaagctaacgggaaatcacctacaaggttcgcgtccaattttgacattttcaacaaatttttgaaaaagatgcac

SEQ ID NO: 23856 - DNA, 304 bp, Glycine max
  unsure (1)..(304): unsure at all n locations
  Clone ID: LIB3050-002-Q1-E1-G4
cgagcagcgtgatttcgagattggaagatttggcgaaggcgttgaattcgacgtgaagaagagcgagactaaggtgaggttgcanggtcaagaaaaagggcgaaaaggtaaactcgctattgctgcggacttgtacgccgtgacgccgtcgtttttggtggtggaggttaagaaggacaacggtgacaccttggagtataaccagttctgtagcaaggagcttcgtccagctcttaaagatatcgtgtggaggacttctcctgtagagaatcctacactcgcttgaagaacaaccaagactccc

SEQ ID NO: 23857 - DNA, 414 bp, Glycine max
  Clone ID: LIB3050-002-Q1-E1-G5
gaaaaacaagtgtttcgaatagattatcctaagtctttgggaatagtgctgcaatggcttcaagtcaggaggaggtgacccttttgggagctactggaagcccatttgtgtgcagggttcatattgccctcaagttgaagggagttcaatacaaatatgtcgaagaaaatttgaggaacaagagtgaactgcttctcaaatccaacccagttcacaagaaggttccagtgtttattcacaatgagaagcccatagcagagtctcttgtgattgttgaatacattgatgagacatggaagaacaaccccatcttgccttctgatccttaccaaagagccttggctcgtttctggtccaaattcattgatgataaggtttttggtgctgcatggaaatccgttttcacagctgatg

SEQ ID NO: 23858 - DNA, 373 bp, Glycine max
  Clone ID: LIB3050-002-Q1-E1-G6
gaactacaatcaaattcattttctggttttcgttttagatagagaaagaattagagacagcgagtgaggggggctaccatgataacacgatcgaatctggttgaacagctgcgagagtatcagattcgatccaagcatgactgggcctctgtctcgttcttctcctccacttcttcaaacatcaccacttccagggtggatgtggtgctttttgtaatatgggaacttgttattttagctttcttggttttttctgtagtctctctgtacttcaagcacatccggcttgcttttattttagtctgcatcacaatcctattgcttttatgcatgaaaattacaaagcaagtaaggcttgcaaggaaaaagagac

SEQ ID NO: 23859 - DNA, 414 bp, Glycine max
  Clone ID: LIB3050-002-Q1-E1-G7
ggcagggtaaaagtaacggagtttttgttgcttggttactctgatattctgcattttctcgtttagttttcttcagcattcaacaaacttcttcaccctctctatcttccaatcctttttttccattccctactattccctatcatctttctttgtgttctcatctttttccttttcccaaggttcgttgtttcttcttcttcttcttcttcttcttcttcttcttgctgttttttccttctaattctcacttctctttcttcaatttttccccttttgggtgatcggggatttttgtgcctggatatgggtttagggttttttctttaatgatcattggtgtgcatgtttcaagtttgatgtattggcagtggaaatcaagggttctttttgtgttattggatgcaaaagttt

SEQ ID NO: 23860 - DNA, 411 bp, Glycine max
  Clone ID: LIB3050-002-Q1-E1-G8
gggagaacataaacaagtacttcaagaggataaaggagaagagcaagaggaagcctcaggattccaagacgtgtccttattatcatcaccttgaggctttgtacagtaagaagcctaagaaggtggatcttgggaacgagttgaagcctgaggagctgttgatgcatatcatggtgagtcaaagtcaagaacagcaacagcaacaagagatgcagactcagactcagtcaccatctgaagatgctgagagagatcagaatcagggagataatgaagatcaaagtgagtatcagaatcagatggttgataataatagtccttccattgcaattatgagttaaaaagcttggtttcaagagattctttctttagtatgctaaaattgaacatcttctctgatgacaaccaacg

SEQ ID NO: 23861 - DNA, 397 bp, Glycine max
  unsure (1)..(397): unsure at all n locations
  Clone ID: LIB3050-002-Q1-E1-G9
gataaaactttgacggtggaaaccttgggttttccggatccctaacctaaattaatttaatcaacaagggctcgttctatcgctaacgccaagactttctccgctctcgtgctagacggattctccaacactctcaccagacgtggctactctcaaagcgcaacaaggggaggagttgcctccatagcacccaaatcaggggaagacaaaggtgtctcatcatacaaggtttcctgngtgccagattccgtcaccggttactacanaccggaaaacatcaaggaggttgatgttgccgatttgcgtgctacccttctccgcaaaaaattcaacaactaatttcaacaatttaaattttttacaaaaccttggttaatggatccgtaagggaattaat

SEQ ID NO: 23862 - DNA, 384 bp, Glycine max
  unsure (1)..(384): unsure at all n locations
  Clone ID: LIB3050-002-Q1-E1-H1
gggacatgttctacacattcccttttgatgactgagaataaagtagataatgtggagaatgtagacttgccaggaccatcagaactaaaggagataaagtcacccaatgtgatccagcagcagaagaaaagggtaaggtttttggtaccagagagtccaaagattgacacaagtgtaatggaagagttggaggaggtgatggaagcctgngaggctggggtagcttacattgtaggacagacacacatgagagcaaaatcagggtctagcatgttgaagaaaataggcattaatttagtgtatgaattccttagaagaaatagcaaggcaccctcctttgttactggtgtgcctcatgcatcatctctggaagttgggatgatg

SEQ ID NO: 23863 - DNA, 348 bp, Glycine max
  unsure (1)..(348): unsure at all n locations
  Clone ID: LIB3050-002-Q1-E1-H10
aagacgacagaagggggcttcaaagaagggaagcaaaggattcttgtggcaacagatttagtangaagggggattgacatagaacgtgttaatatagttattaactatgacatgcctgattctgctgatacttacttgcacagggtgggaagagctggtagatttggcacgaagggtcttgcaattacttttgtgtcttctactgctgactctgaggttcttaatcaggtgcaatctangtttgaggttgacataaaggagcttcctgaacaaattgacacttcgacatatatgccaaactgatgacgttttggaactattaagaggcagatcttgaagaatcttttg

SEQ ID NO: 23864 - DNA, 352 bp, Glycine max
  Clone ID: LIB3050-002-Q1-E1-H11
ggatgccaaagctattttataagccaaattgccgaaactggactacctcctagaataaatttcatttttattttttttgttcaaggccaagaattcaatggcaggtattgcatctggaatcagcacccttgccattggctcaagtgatgctcgacggcgtccagcacaagcccaatccactcccaacactaacactaacacaaacactaacagcaacacttcttcttctacgccatcatctgaagggttcacttaatttaaattctgccaagcaagatataaagggtcttaccaaccagactgaatacgttaaaggcaaccctaatggggtcatcacctttggaaccctaaa

SEQ ID NO: 23865 - DNA, 271 bp, Glycine max
  Clone ID: LIB3050-002-Q1-E1-H12
tgggggacatagcataattgaaattaaagttacaatattgaaccaggtatggcctctcactacagttgcatcatcttggcttttgtcattgctaattccctttcaagcattgacatggcattaacatcacgcaatctccttcagacaacattgccaactttgcctcatggaaatgtccctcctttgcctgttttcccaaatcctccactgccaactttttccttccccaatattcctactcctaagatccccaacattcctaacattccct

SEQ ID NO: 23866 - DNA, 401 bp, Glycine max
  unsure (1)..(401): unsure at all n locations
  Clone ID: LIB3050-002-Q1-E1-H2
gtctcatganggcttacgatgttatgattgctggaaaggtggctgttgtggctggatatggtgatgttggcaagggttgtgctgctgcaatgaagcaggctggtgctcgtgtcatcgtgaccgagattgatcccatctgtgcccttcaggctctcatggaaggccttcaggttctgaccttggaggatgttgtttctgaggctgatatctttgtcaccaccaccggtaacaaggacatcatcatggttgaccacatgaggaaaatgaagaacaatgcattgtttgcaacattggtcactttgacaatgagatcgacatgcttgggctggagaactaccccggcgtgaagcgcatcaccatcaagccccaaactgacagatgggtcttccctgagaacaaca

SEQ ID NO: 23867 - DNA, 424 bp, Glycine max
  unsure (1)..(424): unsure at all n locations
  Clone ID: LIB3050-002-Q1-E1-H4
ggaacttgggaaaggtttgcaggaaattcaaggtttgacaataacctaaaccacaatagttaccaaatcaagtatccccattacagaagacttcaaaagcatgcatggcaatacaaaagctgctttggattattatgtatctattaacagtgattcatatatggccacatattttgggaacatggataagatggttgcagcaatgagagctttcaatggtttatacaagactctatttttgagcagaagaggttttgcacaattaacctcacagggtcttagaggaaagaagttgatgcaagccctatggaagcttcacagagatgattttgccaatggaagaagctctgctctgtccgagtgtttttgcgaattcaagttgtgattttggatctcggattcatcatttntgtagttttgacat

SEQ ID NO: 23868 - DNA, 370 bp, Glycine max
  Clone ID: LIB3050-002-Q1-E1-H5
gaagcgaagggaaagggttaggcatcattcatacactgaacgaacgcccagctcagtcaggtgccggcgttcctctttcacgttctcatggaaaacgacgacgtcgacatgcacgctgccgacaccagcgaagaattggatgacatgaagaagcgcttgaaggagatggaagatgaagctgctgctttgcgagagatgcaggccaaggtcgagaaggaaatgggatctgcgcaagatcctgcaaatgcttctgcaagtcaggccaataaagaggaaatagattctcgatcagtctttgtaggcaatgtggactattcatgcactcctgaagaagtgcaacagcaatttcaatcctgtggaacaagtaaca

SEQ ID NO: 23869 - DNA, 403 bp, Glycine max
  Clone ID: LIB3050-002-Q1-E1-H6
gaaagcagaagcaactaggtaattatatagcttcaatcatctgatcgacggcattgctactagggcttcaggagtcaaattctcattcttcatagctcttttcattgttttggatgcagttggagctgctcacgaagggcatgatcacatggctccagcagaagcacacttctaatcatgcaagcagcctcaaaaaccatgcagtggttggtggactcgttctccttctgcttacacatctcattgctacatagacgctttgagaactctcagtttgccttaacacttccttgttctgtttgtgcatgttaactttactagtgatccatgccatttacacttttgtcttattacatgcgtcatagttgttagatcgatatttgtactaataagctgtgttctg

SEQ ID NO: 23870 - DNA, 417 bp, Glycine max
  Clone ID: LIB3050-002-Q1-E1-H8
ggagtttggacagtcgttcatcttcttcctcctctaaccttacatttagcctttctttcttttctatgttctctctatctctcattctcatctcactttcttttctttttcttttcttttcccgaatctgaatttttccctacaaaatccactcactgtcctcaaagacagatccgaaagtggatgccaaatctatcacccctcgtcgcccgagattatcgtacccattagattcttcttccctcttccttctacactttcccaaattttcacactattcgcggctatagagcacaatttagtttatctactcactgttactgcgatttttgtcctacccttttcactattttagctatttctccgatgaagaggaaaagtggtttctttgagtgaccccagaatcgcgattgtgct

SEQ ID NO: 23871 - DNA, 342 bp, Glycine max
  unsure (1)..(342): unsure at all n locations
  Clone ID: LIB3050-002-Q1-E1-H9
ggttctagtgtgtgattgtttgttgttgtaactcgttcttcttcttttgttgttctgtgtttgtgtttgttttttctctcacctgaaaatgtcttgctgcggtggtaactgtggttgcggaagctcctgcaagtgcggcaacggctgcggaggctgcaagatgtacccagacttgagctacactgagtcaaccaccaccgagaccttggtcatgggagtggcacctgttaaggctcaatttgangggtgctgaaatgggtgtgcccgctgagaacgaaggcttgaaattttgaacaaaatggttctggaaacctggaatttccaattaagtttttggaaaac

SEQ ID NO: 23872 - DNA, 339 bp, Glycine max
  Clone ID: LIB3050-003-Q1-E1-A1
ggaatctagtgagagagagcagaggaaaaggggaagaaaaatgttgagtgcgacggcgatcggcgcgttattgggtttgggaacccagatgtactccaatgctctccgcaaactcccctacatgcgccatccgtgggagcacgtggtcggaatggggttgggcgcggtgtttgtgaaccagcttctgaaatgggaggcccaagtggagcaagacttcgacaagatgctcgaaaaggccaaagccgccaacgaaagacgttatatagatggagatgatgattaatgcatgtcttcatggattgtggcagttggtgaaaataaccatgaaatatgttgaac

SEQ ID NO: 23873 - DNA, 367 bp, Glycine max
  Clone ID: LIB3050-003-Q1-E1-A10
gaaggaggtggtgaaccacccaagggttcactgggatgggctattgacacacattttggttcttttgaagcattaatacaaaaagttaacgcagaaggtgctgcactacaggggtctggatgggtgtggcttggtctggacaaagagttgaagaggcttgtagttgaaaccactgccaaccaggacccactggttactaagggaccaaatttggttccattgattggtattgatgtttgggagcatgcgtactacttacagtacaagaatgttagaccagactatcttaagaacatttggaaagttattaattggaaatatgccagtgaagtgtatgagaaagagagctcttagtctgaaggagcta

SEQ ID NO: 23874 - DNA, 361 bp, Glycine max
  unsure (1)..(361): unsure at all n locations
  Clone ID: LIB3050-003-Q1-E1-A11
gagagtggtggagtgtgcaaaagagcgtcgtagtcgcaaccctaatcagaagaagcgcagcttcaagcgagtgacagccaccagccatgggtcgtatgcacagccgcggtaagggtagatcctcttctgctttgccctacaaaaggacacctcctagctggctcaagatctcttcgcaagatgtcgaagaaaatatctgcaagtttgcgaagaaaggtttgaccccgtctcagattggtgtcattctcagagattctcacggtattgctcaggtcaatagcgtcactggcagcanaatccttcgcatcctcaaagctcacggacttgcgcctgatattccagaggacctgtaccatttgat

SEQ ID NO: 23875 - DNA, 379 bp, Glycine max
  unsure (1)..(379): unsure at all n locations
  Clone ID: LIB3050-003-Q1-E1-A12
gaagatcattcgctacaaaaggcggacgtgtacaagacactcagtggtcacagagctggtgaggctgccattgtctatgaacatggagctgatgttgggacactaatgccaaaactacggcgatctgattactacacactgcctcgtatacatgaactggcggccaaggaaagagctgaatcaggattctgcagtcatgttaaggacttcgtggttggaaggcaaggttatggcagcatcagattcttgggtgagacggacgtgcgacggctcgatcttgagtcgctcattcagtttaacaaccgggaggtgattgtatacatggatgatttanagaaacctcctgttggacaagggctgaataagcctgctgaggtga

SEQ ID NO: 23876 - DNA, 385 bp, Glycine max
  unsure (1)..(385): unsure at all n locations
  Clone ID: LIB3050-003-Q1-E1-A2
gggggagaaaattgttgtggtcagtttgacatgcagcaaaaggacagacacaatggtgaaactgtgtgaagtgttcgaatctttgaagctcaagatcatcactgctaacatcacttcgttttcagataggcttttgaagatagtcttcattgaggcaaatgaagatgagaaagatcatttgcagataaagatccagacagccattaaagctcttaatgaccctttaaaccccatgagcatttgaggaagaaaatatataaatttggggggttctcattttggggtcactagtatataaatagaaagtataggaactgtggctttcatangagtttctcgtatttggtttcgctancccccttttttcctcgcactcaatattccc

SEQ ID NO: 23877 - DNA, 287 bp, Glycine max
  Clone ID: LIB3050-003-Q1-E1-A3
gggggagaaaattgttgtggtcagtttgacatgcatcaaaaagacagacacaaaggtcagtgtgcgtgcagtgttcgaatcggtgaatctcaagatcatcactgctaacaccacttcgttttcagacacgcttttcaagatcatcttcattgaggcaaatgacgatgagaaagatcaggtgcagataaagatgcatacagccagtaaagctcgtaatgacccgttaaaccccatgagcattttaggaacaacatatatgaatttggagcgttctcactttggggtca

SEQ ID NO: 23878 - DNA, 353 bp, Glycine max
  Clone ID: LIB3050-003-Q1-E1-A4
gacagcaacaaacatcttcacaaactagtaatattattcttcgaatccactttattattcataatgggtattttcacatttgaggatgaaaccacctcccctgtggctcctgctaccctttacaaagctctagttacagatgccgacaacgtcatcccaaaggctgtcgaagccttcaggagtgttgaaaaccttgaggggaacggtggccctggaaccatcaagaagatcactttcgttgaggatggagaaagcaagtttgtgttgcacaaaatagaatcagttgatgaggcaaacttgggatacggctatagcgtagttggtggagttgggttgccagacacagtggagaa

SEQ ID NO: 23879 - DNA, 375 bp, Glycine max
  unsure (1)..(375): unsure at all n locations
  Clone ID: LIB3050-003-Q1-E1-A5
gggtgctgcatggaatgctgttttcacggttgatgagaaagagcgtgagaagaatgttgtagaaacatatgaggctctgcagtttcttgagaatgagatcaaggacaagaaattctttggaggagaagaggttgggttggtagatatagctggtgtctacatagcattttgggtccctttgattcaagaaattgcagggttggagctattaagcagtgagaaatttcctaagctttacaagtggagccaagaatttgtgaaccatccaattgtcaaagaaggtcttccccctagagacccagtttttgcctttttcaaaggacgctgtgaaagcctttctgcttcaagatanatttgatgtantgtgagactctc

SEQ ID NO: 23880 - DNA, 369 bp, Glycine max
  Clone ID: LIB3050-003-Q1-E1-A6
gtttgaaggctggtaatgatgcaatgaaagccatacagagtgagatacacattgaagatgttcacaaacttatggatgacactgctgaagctaaagcttatcaagatgaaattaatgaaataatgggggagaagttatcagcagaagacgaggaggagattttagcagaatttgaggacttggaaatccagcttacagtccaagatcttcctgaagttcctccctcagctaatgaagaaattgaagaaaagttggaccttcctgatgtcccaaccatagcacctgttaccagtgatgctgaagtatctacgacacagaaaagttatggaggatacattggcagcttgaagaacattgcgacccaaaaca

SEQ ID NO: 23881 - DNA, 374 bp, Glycine max
  Clone ID: LIB3050-003-Q1-E1-A7
catgaaggtgcaaaagtgattgagaagcatgctgcacaactctgtgttcttgcagaagactgtgaccagcctgactatgttaaactggttaaggccctttgtgcagagcacaatgttagcctgctgacagttccgagtgcaaagacccttggagaatgggctggtttgtgcaagattgattccgaaggaaaagcaaggaaggttactggttgctcctgtgtggttgtgaaggatttcggtgaggagcatgaagcctataacgtcgttctgcagcatgtgaaatctcaatgagttgcaagattcatagattttatgcacttcacattttcattttgggttattccttgagaatgaattttgccttgtggctggat

SEQ ID NO: 23882 - DNA, 326 bp, Glycine max
  Clone ID: LIB3050-003-Q1-E1-A8
gaatgttgagataaaaatgatgacgttcggcccagaacatcaaaataaggcagtgtttttagtggtgaatgcttgctccagcaaggattttacaaataatgtagttggagtgtgctttgttggtcaggatgttactggtcaaaaaattgtaatggacaaattcatcaacatacaaggtgactacaaggctattgtacatagcccaaatcctttgatccctcccatttttgcatcggacgataacacatgttgcttagagtggaacactgcaatggaaaagcttactggttggggccgtgtggatgttcattggaaaatgttggtgg

SEQ ID NO: 23883 - DNA, 415 bp, Glycine max
  Clone ID: LIB3050-003-Q1-E1-A9
accaagccttcattacggttgcaaaaaaacaacagaaggggttcgaaaagattgccaggatctcttccccatctttccggagcaaggaattcaataggattgttgatttgaatcctactaaccttgatgacctgttagcatctgctgacccttctgtattttctcaactacatggactttctgtgcaaccttcaacacccacacaaagtgggcttcggatgcgccaaaacatgaaccacctccgtgcgagttatccatccaacatcccttcctctcctgtgaggaagccctcagcttttgggtttgactcatcagctgctgtggcaactgcagtgatgaattctaagtctgctgccttcgcaaagcgaagccaaagtttcattgatcgtggagctgcaaccaacatcttgggctg

SEQ ID NO: 23884 - DNA, 347 bp, Glycine max
  Clone ID: LIB3050-003-Q1-E1-B1
ggttctagtgtgtgattgtttgttgttgtaactcgttcttcttcttttgttgttctgtgtttgtgtttgttttttctctcacctgaaaatgtcttgctgcggtggtaactgtggttgcggaagctcctgcaagtgcggcaacggctgcggaggctgcaagatgtacccagacttgagctacactgagtcaaccaccaccgagaccttggtcatgggagtggcacctgttaaggctcaatttgagggtgctgaaatgggtgtgcccgctgagaacgatggctgcaaatgtggaccaaactgttcctgcaacccctgcacttgcaagtgaggtgttgggagagcaagct

SEQ ID NO: 23885 - DNA, 380 bp, Glycine max
  Clone ID: LIB3050-003-Q1-E1-B10
gaaccgcaaaattaaaaattgaaaattaaaatttaaaacagatgttgaaagtaaagtcggtggtatgattcatcattctctttcagtttttggcattgaagaatctgagatcggaaaattcacctctccaacccccaatcccatcgttgcaaatgatccgattcattctgttgcagaacaggcagggcaagacccgtcttgccaaatactacgttcctctcgaggattccgagaagcacaaggtggaatacgaggttcaccgcctcgtcgtaaacagagaccctaaatacacaaatttcgtcgagtttcgtacgcacaagataatatacaggcgatatgctgggttgtttttctcaatctgtgttgatatcactgataat

SEQ ID NO: 23886 - DNA, 378 bp, Glycine max
  Clone ID: LIB3050-003-Q1-E1-B11
gacagcacaacttgtttatcggaacgttgctataaacgttgttgttttcagataaacacgtgactcactatctatctatcaatcgatatctccgagttcagccgaaccaaactccgaagctatggcagagctccaaaccaaggttgaacctgttacggtcccggctccggtggatcccgagccaccgctagctgaggctccgccgctcgagaagaaagcggtggcggtgccaccacctgttccggctgcggcagaggaaaccaaagctcttgttattgtggagaaggagaacgagaatgagaagataccagaacctgtaaaaaagaacgcctcaggtggatcccttgatagagacattgctcttgcagaaatagagaa

SEQ ID NO: 23887 - DNA, 364 bp, Glycine max
  Clone ID: LIB3050-003-Q1-E1-B12
gggtgtaccgcacataaagaactacaactagggtttcatctttgccatcagtacacgacaatgatttacgacgttaactctcctcttttccgatccttcctcagccagaatggaggctcctctgataagaggaaatcggacgaacagaagccaacagagcagatacccagagccagcgagaacaagcctataatgactgagtgataacagctgagctgcattcagttgtagaatgaacataagtggtaagtattgtacttggtgctaaactaagatctttttggctgtgttctgaagtatatgccggcgatgttggtctttgtgagtgtaatggtttgattttggagatcgttataacgaaaac

SEQ ID NO: 23888 - DNA, 348 bp, Glycine max
  Clone ID: LIB3050-003-Q1-E1-B2
ggaagagaagagaagagaagggatttggatctgaaaagagaagatggggggaggaatggaagcaaacaagaacaagttcatagaggattggggcactgccagagagaatctggagttcaatttccgttggactcgccgcaaccttgctcttgttggcatcttcggcatcgctattcccgtcctcgtctacaagggcatcgtccgtgaattccatatgcaagatgaagataatggtcggccgtacaggaagttcatgtgggagagtatggagagtcttttgtaataattcgtcaagttagaccttgatattatgaggctacaaaccatgttttttttccttaattcgca

SEQ ID NO: 23889 - DNA, 337 bp, Glycine max
  unsure (1)..(337): unsure at all n locations
  Clone ID: LIB3050-003-Q1-E1-B3
tgctttgtggaagtttgaaacaacaaagtattattgcacagttattgatgcgcctggacatagggatttcattaagaatatgattactgggacatcncaagctgactgtgctgttcttatcattgattcgaccactggtggttctgaagctggtatttccaaggatggacagactcgtgaacatgctctgctttcattcacccttggtgtgaaacagatgatttgctgctgtaacaaaatggatgctactacacccaagtattccaaggccaggtatgatgaaattgtgaaggaagtctcttcctacttgaagaaagtaggatacaaccctgacaag

SEQ ID NO: 23890 - DNA, 351 bp, Glycine max
  Clone ID: LIB3050-003-Q1-E1-B4
ggagaaagagaaagcatagaaaggaaacgaaaaaacagagtacccgacagaatttgaaaacaaaggctgaaatttgaagaaactgagatcattgggtgtgaaatatatggcagaggttgtcctgctaatcgatgatttgaaattactttctgcgagtcctcgttgtagaatttgtcatgaagaagagtttgaaagcgtagaaaccttggaagcaccttgtgcttgttctgggaccgttaagtttgctcatagagattgcatacagagatggtgcaacgaaaaaggaaatacaacctgtgaaatatgtctccagcaatatgaacccggataaacagctcctccgcccaaaga

SEQ ID NO: 23891 - DNA, 371 bp, Glycine max
  Clone ID: LIB3050-003-Q1-E1-B5
gacacaaacggaacaaggtagatatatagaagagccttccatatatagcctcccaaaaaaatgaagagtactacctctttggctctctttctactttgtgccctaacttcatcatatcagccttcagccaccgctgatattgtattcgacaccgaaggcaatcctattcgaaacggcggcacatactatgtgttgccagttataagaggaaagggcggcggaatagaatttgccaaaaccgaaacagaaacatgccctctcactgttgtgcaatctccctttgaggtctcaaagggtctaccactgataatttcatccccatttaaaatccttgacatcaccgaaggacttattttgagcctcagtttcac

SEQ ID NO: 23892 - DNA, 360 bp, Glycine max
  Clone ID: LIB3050-003-Q1-E1-B6
gcatccaaagagaacaatgagactgagaatgtggaaatgaatgattgcaatacaagtatatgcaagtctacctctgatactagtagtagtagcagtaacaagagtgtgccaaaagatggaaggaagaagcgacacgttgcttcagcatccacagcattactttttggcacaatccttggtctccttcaagcaacaacccttatatttgctgcaaaacctctattagctgcaatgggtctaaaacctgattctcctatgctaaaccctgctattaaatacttgagattgagatcattaggtgctccagcagtgcttttgtccttggccatgcaaggaatctttcgaggattcaaggacact

SEQ ID NO: 23893 - DNA, 330 bp, Glycine max
  Clone ID: LIB3050-003-Q1-E1-B7
gacttcacgtttagtaatttttttattctcttctgcgttcttcccaccaacatcgaaaccatgtccaccgacttgcacctccacaacgacctgccccagctccgaatcgcctccgccgccgccgccgatgccgtcgtcaaaaccgacgacctcccctccgacgatgacgaccgcaacgccgtctcttccgtcatcactcaaaccgggaccgaaactgacggagccaccatcgtcgacgtcgccgtcgccgtcaacgtcaacgtcaacgtcaacgacgagaattaccgtactccgacttcgaaggagagcaaaattccagcgacgatgacg

SEQ ID NO: 23894 - DNA, 336 bp, Glycine max
  Clone ID: LIB3050-003-Q1-E1-B8
gggcatgaacctcaacaacatggccaagatgcttaagtgtgctggtaatgacgacatcatcaccatcaaggccgacgacggcagcgacactgtcactttcatgttcgaaagccctacacaagacaagatttctgattttgaaatgaagctgatggacattgatagtgaacaccttgggattccggaggcagagtatcatgctattgttaagatgccatcctctgagtttgctacgatctgcaaggatctcagtagtattggtgacactgttgtcatttcggttactaaggacggtgtgaagttttccaccaaaggagatattggaactgccaatat

SEQ ID NO: 23895 - DNA, 301 bp, Glycine max
  Clone ID: LIB3050-003-Q1-E1-B9
gatgcaatgaaacaaactatagatgagtatcatgcagcagtttgaaaatgtagcttagttccctgtagaagcctgggttaccacccggtaattgacttatttgggattgcttattactagttagcgtgttgttttggatggggtaacaattacccttgtagcgataggaaatcagtgtatttatttggatgattatatagtagaatatccaatgagtgtggattattttgttccccctatcttattacgggtaacacatttggatgattatatagaagaataactcagtttcttgctaagg

SEQ ID NO: 23896 - DNA, 357 bp, Glycine max
  Clone ID: LIB3050-003-Q1-E1-C1
gggttgaaggaagaagggtaaactaggagtaggagggaagaagggttgaaggaagaaaaaaagaaaaacacagaaatggagggtgggaacaacagcagcagtaacaacaaccctgatgagttggcggtggggtgcttgctttcgatcaggacaacgttgggcgacgaattcgaaggccaggtcgtcacttcgatcgcccctccaacattctcgtactccaggagccttccaaacctagccctcgtcgaaatcttaggttgctcaaagccaattacatcaaagacttcacctttctcggccatgcccaagaccctcttgatcccaacacctgcttcctttgactcaccgctctccaac

SEQ ID NO: 23897 - DNA, 349 bp, Glycine max
  Clone ID: LIB3050-003-Q1-E1-C11
ggcagctactcaggaaaatgtgaaccttttgggtattgtgggaagcccatttgtgtgcagggtccagattgcccttaatttgaagggagttgaatacaaatttttggaagaaaatttgggcaacaagagtgatttgcttctcaaatacaaccctgttcacaagaatgttccagtgtttgttcacaatgagcagcccatagcagagtctcttgtgattgttgaatacattgatgagacatggaagaacaaccccatcttaccttctgatccttaccaaagagccttggctcgtttctggtccaaattcattgatgataagattgtgggtgctgtatcgaaatctgttttc

SEQ ID NO: 23898 - DNA, 366 bp, Glycine max
  unsure (1)..(366): unsure at all n locations
  Clone ID: LIB3050-003-Q1-E1-C12
ggtgtgagtgaangagcagatggagtagcggcattaagaatgcagatcttcgtgaaaactctgacagggaagactataaccctcgaggtcgagagcagcgacaccatcgacaatgtcaaggccaagattcaagacaaggaaggcattcctccggatcagcagcgtttgattttcgccggaaagcagcttgaagatggaaggaccctggccgattacaacatccagaaggaatcaacccttcatctcgtcctcaggcttcgtggtggcatcattgggccttccctcatggctttggctcgcaaatacaaccaggacaagatgatttgccgcaagtgctatgcccgtctgcatcctanggctgtgaac

SEQ ID NO: 23899 - DNA, 341 bp, Glycine max
  Clone ID: LIB3050-003-Q1-E1-C2
gacccaacacagccacatggtctaaagctcatattggaagactacccttatgcagctgatggaatactaatctggtctgcaatagaagactgggttcgaacctatgtggaccattactaccctcactcaagccttatatgcaatgacaaagagttacaatcttggtactctgagtcaatcaatgtaggccatgctgatctcaggcatgaaagttggtggccaacattgaacaatagtgaggatcttgtgtccattctttccacattgatttggaatgcatctgcacaacatgctgctctcaactttggccagttaccttatggtggctatgtgcctaatcg

SEQ ID NO: 23900 - DNA, 372 bp, Glycine max
  Clone ID: LIB3050-003-Q1-E1-C3
ggaaaccacaattcacaaccgaaacagtttccatctctctcacaaaatgacaacaatatcaaattgctcccttctcttcctcttcctcttcctctccaccctccacatagcttccaccctctcaacccccaccaacttcatcaagtcctcctgcagcaccacccagtacccagccctctgcatccagtccctctccgtctacgcctccaccatccagcaagacccccacgagctcgtccagacagccctctccctctccctcaaccacaccgaggccaccaaaaccttcgtcgcaaaatgcaacaaattcagaggcctcaaaccgagagaatacgctgccttgaaagactgcgctgaagaaataattacagc

SEQ ID NO: 23901 - DNA, 345 bp, Glycine max
  unsure (1)..(345): unsure at all n locations
  Clone ID: LIB3050-003-Q1-E1-C4
gccactttatttgtctctctctttcccttccaacctcatcccattccgttttctctgcagtactcaattgatccctttgtttttctattcgttctgagagctttgtgtgtatggccggcatagacttgggttcagcatcacattttgttcatcatcgccttgaacgccctgaccttgaagacgatgagaaccaacaagaccaagacaacaaccttaacaatcacgaagggcttgacctagttacaccaaattcaggtcctggtgatgttgttggtcgcaggccaagaggaagacctccaggttcaaagaacaagccanaaccaccagttatcatcacaagagaga

SEQ ID NO: 23902 - DNA, 368 bp, Glycine max
  Clone ID: LIB3050-003-Q1-E1-C5
gacactaacactacaagttcccatcttcaccacgaagcattcttagcattctacagagagaaaagtgacactctacaatggttccaaagcttagtggtgacgtggatgatggtggaactgggcttgaaactaagcctatctgaacaataccctcctcttccttcttctattaaggttgaagttcttagataagaagaagaagagagcataagatagccttttgaagctgaaagcaaattttgtgaagtagcatatatactttcaatttgtttagttcttctgggtggagttccttcatttggtgtttgtagtcatggaggtttcttggttctataccttttgcagctttttatggattcaaccatccc

SEQ ID NO: 23903 - DNA, 335 bp, Glycine max
  Clone ID: LIB3050-003-Q1-E1-C6
ctatattatcgagtatgagacatttaattttcactaacaggcatggaaactgtatgagagaggcatgcagttggagcttgtggacaaggacatagaccccaatgaatatgatgcagaagaagcgaagaaaatcattgaaattgctttattatgcactcaagcatcagctgcagccaggccaacaatgtctgaattaatagttctactcaaaagcaagagcttagtggagcaccttcgagcaactatgccggtgtttgttgacacgaatatgatgaatcacgaaggtggcagctctcctggtacatctaatgctactatctccatttccgttctat

SEQ ID NO: 23904 - DNA, 354 bp, Glycine max
  Clone ID: LIB3050-003-Q1-E1-C7
gaaagaaaaaaacttaaatcaaaatacttaatagcatggcgatacatttatacaaaacttctaccccaagcacacgcaatggagccgtagagagtcaagtaaaatccaatccacgacatcatttgatctatggacagcatcgttgtggtaaaggccgtaatgccagaggaatcattaccgcagggcatagagggggaggtcataagcgtctataccgtaaaattgattttcgacggaatgaaaaacacatatatggtataatcgtaaccatagaatatgaccctaatcgaaatgcatacatgtgtcacatacactatggggatggtgagaaatactatattttacaacccaaaa

SEQ ID NO: 23905 - DNA, 343 bp, Glycine max
  Clone ID: LIB3050-003-Q1-E1-C8
gattttaaaacttcaagaacactccatttctaaccttcccccaatcaccaccaaccatcctaacccttgataccaccggcgtttgcacatgctaacgccaccttgactcattccggtgggtgactccattcactacaacccagcacaccgcgacgagacgatgatgaaccaccacatttcatcgacgaaccaccacacctccagcctcacttcgccaacaatgcctctatttttggttttttcttttcagatcgcgttgtgatagtgtatggtggcgctatgcgtgtaggttttagtttttttctatccagatctggctaccgtgaagaaatggtgcaccacg

SEQ ID NO: 23906 - DNA, 350 bp, Glycine max
  unsure (1)..(350): unsure at all n locations
  Clone ID: LIB3050-003-Q1-E1-C9
gaagaagaagaagggaagatgaacttgagatggatggaagcggtgctgccgctgggaatcatagcaggaatgctctgcgtcatgggaaacgctcagtattacattcacaaatccgcgcatgacagacctaagcacatcgggaacgatatgtgggacgtggccatggagcgaagggacaagaagcttgtcgagcaagcctctccctccaattaacatcgttgttttgccaatgacattgtgaagaaaataaactgctcacctggatttacgactgtgttctanggaagcagggttaatcacaagaatcaaattccgtctgttttcttgtatgcaattcaacataagattta

SEQ ID NO: 23907 - DNA, 362 bp, Glycine max
  unsure (1)..(362): unsure at all n locations
  Clone ID: LIB3050-003-Q1-E1-D1
gaaaaattaaaatttaaaacagatgttgaaagtaaagtcggtggtatgattcatcattctctttcagtttttggcattgaagaatctgagatcggaaaattcacctctccaacccccaatcccatcgttgcaaatgatccgattcattctgttgcagaacaggcagggcaagacccgtcttgccaaatactacgttcctctcgaggattccgagaagcacaaggtggaatacgaggttcaccgcctcgtcgtaaacagagaccctaaatacacaaatttcgtcgagtttcgtacgcacaagataatatacaggcgatatgctgggttgtntttctcaatctggtgttgatacactgataatg

SEQ ID NO: 23908 - DNA, 366 bp, Glycine max
  unsure (1)..(366): unsure at all n locations
  Clone ID: LIB3050-003-Q1-E1-D10
ggttgtttcactataatcttaaaccttccgaaaaaactctacccaacaacgttaattgaccaaaacccatctttgttgttcttcaaaatttccatatgttgaaccattttatttgtggcagtttccatcaccaagaagaagatgtaccatgttcaagccccaagaagtactccaggagaaaagaaagtaggaatattaacaaaaacccatactccaatcgaggcttagacaagttttctgcacttttggctgatcttgacgagagaaggcaaaaggtttactcacagatgagtcctcaggacatatcttttgttcggtttgcgtattccagcaatgatgatttcgttcncatagtggtcaaagtga

SEQ ID NO: 23909 - DNA, 314 bp, Glycine max
  Clone ID: LIB3050-003-Q1-E1-D11
gagaagagagagagagagagagagagtcctgaaacttgggtgcgattccttcactcacaacaacagcacatcactagagctcttctgattcgagcctcttcaggcttccctcagctggtttcccctcaaacggtagtttcactccacacaacgctcccatctctgaacgcatccccatccacagccacgcctacatcatatgcgccgccaccgcctccgtccgcttccctctctcgccggcgtatcgaacgcggccgagttcatgatctccaaggtggacgatctgatgaactgggcccgacgcggctccatct

SEQ ID NO: 23910 - DNA, 388 bp, Glycine max
  unsure (1)..(388): unsure at all n locations
  Clone ID: LIB3050-003-Q1-E1-D12
ggggagagaatanagaagagagatggatccagacgcgttggcaaacgcattcgtggagcactactacagcaccttcgacaccaacaggaacggcttatcgaatctctaccaggagggttccatgctcactttcgaagggcagaagatccaaagcgcttccaacatcgttgccaagctcacctccctcccttttcagcagtgccaccactcaatctccaccgtcgactgccagccctccggcgtcaacgccggcatgctcgtcttcgtcagcggaaaccttcagctcgccggcgaacagcacactctcaagttcagccagatgttccatttgataccaacacctcagggaagctattatgtgttgaatgacatattccgtttaaactat

SEQ ID NO: 23911 - DNA, 308 bp, Glycine max
  unsure (1)..(308): unsure at all n locations
  Clone ID: LIB3050-003-Q1-E1-D2
ggaacatttaccactacgccgttggatactccaccataatcatcagcatcatcaacgtctttaaagggtttgatgcattggagacttctgtaggggatcgctacgatgactggaagcatgcttacattggcatcattgcagctttgggtggcattgctgtgcttttggaggcctacacatggatcgttgtgttgaagaggaggaactcagagaacaagacagcacatggcgtcaatggaacaaatgggtatgattctangggacagcangtgtaagggaaagtggcctcagagatactggattttttg

SEQ ID NO: 23912 - DNA, 403 bp, Glycine max
  unsure (1)..(403): unsure at all n locations
  Clone ID: LIB3050-003-Q1-E1-D3
cccacgcgtccgcccacgcgtccgcccacgcgtccgaagacgacagaagggggcagcaaattctgtgaagatgaagttcacggtgtcaaatctatcaagctctatgttcctcctcgtgttattcatagctcttgtctctcatacacacggaagcaagatcgaccaccatagaagcaacaaacatgttgccctcttcatttttggcgattctttcttagacgctggcaataacaactacatcaacgcaacaacccttggccaagcaaatttctggccctatggggaaacatacttcaagttcccaacggggagattctctgatggacggttgatatcagatttcatagctgaatacgcanaccttccaattggttcaccatatttacaacctggcaattacaat

SEQ ID NO: 23913 - DNA, 367 bp, Glycine max
  Clone ID: LIB3050-003-Q1-E1-D4
gatctacactcataaatcattacatggtcatagtctacacctaattagccaaacgcaccacagcaccaaactagttggctcaattctctttgaatggctttggaggctttgaattcaccaacagcagccaccactcccttccgtggttaccaagaagaggaggaggaggttgaccttcacctacgcgagccttgggccaagagaaaacgctccaaacgacctcgttttgagtcggaggaagagtacttggctctttgcctcatcatgcttgcacaaagcggtaacaacaacaacacccaattaccgtcttcgtcacagtcacacaaagaagcgtcaccgccgctgaaactatcacacaggtgcaccg

SEQ ID NO: 23914 - DNA, 361 bp, Glycine max
  Clone ID: LIB3050-003-Q1-E1-D5
gaagatgaagaggacgatgacgatgatgatgatgacgatgatgatgaggaagagagcaagaccaaaaagaagtcatcagcacctaagaagagtggaagagcacaacttggtgatggccagcagggtgagcgacctccagagtgcaagcagcagtagaagtatttatgcagaatgtcatttatgtagttgagttttgttggtgttcgagaatgtcctaatgtgaaagtgggtttcatgttgttttttaatgtttcttaaattgattttcctccctatatcttggcagtccgaatttgttgcgagtcccttctcttattttgcgcctggtagagagaatgtggttataggtagagatgctgtg

SEQ ID NO: 23915 - DNA, 393 bp, Glycine max
  unsure (1)..(393): unsure at all n locations
  Clone ID: LIB3050-003-Q1-E1-D6
ggtgggtttcaactttcaattcagaatgaacgattccttcatttcgcgagtgattcaccgatctgataatcgattgaatttagggtttgggagatggcgtcgagtgtgttgaagagcctcctcctgagattttcctcatcgaggaacacgacgaccaccagaagtttcagcctcgttacccctcaaatcagcaaccacaccgccaagtggatgcaggatacaagcaagaaatctccgatggagctgattaatgaagttcctccaattaaggttgaaagcaggatagttgcttgtgaaggagataccgatcctgcacttggacacccgattgaatttatatgccttgacttgcccgaatcagctgtttgcanatattgtggccttcgttatgtt

SEQ ID NO: 23916 - DNA, 341 bp, Glycine max
  Clone ID: LIB3050-003-Q1-E1-D7
ctcccatcatcagaacctccaacattaactctccttatgctgatcacgaacttattgggctcgttaacttcggatcttgctctgccaactcccccgttattgccacttacctcttcaagtacctccctaccttgcccgctcaaactgctgccccccctgccggaagtcccgctaacccgagatctttcgatggtaactttgcctgtggagatggcgttgttcaagatggtggatatgagaaatgcgatcctcccacaaccgttatcgctgacagagaaaaccctaacctctgctgcaacccttgtacttgccaatatgaggtcgccggaactgcttgcact

SEQ ID NO: 23917 - DNA, 345 bp, Glycine max
  Clone ID: LIB3050-003-Q1-E1-D8
gagtaaaagttcgtcaattggaaactgcagctggtgcagcagtaaggttctttgacaaagctattggcattaatgtgcctcgatctcgcttccttcgcgtgaaggcaacttcagacttgcatcttgtccagtcggacctttacactttacaagatggattggttattaggaaccaatctagggcaaatcctgaaaatccttccattgaattggggccagaatttaagaatgttagcaatttcttgagccggttcatgtcaatccccagtaatgttgagcttgacagtctaaaagtggcaggcgatgtatggtttggagctggtgtaatccttagaggaaaagcaa

SEQ ID NO: 23918 - DNA, 317 bp, Glycine max
  Clone ID: LIB3050-003-Q1-E1-D9
ggggtcgaccaagccttcattaaggtggcaaaaagacaacagaagggggaagccaaagaaaagaaaatcctcaattttctgagcagccaaacactctctctctgtctctcgaaaattctcagtttgcagagaaaatctgaatcatgtcgtggcaagcgtatgtcgacgatcaccttctgtgtgacatcgaaggtaaccacctcactcacgctgctatcatcggccaagacggcagcgtttgggctcagagtaccgacttccctcagttcaaacctgaggagataactgccatcatgaatgactttaatgagcctaga

SEQ ID NO: 23919 - DNA, 363 bp, Glycine max
  Clone ID: LIB3050-003-Q1-E1-E10
ggggcggtggcgttcttatcgactttaaactgcgcgtgaagttcaagagtgtttgacgatggtttcaacgtccttggattgttgttcaacgttctttcgtgtcttgttcctatttggttattgtttctggcggtcggcaaatactactctagttaccaacaactttgatgtttttatgcattgaattttaataggataaaacttagtccaagtatgttttaaggtacttcaatctaataatatttgaaaatttactttaataatttatgtaataaaaaatgttataaattaatattaatattagttattaaagtaaaatttaaaagaaaaaacaaaaccacaaaaaaaaaaaaaaagcggccg

SEQ ID NO: 23920 - DNA, 365 bp, Glycine max
  Clone ID: LIB3050-003-Q1-E1-E11
ggtgaagaaacacattgcgccaccaaccaccaatccaatcttctccaacgcatcatttcacactccaatcatctaagttgttgatcccataacagaacaaaagaaaaacaccagttaataaatcccaaaacccaaaaccatttattttgccttgttccatttcgtctggtccaaaaaaatcaggaacaacaatgggtttgttggatctggagaagcacttcgcgttctacggcgcgtaccacagcaaccccatgaacgtggcgatccacacgctcttcgtgtggcctatcctcttcacgggccaaatgatcctatacttcaccccacccctcttgaccaccgtagggttccttcccacggtgttg

SEQ ID NO: 23921 - DNA, 366 bp, Glycine max
  unsure (1)..(366): unsure at all n locations
  Clone ID: LIB3050-003-Q1-E1-E12
cacgtanaggggacgcacttcttttcttcagtcttcacacaaatgctaccccagacactagcagtctccatgctggatgccctgttatcgaaggtgagaaatggtccgcaacaaagtggattcatgtagactcgtttgataagactgtgggagctggaggtgattgttctgataatcatgtaagctgtgagagatgggcttcacttggagaatgcactaaaaatcctgagtatatgattggatcttcagacattcccggctattgtaggaaaagctgcaaggcgtgttagaaattttactgaatgctttcctagatactacaagccatctctgcctcgggtttcaaatttcaactagttcttgatt

SEQ ID NO: 23922 - DNA, 364 bp, Glycine max
  unsure (1)..(364): unsure at all n locations
  Clone ID: LIB3050-003-Q1-E1-E2
gggggacacaatttaccgctgtatgtattctgcagacaagttctcacctgatcaccttcttgactgtctcaaaataagttctgaacatgaagcacttgagctggcagataaggttgagtcttcaatgttcacttggaggcgaaaagcttgtctgagccactcaaaaacatcttggaacaaagttaaggatctcatggctgacactgaccgaagtgacaaaaactacatcttagctgagagagctgagactttgttgttttgcttgaagcaaagatatcccgaactttcacaaacatcattggacacatgcaaaattcaatacaaccaggatgtangaaaagcgatattagaaagctactcaaga

SEQ ID NO: 23923 - DNA, 377 bp, Glycine max
  Clone ID: LIB3050-003-Q1-E1-E3
gaatccaaaagcagagaatgcatggcaatatttgagaatttcattgagctgtgcttctaggaatgacatgttggaagcttgtgatagtcgtaatttggaccttctccagaaggagtttccactacagtaagggagggtcagttccactgtggaggtggttgcttgaacatgaatcctaattttccttaaaacttttggatgagtaaatggcacattttctgccattaaagctcgcagtagatgcctgcttctatagaaatttcttggtgaaatgaaaggctgatcaagtgactaagcctgcaggtgaatacgatgcattattctagcaatctttgaacatatggtgtatatcatgaaagtacatcaacctgttacac

SEQ ID NO: 23924 - DNA, 383 bp, Glycine max
  unsure (1)..(383): unsure at all n locations
  Clone ID: LIB3050-003-Q1-E1-E4
ggctgtgaagtgtgaattaaaatatattcaattttgcgtttctctgcctaaaaggattgaaagatgggtcaagcattcggttgctaccaagtcgatcagtcaaatgtggctatcaaggagcattttggaaaatttgatgatgtcctagagcctggatgtcactgcctgccttggtgtcttgggtaccagattgctggtagtctgtcgctgcgagtgcagcaacttgatgttcgatgtgagacgaaaaccaaggacaatgtctttgtcaatgtggttgcatctgtgcaataccgagctgtgtctgagaaagcatctgatgcattctataggctttacaacacaagggaacanattaaatcaaaagttttttgatgtcatcaagg

SEQ ID NO: 23925 - DNA, 340 bp, Glycine max
  Clone ID: LIB3050-003-Q1-E1-E5
ggacagacaaagagttagttgatatgattcgctacttcgatagtgatggagatggaaagctaagccttgatgatttccagaagattgttgttcgttgcaacttgattaaagggtcttgaaaatcttgatagaatcatggttagacagagatgatagcacattggaagatattacaaggactgttatatatatatatatatatttcatggagtgacacagatttagtattccttgtatcccattatcactatatataacttatattgtactgtgctgcttttccttttctgtatacttcgtaactttcatgagctatgtgttcatttataacgtaaaatgt

SEQ ID NO: 23926 - DNA, 157 bp, Glycine max
  Clone ID: LIB3050-003-Q1-E1-E6
gacccacacgtaagttcagatgtcagtacagcagagaggggaccatagaagggggacagttcttctcttcactcttcacattctgttcatcctcgtgactgtctatcgatatcttggccgcgttgatctctttctctggcatattccgtcgactctg

SEQ ID NO: 23927 - DNA, 343 bp, Glycine max
  Clone ID: LIB3050-003-Q1-E1-E7
gatcgtgtgagatcattcaaactacaaaggcacatatctatagcatcctagctatatctgttgatgtgttgaagggtgaagaagcaaaatgaaaatgaggcttgtggtaattgcactaacaatattgatgcttgcaagttcttctatggctatccatgtgaagactttggtggccaacaacatgctacaagagaaggagggagaacacagtaatggtaataataatgagcatcaaatccctctgaaccgctatagtgatatccatgaaattcctggaacgggtggacctggcgaacgtacagtcagtggccacatggaatataccaaaccagctagcccgaat

SEQ ID NO: 23928 - DNA, 349 bp, Glycine max
  Clone ID: LIB3050-003-Q1-E1-E8
agaaaattgttggtgagaagatttgaggcatttatataatcgaaattggaagcgaggaaggaaaatcgaaatcgaaaatggcagtaatggagaggttgaagatgttcgtcgttcaagagccagttgtcgccgcttcctgtctcatcgctggcttcggtctttttcttcctgcttttgtgaggcccatgttggattcatatcaggcaaccaagcaacctcctcaacctgctttaagcgatgtggttgcaggtatgactggaaaaaagtaaaggtgatttacttgacagatacaagtgcaaatttgctaatttccttgtttgaacttattttaattctcaaatgtgagaga

SEQ ID NO: 23929 - DNA, 68 bp, Glycine max
  Clone ID: LIB3050-003-Q1-E1-E9
caagcctccattcaggtgccaaaaaacgacaaaagggggcttgttccaatccgacaccagaaggtttc

SEQ ID NO: 23930 - DNA, 416 bp, Glycine max
  Clone ID: LIB3050-003-Q1-E1-F10
ccaacccttcattacggttccaaaaaaacaacaaaagggaaggttgaagaaaaaaataaggaatttaataatccacctgtaaaggttgttaacattgttaacacaatcagacttcaagagcaacccgcattcgataagaagcagtttgttaccttcatgaagaggtttatcaagaatttgactcccaagctcgatgcagagcaacaggagttgtttaagaagcacatcgagggagcaactaaatacctgctctctaagattaaagatttccaattttttgttggtgagagcatgggtgatgatgcttgcttggtctttgcctactacaaggacggcgctgctgatccaacattcctgtactttgcatatgccttaaaggaagtcaagtgctaagtgacttaatgtaccgagctatc

SEQ ID NO: 23931 - DNA, 377 bp, Glycine max
  Clone ID: LIB3050-003-Q1-E1-F11
ggagcagaggcagagcataaacgttgttgtgtgtttccttagaaaagagagaaagaaataatgagctccatgggtgagagccagcagcggagcttgtttgggagtacaaaggcatcgtctctgccagtgtcaacgtcgcgttcagactctgaaggaggccttcgcagacgtctttcttctctgtctctgaagatccaattagagagcccgaattcctcctcatggtcatttcccagatccaagtccctctcatccatgggtgactatgcaaggacatggtgggactggagctgggcctggatcctctccaggaagctcatcttcgctacagatctcgaaatgaacgaccgggaaaccaagctccttgcttctcataa

SEQ ID NO: 23932 - DNA, 387 bp, Glycine max
  Clone ID: LIB3050-003-Q1-E1-F12
acagaaggggaatttggattataaattgtaaaaaggaaaggggaaaggaagcaatgcaaggaaggagagtggattgattcctcagcagcaccagacatttataaaagctctttcccttccctcaaatcgctcatactcttccaatcttttttttttttttttttttacctttctccctcgctcaataatacaaaacaaataagaagaagaagaaggttttcgcgatggcatcgaaacggatcttgaaggaactcaaggatctccagaaggatcctcctacctcttgcagcgccggtcctgttgctgaagacatgtttcactggcaagcaacaattatgggtcctccagacagtccttatgctggaggtgttttcctagtcactattc

SEQ ID NO: 23933 - DNA, 385 bp, Glycine max
  Clone ID: LIB3050-003-Q1-E1-F2
ggttccagtgtatgtgattgttgtgactcgttcttcttcgtcgttatcttcttcttttgttgtttgtgtgtttgttttttctctcacctgaaaatgtcttgctgcggtggtaactgtggttgcggaagcgcctgcaagtgcggcaacggctgcggaggctgcaagatgtacccagacttgagctacaccgagtcaaccaccaccgagaccttggtcatgggagtggcaccagttaaggctcaattcgagagtgctgaaatgggtgttcccgctgagaacgatggctgcaaatgtggagctaactgcacctgcaacccctgcacttgcaagtgaggtgttggagagctaaagcttcaagcagaaatggcccttaaaattatgataa

SEQ ID NO: 23934 - DNA, 348 bp, Glycine max
  Clone ID: LIB3050-003-Q1-E1-F3
ggaaaagaaaccaaagaaaacgcgatggttgacgtggactttggaacctcgggctcgccgaagcgccacaaccacaacggcttcatcgtaacaatctcggcgatcttggcgctgttaaaaaagcgcaaagcagcagtgaaggcgagcaaagaggatgaattgaagaagtcgtcgcggacggagaagcttctcagcaacataagcagcaaagcgcttttcggtcacaagaagaataataagaagcagctgcgaagcgtggaagagacacaacaagcacaagggtggggaaacggcggcgtttggcagaaggagattctcatgggtggcaagtgtgagccgttgaatttc

SEQ ID NO: 23935 - DNA, 342 bp, Glycine max
  Clone ID: LIB3050-003-Q1-E1-F4
gatggcaaaaccgcgctttttgatttcgacgattcctctgtgtctgtcagtacaactcccgtgaagttagaattggagtgaatgctaagttgacctcactaacaggtttaggttgcgttcattattggttgctattataactaacaattgctctgaccttggaaattggaatgaaataaccttcgtttttacttaaaacatctttcctcactctcaaaagcagggttgagtggatgtgcaatgtcataagggtagtctcaaggctctgtttggcttccagtttgaaatgcttacacatcatggctgtatctagtctttttgtttttatacaaacatcaatgt

SEQ ID NO: 23936 - DNA, 317 bp, Glycine max
  Clone ID: LIB3050-003-Q1-E1-F5
gccactaggaagacgagatggcctgagcttcagcacatcaggaacaagtgatctccccaaacccttcaacaccaccggcgtgacccttgacgctttcgccgccaaaaactttgatgtcaccgacgttgtcgccttatccggcgcacacacctttggtcgtgcccattgcggcacattcttcaacaggctctcccctctcgaccccaacatggacaaaaccctagccaagcaactacaatccacttgccccgacgcaaactccggcaacaccgccaacttggacatcagaaccccgactgtgttcgacaacaaatact

SEQ ID NO: 23937 - DNA, 386 bp, Glycine max
  Clone ID: LIB3050-003-Q1-E1-F6
gattgcggatatgctgtctttgactatgatttcgtcacttctgagaactgtcaaaagagcaaaatcttcttcattgcatggtccccttcaacatctcggatccgtgccaagatgctctacgccaccactaaagacaggtttagacgtgagctagatggtgttcattatgacatccaggctactgaccccacagaaatggatcttgaagtgctgagagaccgtgcacattgaaatgtgtaagcactgatattcattttcatatcagaatctactacgttttacctttagtgacttacctcttcatgcattgtcatctgcagagcccatcttgccacagatatataactcgtatccaagaatacgaatctgaaggctgatgggtttaa

SEQ ID NO: 23938 - DNA, 335 bp, Glycine max
  Clone ID: LIB3050-003-Q1-E1-F7
gaatggggatatgctgtctttgacgattagtgcaacactgcaaagcaaagcagtagagttgaatccttccacactggatgatccactttccaatggcaaatccgttcccagaaatggcacacaagcatcaacaccaggttcaaacttaatctctaacgctatcactcttataacgatgctacatatggcatcattgtagatcaggcttcgcaatgacagcaaggacgttcattgctatactcaactacatgcagcctgatagactaagctgatagctaggagttctgatgacgcagcacctcttgcaatggcacctgaaaatgctagggtttcac

SEQ ID NO: 23939 - DNA, 366 bp, Glycine max
  Clone ID: LIB3050-003-Q1-E1-F8
gaaagaagggttttttcatttcgttcgcaaccaccggccatactcactgttgttctcaagggattcgattctctctgcactcacttctagggttttctctgcgctataagcaatcatggcggatgaaacaccaaatgagatgaaggaggaggttccagaaattgttccttttgatcctaccaagaagaagaagaagaagaaaattacaattgtagatcctgctgatgaacctgtggagaaattggctgagaagacagaaaacctctcagtttccgagggggttgagactgcatttactggtttgaaaaagaagaagaagaagcctgttgaaatgggtgacttgaatgatgagagtggagatgcaat

SEQ ID NO: 23940 - DNA, 385 bp, Glycine max
  Clone ID: LIB3050-003-Q1-E1-F9
cactgtgatagattcatatggaaaccttgtgtatcgggtggacaattacatcatgcaccctaacgaactcattcttatggacgcttcaggaaactctcttctcaccatgcgccgctccaggaagctagggttagtagatagatggtttgtgtatgaaggggaaatggggaagcagagtacgaggagtaagtcggttaagtcaaaagagagaccagtttgttgtgtacggaagcgtgtgaatattttagacggcaaagccaacaaggtccaggcctacgtgtaccgcgctgcctcggattcagataaacgacatccggcgtttacagttgaaggttcctatgcacatagaacatgtaaagtgttggatgagtacaagaatgccgtc

SEQ ID NO: 23941 - DNA, 361 bp, Glycine max
  unsure (1)..(361): unsure at all n locations
  Clone ID: LIB3050-003-Q1-E1-G1
ccagaggtaaaggatcagcactcagaggggaaaaagaacgaggtcaacgacaccagtaacgccgtcgttacgagttactgggaatcacaaggcccaaggttcgtanggaggacgggacagagtggccgtggaactgcttcatgccatgggatagttaccactctgatgtgtcaatagacgtgaccaagcatcatacaccaaagtcattaacggacaaggttgctttagggctgtcaagtttctaagggttctctctgatatctacttcaaggaacggtatgggtgccatgctatgatgctggaaacaatagcagcagttccaggaatggtgggagggatgctgctgcacttaaagtctctg

SEQ ID NO: 23942 - DNA, 373 bp, Glycine max
  unsure (1)..(373): unsure at all n locations
  Clone ID: LIB3050-003-Q1-E1-G10
gaataaaaaaaacttagaatcgaaacgaaaaatcgccatgaatcccaaaatcctcttcgtgtttgctctgcttctgaatctcgtatccaattcgttccaaaaccctaaccctaaaacccccaaatcaacgtcatcgcaggctcacgtggagctcatcaaccacggcttacccgccggtcttctccccgccaccaccgtcttgggctacgccgtgaaccgtacctccggtgactttaccgtcaagctcggcggcgcgtgcaagatcacgctcccgccggacaactacgtcgccacctattccgacaccatcacagggaagatcgtgaaggggaaaatcgctgaactcgaagggattanggttcgcgcgttcttc

SEQ ID NO: 23943 - DNA, 370 bp, Glycine max
  unsure (1)..(370): unsure at all n locations
  Clone ID: LIB3050-003-Q1-E1-G11
gactcacaaccacaacaaggcagcagtgcgaagagaaagaaagagaagaagcgcttatcgaactcggacggaagcactgagttaactcagagcgagtgaaagtgttgctgcgtgatgtctggtggtatcgcccgtggacgcctcaccgaggagcgcaagtcgtggcggaagaaccatccccatggttttgttgcgaagccggagacgctgcccgatggaaccgtgaacttgatggtgtggcattgcactattcccgggaagactgggactgattgggagggtggctacttcncgcttacgctgcactttagtgaagactaaccaagcaagcctccaaagtgtaaattcccacaaggtttcttccacccta

SEQ ID NO: 23944 - DNA, 366 bp, Glycine max
  Clone ID: LIB3050-003-Q1-E1-G12
gccaaaaaaacaaaaaaagggaatcatcacaagccaaaactgcagtagccaatgaagaacaatggcaaaatgctttagaagaatcaaaaaataacttgtccaaaaattccgaaggtgccaccaactcaggacatggaaacatcaaagaaaataccaaggggaagaaaaacaaatcaaagaaaagcaacggtgggagaacgggtaagaagtgaaaatgtacttatgactggttgtttgtatattcagatatataggaatatgtgttcaaactttaaactgtctggttggtctatctttgctatattttctttgctgtggacctgattttggacttttaatcttgatcatctatgaaaagttctttat

SEQ ID NO: 23945 - DNA, 368 bp, Glycine max
  Clone ID: LIB3050-003-Q1-E1-G2
ggggtacaacagttgcaaaaatttcaaggcataaaaagcaaaacattccttcttggtagctacaaggtcgatggacatgatgaagaatagcccttgtgatgtctcttcttcttcttacatgcttattgaggccagtggtgactctgaagctgattggaacccctttgctatgggtgaacatgcttatgaaattggcagagcagatgatgatgctcaatcttgcatctatgatgattctgagacttgtaatgctgctgatgaactcaatggatatgatgagtcctggaataatgatgatgatgctgaagacgagaagaaagatgatgttattcatcatggaacttcatattgtgatgatgatgagatgc

SEQ ID NO: 23946 - DNA, 351 bp, Glycine max
  Clone ID: LIB3050-003-Q1-E1-G3
ggggtacaacagttgcaaaaatttcaaggcataaaaagcaaaagattccttcttggtagctacaaggtcgatggacatgatgaagagtggcccttgtgatgtctcttcttcttcttacatgcttattgaggccagtggtgactctgaagctgattggaacccctttgctatgggtgaacatgcttatgaaattggcatagcagatgatgatgctcaatcttgcatctatgatgattctgagacttgtaatgctgctgatcaactcaatggatatgatgagtcctggaataatgatgatgatgctgaagacgagaagatcgatgatgttattcatcatggaacttcatattg

SEQ ID NO: 23947 - DNA, 363 bp, Glycine max
  unsure (1)..(363): unsure at all n locations
  Clone ID: LIB3050-003-Q1-E1-G4
ggttgccaaccaaattattcccttcttcacttactgtcttctttatttctttctccacctgaagttctccacaacttggaaggtgatcagcttcaagaattttccatcatggctactgagacttctgcatctgatcatgcttctactattgatgagcaatatgtgaagaatgaaaaggacgaaggcattgcacaaaagatggcttctttagcaaatgaagatgaagtcaaacatgacaagcctgaggatgaggatactccttcatcaaagacagaagaagatgaggttgctgcagttgagatcganaaatctgaagattctccggcattagaggcttctgctgaagatagtgtgaaacatgac

SEQ ID NO: 23948 - DNA, 378 bp, Glycine max
  unsure (1)..(378): unsure at all n locations
  Clone ID: LIB3050-003-Q1-E1-G5
gccgctgagctccctttctcctcggtccacagagacaaaatgtaagacaggtgccaacagttcatcacgaaagaaaggactagctgagccgagatcactaactaaaacgaatttaatactaatcgaaaatactaatagaatagaaatagaactgtcttttcatatagatatcccttcaacacaacataggtcatcgaaaggatcttgaagacccaccaacgcacgaaagccgggatctttcagaaaatggattcctattcgaagggtgcataaccgcatggataagctcacactaacccgtcaatttgggatccaattcggttccttangaggtatcgggaacgaattttggaatgtaataatatcgattcatacaga

SEQ ID NO: 23949 - DNA, 375 bp, Glycine max
  Clone ID: LIB3050-003-Q1-E1-G6
ggcaacgaaaatgaaaaactcctatataaggcaaagctgcctctggctgtaaccctaatagcacaggtagcaccgattggctcttcaagacttgcttctttaccatttcattcctaaagaccctattcttcttcgctcattcatcagcactgccatcagccccaacctccccacaaggtcacagggactaaagatgtgtgccaccatgtcagacgatgaaatggatgagaaggagttggatctctcttctgcagaagttgtaaccatatacaaaaccgcggctgagatcgttaacaacgccttgaagctagttatttcagaatgtagaccataggcgaagattgtggatatttgtgagaaaggtgattcatacat

SEQ ID NO: 23950 - DNA, 360 bp, Glycine max
  Clone ID: LIB3050-003-Q1-E1-G8
cggaaaaggtttgacttttgatagtggtggctacaacatcaagacaggacctggctgtttgattgaacttatgaaatttgatatgggcggttctgctgcagtttttggagcagcaaaagctctaggtcagatcaaacctcttggagtggaggttcattttatagttgcagcttgtgagaatatgataagtggaacaggtatgaggcctggagatattgtcacagcttcaaatggaaagactatagaggttaataacacagatgcagagggtaggcttaccctggcagatgctctggtgtatgcttgtaaccagggtgctgaaaagatagttgacctggcaacattaactggggcctgcat

SEQ ID NO: 23951 - DNA, 345 bp, Glycine max
  Clone ID: LIB3050-003-Q1-E1-G9
gaaacaattcaagcaaaaaaagcaacctctcttttcttcacaagctcaaatcaaatagtgagtagaacttcaaaaaaaaaattaaacatgtctactacacatttttcccttctagccatttttctccttctttcactagattctcttggcacaactatgggtggacgactcatccccccaagtgctccaagtacagttacaaggccactagtttcatcagaagttgaaaactacgtgaagccacagctgaatcacaagctgaaagccttacaaggaagagaagttaaggggtgcttgccaaaaggttcaaggcataactcggctcctagcagattcgtcaactac

SEQ ID NO: 23952 - DNA, 143 bp, Glycine max
  Clone ID: LIB3050-003-Q1-E1-H11
gatccacgtaaatacaacacaagaaacagacagagagaaattcacacataaaaatcatcacttcaaattaagctagagctagaaagattcagaggtagctatagagagagaaacagacgtcatggatggtttgcaaagatctg

SEQ ID NO: 23953 - DNA, 327 bp, Glycine max
  Clone ID: LIB3050-003-Q1-E1-H2
tcagtgacacagtcacacaagatcgctcattggactcttcatatgctgaaacgttgaaaacacagtgtcccccaccaccacccagctcagacccaacagtgtctcttgaaccatccacgccaattcgtttggacagtaaatactatgagggattgatcaaccaccgcggcttgttgacttcggatcagacattgtacacgagccaatccacaaggggaatggttcaaagcaatgctaacaatggtgccagttgggctgacaagtttgccctagcaatgcttcgcatgggttctatagaagtgcttactggctccgatggtgagatca

SEQ ID NO: 23954 - DNA, 282 bp, Glycine max
  Clone ID: LIB3050-003-Q1-E1-H3
ggattgactactgacaatggcgcttcaacggttaccagaaggatgaattgctattacacacacttgcacttcgacgtgcgaacatgtgtatgtcttccgtcgtatcaacgatttactctccggctgtcgatcccgccgctgtgtcgcaccgttttcgccatgtcgactaccactccagcaattgacattctcgatcagttcgcaatcaactctctactctcgcgctctagctagatctctaggatcggcctaggatcactcatcacggtaagaagagctttc

SEQ ID NO: 23955 - DNA, 305 bp, Glycine max
  Clone ID: LIB3050-003-Q1-E1-H4
gatgttcaataatatggaataattttcttcctagttcatatgtctgtggagcaacctttaacattcgcctatttcttcttcttcttttgatatagctccaacgattaatatactatataacatcgctgtggtgataacataaacaattgaatcatgtcgcggagaccggcgaatccgtctcggcgattcggggacagtggaggtggattgttttcatcttcgaaatcaaaggcgtcaccggttttgtcggttgggctcataattgtgggatgtctgtttctcattgcgtatgtgtacaagggctc

SEQ ID NO: 23956 - DNA, 262 bp, Glycine max
  Clone ID: LIB3050-003-Q1-E1-H5
gtagcatctgaaactgatcattgcagaccattcttctgttctcgtagtattaagatatttgatgtgctgagttttcaattgggaaacgaaccattcactttgttttagattcgtattcttttgctcaaacgcatggcttgacagtttacaatgtggcaattcaattattttccattttttaaaattaaaattagaactctacatttttatttttatttgttttcaaacatgttattagtttcaaggtctagcttctgtaagt

SEQ ID NO: 23957 - DNA, 338 bp, Glycine max
  Clone ID: LIB3050-003-Q1-E1-H6
ggcagcagacacacacaccataaacgattcagttcagtcactttcattatcaggttatgtcgtcaatcaacgacattttcggaacgtcaacaacatgcacttacacgatcactatcactcagtctcactctgctgttcatctacctcatgggtatccatgaaatgacacatagacacgaccacggtatcctgcacattgataacctccaccatggtatccaccccagcagctatgccccacagtatgctcagcagcctctcctcatgcatcatgttgggtttcatgacggatgtttggctgaactctgctgctgatgcatgcttgatgcctgcattta

SEQ ID NO: 23958 - DNA, 334 bp, Glycine max
  Clone ID: LIB3050-003-Q1-E1-H7
ggagctgggtttgttttcggcctttgatcttcgattctctctctttttctctcgcgaaaaccgtatcagcaatgtctggagaatcagccagcgctattcacaagggtcaagtcgatctcttagacttcattgactggtctggggttgaatgcctcaatcaaagctccacccactctctccccaatgctatcaaacagggttatagagaagacgatggtttgcatctggagagtgatgcagacgagcagcttttgctctatattcctttcactcaagtcgttaaactttattcctttgttatcaaaggtcctgaagaagaggccccaagacagtg

SEQ ID NO: 23959 - DNA, 205 bp, Glycine max
  Clone ID: LIB3050-003-Q1-E1-H8
aggcgtcagtagagcagagaaaggggaacaaatagaggtcgagacaaaagaatatctttcgctcgctgtttggaattgcctctttctttgagaaactcacaacatcatcgtttacctctctggtacaccaaaggctttaacacgtctaatatcggctgagctttatgtcaaatatgccaccatcattatcattacacgtgtaata

SEQ ID NO: 23960 - DNA, 338 bp, Glycine max
  Clone ID: LIB3050-003-Q1-E1-H9
gacacaattcaataccatttatcaactcactcatcaatctcgtttgttctcactaactattacttcatcatgtcgtcgagcacagttggtcaagtcatcaaatgcaaagctgcggtttcatgggaggcagggaagccacttgtgattgaagaagtagaggttggcacaccacaagctggtgaagtgcgtttgaagattctctacacctctctttgccacactgatgtttacttctgggaagccaagggccaaactcaattgtttcctcgtatatttggtcatgaacctggagggattgtggagagcgtaggttagggtgtgactcatctcaaaccagg

SEQ ID NO: 23961 - DNA, 370 bp, Glycine max
  unsure (1)..(370): unsure at all n locations
  Clone ID: LIB3050-004-Q1-E1-A1
gggcagccgcgatatcatcttcttatagccactcgaaaatgaccaagagaaccaagaaggccggtattgttggaaaatacggcacccgatatggtgctggtttaaggaaacaaatcaagaagatggaagttagtcagcacagtaaattcttctgcgagttctgtggaaagtatgctgttaagaggaaggctgtgggtatttggggctgcaaagattgtggaaaagtgaaggctggaggtgcttacacattgaacactgccagtgctgtcactgtccggagcaacattcggaggctgagagagcagactgagagttganagcagtttacacttgtcatttgttttcaaatcataaattttgctgctggtta

SEQ ID NO: 23962 - DNA, 252 bp, Glycine max
  Clone ID: LIB3050-004-Q1-E1-A10
gcaagatgaccaaccacgtcatactggacatgtttcaaattagactatcttatggtgttgatgcaaacctctgacaccatggggtgcaaattaggggtatttggtcatgcaacatcctgtgctcaatgctccacagtctgcgatgaccctagccacgatagacagtcccgtctgctacacctagaatgacatgctcgtcgatatcaggcactcaagctcactccacttcacagcatcattcatcacattata

SEQ ID NO: 23963 - DNA, 369 bp, Glycine max
  Clone ID: LIB3050-004-Q1-E1-A11
ggatcagaagacaggttcaaaccggagcaaaaaaacttgttacgatggtttcttccgacaaggatccacgagaggaagtccttcaagcatggtacatggatgatagtgatgaagatcaaagactcccccaccacaaagaacccaaggagtttgtctcgttggaccaacttgctgaacttggagtccttagctggaaattagatgctgataaccatgaaaatgatccagagctgaaaaagattcgtgaagagcgtggctacacctacatggatgtttgtgaggtctgcccagaaaagttgccaaattatgagcaagaaatcaaaagcttctttgaagaacatcttcacactgatgaggagattcgctttt

SEQ ID NO: 23964 - DNA, 404 bp, Glycine max
  Clone ID: LIB3050-004-Q1-E1-A12
gggatatgtgaagacacctcgtggccttcgcacactgaatactgtttgggctcagcatctaagtgaagaagtcaagagacgattttataagaactggtgtaaatctaaaaagaaggcttttaccaaatattcaaaaaaatatgaaactgaggaaggaaagaaagatattgaatctcagcttgagaaattgaagaagtatgcaactgtcattcgtgttctggctcatactcagataaggaagttgaagggtctaaaacagaagaaagcacatttgatggagatccaagttaatggtgggacagttgaccagaaggtggactatgcatatagcttcttcgagaagcaaatcccagtggatgctgttttccaaaaagatgagatgatagatatcgttggagtgacta

SEQ ID NO: 23965 - DNA, 400 bp, Glycine max
  Clone ID: LIB3050-004-Q1-E1-A2
ggcagcgcttgatttgaggcgaggcaagccccactcaaccaccacacctctcctcgttcacgctacccctttctgctcttcatcgagctttcaagttttagaagtataaagatggcagagatattcttatttaactcagagtcggtgaacgagggacaccctgacaagctctgcgaccaaatctccgatgctgtcctcgacgcttgcctcgagcaggagccagacagcaaaattgcctgcgaaacatgcaccaaaaccaacttggtcatggtcatcggagaaatcacgaccaaggccaacgttgactacgagaagatagtgcgtgacacctgcaggaacatcggcttcgtctcaaatgatgtgggaccggatgccgacaactgcaaggtcctcgtcaaca

SEQ ID NO: 23966 - DNA, 272 bp, Glycine max
  Clone ID: LIB3050-004-Q1-E1-A3
gatccttaatgactttcttggacatccatggaaatggcagtctagaaaactcgagtggtagtcatcttgatcctaatggcgcatctggatgtacctcacagcagcgatcttaacactcatgatcgagttcacatatccagtgtggtgcaccataatctgcaggtgagctgcgtgatcggaactgagcgaccagcttcaaacacctgaaacgcaattctggaggcccttccggactcaatttagcatactctcatcgctccggtcaatctctc

SEQ ID NO: 23967 - DNA, 322 bp, Glycine max
  unsure (1)..(322): unsure at all n locations
  Clone ID: LIB3050-004-Q1-E1-A5
ggcagacgccgtgactagacactcatctcactcgcgccatcttagggtttctccttttgtttcgcaacatggttgccgctaagaaaactaagaagacccatgagagcatcaacaacaggctcgctcttgtcatgaagagtggcaaattcaccctcggttacaagaccgttctcaaatctcttaggaactccaaaggaaaattgattatcactgctaacaactgcccccctttgagaaagtcagagattgaatactatgctatgttggcaaaggttggagttcatcattacantgggaaacaatgtggattgggcactgcatg

SEQ ID NO: 23968 - DNA, 400 bp, Glycine max
  Clone ID: LIB3050-004-Q1-E1-A6
gactacaaatcagttttctacttgaatcttcgttatccttcttttggtctccttgaactcgactattcactatggcagatgaggtggttctgctagatttctggccaagtccatttgggatgagggtcaggattgcacttgctgaatcgggtatcatatatgagtcgttcgaagaggacttgcagaatacgagccctttgctcctcacaatgaacccggttcacaagattatcccggttctcatccagaatggcaaacccatttgtgaatcgctcgttgctgttcagtacattgaagaggtctggaatgacagacatcacttgttgccttctgacgcttatcagagagctcaagcaagattctgggctgaccttgttgacactaagatatgtgatcctgg

SEQ ID NO: 23969 - DNA, 266 bp, Glycine max
  Clone ID: LIB3050-004-Q1-E1-A7
gaacctttgcattctattcattcaagattcagcaagtgcgttttggaagcagagaccgaaatacttcgagatggcccgtacaaagcaaactgctcgtaagtcaactggaggaaaagctcccaggaagcagcttgcaaccaaggctgcacgtaagtctgcaccaacaactggtggtgtgaagaagcctcatcgttatcgccctggaactgttgctcttcgtgagattaggaaataccagaagagcactgagctcctaatcaggaagc

SEQ ID NO: 23970 - DNA, 356 bp, Glycine max
  Clone ID: LIB3050-004-Q1-E1-A9
gggtgtcgcgtccgctatatattctacccgaatttctgcattttccttcttccatcggcgcggcacacacagacacacacatttcgtcggaatgggaagggtgattcgcgcacagcgtgagggtgcggggtcggtgttcaagtcccacacccaccaccgcaagggtccggcgaggttccgcagcctcgacttcggcgagcgcaacggctacctcaaaggggtcgtcaccgatatcatccacgaccctggtcgcggtgctcctctagccaaagtggcgttccgccaccccttccgctacaagaagcagatggagctcttcgtcgccgctgagggcctctacaacggccagttcatct

SEQ ID NO: 23971 - DNA, 252 bp, Glycine max
  Clone ID: LIB3050-004-Q1-E1-B1
ggagtgagggtcgtgcaatttttgctagcggaagtccatttgatcctgtagaatacaagggcaaagtgtactattctggccaagccaacaatgcttacattttcccgggctttggtctggggttggtaatctcaggagcaatcagagtgcatgatgatatgcttctagcagcttcggaagccttggctaaactagtgtccaacgagaactacgaaaagggcttgatttatccaacattctctaacatcagag

SEQ ID NO: 23972 - DNA, 360 bp, Glycine max
  Clone ID: LIB3050-004-Q1-E1-B10
gatctacactcataaatcattacatggtcatagtctacacctaattagccaaacacaccacagcaccaaactagttggctcaattctcgttgaatggctttggaggctttgaattcaccaacagcagccaccactcccttccgtggttaccaagaagaggaggaggaggttgaccttcacctacgcgagccttgggccaagagaaaacgctccaaacgacctcgttttgagtcggaggaagagtacttggctctttgcctcatcatgcttgcacaaagcggtaacaacaacacccaattaccgtcttcgtcacagtcacacaaagaagcgtcaccgccgctgaaactatcacacaggtgc

SEQ ID NO: 23973 - DNA, 392 bp, Glycine max
  Clone ID: LIB3050-004-Q1-E1-B12
gaccaaaccaaacccctaagaggccctaactagctaactattttctttctttcttcttcgccgggaaagatgggagtggctgtttatttggacaccattttcgtccctttgagtcttttcatcacagtgggttaccatgtctatctttgccacaccatcaagaacaaaccttcacgtacaacttatggaatcagtaagaagagaaggacagattggagtctcaacttaaatcagggtgatgccagcaaagctatgttgacggtgcaaagcttgaggaacactcttatgtccacaatactcacagctactataaccattcttattaacttgggtttggcagctttgaccaacaacacctacaatgctagccatctttttagcagtgggatttt

SEQ ID NO: 23974 - DNA, 404 bp, Glycine max
  Clone ID: LIB3050-004-Q1-E1-B2
gacccttaatttttttcttcaacaaacgccacaatggccgtcacgaaaagcctctccatcttcctcttcatcgccataagctgcgtggccgtagctcaggcagcgaacttcaacatcacaaacaattgcacctacacggtgttgggcgccgccgttcccggcggcggctcaaggcttaaccctggcgaatcgtggaacatcagtgtgacgaacggcacgacaggaggacgcatctggggtcgaacaaactgcaccttcgacaacgcacgacgcgggaagtgcctcaccggcgactgcgacggtgttcttgagtgcaacatcacaggtacacctccgaacacgttggtggaattcgcgttgaaccagtacaacaacctcgacttctacgacatctccctcgtcga

SEQ ID NO: 23975 - DNA, 292 bp, Glycine max
  Clone ID: LIB3050-004-Q1-E1-B3
ggatcaaattcactttgatattcattccttctttcatttcattagcaaaagtgatcaattgagtgctacttcaccagcgattatgatgaggatcaagaagcagggccagaacaagtttgttcgaatcatggcatcaccaatcagagcactgggaaaagcacgtgacatgtacgtgcggagcataacgaactgcggccagcacgtgagctactacggcggcgaccccacagaacgcgcgggaaggttctcgaggagccacagcgtggccacgtcgacgacgtccgaggttgtc

SEQ ID NO: 23976 - DNA, 65 bp, Glycine max
  Clone ID: LIB3050-004-Q1-E1-B4
gcggctgcgacacagcgaggggatggctcttcactttcatgttcactcctgcgatccattccgta

SEQ ID NO: 23977 - DNA, 312 bp, Glycine max
  unsure (1)..(312): unsure at all n locations
  Clone ID: LIB3050-004-Q1-E1-B5
cagtcctgcgtacagatgacaaaagacgggggatcgggatatgcctgagttgcttacgaatatggtgctcatgtccccaacacattgcttaaggtatgagtatgaagatgctgacttggatgcccaagatgctgaggtgtcactatggaatttctcaatttaataatgtgttttggtttggtttatgttgttagttttttggagtgaacagtgtctgtactggttttttattagtagtacggatactagttatacgtggaaagattgcgagggaccanaaggaattttcttttgaacccttttttgtcaatg

SEQ ID NO: 23978 - DNA, 281 bp, Glycine max
  Clone ID: LIB3050-004-Q1-E1-B7
gactgcgaaaccagcaggggctccaattcctactcttagccgcagatctctcagggcttgcatcttctcaggtaagttgtgaagatgtacacatcaaggaagaaaatccacaaggataaggatgctgaaccaactgagtttgaagagtcagttggacaggcattgtttgatctggaaaataccaatcaggagcttaaaagtgatctgaaggatttatacataaactcagctgtgcaagttgatgtttctgggaaccgcaaggctgttgttattcatgtccc

SEQ ID NO: 23979 - DNA, 409 bp, Glycine max
  Clone ID: LIB3050-004-Q1-E1-B8
gagagaaagagagagaaagatgtcgaagcgtggtcgtggtggttcggcggggaacaagttccgcatgtcgctgggtcttccagtggcggcgacggtgaactgcgccgacaacacgggggcgaagaacctctacatcatttcggtgaaagggatcaaaggccgtttgaaccgtcttccctcggcctgcgttggcgacatggtgatggccaccgtgaagaagggaaaacccgatctgaggaagaaggtcttgccagctgtcatcgttcgccagcgcaagccatggcgccgaaaggacggcgtctacatgtacttcgaagataatgctggtgttattgtcaatcccaagggagaaatgaaaggttctgctatcactggtcccattggaaaagagtgtgctgatttgtggcct

SEQ ID NO: 23980 - DNA, 412 bp, Glycine max
  Clone ID: LIB3050-004-Q1-E1-B9
gatcctagtggagaaattctagttttgactaaattttgtccttggaagcttcacttatttgagcttgagggagagttgaaaaatgaccctgctgtcaaatatgttctatatcaggatgaaagaagcaagcattggcgagtgcaggcagttgcagtatctcctgacagttttcagagccgaaaggctctaccctcacagtggcgggggttaagggatgaagaattgtcaaagaagtcaagcattcctggatgtgtttttgtgcatatcagcggatttattggtggaaaccaaaactttgatggtgccttggccatggcaaaggctgctttgaagatgtagacgaagatcatatgaaccaagggctatcactgattttgcgcactcattcacagtacactttactgattgcgtt

SEQ ID NO: 23981 - DNA, 325 bp, Glycine max
  Clone ID: LIB3050-004-Q1-E1-C1
agggaaggggaagaaggttggttgattggtcccattgattccgaagagaagagaaaagatgtttgagccacaacagctatacactcgcgcgaagaccgaggaattcgacctcgaatcaggagaaaccctctacccagggctgagcgtctgcgagaaccagctccgatggggtttcatccgcaaggtctacggcaacctctccgcgcagatcgtcctcagcaccctcgtctccgtcaccaccgttttctatactccaatcaatgacctcctcaatgggcaattcaccctcctcctcatcctcctcttccttcccttcatctttttg

SEQ ID NO: 23982 - DNA, 291 bp, Glycine max
  Clone ID: LIB3050-004-Q1-E1-C10
gaaggaaggaaggaagagtgagcgtgaaagatgccttgggcgaggctttcagggtctccaaggctcgacgttgctattgacatgggcaatccatttctcaatctcactgttgatggtttccttaagatcggagctgtcgcagccacgcgatcagctgctgaagatacttatcatattatccaaaaggggaatatctcaagtcatgatttcgagaaaacgttgaagaagatgtgcaaagaaggtgtatattggggaactatagctggcgtttatgttggaatggaatatggg

SEQ ID NO: 23983 - DNA, 409 bp, Glycine max
  Clone ID: LIB3050-004-Q1-E1-C11
agggtaacgaggttgaccagagttacatacagcagcaccactcgttgtcaatgccaatgatgttttcgggttttaacagagagaaggagatgtcagccatgatcactgctttgacacgtgtggtttgtggagattattctcttgttcatcacaatattgataatactaatagtgcaattgttggtggtggtggtggtgatgatgtttcaaatatggcttctggttctatgccaccttcgtctacttctttatctcatggtggcaactctgttctcaagagaagaagggaagatgataatacaagtgatttcttacgtggaggttcattccctgctattttaacaactgcggaaggttcaagcacgattagaagaagaagagcgaatacggtatacgattacgaatacag

SEQ ID NO: 23984 - DNA, 392 bp, Glycine max
  Clone ID: LIB3050-004-Q1-E1-C2
gttcttgaggagaagaattggccgccttttttcccaataatccatcatgacattgctaatgaaattccaattcatcttcaaaaattgcaatatgttgcatttactacattgttaggattagtgttgtgccttttttggaatgttatagctgttactgctgcttggattaagggtgaaggtgtaaaaatatggtttcttgccattatctatttcatagcaggggttcctggagcatatgttctgtggtatcgcccattatattgtgcttttaggaatgaaagtgctttgaaatttggatggtttttcctgttttatctgcttcacataggattctgcatcttagctgcagttgctcctcctatagttttcaaaggcaaatccctgacgggcat

SEQ ID NO: 23985 - DNA, 374 bp, Glycine max
  unsure (1)..(374): unsure at all n locations
  Clone ID: LIB3050-004-Q1-E1-C3
ggaacaaaagatgataacaaaacaaacagagattctgttctcacaaatggtctaggcataggagaggatttgcaagtgcctgtgaatctccagctaagccagccacagcaacaacactacaaggaaccttcaggaactacaaaattgggcagattgcaattgcattgatccatttacaggacgtgtgtttctcaattgctatcaaggaaaatggactcaaattttaacctcaatgttttcatataaatgtggcatatataccacaaacaaattagcttaaagattttaatttganattatcaataccagaaaaggcaacctatcatgtatgtaagaaacaatgaaagcatcttatgagaaaccaagactcaaat

SEQ ID NO: 23986 - DNA, 367 bp, Glycine max
  Clone ID: LIB3050-004-Q1-E1-C5
gagagcacagagatttggtttttattctacctaacaccacatggatacgttgccggaggattgtgtttccaaaattctgtcttacacatctccaccagacgcatgtagattctctatggtctcttcaaccctacgctcttccgctgactctgaccttctctggcgaactttctttccttctgattactctgacattgtctcaagggctctcaaccccctctcccttaattcctcttcttcatacaaacaccttttctatgctctttgtcatccactcctcctacatggatgcaacatgagcttcagattagacaagtcttcgggtaagaaatcttatatcctatctgcaaggcagctttctataatc

SEQ ID NO: 23987 - DNA, 380 bp, Glycine max
  Clone ID: LIB3050-004-Q1-E1-C6
ggcattgtgaaatcaacagagaaacatttcactaatagagagacataagcataatattgagaaataatggagggttgtacttattgtgtgaagttgctatgccttgttgggtttgtggtgcttgtgagtactattgcaggggtggagagtgctggtgaatgtgggaaatctaccaccccagataatgaggcttataagcttgcaccatgtgcctcagcagcacaagatgagaatgctagtgtttctcagagttgctgtgctcaggtgaagaaaattgggcagaacccaagctgcctctgtgcagttctgctctccaacacagccaaaatggctggtgtcaaccctcaagttgctgtcaccatccccaagcgttgcaacct

SEQ ID NO: 23988 - DNA, 403 bp, Glycine max
  Clone ID: LIB3050-004-Q1-E1-C7
gacacacaaactttattacagttgttgtaactaagcaagaatattattaggcaatgaagtcttctggaccttcaacaactcttgctctttttttaaccatcaatttgcttgtctttgtcatggcaagtggctgctacacttgcacacagcctaagccaaaccctagccctaacccattcccttaccctaaccccagccctaccgcaaagagctgccccagggacgcacttaagctgggtgtgtgcgcaaacgtgcttaatggaccaattggtgcgattgtggggtcaccaccggaccacccatgttgctcagtgctagaagggcttcttgaccttgaagttgccgtttgcctctgcactgccatcaaagctaacattcttggcattagccttaacatccccat

SEQ ID NO: 23989 - DNA, 408 bp, Glycine max
  Clone ID: LIB3050-004-Q1-E1-C8
ggaggagaggcggagacgaagaagtgaagagaagagaagagaagggatttggatctgaaaagagaagatggggggaggaatggaagcaaacaagaacaagttcatagaggattggggcactgccagagagaatctggagttcaatttccgttggactcgccgcaaccttgctcttgttggcatcttcggcatcgctattcccgtcctcgtctacaagggcatcgtccgtgaattccatatgcaagatgaagataatggtcggccgtacaggaagttcatgtgagagagtatggagagtcttttgtaataattcgtcaagttagaccttgatattatgaggctacaaaccatgtttttttttccttaattcgcaaaggcttgcttgcttttaagtactctagacctacc

SEQ ID NO: 23990 - DNA, 372 bp, Glycine max
  Clone ID: LIB3050-004-Q1-E1-D1
aggacacagaaaggaatgaagaggaggaagatgaaacagcaatagatgcaacagcaggcagagaagaagaagatcatcaagaccaagacaagactaagaaacagctcaagccaaaaaagaagaaccaaaaaaagcaaagagagccgagatttgcgttcatgacaaagagtgaagtggatcacctcgacgatggctatagatggcgcaagtacggtcaaaaagccgtcaaaaacagccctcatccaaggagctattatcgttgcaccaccgcgacatgcggcgtgaagaagcgcgtggagcgttcctcggaggattctacggtggtggtgacaacctacgaagggcaacacactcacccgtgtcctgccacgt

SEQ ID NO: 23991 - DNA, 406 bp, Glycine max
  Clone ID: LIB3050-004-Q1-E1-D10
ggcaaaaatccgatcagaagacaggttcaaaccggagcaaaaaaacttgttacgatggtttcttccgacaaggatccacgagaggaagtccttcaagcatggtacatggatgatagtgatgaagatcaaagactcccccaccacaaagaacccaaggagtttgtctcgttggaccaacttgctgaacttggagtccttagctggaaattagatgctgataaccatgaaaatgatccagagctgaaaaagattcgtgaagggcgtggctacacctacatggatgtttgtgaggtctgcccagaaaagttgccaaattatgagcagaaaatcaaaagcttctttgaagaacatcttcacactgatgaggaggtccgcttttgtgctgctggaagtgggtattttgatg

SEQ ID NO: 23992 - DNA, 394 bp, Glycine max
  Clone ID: LIB3050-004-Q1-E1-D11
gagtccaagttatgattttgagcaggagctgcttcctgtggttctcaggtccaagaagaagagaacagagcagctatatgattgtgttacttcaagaaactccccaattgaagtccttgagctgagggttacacacatgggggagaaaattgttgtggtcagtttgacatgcagcaaaaggacagacacaatggtgaaactgtgtgaagtgttcgaatctttgaagctcaagatcatcactgctaacatcacttcgttttcagataggcttttgaagatagtcttcattgaggcaaatgaagatgagaaagatcatttgcagataaagatccagacagccattaaagctcttaatgaccctttaaacccatgagcatttgaggaagaacatata

SEQ ID NO: 23993 - DNA, 203 bp, Glycine max
  Clone ID: LIB3050-004-Q1-E1-D12
gagcatagcagcatcatacaaagcattgaattcaaaaacttaagttcattccttgtgttttgctttcttcctcaaaaccaaacatgtcgaacacatgcggcaactgcgactgcgctgacaagactagctgcaccaagggaaacagctatggtgttattgtagagactgagaacagttacatccagaccgttgtcaaggatgtt

SEQ ID NO: 23994 - DNA, 415 bp, Glycine max
  Clone ID: LIB3050-004-Q1-E1-D2
gagggttttgtgctgttgtcgctgctcatcctccataacctccgagctctacaccgaagaacgaagccatggggaagacacatggaatgggagctgctcgcaagctcaagtctcaccgcacgaggcaaaggtgggctgataagtcatacaagaaatcccatcttgggaatgaatggaagaaaccttttgccggttcatcccatgccaaaggaattgtccttgaaaagatatgtattgaagctaagcagcccaactctgctattcgtaagtgtgccagagttcaacttatcaagaatgggaagaaaattgcagcttttgtccctaatgatggttgcttgaactacattgaacagaatgacgaagtcttgattgctggatttggacgacatggtcatgctgtgggagatattcctgg

SEQ ID NO: 23995 - DNA, 367 bp, Glycine max
  Clone ID: LIB3050-004-Q1-E1-D3
aagacgacagaaagggaaaatcaaggtggttgcacctcctgagagaaagtacagtgtctggattggtggttctatcttggcatcacttagcaccttccaacagatgtggatctccaagggtgaatatgatgaatctgggcaagccatcgttcatcggaattgcttcaaaatttggttcaattcaacctggatggtattcaattcctcaaggaaccaattctgttccaaaattccattaaatttggtttacctaattggtaattgaagccttgggtttttaatagatatatccagtttaatgaatggatttgtaagttgagtatgttataagtttccccgttaggtcaccttggaagccagacttttt

SEQ ID NO: 23996 - DNA, 408 bp, Glycine max
  Clone ID: LIB3050-004-Q1-E1-D4
gggtgtagcgcatagagagaactagaactagggtttcatctttgccatcagtagacgacaatgatttacgacgttaactctcctcttttccgatccttcctcagccagaagggaggctcctctgatcagaggaaatcggacgatcagaagccaaaagagcataaacccagtgccagcgagaacagacctatgatgactgattgataacagctgagctgcattcagttgtagagtgactataggtggtaggtattgtacttggtgctaaacgaagatctttttggctgtgttctgaagtatatgcctgcgatgttggtcattgttattgtaatggtttgattttggatatggttataacgaaaacttattatggacagtagttgaacatgatgcacgcatgacacatgc

SEQ ID NO: 23997 - DNA, 280 bp, Glycine max
  Clone ID: LIB3050-004-Q1-E1-D5
gtcagtggggctgcgataagagcacaaaacggggtggcggggtgcgtcagagtgaggcgagaatcaagaagcgacacggatccagacgcgttcgcatcggcattcttggagcactgcaacgccagcttcgacaccactcgcaacactctcgcgaatctccaagaagatcgttcgattcactcttgcgacggtcagaacatccacggctcctaccacatcgtcgtcaaactcaactcacatcccttccaccagtgccagcactccatcatcaccgtcgatt

SEQ ID NO: 23998 - DNA, 275 bp, Glycine max
  Clone ID: LIB3050-004-Q1-E1-D6
gactgcgacgaaggaacatcgctatgatcatggctatgacagcatcagcagcagtgcaagttcttaaactgctgcatcacctatctattcagaatgtttatcggaccacaataccgacggctgtgcctcaatttctctccctcatctcactctctctctctctctctctttttcctttctccataacttgttatacattaattagtgaaaattacacaagtgagatggtatgcgtctttctggttgcgagtcctagtgctaatagtctgttgtta

SEQ ID NO: 23999 - DNA, 411 bp, Glycine max
  Clone ID: LIB3050-002-Q1-E1-F1
gaaacaaggaaggtgaagcatcaatctctttccattccccatccttcagtttgatttccaagccattcagattattcagctgatgtacaatggatgtgatggtcaagtccgagtgaggttgcagtcccaaatcattttcatccatctggggtgttctatacttcatgcatcgaagtagataatcgtttgattctatgaaagaatcgcatcgttgcatgtccacaccatagctctcaaacaccattctcttcgccatatggactaattctcctaacaacttagcatactcattgatgctttcactatatggaaaattaaacctctactatgagcaattaattgttcacaatcatattatatataaacaaaatatagctaggaaaataatatatgtcgttgaaagaaataata

SEQ ID NO: 24000 - DNA, 437 bp, Glycine max
  Clone ID: LIB3050-004-Q1-E1-D7
gctggcagaaaacgaccgacagggaggatcagggcgagtctctgtgtctcgtggcctcggttcgataagtcggtggtggcgttgattaagggattgcttggacgccgcgtgctaccggggttcgagtttgggttgagtgacgacgacgttttgaaaattgggaggagtacggatatggatgtgcagtctgagttgtatatttgatttactgtgtgattgtaatttatattcatggtttgatcccctgaggagtagttcggtactttaagttactgtgtgatgttgtgattggtaatttgattaattagtcacagctacagattttacattgacacatgtgtcatgactagacgaattgtttggcataacgagtagttggtttgtctgttgtggtgcactttacagctttgttgattcactttagacatggccacgga

SEQ ID NO: 24001 - DNA, 400 bp, Glycine max
  Clone ID: LIB3050-004-Q1-E1-D8
gatcacacacacacaacataaactattcaattcagtctctttcgttatcaaattatttcttcgatcaaggtcgttttcgaaatttcaccaacatgagctactacgatcatcagcaacagcctccaattggtgttcctccccctcaagggtatccaggaaaggacgcttaccctccaccagggtaccctgcacaaggttaccctccaccagggtaccctccccaaagctatgccccacagtatgctcaacaacctcctcccaggcaagaagttggttttcttgaaggatgtttggctgcactctgctgctgttgcatgcttgatgcttgcttttaagttctgaaagagacgtggaaggtggtgactgaatcagagacattctgtgaagcggcattctcatc

SEQ ID NO: 24002 - DNA, 390 bp, Glycine max
  unsure (1)..(390): unsure at all n locations
  Clone ID: LIB3050-004-Q1-E1-D9
ggagttcctgcagatgagcgtctgcattggcgttcattcttagtcaaactaggagctgataatcttaagggtgtcaaaaacgaagagctcctagttgcttgccacaaatcggtttatattgtatacacagtgcttggcgatgtcagcatctatgtcgtgggcaaggatgagtatgacgaacttgccttgtccgaagtgatctttgtgataacctcagctgtgaaggatgtatgtgggaagcccccaagtgagcgccttttccttgacaagtatggaagaatttgtctgtgcctggatgaaattgtatggcanggatatttggaaaatacagaanaggatagaatcaaaagactgataaggttaaagccctcaacagagttttgaatgaaa

SEQ ID NO: 24003 - DNA, 381 bp, Glycine max
  Clone ID: LIB3050-004-Q1-E1-E1
gaaggaagggagggaagaatagaatgggatctggaagtggaaaacacactggagagttcttcaggagaagggatgcatggaggaagcatccgatgctcaccaatcagctccgccacgccacccctggccttggcatcgccgtcgtcgccttcggtatctacctcgtcggcgaacaagtctacaataggctctatgctcccgatcctcattcgatttctcacgtgaaagccggggatcaccactaaacgtttggacgtacgcactccattccatcatcacttaataagcttgctagcatgttctccgcagcctttaatgtttaaatttcagaccgtgttcgcttctttggcactcactatgttgtcctgtatgcctacattt

SEQ ID NO: 24004 - DNA, 309 bp, Glycine max
  Clone ID: LIB3050-004-Q1-E1-E10
gggaagaacgaagcctcctcgttcttcttcttctgcgctttctctctccctctctagaaccgtaaccgtcgtttctttctttctctctcctcaaccagagataaagagtcaccttcttatttttctgaatctcgcggcgttgttctttctgctgctgcggctgtggttccggcggcgatgggacagcaatcgttgatctacagcttcgtcgctcgaggcaccgttatcctcgcggagtacaccgagttcaccggaaacttcaccggcgtggcggcgcagtgcctccagaaactccctttctccaacaac

SEQ ID NO: 24005 - DNA, 349 bp, Glycine max
  Clone ID: LIB3050-004-Q1-E1-E11
ggttcaagaggctgagaagtacaaatctgaggatgaagagcacaaaaagaaggttgaggccaagaatgctttggaaaactatgcatacaacatgaggaacgttgtgaaggatgacaaaattggtgagaaacttgatcctactgacaagaagaagattgaggacgcaattgagcaagctatccagtggctagacagcaaccagctcgcagaagcagatgaatttgaggacaaaatgaaggaattggaaagcatctgcaatcctatcattgccaagatgtaacaaggtggtgctggtcctgacatgggtggtgctggcgctggggcagccgaggatgattatgctgctcct

SEQ ID NO: 24006 - DNA, 403 bp, Glycine max
  Clone ID: LIB3050-004-Q1-E1-E12
gatataagatcgattatactcacaagttttgttctttcctagcaattcggcgcaatcgtcttctgcttcaaggaaggagagctcgttattctctatcaacaatgaaaatgtcaggtgaagaggttgttgttgcagctgagccagctgctgccatcccaggcgagcctatggatatcatgactgccttgcaacttgtgctcagaaaatctctggcttatggtggtcttgcacgaggccttcacgaaggggcaaaagtgattgagaagcatgctgcacaactctgtgttctagcagaagactgtgaccagcctgactatgttaaactggttaaggccctttgtgcagagcacaatgttagcctgctgacagttccgagtgcaaagaaccttggagaatgggctgg

SEQ ID NO: 24007 - DNA, 392 bp, Glycine max
  Clone ID: LIB3050-004-Q1-E1-E2
gattcatgcattagcactatttctcaatctctcgtcttacccatttcctccggccctctttctcttttcttgttctgtttttattttcactgttctctgataacaacgttgttaattgtcaccatggttgttctgtctcaactagcattaaaccagtttttccttctgaaaacatgcaagtctacgcccttgttctcggggattcctgtagtcgacctcacggacccctatgccaagacgcacatagtcaatgcctgcacggacttctgcctcttcaagctcgtgaaccacagtgttccgttacagttcacggtcattttggaaaacgaatccctcaggttcttcaaactgcctcaatccgagaaacacagggctggtccccctgacccttt

SEQ ID NO: 24008 - DNA, 85 bp, Glycine max
  Clone ID: LIB3050-004-Q1-E1-E4
gattgctatacgatctcttcactagcgctccggttcaagttctgcaatcagggcaacatgttcatgttccacgccagtccctgtc

SEQ ID NO: 24009 - DNA, 412 bp, Glycine max
  Clone ID: LIB3050-004-Q1-E1-E5
gatacaaatgttgtcatgatacactcggtcctgttatgtgctgtcatttactcactcgggttgaactccatcataaagtgtgtcctaagatgttcaatcatagtcatcaataacaatgacccttcttcttcaagtgtgagcaacaacaagccttcaccgagattggccaacacaggaatcaagaagaaagtcctcaagacttttcctactgtgagctactcaacagagatgaaacttcccggtttggacatatagtgtgtgatttgcctctcggagtttgccaatggtgataaagtgcgcattatgccaaagtgcaactatggtttccatgtgctctgcattgacaagtggctaagttcacactcatcatgccccaagtgcagacagtgcatcattgagacatgtaagataa

SEQ ID NO: 24010 - DNA, 405 bp, Glycine max
  Clone ID: LIB3050-001-Q1-E1-A1
agctgaaccacattatcaagtctacaaatatgaagtgcctgactccaccatcggcattggaaggggattgtggattccttgctgcaaacctttatgctaagagtgtttttggggaagatgctttggtgaatgtgagcattgaaaagcaatcagatggtaagttgagtggatacatcagaataagaagtaaaactcagggaattgccctcagtcttggggataagataactttgaaacagaagggagccgcttaataggagtaaatgcccgttttctctgatgtttcttcgcttatatcaactttgtgtagcttcttgtggcggctaacttcaagcttggttattgcttcaaattctgcggcttttggtggcagcccgcttgttagtattaatttttttttcccct

SEQ ID NO: 24011 - DNA, 379 bp, Glycine max
  Clone ID: LIB3050-001-Q1-E1-A11
acctaaacataaactgaatttcccaaatccccttcccaattttcatcaacacctaatactcccaaaccaatcctcgatcatggacgccgaatcataaactcagctaatcgatgagagaagagaggagcaggaacttaagtacctggaatttgtgcaattcgcgacgatccaagccctgatgcgctgcgccatcctcgactcctatgccaaagagcgcgcgggtcctctgaagccctgcgtcgacatcgtcaacgaagccgtgaagatcgtcatggctccggtctacgacaagttccatgtcgtcaccgtggatgtcctcaaatacgctcgattgaaggtcgcccaattggatcgccacgtttcctccaacgtgaagaaa

SEQ ID NO: 24012 - DNA, 399 bp, Glycine max
  Clone ID: LIB3050-001-Q1-E1-A12
tgagtcctgttagctgcccgcaacgttgtgagaagtcactgaaccttatcattaagaagaacgagaagcccaaaatgggaacaatggagagcttgaagttcttggagtcttcaaagtacatcagagatcttgccactttagtggttgcttatggaatcagcatcaatcttgttgaggttacctggaagtctaagctcaaagctcagtttcctagtcccaacgagtactcttcttttatgggtgacttctcaactgcaactggaattgccacattcacaatgatgcttgtcagccaatttatatgtgacaagtatggatggggagttgctgccacgatcacccctacagtcctgcttctgacaggagttggtttcttttctcttatattgtttgggggcc

SEQ ID NO: 24013 - DNA, 384 bp, Glycine max
  Clone ID: LIB3050-001-Q1-E1-A3
gccaacgcgtccggcaaaacgaaacacccgtcaccctctcatctcagagcttccatatagaaaccctaaacctaccgaaccctttcaccgcttgttctctgctctttgtcgttcttgtgtgattcgcaatataagggtttggcatggcgagaagacacagcagcagcagcagcgagtcaagtgaggatgacgtgagaaaacgccgtggtagtgaatctgaggatggggagagggatacgtatcgacacggtggtgggagtagtaagaagagttccggtcacttcagtcacagggcgaacggtgatgacagtgattcgggagaagaaagaaatggtgctaagaaggatgggaagagtaagagtacggagagaaaggaggagcctg

SEQ ID NO: 24014 - DNA, 298 bp, Glycine max
  Clone ID: LIB3050-001-Q1-E1-A4
aacacccgtcaacctctcatctcaaaacgtccatatatatacccgatgcctaccgaaccctttcggcgcttgttctcaggtccttgtcattcgtgtgtgattcgcaatataatggtttggcattgagataacacacattagcatcatcagcgagtcatttaaagatgacttcttgaaacaccctggtagttaatcagatgatggggatagggataagtccccactttgtggtctgagtagtaataagagatcccgtcacgtcactcacatggcaaacgttgatgacccttattcggga

SEQ ID NO: 24015 - DNA, 266 bp, Glycine max
  Clone ID: LIB3050-001-Q1-E1-A5
ttgtgacaagtcactgaaccttatcagtacgaagaaggacaatcccgcaatgggaacagtggagagcttgaagttcgtggtgtggtcagagtacatcagagatcgtgccactttagtggttgcctatggaatcagcattaatcttgttgaggttacctgaaagtctaagctcaaagctcagtttccgagtcccatcgagtacgcggggtttaccggtgacttcgcacctgcacctggcattgcgacattcagagggatgcgctgtc

SEQ ID NO: 24016 - DNA, 369 bp, Glycine max
  Clone ID: LIB3050-001-Q1-E1-A6
agctcacctttcccttggcgacgccgtgagaaacgaaaagcgaacaaaaaaaaaacagagtggggtgggaggcacacgcacaaacgcagagtcagaatctccaatcttcaatcggagacaaagctagctcgaacgaacgaagtagagtagtgtgctacgaaaaatgtggcggtgcatcgcacgtggtctccgtggacctgcttccaccagatccacctccaatcactcacttggatctcaactttctagattcttctctagtggggcgaactcctcgtacaccgtggtggatcatacttatgatgctgttgtcgtaggagctggtggcgcgggattgagagctgctattggactttcagaacacgggtt

SEQ ID NO: 24017 - DNA, 332 bp, Glycine max
  Clone ID: LIB3050-001-Q1-E1-A8
acccaaacgtcaggccaaattatgattatgattatggatatcactgccaggatcatcaggatttcgattctatggcatgcacattcgcacttgtacacggtctcggacccccatcctcttgagctctattctacagtctaaagctatctagtaatgttgcctttatgattctcgagtctagaactatcagacgccgtcctcttagagtggatagtggaagatttggcagtgcccatttgggaagcactgctgcagctgtggccatcatagctggaaggtcacctattaacaacaattccacctaaggtcagagaactaaggtcaccgtctct

SEQ ID NO: 24018 - DNA, 340 bp, Glycine max
  Clone ID: LIB3050-001-Q1-E1-B1
atctctaactcttccacctccaaaggaagaaactctctctagacattctatccttggtcccaacgggctaaaagggcagtggagaccacctatcattgataaagggatcaagtatccaagcaacatagatctgtctcctgttgaattaccaagcctacaacattccttggaagatgaatctctgaaaaagaaggataacagcattgcagaacaccataaatcagagttagattcaattctaacccaaagtgaggactgccagccccatccccaacctcagcctcagcatgatcaagagcctccttctcttatatcttttgagacaactgaaacctctgct

SEQ ID NO: 24019 - DNA, 358 bp, Glycine max
  Clone ID: LIB3050-001-Q1-E1-B10
gaattagtcatagtagtttcttcctatttgaacaacgtaggatacaaccctgacaagattccttttgctcctatatctgggtttgacggagacaacatgactgacatgtccagaaaccttgactgggataagggtccaactctgccacatgcacttgaccagatctctgaacccaagaggccttcagacaagcacctcacgctataccatcaggaggtgtactatattgaaggcattggctctgtacctgtccgatgggttgagactagtctcttgaagcctcccattgaagtgacttttgcatcaaatgaactgagattccaagtaaagtcagttggaatgcaccacacacctctca

SEQ ID NO: 24020 - DNA, 312 bp, Glycine max
  Clone ID: LIB3050-001-Q1-E1-B11
ttcttcgggctcggcttcttctccttgtagttgaattaaaatatggggttgtctttcacaaacctttttagccggctctttgccaagaaagatatgcgtattcacatggtaggtcttgatgctgctggtaaaactaccatcttgtacaagctcaacctgggagaaattgtcacaaccattcccacaattggttttaatgtggaaactgtggaatataagaatattagctttactgtatggaatgtgggtggccaatataatattcgcccttaatggagatactacttctaaaacactcaggggcttatcttt

SEQ ID NO: 24021 - DNA, 403 bp, Glycine max
  Clone ID: LIB3050-001-Q1-E1-B3
gcgtcaaggttaaacaaacccaacacagaaaatcacgtaagaatggaactccaaatcaaaaagctcaaaacttttccaatttccaaaataagaaacagagaaaaaaagcaaaaagaagctggaaaattttcatcctttggcacttttttccgttttttcaacaaaaaaggttggaacctttcctttccttccattgaaattggatggctggcggcggacgtggggaccggccgccgtggaaggaggcggcgccgccacgacccaccatcactctgcccgcgcggtccggtttcatggggaaccattttcaagggagggttcacccctggtcccatgactctgctttctggctttttgggtgatggggatgatggaaagtccttctctcagctcctcgccggag

SEQ ID NO: 24022 - DNA, 397 bp, Glycine max
  Clone ID: LIB3050-001-Q1-E1-B5
cgacccaagcgtcaggccctagactacacaacacactttgcaatggcggttgttgcgcaaacccctgacatcgccggcgagcgacagtccggccaagacgttcgcacccaaaacgttgtggcatgccaagccgttgccaacatcgtcaaaagctctttaggccccgttggcctcgacaagatgctcgtcgacgacattggcgacgtcactatcaccaacgacggtgccacgattctcaagatgcttgaagtggagcatcctgctgccaaggttttggtggaactcgccgagcttcaggaccgaaaagtcggagacggcactacttcggtcgtcaatgtcgctgctgagcttctcaaaatgggaaatgaccttgtcaggaacaagattcatcctacct

SEQ ID NO: 24023 - DNA, 411 bp, Glycine max
  Clone ID: LIB3050-001-Q1-E1-B6
agaagaaaacctaagcttagaattagaaacaaagaaaagaagaaaggaaagaattgatcgttgaaaatgcagggaggaaagaaagcgggagagtccattaaggaaacagctacaaacattggtgcttctgccaaggctggcatggagaagaccaaggccactgtccaagagaaggcagaaagaatgacagcacgtgatccggtgcaaaaggagttggcaacccaaaagaaagaggcaaagatgaaccaggcggagctggacaagcaggcggcgcgtcagcataacacggcggccaaacagtccgccaccacggctgggcacatgggacatggccaccacaccaccggaaccgggactggaaccgccacgtattccaccaccggggaatatggtcagcccatgggggcccac

SEQ ID NO: 24024 - DNA, 408 bp, Glycine max
  Clone ID: LIB3050-001-Q1-E1-B9
acggacgcgtcagaaagtaatggcagtggcaacgatggaagagattctacaaagcccataagcgatattggggatgcgagtggcggatcattgggacgttcaagatgcacagttgagtctcaacgagaagctcaacgcgtgttttgaaagcatcgctgtctcagcctttcctttggatccttcaaacacaggaattgatgattaaatcagacgccaccctagcagatgctgttaagatattggcaggacataacgttttcagcgcgcctgtggtggatgttgaggcgcctgaagacgctaattggattgatagatacaacggaattgttgagtttgctggaattgatgtatggattttgcatcagtcagaacctacgtctccgaggactccgtccactccatccagtg

SEQ ID NO: 24025 - DNA, 404 bp, Glycine max
  Clone ID: LIB3050-001-Q1-E1-C10
gttcgatcatccatcatgcctaatgatatccagaggagatgatacatacacgaatatctaccattgatgtcatgaattctaatgctattggtcaaaagatccctctattctcagctgctggtctcccccataatgaaattgctgcacagatatgccgtcaggctggcttagtcaagcgactagaaaagtctgataatcttctcgacggtggaggagaagaggacaattttgccattgtgtttgcagctatgggagttaacatggagactgcacagtttttcaaacgtgactttgatgaaaatggctcgatggagagagtgacccttttccttaatctggcaaatgatcctacgattgagcgtatcatcactcctcgtattgctcttactaatgctgaatatttg

SEQ ID NO: 24026 - DNA, 409 bp, Glycine max
  unsure (1)..(409): unsure at all n locations
  Clone ID: LIB3050-001-Q1-E1-C12
gtgagtcgcactatctctctagtttccatagcacacacacacgctaatcattcgacgaggccgcaagtgagtgagagagaagaatcactcactgatccacacacaaaccagaacaaaaccaagcacagacagcgtgcgctcttcttgtgatttgtgttacaagcaaccaaccacactcacacacacccctccataataaaaatcacttccatgctctcttcttcaccccaaccaaaacaaacaggtttgcatttgcttaactggagccagattctgtagctgatttcatcccaataaatctaatgatgcttaagtaactaacactcttcgattggtttctgggttctcttgaagatttggtctttaatcgagtcgaattggatcntgtgatttacttagccgacttcac

SEQ ID NO: 24027 - DNA, 359 bp, Glycine max
  Clone ID: LIB3050-001-Q1-E1-C4
acgcgtcagcttatgtgcttcactcttgggctggagggttaactgagttcacagatggaaggaatcaagagagcacaagtgaggctgtgagtgcatattattctgctgctttgatgggattagcatatggtgatgtacctcttgttgcacttggatcaacactcacagcattggaaattgaagggactaaaatgtggtggcatgtgaaagagggaggtactttgtatgagaaagagtttacacaagagaatagggtgatgggtgttctatggtctaacaagagggacactggactttggtttgctcctgctgactggaaaaagtgtatgcttggcattcagctcttaccattggctcct

SEQ ID NO: 24028 - DNA, 397 bp, Glycine max
  Clone ID: LIB3050-001-Q1-E1-C6
agatttcattcaacaaaaccatttttttctctctcactcactcacttcacacaatgaagcacccaaggggctgaccctgtcgtccgcaacgcttgccgcgacaccgtgggtgccctcgctgcacagtatttgaagggctgactctgccgtccgcaacgcttgccgcgacatcgtgggtgccctcgccgcaatttttgaagggaaacgatagagggggtggcgggggaggtgtagggacggtggtggggctgttcgtgaagccactgattgaggcaatgggggagcagaataagggggtgcaggcgggggcggcggtgtgcatggccaagatggtggagtgtggcggtggcggtggaggaagggaagcggtgtcggtggcaacgtttcagaagctatg

SEQ ID NO: 24029 - DNA, 345 bp, Glycine max
  Clone ID: LIB3050-001-Q1-E1-D1
cccacgcgtccgctctttcattatttaataacaattattattctcaatgggcaagactcctttctcctttcgtcgctccgcctctcgccgccgccccaagaagaccgccgccccgccccctcctccctctccgccgcaacatccctacgcggccggattcgccgcctcacccgacgacaacaaccgtctcatcgccgccgccgccggcagcagcgccttgacgaaggcgaagaagaagaccggcaacgtccgcttgtggatgaggtttgaccggtccggccggtcagaactggtggagttggagaagaacgccatcgtccgccacgcagcgattcccgctagaga

SEQ ID NO: 24030 - DNA, 408 bp, Glycine max
  Clone ID: LIB3050-001-Q1-E1-D10
agcccacgcgtccgcccacacgtccgcccacgcgtccgcgcacacgtccgaccacgcgtctgcacataaacaccacaaatacttccttacaagcagaaccatcatgtaatatggcacattatcaaaagcactaagatgatcatggtcacaacgttgactagtatggcaacgttgagaaacaaaccgacgaatacggaaaatcagttcatgctgctactagttcctatgtacccaccagaacggctgctggtggttacagtgaagacattaataggcaacatgagagcaccaatgcctactgagtagacactgggagacaacattctagtggtggctacgatggaggcactaataaacatcaagggactactggtggctatgctgctgacaccaatagacatcatggaa

SEQ ID NO: 24031 - DNA, 331 bp, Glycine max
  Clone ID: LIB3050-001-Q1-E1-D11
acatcagtaatacaggtacttccttagaagcatggccaacatcaacgatggcacgttatcacaagcacgaagataatgatggtcgcaacgttgaccagtccggcaacatttagacacgatccgacgaatacggcaacccatgtacatgctgctggtgtaacctatgtgaccaccatgactgctgctggtggttacaatgattagcttcctaggcaacaggagactaccaatgcctacggctatagacactgggagacagcattcaaggcgtggctacaatggagacacgaatccgcatcatcaggtgactgatggctatgctgatgaccac

SEQ ID NO: 24032 - DNA, 408 bp, Glycine max
  Clone ID: LIB3050-001-Q1-E1-D12
aaattttcctttttcttctatctttctgttccatcgatcacctccaaatccaattatatatttatatttttcactccgcaacccaacactacctgaaccaacttcttcatcaatttattctccctaaagcttcgccaacggccaccccaactctctgctttccagcttcttcctttcttttgctatttcgaggcacagatgactggaatttcaaaggaagaagggtcagctagtccaagttggggtgcttcattttttatgcagacaagagaggaagtggctagagctgttgcagctgctgttaaccctccaatgtcgtcaaaagatgataatagtggtagccaacttcaaaggctgcagtatcaagttgcaaaaatgttaaaaggcttttctcaacctcctgatgtt

SEQ ID NO: 24033 - DNA, 388 bp, Glycine max
  Clone ID: LIB3050-001-Q1-E1-D3
ttcattcaccaattattttctgtcctcttttcctctcagaagagcctctgagtctgctcacgtgttccctgtcaagagatccctttgtttttgacgtgtgaacggaaacagaaataagatgaatcagtgtggttatcagcagaagaatgccttgacaagctgtgaagagatgatgatgggatctgtggtgtgccctaaacctcgaagattgggcctgttgaaccactcaacctttgataaccacatcagacccttgagggcaccctttatcaactaccaatcagaaattgaagactcacgagttggcgctgagcttatggacattattctccccaatagatctggggggcaagtggcttcatcaccgccatttttctgtggatctcca

SEQ ID NO: 24034 - DNA, 375 bp, Glycine max
  Clone ID: LIB3050-001-Q1-E1-D4
gcgtcagtggcatatcagcgccaactggccttgagtcacgctgctgtatctggtctttcaggtcaaactcttctgcaaatgactggacaacatggcctagctccagcttctatgggcgtaaactctggggcatctcaagccatgtatgatggatataccggtaattcatcgagacagcagcttatgtactatcgttgacacactggccagcgcagattcacagttgcattgttatcttctgggggctttgatgttcatcacatttctcattgcttccccacagcatgttcttttcatactgatgcttttttattgatgcagcatcttggaatgttatgaagctacttttacaatagaggtctagaataaaaatac

SEQ ID NO: 24035 - DNA, 410 bp, Glycine max
  Clone ID: LIB3050-001-Q1-E1-D5
agacatccccttattgttaaaccctttgtttgcacaagaaaagagttacttcatcatcatcatcaacatgagtcgcttcaacaatcagcaagaatcccctgtatcatatcctccagcactgtatgttagtgccccaccacctatgggttatccttccaaaggtgatcctacagctgtagggtacccccaacaaagagttccagaagaaaccacaagcaggggtgatggattttggaagggatgttgtgctgctttatgctgctgctgggtcctggattgttgcttctgattgaatcatagcacagatttgtgtttgtcaccatgttttctttttcacattgccagtttcctatttgtattctttgtagtttagaagaataaggatctttgtcctcttggacagcttgtat

SEQ ID NO: 24036 - DNA, 380 bp, Glycine max
  Clone ID: LIB3050-001-Q1-E1-D6
agcccacgcgtccgctgaaaatgagttccaaggttttgcttgttctacttatgttcttggccactatacttctgatctcctctgaggttgcacccgatgatgcatacgagaattttgacaaaatagatgggaagcctagtgcagatggggtagatgaaagcaagtattggcgtggcggctatggtggcggctatggtggtggttatggaggtgggcgtggatgctatggaggtgggcgtggatgctatggagggggacgtggtggatatggcggcggacgacgtggctatggtggcgggcgtggtggctattgcggcgggcgtggtggcgggcgtggtggctatggtcctaatgaacataacgatgctggggttgatgct

SEQ ID NO: 24037 - DNA, 336 bp, Glycine max
  Clone ID: LIB3050-001-Q1-E1-D7
agtgaaaatgtgccttcaaggattaacagatgtttggaggaaggagccgaagaatttttcttgaagcctgtgaggttgtcagatttgaacaagcttaaaccccacatgaagaaaaccaagttcaaagatcaaaagcaagaaacagtagaaaggtttgaagactcagaagttcaacagcaacagtcacaacaacaaatcatcatccaaaatgagcatcaccaagcaccaaaattacaagttcttcagccagagtcagaatcagagtcacatccacaaccaactattgaacaacagcaacaaattctacaacaagccaacaacaataacaagaggaag

SEQ ID NO: 24038 - DNA, 415 bp, Glycine max
  Clone ID: LIB3050-001-Q1-E1-D8
agctcaagagagggtctgcctgtctttgcaattggtgttgggcttagcacatttgacaaagcatctgttcattagtatgtgcagtcacacattcaaattaatgaatatcgtgagcgtataatcttgccttctgcatcaaagaagcaggggcgacctattaccacttgtataaaggttttagacatgactggtctgaagttatcagccctgaatcagattaagttgctaactattatatcatccattgatgatctgaactaccctgagaagacaaatacttattacattgtaaatgctccatacatattttctgcttgttggaaggttgtgaagccacttttacaagagaggacaagaagaaaaatacaggtgttaccaggttgtggacgagatgagctattgactatcatggatt

SEQ ID NO: 24039 - DNA, 411 bp, Glycine max
  Clone ID: LIB3050-001-Q1-E1-D9
agcccacgcgtccggaaacattggatgacgccagaaaaggttaaaacgtcaatcagaacttttccttcttcagctgaaatagtacctgaaccgctgggtgtcgtgttagtcatctctgcatggaactatccaatcttgttgtcccttgatccagtagttggagctatagcagctggtaatgctgtggttctaaagccatcagaaattgctccggccacttcatcagtactagcaaagttgatagagaagtatatggataactcatttgtaagagttgttgagggggcagttgatgaaacaactgcactattgcagcaaaagtggaacaagattttctacacaggtaatggaagagtgggaaaaatagtgatgactgcggctgcaaaacaccttacaccagttgtactggag

SEQ ID NO: 24040 - DNA, 412 bp, Glycine max
  Clone ID: LIB3050-001-Q1-E1-E10
aggggtaaggtcgcgttgtgttgcgtcgtgtcgtgcgctgttcctctgtttctcgtttttgtgttcagaccgaaccctagctccgcatcgcaaccatgtcgaccaagcaaggtggaaaagctaagcctttgaagaaacccaagtctgataagaaggattacgacgagattgatgtggctaacattcagaagaaaaaggaagaggagaaggcgctaaaggagttgaaagccaaggcgcaacagaagggaagctttggaggttctgggctcaagaaaagtggaaagaaataatggctctttatcatgattgtatgcattcaatattgagccctgtaattacagttgctaccatgataacttctcttattattgtggcctactttattgctaatgtgtactgaactgaagtatgt

SEQ ID NO: 24041 - DNA, 413 bp, Glycine max
  Clone ID: LIB3050-001-Q1-E1-E11
aagcgacgcatccgctgcacatcatctctggtctctggcatccttggtagcggaagaactcaatcctgtccaattccctttagcttttctattcttcaatctcatcgaattcctttctaccactctcataaattgctgcattttcttaactagatgcctctccgttgagggtttctctaggtatggtttgaattacaatgtctgaagctgaagaaatatcaaagcttgaaagcttgtgctcctcagtatgataaatgttggcaagtagagcgaaattctcactaataatagatctcaacaaatcataattcaactactatgatttctctcaaagcttataccataaacgtgattatggtagcaatatgtcaattgacagtgttggaagcttacacacaagttaccgcagatga

SEQ ID NO: 24042 - DNA, 311 bp, Glycine max
  Clone ID: LIB3050-001-Q1-E1-E12
gtgagtcgtataaacatcatctctggtcacaggcatccgtggtagcggaagaactcaatcctgtcgaattcccttgggcttttctatcttcgatctcatgaattcgtttgtaccactctcataacatggcggtgttcttaactagatgcctctccgttgagggtttctctagctatggtttgtattagagtgtctgaagcggaagaaatataaaagcttgagagcttttgcccctctgtgtgaaaaatgtgtggaagtggagagagaggtccacgaataatggatctcaagagatcataatttcaactact

SEQ ID NO: 24043 - DNA, 387 bp, Glycine max
  Clone ID: LIB3050-001-Q1-E1-E3
acgcgtcagcaacaatgctcctccgtttccttttcacgtgtcaagggtagacaaatctccagcagcatatagtcatagtcacaggcaacaacaaccaggtggctggcagatgaatcagaacattcctcttgttcctcccaacttttcttgtttttccaattccaattccaattccaattccaatgtcctccaaaacgccttcaataagaatgttgttcagccttcagcctcatatcctcaatgcttggctattgagtttgatcaacagagggagattgatcaccatatcagatcacataacgaaaaattgaggattttgttgcaagagcaaatgaaacagcatgtggcaaagttattgaagaaggtggaatctaatgctcctcaatt

SEQ ID NO: 24044 - DNA, 382 bp, Glycine max
  Clone ID: LIB3050-001-Q1-E1-E5
aggccctttttttttttttttcccttcatctttcccatcatcttctttccccttgactttctctgcatcaattttgtcatactttttcttcttttccttcttctcttcatcatccttcccatcatcttctttcttcttgatcttctctgcatcagttttgccatccttgtctttcttctcctttttcttcttttccttcttctcttcatcatctcggcacaagtcccagcaccaccatctccttctacaattccatccccaatgtctcctttggcaccttctacaccaccaccgtcccgttctcttcctgctcctccaacgtctcttacgccaccacttccatctacagatttcgctcccattcttccaccaccctattgga

SEQ ID NO: 24045 - DNA, 369 bp, Glycine max
  Clone ID: LIB3050-001-Q1-E1-E6
agaaagaagcaagcatgtgtggcggagcaatcatcgcagatttcatacctcggcagcgtccccgcaccctcacagcctccgaactctggcccaagcgcagcgaacctcaacctcaacctcctcctcctccagttaagaggcagaggaaaaacctctacagagggatcaggcagcggccctggggcaaatgggccgcggagattcgcgatccacgtaaaggagttcgtgtctggcttggcaccttcaacaccgccgaagaagccgccagagcctacgacaaagaagcccgaaaaatccgcggcaagaaagccaaagtcaatttccccaacgaggacgaccctctgccgcaataaggattttgcaagagcc

SEQ ID NO: 24046 - DNA, 371 bp, Glycine max
  Clone ID: LIB3050-001-Q1-E1-E7
agctctctctctctctcacccttcccagtgatcaattcaacgatgttagagcagttgctgatattcacgcgcggagggctcatcctctggacctgcaaccacctcagcaacgccctgaggggatctccgatcgacacgttgatccgatcctgcctcctggaggagcgatccggtgcggcctccttcaactacgacgcacctggagccgcatactctctcaaatggaccttccacaacgacctaggcctcgtctttgtcgccgtctatcaacgcgtcctccacctcttgtacgtcgacgatttgctcgccgccgtcaagcgcgagttctcgcgcctctaccaaccccaaaaaaccgcctaccgagattttga

SEQ ID NO: 24047 - DNA, 371 bp, Glycine max
  Clone ID: LIB3050-001-Q1-E1-E8
agccaaaccacggacccaaaacattgaggtataacaactgaagaaccaacaagaggggtattgagattgagattcaagtaatggggaagagcaaggttcttgtggtggggggaactgggtacatacggaggaggatagtgagggcaatcctggcactgggccatgagacctatgtggttcagaggccagagttgagcctccagatagagaagctgcagaggctcctctccttcaagaagcaaagtgctcatctcattgaggcctctttcaatgatcacaagagccttgttgatgctgtgaagcacgttgatgttgtcatcagtgccatctctggtgttcacatcacgagccacagcatcactctgcaactc

SEQ ID NO: 24048 - DNA, 416 bp, Glycine max
  Clone ID: LIB3050-001-Q1-E1-F11
agctcaagtaccaatatttgtttttattataaaagcatgtaccttttgttcttcctaccaatacaaggttctccacaacaaacacgctgatgaatcaatactgggacttcttcaatggcagatgaagctatctctccacattgaatttgaaaaagccagttagtgctacagccagattgtgcaaaaccttggtgtaaaatctgtgttcaatcctctgttttgttgctgacattgaagactcttaaacaattaatcaagaattgttctagtgttttggttctggcaccagttgatctactattgggaattggtaacaaggatcactttctactacaacattcaactagatttcttgtactttcattttcatcaaaaattacattcttctatggatggtcttagttgggatgcctcac

SEQ ID NO: 24049 - DNA, 399 bp, Glycine max
  Clone ID: LIB3050-001-Q1-E1-F12
cccacgcgtcagggaaaagcagaggagaattgccttctagaagcgttatctcgcagagatgggcactgtttctctgcttaggaagtttctgtgctggaatgctcttcactacaaggatatggactatacctgaaaacaacaaaggactagcacggccaacagcctcagaagctgaaaaattgagtttagtttcagaaggctgcaattccagaattttgcaagagatggaaatgaagcacgataaagacacttatggtgaagttttcaagagtcataattccatacaaacattggacaaggctatttcaaacttagagatggaattggctgctgcaagggcaactcaggagtctctacgaagtggtgctcctatttcagatgatataaggttgagtgaat

SEQ ID NO: 24050 - DNA, 408 bp, Glycine max
  Clone ID: LIB3050-001-Q1-E1-F2
acgcgtcagctcaggaggtggagttttcaagtggcggtgtaaatttgggttgatttgcgagttcttttcatgcccagcttgtcttggagggaatttaagtaaacaacgattgggattcaagcttggtggttaacattatgttctaatggttgtgatggcccacgacgtgaagcataactgggttctgatttcgaaaaatgttatcaatgattgcagtcatcaaaattggactgggtttgtagtattagattcacggtgctccgaataatttagagttttctaattttttaggattcctatatttgcacgttacaattttcctatattttttatcgggtttgatataaaggataatgatgtacaagaatttcccttgtatttatgaaacattagctattaatttctttt

SEQ ID NO: 24051 - DNA, 398 bp, Glycine max
  Clone ID: LIB3050-001-Q1-E1-F4
acgcgtcagcccaagcgtccgcccacgcgtccgcggacgcgtgggccaacatctatctcacttcttagttctttgtggctctttccatgatgggctctcctacatctccaagagttctcttcttgagtctctttgtaactctttccatgattttacatttgagttcagccaggaagttgtctgagtcagacccccaattgcagttccaataccacagaggccctctcctcacaggcaaaatctccgtaaacctaatttggtacggtaagttcaaaccttctcagaaagccattgttgctgatttcatcacctctctctcctcttccaaacccctcaccgcgcaaacatccgttgccacgtggtggaaagccaccgacaaatactacaaaaactcgttc

SEQ ID NO: 24052 - DNA, 419 bp, Glycine max
  Clone ID: LIB3050-001-Q1-E1-F6
agtcttcttcatctacattagtagttcttgttattcattattcttcatactcacacagcttcttctgggggcaaaaggggtcatttttcagatccgaggttgagctcctctacccatcatgatggagctcggatacctgaatcagggtcagccttctagaggaacaacaccacttgtcactcttccattgttgctttcaacacttgtgttcttctccactttcacacatgccttctcttcttctgtgtttccggaattgaatcctattaaacctaggcactcacgtcttctcaggagtgctgtgcaacgagaaactcctacatctcagttgtctgaactatggtcacctctggaaagccaaggatggaaaccttatgttgaatcaaataagccaacattaccagagaagtcagagggat

SEQ ID NO: 24053 - DNA, 411 bp, Glycine max
  Clone ID: LIB3050-001-Q1-E1-F8
agcccacgcgtccgcccacgcgtccgcacacacacagctagcagatattacatacacgtgaatcactaattaagccatggagaagaaatcaatagctgggttgtgcttcctcttccttgttctctttgttgctcaagaagttgtggtgcaaactgaggcaaagacttgcgagaacctggctgatacatacaggggtccatgcttcaccactggcagctgcgatgatcactgcaagaacaaagagcacttgctcagaggcagatgcagggacgattttcgctgttggtgcaccaaaaactgttaaatggatccattcactccaacgtgaagaagatgcatgcagcgctattttataaaaaataaaactactatatactatatataataagactggcgctgcatcaatgacct

SEQ ID NO: 24054 - DNA, 411 bp, Glycine max
  Clone ID: LIB3050-001-Q1-E1-F9
aggtttaatttactctcctcgccaaggcagaaaggtgggctagtccagtcgtctcaattctcttcaggtaattctgctggacaatcactgcaaggaatgcaagcaatgggtatgatggggtcgccaaatctcacctcgcaactacgagcaaatggagccatggcttatgcacagcagctgcgtatgagtcagggtcaaatcaggcagcaactatcccagcaaggttcacttaacactgcacaggttcaaggtttaccaaggtcatcatcccttgcttttatgagttctcagttgtctgggttgtctcagaatggacaacctgcaatgattaactctttaacacagcaacagtggcttaagcaaatgccagcaatgtctggccctgccgcaccattgcgtcttcaacaccag

SEQ ID NO: 24055 - DNA, 382 bp, Glycine max
  unsure (1)..(382): unsure at all n locations
  Clone ID: LIB3050-001-Q1-E1-G1
acccacgcgtcagcccatctgatcatataacacaacacactgcaggcttgttgtgttgtgctgtgttcattctgaaactttgatctatgtgagacaagttgtggctaccctgcaaagccagaaaaaatggtgccagagaacttgaagaaacaacttgctttggctgtgagaagcatccattggagctatgcaatcttctggactgattcaactacccaacccggggtgttgagctggggggaagggtattacaatggagacattaagactaggaaaacaagtcaaggagtagaactcaattctgaccaaatagggttgcagangagtgaacagctgagagaactattcanatccctcaaaactgtagaagtcacccctcaaa

SEQ ID NO: 24056 - DNA, 398 bp, Glycine max
  Clone ID: LIB3050-001-Q1-E1-G11
tcaaatgagggacgcttttaaaagttatgtccgtactcgggattattgcactacatcaaagcacattgttcatatgtgtatgagtgcaattctggtcagcattgaaatgggtcaatttcctcatgttacaagctatgttagcaaggcagaacagtcaccagatgcccttgaagcagtaacagttgcaaagctacgatgtgctgcaggattggctaatctagaagccaaaaagtacaagcttgctgcccgaaagtttctagaaacaggacctgaactgggaagtcactataatgacgtaattgcacctcaagatgttgcaacatatggaggactttgtgcacttgcaacatttgatcgggcagagttaaaggcaagctctccattatattgttgtgatg

SEQ ID NO: 24057 - DNA, 241 bp, Glycine max
  Clone ID: LIB3050-001-Q1-E1-G12
gcaatgtttgcaacaagcaccatgatcaggacccttgaattttcctccccttgtctatgatcgaggaagaaaatctgtaatatattatgcaaaaaataattaaggtcttttcctttaaatgggctggttcaatgaaccgagaccactgcaggttcatggggatgggaggattaagaggctatgttttttaatcttccgatgttactgttgtttttttttaatttcaataaggatattatat

SEQ ID NO: 24058 - DNA, 411 bp, Glycine max
  Clone ID: LIB3050-001-Q1-E1-G2
ggtgtcctcgaagagcacaacgaggtaggcctctgcgacttcttggagagtggagacggcgctgctgtggaagtagagattggtcttgaagtccagagcgatttcccttacaagtctttggaaaggaagcttccttatgagaagctcggtgttcttctggtactttcggatctcccttagcgccaccgtacttggcctgaaacggtgcggcttcttcacaccgccggtcgccggagcggacttgtgtgctgctttcgtggcaagttgctttctcgaagcttttcctctggtggacttccttgcggtttgcgtcgtacgagccatttcgaacacagagattgcttgactttggaagaagactaatgagtacagcacggtgtaagctgggattcaagaacagaacatcatgag

SEQ ID NO: 24059 - DNA, 330 bp, Glycine max
  Clone ID: LIB3050-001-Q1-E1-G4
ccgtcatgaagacttgcaggaggagatttccggcgtgacgtcagattacggcgagtctcaggcgcagatcggatacctcctggaggcctccgacgacgatcttgggcttcctcccgccggaaactcgtcggcgccacaggagaagaacgtggaggccgagttggttcgagtcgcgtctgactcgtccggaatcggcgagttgtgggagtttgaggaccagattccgagatacgactcgttcgatttgggaatggggttcggttatgagtgcgatgctaccgaatacgctgcgtttggtgaacttttcgatcattctgatgtgtattatga

SEQ ID NO: 24060 - DNA, 396 bp, Glycine max
  Clone ID: LIB3050-001-Q1-E1-G6
agcaattttgggacgattgggaaggagaagacgaagaaggagagcagcgagactctgaattcgtgtgtctcttctgtgaatcccggtacagctcgtgcggttccttgttcgaccactgcgcctcccttcaccgctttgatttccacgcgattagaacaactcttagcttggatttctatgcctccttcaagctcattaacttcatccgctctctggtggcagagaacagatgttggagttgtggattaacatgccagtccaaccgtgatcttcagaatcatttgcatgatttagttgactttaatgagataaagactttgtggaatgatgataggtatctgatacctttcatggaagatgattcactgttgtacagttttggtgattgtgacgaag

SEQ ID NO: 24061 - DNA, 168 bp, Glycine max
  Clone ID: LIB3050-001-Q1-E1-G7
agaaaaaaaaaaaaaaaaaaaaaaaaaaaaaaaaaaaaaaaaaaaaaaaaaagggtctaaagtcaagtggctcaactcttaagcacgcgggcagtcgacctaaaggatcgaccataacgtgcgcatcccttcaatgcatatgattctcctataatgacatcaaaactg

SEQ ID NO: 24062 - DNA, 375 bp, Glycine max
  Clone ID: LIB3050-001-Q1-E1-G8
agctctctcccaaattgctttctctcatttctctctcccgaattgttatctcccccttctttgttccttctttccatttttttcattcttcccgtttttctgtattttcttacatctaaagctgtgattttttacatcaaaattgtgatttttatctcagattccatgacaacgatatcatatttgcgttcctctctaagtttgtatttttatttgaccgtgactaactattgttcttcctttgcaacacaaaagcttcaatttttttgtgttttctgtttttttgtgttataatgacttttcgcaggacaagaggttaaattttttggtgtttctgagccttctccgacgttaccaaaggctggagcttttttg

SEQ ID NO: 24063 - DNA, 414 bp, Glycine max
  Clone ID: LIB3050-001-Q1-E1-H1
cagaggtgaagcttcatggattttggtatagtccctacactttgagggtggtatggaccttaaagttaaaggatataccatatcaaaacatagaagaagaccgctacaataagagtcttcaacttcttgaatacaacccagtatacaagaaaactccagtgcttgtccataatggaaaacccttatgtgagtccatgcttattgttgaatacattgatgagatttggtcacataattcattacttcctgctgatccctacgagagagctctggcaaggttttgggttaaatatgctgatgatgacatgttttctgcagttattgcattcttccttagcaataatgatgaagagcgagaaaagagcatagagaagatatgggagcatctcagggttgttgagaatcagtgttttg

SEQ ID NO: 24064 - DNA, 406 bp, Glycine max
  unsure (1)..(406): unsure at all n locations
  Clone ID: LIB3050-001-Q1-E1-H10
aggctgatgacccttggttgcctccatgagaagcatcttgaggagcttcttgaatattttcgctttgggctgtggtgggttccccttggggttgcttcttcaattggtcttggatctggtttgcacacatttgtcctatatttgggaccccacatagcactgtttacattaaaagccgtgcaatgtggccgagttgatttgaaaagtgctccatatgatacgacacaattaagtagaagtgcttcttggcttgataaaaactgttctgagtttgggccaccattattccagtcagtatatgattcacaggttccgcttagcagcattttgcctcaagttcagctggaggctattctatggggtattnggacagctatangggagcttcctccttactttatctcca

SEQ ID NO: 24065 - DNA, 415 bp, Glycine max
  Clone ID: LIB3050-001-Q1-E1-H3
aggggcaaagcaaaggcaaatctttctcacaacctacaagttatcttctttgaatagtaacacttttggggagccgacacaaaagcctaagctgaagctgaagaaggttgctgttaaggttaagaagattgtggcctcggttttgatgttcatgcgagttggttcttttaggtcatgcagttctaggtctcagatttctgccacctcaccaaataggaagaactcttgaggatgttgttctgacgtgggtttaggatggtttataattctctctataatctttggttctttcacactcaggagttttagtgtgtgtttgtgaaagcgaacgcaggcgtttttgtattggaacgccgaatttttccgctttcaaacacatccttattagtatatttatatggttgatgatgaagga

SEQ ID NO: 24066 - DNA, 385 bp, Glycine max
  Clone ID: LIB3050-001-Q1-E1-H4
acggtccacctcattgtatacttgcaagtaacacttccacaattgacttgaatctgattggagagaagacaaagtctcaagatcgaattgttggagcccatttcttcagtcctgcacatgttatgccgcttctggaaattgtacgtaccaagcagacctctccccaagtgatagttgacgtgttagatatttcaaagaagataaagaaaactccagtggtggttggaaactgcacaggatttgctgttaataggatgttcttcccatacacgcaagcaggtctcttgcttgttgaacgtggtgcagatgtttatcaaattgatagaataataaccaaatttggaatgcccatggggcctttcagattggctgaccttgttgggtt

SEQ ID NO: 24067 - DNA, 413 bp, Glycine max
  Clone ID: LIB3050-001-Q1-E1-H5
aggcttcttgttgttggaaagaaaccctagcaagcggaacaatggcagacgttgaggtcgatgtggcggctgcagcagcagcagggcagccgaagaagagaacgttcaagaagttcagtttcaggggcgtggatctcgatgcgcttctggacatgtccaccgatgaactcgtgaagatgttcagtgctcgcgcacgtagaaggttccagagaggcctcaccagaaagcccatggccttgatcaagaagcttcgcaaagcgaaaagagaagctccaccaggtgagaagccagaacctgtccgcacccacctccgcaacatgattattgtgcctgagatgattggtagcattattggagtgtacaatggcaagacctttaatcaggttgaaatcaaacctgagatgattgggcat

SEQ ID NO: 24068 - DNA, 390 bp, Glycine max
  Clone ID: LIB3050-001-Q1-E1-H6
atctgagggagaggagagcattttcatttttcaacttgagagaagaagagaaggggaaaaggaaaaaaaggcaaaatgggtaaggatctgagcgatgagcaagtgtcttcaatgaaggaagctttctctttattcgacacagacggtgacggtcggatcgcgccgtcggagctggggatcctgatgaggtctctgggagggaacccgactcaggcccaactcaaagccatcgtggccgaagagaacctcacggctcccttcgacttcccccgattcctcgatcttatggccaaacacatgaaacccgaacccttcgatcgccaactccgcgacgccttcaaggtcctcgacaaggactccaccggcttcgtcgccgtctccgagctccgc

SEQ ID NO: 24069 - DNA, 360 bp, Glycine max
  Clone ID: LIB3050-001-Q1-E1-H7
agtgaccatttcccttgcttttggttagggtttccagagttttccaacttatcaatccacacaacttcattcattcagagaaagaacaaaaatgatcgagctgttcctgtcggaaccgaattggaacgacgtcgtaaacgacgacgattcaactcgttcgagaatctccattctcaacgacttggaaaccgttatttggtctacggtgggtcgctccgaggcgcggttgtggctctgcaacactgtcgcgggattgaactgcgtaacttccctcgatcagcgtgacctgtttcggaatttgctcagaaccagtggggtgaagcgggatttggcctctcagctcctgcatttgatgttcga

SEQ ID NO: 24070 - DNA, 393 bp, Glycine max
  Clone ID: LIB3050-001-Q1-E1-H8
agggcgaataatacgttaggtgggagtattcctaaggagttaggggacctgcctgtgcttaattatcttgatctttcagggaatcagttctctggtgagattccaattgagctgcagaagttgaagcctgatttgttgaatttgtcgaacaatcagctttctggggtgattcctcctctttatgctaatgagaattatagaaagagttttcttgggaatcctggtttatgcaaggctctctctggattgtgtccaagcttgggtggtgagagtgagggtaagagcagaaagtatgcgtggattttccggttcatatttgtgcttgctgggattgtgttaattgttggggtggcttggttttacttcaaattcccggacttcaagaagatgaaa

SEQ ID NO: 24071 - DNA, 412 bp, Glycine max
  unsure (1)..(412): unsure at all n locations
  Clone ID: LIB3050-001-Q1-E1-H9
agcggagctgtctgtgcaaatttgcgttgttcttcgcggcacacctcactcactgaacggtaagtatggcggacaaggctgttacaatccgaacccgaaagttcatgaccaacaggcttctttccaggaagcagtttgtcgttgatgtccttcatccagggagggcaaatgtttccaaggctgaacttaaggagaagctggctaggatgtatgaagtgaaagaccctaatactgtatttgtcttcaaattccgaacacattttggaggtggcaaatccactggatttggtttgatttatgatacagtggagaatgccaagaagtatgagcccaaatacaggcttatcaagaacggccttgacaccaacgtagaaaagtcaaggaagcanatgaaggagagaaagaatagagc

SEQ ID NO: 24072 - DNA, 316 bp, Glycine max
  Clone ID: LIB3050-002-Q1-E1-A1
gaccttagtggggatggacatagtcttgtgacttacacccaacttgccaactggggtcaatgctcctcatggcagaacttcactgcttctccattcactgctggtgctaaaactatcacgtttgataacccctgtgattacttttcaactggtaaagtgaaagctatgacactgtcactttctgtgttggtagccattgaaatgttcaactctctcaatgccctatctgaagatggaagccttttgacaatgcccccttgggtcaacccttggcttcttttggcaatgtcagtatcatttggtctgcactttttga

SEQ ID NO: 24073 - DNA, 323 bp, Glycine max
  Clone ID: LIB3050-002-Q1-E1-A10
ggttgttgagcgtgcatcagtgtatggttccaggaatatgcttgatcagcaccgagacatgaggatggatgtagataacatgagttatgaggaactacttgcacttggtgagaggattggctatgtgaacacaggagtctctgaggatttgctttccaaatgtttgacggaaacaatatattgttcatctgagcaaagtgaagacgaaggaaactgcgtaatatgtctggaagagtacaagaatatggacgatgttggaacacttcaaacttgtggacatgactaccatgtgagctgcattaaaaagtggctatccatgaaga

SEQ ID NO: 24074 - DNA, 327 bp, Glycine max
  unsure (1)..(327): unsure at all n locations
  Clone ID: LIB3050-002-Q1-E1-A12
cgctcaccgcgacataaagcccgcgaacatcctagtaaactccgaaggggatgttaagattgcagacttcggagtcagcaaactcatgtgccgctcgctcgaagcgtgtaactcttatgtcggcacgtgcgcgtacatgagtcccgactggttcgacccggaagcgtatggcgggaactataacggttttgctgcggatatttggagtttgggtttgaccctatttgaactctatgtgggtcacttcccatttcttcaagcgggtcagagacncgactgggctacccttatgtgtgcaatttgcttcggcgaaccgccgaaccttcc

SEQ ID NO: 24075 - DNA, 399 bp, Glycine max
  Clone ID: LIB3050-002-Q1-E1-A2
ggggagtgaactgaaaaagcataaagtatggcttcgacggcagcgtaccttgctcggtgcgcggcgcagaaggagagggttcggatcctctaccgccgcgccctcaaagacactctcaactgggccgtacatcgccacctcttctacgacgacgcttcaaacctccgcgaaaggttcgaggagaacagacacgtggaagaccctgataccattgacaggctcataacggatgctgaagcttcctacaacaagtggcgccatcccgatccctatattgttccttgggctccctgttggtccaagtttaaccccaaaccaaactccacctcaaaggaattgagaatagttaaaaataagggccgtaaagataatgactgaaaatctaatttaatttttttg

SEQ ID NO: 24076 - DNA, 385 bp, Glycine max
  unsure (1)..(385): unsure at all n locations
  Clone ID: LIB3050-002-Q1-E1-A3
gaggaaaagaaagaaatagaacaagaagaaaaaaacacagcgtcctagatttcctcttctctgcttcggaagaaagagaaaacaaacaaaacaatggcgtttgcttctttcctcggcagagtcctcttcgcttctgtcttcatactctctgcttaccaacaatttaatgaatatggagttgatgggggacctgctacaaaagcactcagacctaagtttgatgcctttacacatcgggtgcattctcaagtgggctttcaaattccagagattaatctgaaatttttaattgctggggctattgctctgaagggtcttggangggttcttttcatatttggcagctcttttggagctttgcttctgctcctgcaacagctgattg

SEQ ID NO: 24077 - DNA, 303 bp, Glycine max
  Clone ID: LIB3050-002-Q1-E1-A4
ggggaagttaatactcaaaaatctgaagttagctcggaattgctcaaggagtctacccttgctgagaaggatagtgatgaccacaaagttcccgagaatggatctgctacaaaaactggagatgccccaaagggtgctaaaccagttgttcccgagagtaagattgtagccaatggggttgtttctaatggtgtctaagctctactgtgtttgaaggaagcggtccaatacacctcagtggcatatattggtgttcttagaagtatatttatcagcaatttggtaccgcccgggatttgatct

SEQ ID NO: 24078 - DNA, 404 bp, Glycine max
  unsure (1)..(404): unsure at all n locations
  Clone ID: LIB3050-002-Q1-E1-A5
caaaaaacgacagaagggcaatctgcaatggtttatttgttggcanctgcgaacgagacatggggtgacaaggtttaccgtgagaatcactactacttgcatggttattgggggattttggcggatcgttctgacgagatgactgacacttatcacccggggcttggggatcatacgtggcctctggtgacccattttgtagggtgcaaaccttgtgggaagtttggggattaccctgtggacaagtgcttgatgcatatggatacggcctataactttggtgataaccacattttgcagatgtatgggttcactcataagtcccttgctagccgcaacgtgaacagggtgaggaatgatactatcaaccctcttgaggttaaggatgaccttggattgcttca

SEQ ID NO: 24079 - DNA, 412 bp, Glycine max
  Clone ID: LIB3050-002-Q1-E1-A6
ggaatggagatggaaccaacaatatctgagactccaaatgaaaattctcgaacttttgaatcgatgatcgtagagatggagaaaactcgagaataagttggagttgtatgcacatggtgggctgtcttcataaaataatatccatcaaatatttttcatatgggctgtctcatactgagctaatggagctttagattccgaaactaacaacatatagggaaggaagtaataatgttcatcagatatttttcagctgagctgtcttcacatatttacttcaacactataattataccatattataaattcgcaattatttcccctccaatcttctttaagcatttgtaaattccccatcaaaaatccttattttggcatcttgatacatggtgtcggagaccaggagtcgtat

SEQ ID NO: 24080 - DNA, 418 bp, Glycine max
  Clone ID: LIB3050-002-Q1-E1-A8
gagtgatggaagaggaagaatacaactatagagaagtgaggcttccttctctgatagcagtggtgggcgagccagagctggggagggaaacaggggaaaggagaagaggaagggacataataatagccatagatcatggccccaataccaaacatgctttcgattgggctctggttcacctttgcaggctcgctgataccatccatctcgttcacgccgtttccgacttgcataaccaagttgtctacgacataacccagggtcttatggagaaattagccattgaggcttttcaagtactaatggtgaaaacagtagctcgaattgtggaaggtgatccaggaaaagtaatttgcaaggaagcagagaggatcaaacctgcagctgtggttatggggacccgaggcagaagcttgat

SEQ ID NO: 24081 - DNA, 328 bp, Glycine max
  Clone ID: LIB3050-002-Q1-E1-A9
gacagacaaacaaacaatttaccagctatacttgttccttttgaaggttagaagtgctacaatacaaacaatggcagctactcaggaagatgtgaagcttttgggtattgtgggaagcccatttgtgtgcatggtccagattgcccttaagttgaagggagttgaatacaaatttttggaagaaaatttgggcaacaagagtgatttgcttctcaaatacaaccctgttcacaagaaggttccagtgtttgttcacaatgagcagcccatagcagagtctcttgtgattgttgaatacattgatgagacatggaagaacaaccccatc

SEQ ID NO: 24082 - DNA, 389 bp, Glycine max
  Clone ID: LIB3050-002-Q1-E1-B1
gactttcacaacttggttcttatttaatttcaactattataacaagccttaatctaatatctctcacagcccttctttgagagacctcaagagagaaaataaggtatgtgttctttctcttcagaacagttaccttatctttttcttggttttgcccttcaccctccatggccatccaagagacagcgccagcaccttcggttgaacatccataaaagaaggagagcacaattgcaagaagcaagacggaggaagaggatgatcatcttgaagcttacagaaataaagatgagaaacttgaagttgtacatggagaaccaaagcatcatagaggagaatcagaagttgaggaagcaagcaatgcttcttcacaaagagaatgatgtcct

SEQ ID NO: 24083 - DNA, 412 bp, Glycine max
  Clone ID: LIB3050-002-Q1-E1-B10
tgggttgttcaagaaatgcttaaacttggtgtggtcgcgaaattgtgcttggtgcttcaggtggatagtggaaacaaggctaaggaaaaggcaagagagattctcaaattgcatgctcgtgcgtggaggaattctccatgcataccgaacaatttgcttaattcatacccgaactatgtgtgaaatgatacgagaattttgaatggtacctcttttagaaattttaatgtacataaattatttggaaaggacacagttaggtgtaagttagaaatatgagcagcaactatatatattgattgccccacaaaaagcataggtgggtagtgagatttcaggttttgatttgtatttcctgacaattgtgtgatggatttttgttttgctaattaaacaagctgacacagaattg

SEQ ID NO: 24084 - DNA, 315 bp, Glycine max
  unsure (1)..(315): unsure at all n locations
  Clone ID: LIB3050-002-Q1-E1-B12
gaacacaacctggggtgttaaatagaaaagaggagtttgagaatggcaacgatcagcgcggttcaggtggagttcctggagtttccagcggtggttacttcaccagcctccggcaagacctatttcctcggcggcgcaggggagagaggattgacgattgaggggaagttcataaagttcacaggcatangagtatacttggaggataaggcggtgccatcactcgccgctaagtggaagggtaaaacttcagangagttagttcacaccctccacttctacanggatatcatttcagggccgtttgaaaagcta

SEQ ID NO: 24085 - DNA, 391 bp, Glycine max
  unsure (1)..(391): unsure at all n locations
  Clone ID: LIB3050-002-Q1-E1-B2
gtaattgcaactgtcaaagatgcttgtanagcacctgtggttaagaataaaccacggctggtggaagcaatgtatttttgtgaattgaatacacctactgaatatttgggtcccatgtatgctgtactttcccgaagacgggcccgagtattgaaggaagagatgcaagaaggttcccctttcttcactgtgcatgcgtatcttcctgtttctgagagctttggttttgcggatgagttaagaaggtggacttctggcgccgcaagtgcacttcttgtccttagccactgggaagcacttcctgaggattctttctttgtacctaaaacggaagaggaaattgaagagtttggagatggttctagtgttcttccaaatacggcaagaaaat

SEQ ID NO: 24086 - DNA, 407 bp, Glycine max
  Clone ID: LIB3050-002-Q1-E1-B3
gaacttaggatgcaaatacagctaaccagataccaaagcaccttatttaccatgcactatagtgagtacgtctcctatgtgaaggagagaagaggtgaagctcctattcttgcggctaaatcacccaactattgaatatgttgcctacctttcttgaggctgcataatttctttactaaaaaaaagaattctgttttcaaatgaattacaaaataaaaaaagaaaacccacttgcctagggtcggaatcaatttgtttgtctaacccaaactaccgaagtgattggtgcaactttctatgctctccaaatttgtgtgcttttgaggagactaagaacattggacttagttcctaagaatgtcctctaccactgcagtttatgaaactgctgcactgttgaactgttt

SEQ ID NO: 24087 - DNA, 409 bp, Glycine max
  Clone ID: LIB3050-002-Q1-E1-B4
gacagacaaacaaacaatttaccagctatacttgttccttttgaacgttagaagtgctacaatacaaacaatggcagctactcaggaagatgtgaagcttttgggtattgtgggaagcccatttgtgtgcagggtccagattgcccttaagttgaagggagttgaatacaaatttttggaagaaaatttgggcaacaagagtgatttgcttctcaaatacaaccctgttcacaagaaggttccagtgtttgttcacaatgagcagcccatagcagagtctcttgtgattgttgaatacattgatgagacatggaagaacaaccccatcttaccttctgatccttaccaaagagccttggctcgtttctggtccaaattcattgatgataagattgtgggtgctgtatcg

SEQ ID NO: 24088 - DNA, 413 bp, Glycine max
  Clone ID: LIB3050-002-Q1-E1-B5
gctgctacaattacagttaatcccttgactgcacttctcatgcttgaacactgcgttactttgaactcaggagatgctattgtgcaaaatggggctaccagcatggttggccagtgtgtcattcagattgcaaaatcacgtggcattcacaatatcaatattataagggacaggcctggggtcgacgaagtaaaagaaaggcttaagaatttgggtgctgatgaagtttccactgagagcgaattggaagtgaagaatgtcaagagtctcctgagtggtatacctgaacctgttttgggatttaactgtgttggtggcaatgctgcttctctggtactcaaatttttgagacagggaggaactatggtgacttatggtggaatgtctaaaaaacctgtctctgtgtcaacatc

SEQ ID NO: 24089 - DNA, 418 bp, Glycine max
  Clone ID: LIB3050-002-Q1-E1-B6
ggaaccaaacaacaaatattcatggctttctttattctctccttcctcttccttcttcttgtttcatctgccactgcttgtgatcgctgcttgtatcaatccaaggcttcctatttctccaaagcttctgctctttcatctggggcatgtgggtatggctctttggcactagacataagtggtggacaccttgcagctggtgtggattctctcttcaaaaatggagcacgttgtggtgcctgctttcagataagatgcaagaacccaactctatgtagcaaagaaggtaccaaagtggtattgactgatcttaatcacaacaatcaaactgattttgtgctaagcagcagagcctttgcgggcatggctcaaaagggtatgggccaacaaatactgaagcttggcattgctgaaattt

SEQ ID NO: 24090 - DNA, 247 bp, Glycine max
  Clone ID: LIB3050-002-Q1-E1-B7
ggaaccagacatcaaataatcatggctttcggtagtctcacaatcgtcttcagtcttcgtgtttcatctgcgacagcttgtgatcgctgcctgtctcaaaccaaggcttcctagttcgccaatgcttctgctctttcagctggggcacgtgggtaaggctctttagtacaacacataagtgccggatacgttgacgctggtgtggattctcgcgtcataattggattacgaagtggagcttgctttc

SEQ ID NO: 24091 - DNA, 404 bp, Glycine max
  Clone ID: LIB3050-002-Q1-E1-B8
cataacgcagggtttctcttcgagtaactttctcggagaaggaggtttcggacccgtgcataagggcttcattgatgacaagcttaggcctggtctcgaggctcaaccggttgccgtcaagcttttggacttggacggttctcagggccataaagagtggttgactgaagttgtgtttctgggtcaactaaggcatccacatctcgtgaagctgattggatattgctgtgaagaagaacacaggcttctggtatatgagtatttaccacgaggcagcttagagaatcaactatttagaagatatacggcatcgttaccatggtcaacaagaatgaaaattgcagctggagctgcaaagggtctagcctttctacatgaagcaaagaaaccagtcatctatagag

SEQ ID NO: 24092 - DNA, 292 bp, Glycine max
  Clone ID: LIB3050-002-Q1-E1-B9
gagagaaagagagagaaagatgtcgaagcgtggtcgtggtggttcggcggggaacaagttccgcatgtcgctgggtcttccagtggcggcgacggtgaactgcgccgacaacacgggggcgaagaacctctacatcatttcggtgaaagggatcaaaggccgtttgaaccgtcttccctcggcctgcgttggcgacatggtgatggccaccgtgaagaagggaaaacccgatctgaggaagaaggtcttgccagctgtcatcgttcgccagcgcaagccatggcgccgaaag

SEQ ID NO: 24093 - DNA, 369 bp, Glycine max
  Clone ID: LIB3050-002-Q1-E1-C1
gacccagttgcagaaagaaaagaccatcaaagtttcacttcagccttatccggtttagggtttcggtttttgacccaacctttgacgtatcgaaaccttaagtttcggatcaggtctgagcaatctggttggtagaacctttggtcttagagagtcaagttttatgtctgaattagacgatcaaattcctactgccttcgatccttttgctgatgcaaatgctgatgactcgggtgctgggtcaaaggagtatgtgcatattcgcgtacagcagcgaaatggaaggaaaagcctgacaaccgttcagggattgaaaaaagaattcagctataacaagatacttaaagatgttaagaaagagttctgttg

SEQ ID NO: 24094 - DNA, 382 bp, Glycine max
  Clone ID: LIB3050-002-Q1-E1-C10
gggagtcacacacacactctctctctctctcttgaccaaaaaaatcaacaacataccaagctagctaacatgcaggaggacaagaagatgaaggtgaagaaaggattcctcgctgttcaagtgggtttagaagacgacgacgaaggtggctcttcccctcaaagattcgtgattcctatctcatacctttatcaccctctcttcgagcgccttctggacaaggctcgtgaggtttacggctaccacaccgatggcccactcaagctcccgtgctccgtcgacgatttcctccatctccggtggcgaatccagaaagagtccactcctaaccaaaaccaccataaccagagccaccatcggccttcaacacgctctgcaactc

SEQ ID NO: 24095 - DNA, 417 bp, Glycine max
  Clone ID: LIB3050-002-Q1-E1-C11
gatcatggtcttagcagctgttcctttccatttatagttgcagagcaagaagtttgttcggagatctgcaagctggaaaatgtgattgaggaagctgaaaccactgatgatatccagataaaaaaccaacatatggaagaaaagactcaagctttggatttcttgcaagaaatgggttggcttcttcatagaagtcatgtgaaatttaagctaggttccatggctcctttccatgatctcttccaattcaatcggttcgcttggcttgttgacttctccatggaccatggttggtgtgctgtgatgaagaaactcttggacattatatttgagggtggtgttgatgcaggagagcatgcctccattgagcttgcattgttgaacatgggtcttctacacagagctgtaaagagaaac

SEQ ID NO: 24096 - DNA, 414 bp, Glycine max
  Clone ID: LIB3050-002-Q1-E1-C12
ggaaagagaaagagaatggaaaagagggtagcaatattacaggaatggtttgaccgcgttgactcggagaaaagtggaagcataacagcggtgcagctaaagacagctcttgctgtgggcaacctggaatttccgctctcagtggttcagcaaatgatcaggatgtacgatttcgaccggaatggtactatgagctttcaagaatttgtttcactcaacaacttccttcttaaggttcaacatgcattttctgatctagagaggggtcgtggttttcttgtacctgatgatgtatttgaggctttggtaaaaattggtttcatgctggattctcctgctttttactctgtctgtgagagcttcgatcaaagtgaaaatgggaggtttcagctggacaacttaatatcaatctgt

SEQ ID NO: 24097 - DNA, 203 bp, Glycine max
  Clone ID: LIB3050-002-Q1-E1-C2
gatggtcctgcattttctagtttgccatacctgcaagagctttacctaaggagaatgaggctcagtgaagtcccatcagatatagtggggctgcatcagctacggatccttgacttgagtcagaattcccttcaatcaattccagtggggctaaaagctctcacttctctccaggaacttgacctatccaataacaacattgc

SEQ ID NO: 24098 - DNA, 417 bp, Glycine max
  Clone ID: LIB3050-002-Q1-E1-C5
gagacaaacaaacaatttaccagctatacttgttccttttgaaggttagaagtgctacaatacaaacaatggcagctactcaggaagatgtgaagcttttgggtattgtgggaagcccatttgtgtgcagggtccagattgcccttaagttgaagggagttgaatacaaatttttggaagaaaatttgggcaacaagagtgatttgcttctcaaatacaaccctgttcacaagaaggttccagtgtttgttcacaatgagcagcccatagcagagtctcttgtgattgttgaatacattgatgagacatggaagaacaaccccatcttaccttctgatccttaccaaagagccttggctcgtttctggtccaaattcattgatgataagattgtgggtgctgtatcgaaatctgttt

SEQ ID NO: 24099 - DNA, 349 bp, Glycine max
  Clone ID: LIB3050-002-Q1-E1-C6
ggcatttgtagcaatttttgtgtaactcaaagccaggagacaaaattcagatcacaggcccgtcggggaagataatgcttttgcccgaggatgacccaaatgctacccatataatgattgccacaggcactggtgttgctccattcagaggctatctacgccgaatgttcatggaatcagtccctgcatacaagtttggtggattagcatggcttttccttggagttgccaacactgacagtcttctctatgatgatgaattcagcaaatacctcaaggattatccggacaatttccgctacaatcgagccctcagcagagaacaaaagaacaagaattggggcaaaat

SEQ ID NO: 24100 - DNA, 398 bp, Glycine max
  Clone ID: LIB3050-002-Q1-E1-C7
ggagtgagacaatatcacacataatataattccaaaatcactcctattgctatagcaatatgatgggtgacactgagatcaaaccaccagttgaagtagtcatatgtgcttccatgaacaataacaatagcgcaaacaaccacaccctcccaaccgacatcaccaagtcatcacaatcacacttaccaatcttgaccaagctccatgctggttactttttcatatgcctttcctttggtgcacaagctttgctctggaagagtttgagtaaacacaacaaggactcacaaactctctggcatggattcaatttgatgccttccattgcgtttctactactttggtgtgtggcactgctcactggcaacactttgtccttactttacgtgctcaagtgc

SEQ ID NO: 24101 - DNA, 340 bp, Glycine max
  Clone ID: LIB3050-002-Q1-E1-C8
gcaggtggtgtggtctgctgggtggtccgaagaatggagccgggagggtcaccgggttgcaagtgcccttccacaggccggttttcttacgcattctggaggccggtgggctcaggaggacgcagccgttgagatagctgaaaaaatttctcagtttgtattgtcattaccaaagtctattaggaaagttgaacaggagtccaccccagagcacgtacagaagatgcttgatgaagcaaaaagcagtggtcatgatcatcatcaccatcaaagtcctgatcatggtcatggacatgatcactatggtgatgctcacatccatggagctaattatatggac

SEQ ID NO: 24102 - DNA, 417 bp, Glycine max
  unsure (1)..(417): unsure at all n locations
  Clone ID: LIB3050-002-Q1-E1-C9
taacatacaattatggggtgacctcatatgatattggaactggatttggacattttgctatcgcaactccagatgtttacaaattggttgaagacatccgggctaagggtggaaatgtcaccagggagcctggtccagttaagggtgggaaatctgttattgccttcgtgaaggatcctgatggttatgcttttgagctcattcaaagaccttcaacccctgaaccattgtgccaagtaatgcttcgcgttggtgatttagagcgctcaattaagttttatgaaaaggctttgggtttgagggtggtaaagaagactgatagacctgaatacaagtatactatagctatgcttgggtatgcagangaacatgagacaactgtgttggagctgacatataactatggtgtcactgaat

SEQ ID NO: 24103 - DNA, 93 bp, Glycine max
  Clone ID: LIB3050-002-Q1-E1-D1
gaatggtccggtgaagtgttcggattgcggcgacgtgagcggttcgctgcccgcgacgttgtgagaagtccactgaaccttatcatttagagg

SEQ ID NO: 24104 - DNA, 378 bp, Glycine max
  Clone ID: LIB3050-002-Q1-E1-D10
gaagacagaggcagaagagaagagaaaagaaagcctctccctccgtaccaaacccttccaacactgaataatgatctctcccgcaacctctgaagctgcgacgacgacgtttcccaatcgaacacaatcgcacaaaatttgagcaatgaagaagcgcaaggaacttggccatggctctccttcaatttctccccctccgaaatcaagaagactggagttggagcgcgacgtgatgatggaggaagaggaaaatgtaatggtgaagcaaccctgtgtggaccccacaccttcgcctgtgacggacatggaagagagagcgattgttctttatgagccaaccgctactacgccttttctcaagtcccaagctcgcctgag

SEQ ID NO: 24105 - DNA, 393 bp, Glycine max
  Clone ID: LIB3050-002-Q1-E1-D11
ggttccaagtcgcaaacaaagtaacactagaactcacaaaggacagaagaaacgcgaatgccaggagaactccaattaccacccgggttcagattccaccccactgacgatgagcttgtgaatcactacttgtgtagaaagtgtgctgcgcaaaccattgctgttcccatcatcaaagaaatcgatttgtacaagtttgatccatggcagcttccagagatggctctttacggtgagaaagagtggtactttttctctcctcgagaccgaaaatacccaaacggttcgagaccgaaccgggctgccggaagcgggtactggaaggctaccggagctgacaaaccgatcggaaaaccgaaagcccttggaatcaagaaagccctcgtgttctac

SEQ ID NO: 24106 - DNA, 359 bp, Glycine max
  Clone ID: LIB3050-002-Q1-E1-D12
gaaataatgatgatgattttgagccccctttaattccttaccatagcgaaattcccaggattcgtctctttggtgttcttggtgtaacatacttcatacttgctccactgatactgccatttctcttgatctacttttgtttgggatacatcattttccgcaatcagctgctgaaagtttacgttccaaagtatgagactggaggagagttttggcctacagtgcacagctccacaattttttcattgatactgatgcatataatagccattggtctttttggtttgaagaagcttcctctagcatccatattgattcttcctctttcaattctcacacttctattcaatgagtattgc

SEQ ID NO: 24107 - DNA, 390 bp, Glycine max
  unsure (1)..(390): unsure at all n locations
  Clone ID: LIB3050-002-Q1-E1-D2
ggatgttgataactttgtaaagggaactaaagattccagggtttgtaatgctttccctgcaaaaggtcattttccatttccaactcaggcagcattgtcatctggggttaatgctgttcctgatcctctgaaaacatttgaaggtctttcaaagaccttaattaaatctccaaaacctgatgttgggacaattgtcagtgcaattcatgttctttcagaattgcttgtgcaaacatccatggatggagtagactcaaatagtgaacatggtcatgatgagattatgattcagcanataatcaataacctaaatgatttcagcacaaaaagatgtggcctaacgattccaaccttgattcaactcccacagataatccatttggtcctgat

SEQ ID NO: 24108 - DNA, 376 bp, Glycine max
  Clone ID: LIB3050-002-Q1-E1-D3
ggggtatcttctagaagcctctgacgacgaactggggttgccgccgacggttgttgacggtgaggaaacgggtcgggttggtccggaaatgacggagcttgccaggttaatgggttttgaagatgatatacccagttatgatgcattcgggtttgggtcagggtttgcggcggagagtgacggcggcgccggacgttttgtgacggtggatgggttgtttgactattcggacccggcggcggatgttttgtggcggtcggagtcattacaagctatgtacgtgaccgcggcgagattttgcgatggttttggcagaagggtgcgtacgggtggaaaatgtaaatctaggaaaatattggggttaaaataagacgag

SEQ ID NO: 24109 - DNA, 320 bp, Glycine max
  Clone ID: LIB3050-002-Q1-E1-D4
gaagatgctcatctttgatccaaacaggcgtattacagttgacgaggcgttgagccacccatacatgtcacctctccatgacatcaatgaggaacctgtttgcaccagacctttcagttttgactttgagcaaccatcattcactgaagaagacatcaaggaactcatctggagagaatctgtgaagttcaatcctacaaccatatatgtttagtgaaatatctgatgactaatatatacattttatgaccactacttggcaagttgcagcgcacagaagatatgaaaacgtattggagatactgagattcactgaattt

SEQ ID NO: 24110 - DNA, 403 bp, Glycine max
  Clone ID: LIB3050-002-Q1-E1-D5
agccatcagaagaggagagaaagggattgtgaaagcgacaaagaaacatttcactaatagagagacataagcataatattgagaaataatggagggttgtacttattgtgtgaagttgctatgcctggttgggtttgtggtgcttgtgagtactattgcacgggtggagagtgctggtgaatgtgggaaatctaccaccccagataatgaggcttataatcttgcaccatgtgcctcagcagcacatgatgagaatgctagtgtttctcagagttgctgtgctcaggtgaagaaaattgggcagatcttaagctgcctctgtgcagttctgctctccaacacagccaaaatggctggtgtcaaccctcaagttgctgtcaacatccccaagcgttgcaacctg

SEQ ID NO: 24111 - DNA, 396 bp, Glycine max
  Clone ID: LIB3050-002-Q1-E1-D6
gacaaaacaagtgtttcgaatagattatcctaagtctttgggaatagtgctgcaatggcttcaagtcaggaggaggtgacccttttgggagctactggaagcccatttgtgtgcagggttcatattgccctcaagttgaagggagttcaatacaaatatgtcgaagaaaatttgaggaacaagagtgaactgcttctcaaatccaacccagttcacaagaaggttccagtgtttattcacaatgagaagcccatagcagagtctcttgtgattgttgaatacattgatgagacatggaagaacaaccccatcttgccttctgatccttaccaaagagccttggctcgtttctggtccaaattcattgatgataaggtttttggtgctgcatggaaa

SEQ ID NO: 24112 - DNA, 406 bp, Glycine max
  Clone ID: LIB3050-002-Q1-E1-D7
ctcttcctacttgaagaaagtaggatacaaccctgacaagattccttttgttcctatctctggttttgagggagacaacatgattgagaggtccacaaaccttgactggtacaagggtccaactctgcttgatgcacttgaccagattagtgagcccaagaggccctctgacaagcccctcaggcttccccttcaggatgtgtacaagattggaggtattggaactgtgccagtgggacgtgttgagaccggtgtcttgaagcctggaatggtggtgacttttgcaccaactggactgacaactgaagtcaagtctgtggagatgcaccatgaatctcttacagaggcacatcctggtgacaatgtgggattcaatgttaagaatgttgctgttaaggatttgaag

SEQ ID NO: 24113 - DNA, 241 bp, Glycine max
  unsure (1)..(241): unsure at all n locations
  Clone ID: LIB3050-002-Q1-E1-D8
agggaagggatattttgaggacagaaggccagcttctaacatggacccatatgtggttacttccatgattgcagacacaaccattctgtggaagccatgagcaaaacttgcatgttgtctccctttggatggaacaaggaacaaggaacaaggaacaaggaacagttatgcttttctaagtanggtttggtcctttttattttttaccttttgatttttctaggatttcgatttgtggcta

SEQ ID NO: 24114 - DNA, 342 bp, Glycine max
  Clone ID: LIB3050-002-Q1-E1-D9
catctaaagaaagtcaaggaatcatctggaccgaaagaagcgtcaaaaaagagcaatcctctattcgaggcacccgtccaaggccagagaatgattttactaccacatttaggtatcggcttcggcaacttaactgcaactgctgaaaatactcctccaggatttgaatcgaaattgcctgaagtgcccgaaatcttcaaggcagccacaaattgttttgaaaccttgtgcagttactgctgttgcatgtgctgcatccagtgctgtacccggataaacagccaatgtgcaaccgcattggcacaactctgcattggtctaagatgcttcggctgcatctca

SEQ ID NO: 24115 - DNA, 356 bp, Glycine max
  Clone ID: LIB3050-002-Q1-E1-E1
ggagctttagattcttttcccctagattcagccacagttggaaaaaaaaaaaaagttgttcgagatggcacgtacgaagcaaactgctcgtaagtccacaggaggaaaggcacctaggaagcagctcgcaaccaaggctgcacgtaggtctgcaccaactactggtggtgtgaagaagccacatcgttatcgtcctggtaccgttgctcttcgtgagattaggaaataccagaagagtaccgagcttttgattaggaagctccccttccagaggctggttcgtgaaattgctcaggacttcaagactgatctgcgtttccagagccatgctgtgcttgcattgcaagaagctgctg

SEQ ID NO: 24116 - DNA, 338 bp, Glycine max
  Clone ID: LIB3050-002-Q1-E1-E10
agtatatcggtggcaccaaatacatggtcatccagggtgagcctggtgctgtcattcgagggaagaagggtcctggtggtgttactgtgaagaagaccggtgcggccttgatcattggcatttatgatgaaccaatgactccaggtcaatgcaacatggtagttgaaaggcttggcgattatctcattgatcagggtctctaatctttgctttatgtcctgttatcgtgcatatttcattggcttctgtacaagtttttgcatcgacctggactggaatgctttgattgcagtgtaataatcttgttgtgagtatgaaaagtcacgggatctgcgtgt

SEQ ID NO: 24117 - DNA, 288 bp, Glycine max
  Clone ID: LIB3050-002-Q1-E1-E11
agagtatatcggtggcaccaaatacatggtcatccagggtgagcctggtgctgtcattccagggaagaacggtcctggtggtgttactgtgactaagaccggtacggccttgatcattggcatttatgatgaaccaatgactccacgtcaatgcaacatggtagttgaaatgcttggcgattatctcattgatcagggtcgctaatctttgcattatgtcgtgttatcctacatatttcattggcttcctgtacaagttattgcatccacctgtactcgaatcctttg

SEQ ID NO: 24118 - DNA, 394 bp, Glycine max
  unsure (1)..(394): unsure at all n locations
  Clone ID: LIB3050-002-Q1-E1-E12
ggataacaaagagagtgatgattttgaaatgctgaacagaaatgaagaatcaacaagtcaaggagcaacagatgaaaacacaaatgacgtggtcttaaatgagaaggatggaagcaagaatcaagtagttgggacaagcttagagaccacttccggagatgataatttgtctgtcncatgttagcaacttaagttgttcatctgaatagacttttgangggaaggctagagtaaaattaattctacaactttttaatacataaatgctggtaatttgtagatcgtatgttagtggtttacttttattttgtggctatatatttttttaatttgtatgttttggtaatatgaaagattggggaagactagtggttttgttcttcgttgtcatatc

SEQ ID NO: 24119 - DNA, 411 bp, Glycine max
  Clone ID: LIB3050-002-Q1-E1-E2
gactgaatcaagacattaatggcattatatatagtttgcatatctttgaagatatgggtttccattgtgaggaaaaggatagcatacatctgcaaccttgcgcagcttgcaggatgttacgccgcagatgtgacagtaagtgcgtacttgcttcatatttcccaaccaatgaggttgataaatttgctggagtgcatagagtgttcggtgctagcaacgttatcaaaatgattcagatggtcgaggaaacaaagagaggggatgctgttaaagcgatggtgcacgaggcgacggcaaggctcagagacccagtttatggcagtgctggagctatttatcagttacaaaagatgattgaggaactgaaagcacagctggagtccataaaaactcctgtgtcagaacaaaaag

SEQ ID NO: 24120 - DNA, 376 bp, Glycine max
  unsure (1)..(376): unsure at all n locations
  Clone ID: LIB3050-002-Q1-E1-E3
aaggttaagggtgaggacttcacgcggcacattagcaacgtggagacatgggtcagttctgctttgaccgatgagagcacttgcggcgatggattctccgggaaggcgctgaatgggaagatcaaggactctattanggctaggatgctcaatgttgctcaggttactagcaatgctctctcgcttattaaccactatgctgcacaacactagttgggaacaatgatcttggttgcttaatgctttacttttcttcttttatgtgctctatgtaattattatatatgtgagtctttatagatatatggatcttctcatgcttcttaaatgtgaaatatgacgttgtgtttttctatgattaaaaaanannnnnnna

SEQ ID NO: 24121 - DNA, 93 bp, Glycine max
  Clone ID: LIB3050-002-Q1-E1-E4
gcaaagactggatgagaaattgcccaatgctggaagcaaattgggaactcctcaattcaaaggtggggtttccaaccccttgctgaacgttgg

SEQ ID NO: 24122 - DNA, 404 bp, Glycine max
  Clone ID: LIB3050-002-Q1-E1-E5
gcagcaattaaacagttgagaaagaacctggtcgttaaggcaaaaccagtaccaagcttctattatgaggggccaccccccaagactgaactcaagaagctgccactgactcgccccaagtcaccaaaactgtcccggagaaggagctgtggtgatgctgccggcatatccccagaaatttctactcgaggacgtcacagtgttggcaataacccaaaacatggtagccttgtccctcccaaaaacaaggacctggtcactggacgtaacagcaatggctctagcaaaaccaaagaacgaccaaaactggataaggaaacaaaaacagctcctcctaaaatcactgagcagacaaatgcggacatatcagtccaatcatgagcttatcaagattttactgacct

SEQ ID NO: 24123 - DNA, 377 bp, Glycine max
  Clone ID: LIB3050-002-Q1-E1-E6
gagatccatgagagccaagaagatcatgaactaacatatgctctaacccctgcatcaaagcttcttgtcaatagtagtgatcattgtctatctccaatggttctagcgtttaccgatccacttcggaacgttaaataccatcacttgggggaatggattcgtggggaggacccctcagtatttgagacagcccacggaacaagcgcttggggacttcttgagaaaaatcctgaatattttagtctcttcaatgacgctatggcaagtgattcccgaatagtagacttggcactcaaaaattgcacttcagtttttgaggggctagattccatggtggatgttggtggtggaactggaaccacggccagaattatctg

SEQ ID NO: 24124 - DNA, 403 bp, Glycine max
  Clone ID: LIB3050-002-Q1-E1-E7
gaaggaaaaaagagtgacactcattttaaacggaaattgctttagcataaaagagttcaagaggaggaagaacaacaagtagtaataactatatctacatagttatctttctcttgagctttgtaatttgaaacctatagatggaatggaggaagtgctacttggatgttatattggtgcccttggtgtttctaacaagcattgggtaccatttctggctatggcataaggttcgaactcagccacacacaaccatcattggcatcaatgctagtggccgtagaaattgggttaatgccatgatgaaggacaatgacaagaaaaacattctggctgttcaatcactaaggaacacaatcatgggtgctaccctaatggccacaacctccatccttctatgctc

SEQ ID NO: 24125 - DNA, 360 bp, Glycine max
  Clone ID: LIB3050-002-Q1-E1-E8
aggggaacacaacaaaatcaaaggacaagcctaaaaaactggcaagcccaaccaaaatcccccaaaactttcaaccatgaactgaacaacaacaacaacaaccacaagggcaaccctacaaaaccaactccaaagagattaattttaataacaaatttcccaattcacaagaaaaaaccttgtgggcaactcctcaaaaatgtcaagcttccccaacacagtggccgaaagccccacgtcccgcaaagcacccgaaaaatccaccttttctcacacatgcagactcttgagccaatttcctaaagagaaacgtgcttctgctgagtccacccttggaatttgtggaaaaatggaacctaa

SEQ ID NO: 24126 - DNA, 393 bp, Glycine max
  unsure (1)..(393): unsure at all n locations
  Clone ID: LIB3050-002-Q1-E1-E9
accacgcgtccgcccacgcgtccggggaagtgggtggcggagatcagagaacccaacaaaaggtcgaggatatggttgggttcttacacgacacccgtggccgccgcacgtgcctacgacaccgctgtcttttacctccggggtcccaccgcgcgccttaacttccccgaactcttgttccaggacgacgaccaggagggcagtgattcggtgcagcacggcgcagcagggaacatgtccgctgattccattcgccgaaaagccacgcaagtcggcgccagagtcgacgctctccaaaccgcgcttcaccaccacgcgccaagtaccaactctctcaatctcaagcccgacttgaacgagtttccanaactcgaagagcttcangattgatat

SEQ ID NO: 24127 - DNA, 427 bp, Glycine max
  Clone ID: LIB3050-001-Q1-E1-A10
gacgcacgcgtcagcaagaagctaagattaacacaccaacccactagaaacatgaaaacccctaacaaagcctcattactcttattccctctcttgtccctttccttatttatcaaccattcccatgcagcaggaatcgctgtgtactggggccaaaacggtggagaaggcaccttagcagaagcttgcaacacaggaaactaccaatatgtgaacatagccttcttgtccacttttggaaatggccaaaccccacaactcaaccttgctggtcattgtgaccctaacaacaatggttgcacagggttgagcagtgatatcaatacttgccaagaccttggcatcaaagtgttgctctctcttggaggtggtgctggaagctactccctcagctcatctgatgatgccacacaacttgcaaactacc

SEQ ID NO: 24128 - DNA, 361 bp, Glycine max
  Clone ID: LIB3050-001-Q1-E1-A2
cggacgcgtgggcggacgcgtggggcgcgttaagccaaccgcagaagctatcggcgtacgatgttctgatggagtacgggttcccggtgggtcttcttcccaagggagccatagggtattcgctcaacagagacagcggcgagttcgcagtgtattttcaaggagcgtgcagcttcgacataaagtcctacacgctcaagtacaaatccaccatcacaggtgttatctccaacggcaggctctataatctcaaaagtgtcaccgtcaaaatcttgctcctttggctcaacatcgtcgaagtctctcgtcaggggaacgatatttacttctccgtcggaatcgcttccgccgattttggcgt

SEQ ID NO: 24129 - DNA, 404 bp, Glycine max
  Clone ID: LIB3050-001-Q1-E1-A7
taaccattcaaaatcctaatgcacttgacagcaaggttcttctggattttgatcatgttaaaaatagtttgaaagttgatgatgaagaactacagaaaatgagttcagatccaacctataacataaacatgtcgggtgatataaagcaaatgcttaaggagcttggaactgagaaaggaaaggaaactgcattgcatgggggaggcggtggcaaggcacaaaaagaaagagctgctgcacttgctgccatcttagctgcaaggtcacgtgttgaagaagattccaaatcaaatccaaataaagaggtcaaagtttctcaggcatttagtattgtagatgctgcgtctgcctcagtacatggaagaagtgcagctgctgctaaagcctcagcagatgataaaact

SEQ ID NO: 24130 - DNA, 381 bp, Glycine max
  Clone ID: LIB3050-001-Q1-E1-A9
acccacgcgtcaggaagaatttgatggagtaaaaaaaagcagaaatgagcagcgattccctgtctctggggaacctgtttgtcttatatgtggaagatatggcgaatatatatgcaacgagacagatgatgatgtctgtagcatggaatgcaaaagtgaacttctggaaattcttaaactcaatgagggatcctcccacaaccaagttagagatatctcctcatctggaattagtgctgctgtaccagttccagtttttggtgatgatacctgggattataatcaacatcactggtccaaaaagacatgtagtctttctacttatgaatgttggaaatgtcaaagacctggccacctagctgaagattgtatggtcactga

SEQ ID NO: 24131 - DNA, 427 bp, Glycine max
  Clone ID: LIB3050-001-Q1-E1-B2
gccacgcgtcaggtggagtgtgagtgagtgagtccttggtccgaagcaatgcaagaagaagaagcatagcagagaagcagcaatgacaagagcaatgctcctggtgttattccctcaagacaacaaagccaagttcaacttcccttctccttctaagtctcttgtctccaaagcacaatccactatctcaatctgcctccttctctttttcacaactctcctcctttttactctctccaccctcccaaacacccctcacacccctcccactcagcctcctaaacccaccccccaccacctggctctccagcgcatgggcactctccaccgcagaggcaccaaatccatgtccgacctcctcatctgccacgtgcctgacgaaacccccctccaagacttccgcatcttcctccgccttctccaacgt

SEQ ID NO: 24132 - DNA, 423 bp, Glycine max
  Clone ID: LIB3050-001-Q1-E1-B4
cacgcgtcagcccacgcgtccggaagagccttccatatatagcctcccaaaaaaatgaagagtactacctctttggctctctttctactttgtgccctaacttcatcatatcagccttcagccaccgctgatattgtattcgacaccgaaggcaatcctattcgaaacggcggcacatactatgtgttgccagttataagaggaaagggcggcggaatagaatttgccaaaaccgaaacagaaacatgccctctcactgttgtgcaatctccctttgaggtctcaaagggtctaccactgataatttcatccccatttaaaatccttgacatcaccgaaggacttattttgagcctcagtttcacttatgtacccccctgtgcctcaactccttctcggtggaccgttattctcaagggtctg

SEQ ID NO: 24133 - DNA, 96 bp, Glycine max
  Clone ID: LIB3050-001-Q1-E1-B7
aaaaaaaaaaaaaaaaaaaaaaaaaaaaaaaaaaaaaaaaaaaaaaaaaaaaaaaaaaaaaaaaaaaaaaaaaaaaaaaaaaaaaaaaaaaaaaaa

SEQ ID NO: 24134 - DNA, 340 bp, Glycine max
  Clone ID: LIB3050-001-Q1-E1-B8
gtatagaattcccgggctgacccacgcgtcaggcgtagtgcaactggggtacatgaaagcaaatattggcgtggtggctatggcgactatggtggttggcgtgatggtggttggcgtggtcgctattgaggctggcgtggttgctatcgtggtcggcttcgtggctatggtggctggcgtcgtggctatggtggtgggcgtcgcggctactgctgttgccgtggtggctttggccctaacgaacatactgaggctgtgattgatgcgatccctcacaactcacagtgaaaactgctaaagcctatatatgatttaagttatcgtactaaataatacttca

SEQ ID NO: 24135 - DNA, 374 bp, Glycine max
  Clone ID: LIB3050-001-Q1-E1-C1
gcgtcagagaaaatacaatccaaatgatgaaatagatgttcatgatttgagaacaataaaatcaagtaaatggggtgcaactgaagaatttcaagatgcatatgaatgtgaagagtgggtagatgaccgagatatggatatgttgtattcatctggtaatgttgaatttaaccctaagatatacaggaagtataagaaagaatatgacgagttggagaatgaagaagattttccatctgatgagtgggttatacctcaaggttctatgggacatgtacaaaggcattcatttcaatttcggaagtattccaatcaaaatataaagcatcactcaaagtctagttcttcaaactggtataaatcccagcattttt

SEQ ID NO: 24136 - DNA, 430 bp, Glycine max
  Clone ID: LIB3050-001-Q1-E1-C11
gacgcacgcgtcaacccacgacgtccgtgttagaccattattttcaaaattcactatgagagcacacaaactcttgttgttttttatacaattctgcttaataaactatagtgccaacatctttccagcaaatggttattttcttggccatcagtgttccattgtcctccatttgaaaaataacctaatattcaactctacaaaatccaaaaagcttaccctttggaaccaaactgaagattgttgccaatggcatggggtgacatgcaacgaggggcgtgttatagcccttgatctcagtgaggagtctatctcgggaggactcgttaattcaagctctcttttcagccttcaatatctacagagcttgaatttggctttcaataacttaagttcggtgattccttcggagttgtacaagctgaataat

SEQ ID NO: 24137 - DNA, 332 bp, Glycine max
  Clone ID: LIB3050-001-Q1-E1-C2
acgcgtcagattgagcaacaggctttcaaacagaatccattgggataaaaaaaaaaaaagatgtaagagagagaagaaggaaaccccaacccaataatcatactcgtacttgggatgatattggatcatctcaacctcaattttctacaatattaaataaacaatcaccttcattttttttttctcctcttcatttctgatctcatccccatggatccctttgatttaatacgcgaagggtttggttgaggctgactggacatgcgctgttactacttttaaagtctgtttatgctgtagttattttgtccataatttaatttaaaaatgaa

SEQ ID NO: 24138 - DNA, 415 bp, Glycine max
  Clone ID: LIB3050-001-Q1-E1-C5
ggtcagggattcccgtctcgacccaagcgtcagatacctactttcagctcctaagagcacgcatcactgttgcacttcttactcgttctccctcttttttttcttcttcttcttcttcgctaaaccccccctttatttttcctatctcactaacatcgatgggagacgagaataagaccaagtcccctgcttccggcgtgtggtccaccatcaagcctttcgtcaatggcggagcctccggcatgctcgccacctgcgtcattcaacccatcgatatgatcaaggtgaggattcaacttgggcaaggatcagctgcgcaggtcacttccaccatgcttaagaatgagggtgttgctgccttctataagggtctatctgctggattactcaggcaggctacatacaccactgcccg

SEQ ID NO: 24139 - DNA, 418 bp, Glycine max
  Clone ID: LIB3050-001-Q1-E1-C8
gtcaggaattcccgggccgacccacgcgtcaggttccgatgaatcggaggtttctgatgtgactactgtgggatccaatgttcggaaggatctaaacgagtttcaggaaaagcatgccactctcgttttaactactgttaaggaaatttcaagattgagatatgaactatgtccacgtgctatgaaagaaagacacttttggaagatatatttcacacttgtcaacactcatgttgctccgtatgagaaagaatatatggaggaggttcagcttagagcggcggcagagcagaatgtggatactaaggtagagcaacctgctgttactggaggaactggaaaggcagaagcaacagggaacaatttgaatggtagaccttctaattcatcctctactgaacaagacttggacacattt

SEQ ID NO: 24140 - DNA, 410 bp, Glycine max
  unsure (1)..(410): unsure at all n locations
  Clone ID: LIB3050-001-Q1-E1-C9
aattcacggctcgacgcacgcgtcaagataggcaccgtgctttacaggagcttcttgagcttgttgagtcgattgataatgcaaatgatttaagcaaacttggaggacttctcgcggttagagaagaactttattgctctgatcctggtataaggacaattgctgcatgggttcttggaaaagctagtcaaaataatgcaattgttcagcagcagatcttggtacttggagtgctctcaaggctgatgaaaatggtaaactctaattcgatggaagaagccaataaagcattatatgctgtttcagctttgattangaatgatttggctagtcaggggttgttctatgctgaagctggaggttggatgcttcaagatattttgagtaatacaagtcttgatgtcagacta

SEQ ID NO: 24141 - DNA, 392 bp, Glycine max
  Clone ID: LIB3050-001-Q1-E1-D2
acgcgtcaagcaaactctggtggcatataccactcagttgaatatacaaatcacattgggcagttagccaataaccatggactgaagcttcacactgatggggcccgtaattttaacgcatcagttgcacctggtgttccagtggataagcttgtccaggcgggtgattcagtttccgtttgcctaactaaaggtataagtgctccagttggatctgttattgttggatcaagaattttattgccaaggctacacgactccggaaaaccttatgaagtggaatgagacatattggcctcctttgtgccgctgcacttgttgccttgcaagaaaatgttgggaaactggaaaagtgataacaataaagctagacttttggctgatggattaaa

SEQ ID NO: 24142 - DNA, 412 bp, Glycine max
  Clone ID: LIB3050-001-Q1-E1-E1
ggtcaggaattaccgggtcgagccacgcgtcagcccacgcgtccgcccacgcgtccgatttcctctcagaaccctcgatcactcccacgcgctcctatatcctctccttcaccgtcgctctctccaacgatcacaacaacatcgtcatcccatggcaaacgccgcatctggtatggcagtccatgatgactgcaagttaaggtttttggagctgaagacaaagaggacacaccgtttcatagtttttaagattgaggagcagcagaagcaggtcattgtggagaagcttggtgagccagcccaaggctatgaagatttcactgccagccttcctgctgatgaatgccgttatgctgtttatgaatttgagtaactgactgaagggaatgtccccaaaagcagaatttttttc

SEQ ID NO: 24143 - DNA, 424 bp, Glycine max
  Clone ID: LIB3050-001-Q1-E1-E2
acgcgtcaaggtgactctcgggttttacaacgcagcttttcatcgttcagtctaaggcacacgcacaccatcaagtcatcttctggtctgctgatatctatggcatattacagagatgatcgatttgcaacatttgaacagttttatcgttgttaccctgtctccttcattgagaaggtacgatcactgatttagccttatgtcaataataacttcctttgcgagtttctttcagaggaaataaaagaagaggtgagaaaattttgaaatttgaattgaggagaaaaattttctcttctatcctcctattttctttcctctcatccaaacatgtcataaactatttctattcacaaagtcaacatattccttgggatttatatttgggccctgtgattgatcaaaggggtctgatctgtgatca

SEQ ID NO: 24144 - DNA, 416 bp, Glycine max
  Clone ID: LIB3050-001-Q1-E1-E4
acgcgtcagggacattaaagttaaaggatataccatatcaaaacatagaagaagaccgctacaataagagtcttcaacttcttgaatacaacccagtatacaagaaaactccagtgcttgtccataatggaaaacccttatgtgagtccatgcttattgttgaatacattgatgagatttggtcacataattcattacttcctgctgatccctacgagagagctctggcaaggttttgggttaaatatgctgatgatgacatgttttctgcagttattgcattcttccttagcaataatgatgaagagcgagaaaagagcatagagaagatatgggagcatctcaaggttgttgagaatcagtgttttggtgatcagaagaaattttttgggggagacatttataacattatgggc

SEQ ID NO: 24145 - DNA, 433 bp, Glycine max
  Clone ID: LIB3050-001-Q1-E1-E9
aattcacggctcgacgcacgcgtcagccgtcaccgtcgccatcaccggtgaaaaagggcggtgaattggggaggagtgaggaagattcgcgtttgaagagtgtgaatttgagtaaggagctttctgcggaagaagctaatcaattgtttggtatggtgtttgggaatgaagtttctaagggcattcttgcacagtggagcaaccagggaattcggtttagctctgatcctgtaacatcaatgggcctagtgcagcatgaaggcggtccctgtggcgttttggcagctatacaagcatttgtgcttaaatacattcttttcttcagtgatgagttgaaagatgtgtcatgcatgtcaccggagggtctgggtgcgtcatttaaaagtcagtctattccatcatataatttttcttcactcactgaatgtgaaaa

SEQ ID NO: 24146 - DNA, 397 bp, Glycine max
  Clone ID: LIB3050-001-Q1-E1-F1
gggtcgagccacgcgtcaggttgctactattgaggatatatatcttgcatatgaacagttgaaagtggatgagaattctctatattcatgcattggaattgctggtgctcagactgcacaagatatagcagctcctttagaagaggaagtagcagatgatgtttatccaggtgttattccggtgggacgaggtttatctacaatgacacggccaacaacctgatatttttggactaagttttggcctgcttgctttaagatcgggaggagccatgtctggaagtttgattacaagttgtcgttcaaaggattaacggcatgtgtgtcacaacacaagaagttgctgcattcatttaacattcaaaccactcggtatacaagctgtttgatcaaacct

SEQ ID NO: 24147 - DNA, 97 bp, Glycine max
  Clone ID: LIB3050-001-Q1-E1-F10
aaaaataaatcataataaacaaaaaagaaaaaaaaaaaaaaaaaaaaaaaaaaaaaaaaaaaaaaaaaaaaaaaaaaaaaaaaaaaaaaaaaaaaaa

SEQ ID NO: 24148 - DNA, 316 bp, Glycine max
  Clone ID: LIB3050-001-Q1-E1-F3
agttcacggtcagttctgaaaaatgggttccaaggttttgcttgttgtagttatgttcatagcggctatacttctgatctctgctgaggttgcacccaatgaatacgaaaattttaacaaaaaagatgggaagcatgctccaaatgggttatatgatagcaaatggggttacggtggttggggtggtccttggtatggcggctggggtggcccttattatggtggcggctggggttggccttattatggcggtggttggggcggtccctggcgtggtggtggcggtggtggctgcggacgttggcgtcgacctaat

SEQ ID NO: 24149 - DNA, 413 bp, Glycine max
  Clone ID: LIB3050-001-Q1-E1-F5
aattcccgggtcgacccaagcgtcagaaaagctcgtggaattgctagcaatggcgaggatcaaggtttacgagctgaggcagaagacgaaggctgatctgctgaatcaactgaaggacctgaaggcggagcttgccttgcttcgtgttgctaaggtcaccggtggtgcccctaacaagctttccaagataaaggtggtgaggttgaacattgcccaggttttgacggtgatttctcagaagcagaaggctgcgttgagggatgcctacaagaataagaagtacttgcctctcgatctccgccctaagaaagaccagggctattcgcaggaggcttactaagcaccaggcatcattgaagacagagagggagaagaagaaagagttatatttcccactaacgaaatatgctatc

SEQ ID NO: 24150 - DNA, 369 bp, Glycine max
  Clone ID: LIB3050-001-Q1-E1-F7
ccgggtcgacccaagcgtcagattaaagaaaacctcccagaccatgagaaaatggtggcttttgctaagtttattagagaaaaacgtttggcatgtacctaagaaagtaatcttatatgagatcaagtatgaatcactttgtatctgtctgaatcgttttgttatgcgtgtttctttagtttccactccattattaggatgtcttgacatatctgtgaaagcaataaaagtttaatgggaaaaaaaaaaaaaaaaaaaaaaaaaaaaaaaaaaaagaaaaaaaataaaagaaaaaaaaacaaaataacaacaaataaggttaaaaaagcggagaaaaactgcacaagaatcaattaacataccaaaaga

SEQ ID NO: 24151 - DNA, 405 bp, Glycine max
  Clone ID: LIB3050-001-Q1-E1-G10
aattcacggctcgacgcacgcgtcaacccggatggttcggttctccgtgctcagttacctggcaggccaactcgtgattctctatttgtggatccagccagagataggactagcttgctcaaaatatggaacctgaacaaatgctctggagttgttggtgtatttaactgccaaggtgctggatggtgcaagatagagaagaaaacccgcatccatgatacatctcctggtacactcaccgcctctgtctgcgcctctgatgttgacctcatcacacaagtagcaggtgctgaatggcttggagatacaattgtttatgcttacagattaggtgaggtgattcggctaccaaaaggggtttcaattccagtgacactaaaagttctggagtttgagcttttccac

SEQ ID NO: 24152 - DNA, 410 bp, Glycine max
  Clone ID: LIB3050-001-Q1-E1-G3
cacgcgtcagcccacgcgtccgcccacgcgtcagcccacgcgtccgcccacgcgtccgcccacgcgtccgaagaaaccttagtttgatattttgattggttctgtggagagtttttttttctttggtgtggtttttggtttgtgctgtttttggttgggaataacaatggccgatgaaggaaacaaaagcaataacttctattcgatcttggggttgaagaatgagtgcactgaattggagctaaagaatgcttataggaaacttgcagagaaatggtacccaaatctttgtttaaccaacgggaattcagaattagtggaagaagctaagaaaaaatttcaggaaattccggaaacctattcagttttaactgacgccaacaaaaggttaatgtacgacgtgggagtct

SEQ ID NO: 24153 - DNA, 396 bp, Glycine max
  Clone ID: LIB3050-001-Q1-E1-G5
ccgggtcgacccaagcgtcagccaatactgagcggggcagcattgagaccagaggtggctttgtctcaaacatgccaggagatgttgcaagagtgaatgggcagctagcagtttctcgagctttcggagacaaaaacctcaaaacgcacttgcgatctgatcctgacattcagtatactgacattaccccagatgttgagcttttgatacttgctagtgatggtctatggaaggtaatggcaaaccaagaagctgttgatgttgcaagaaggataaaggatccacaaaaggcagcgaaacaactagccactgaggcattgaacagagacagtaaggatgatatttcctgcattgtagttcgtttcaagggttgaaaaaggggaacatacatactct

SEQ ID NO: 24154 - DNA, 434 bp, Glycine max
  Clone ID: LIB3050-001-Q1-E1-H11
ctcacgggtcgacacacgcgtcaactcaggttatggttaccttggggtacatgcacagtcaaggtgttcataccctttttatataacattctcaagaaagcaaacttatggtacttttttttttggtctacttacatgatataattattgtaggtgataatgggttaatgaccttaaaaaacaaattataagggagaagttagctacttagtttgagaagaatgatcttcggaagctgaagtacattcttgggatataagttgcctactctaagtaaggtatctttaattctcaaaggaaatatgtgcttgatctccttaaatagactggtaagttgggttgtaagatgtgcttgaccatgtgtacagggcccttaaccagctaaaatactcctaaagaaagacacatcagataaatctggattctaccatatt

SEQ ID NO: 24155 - DNA, 423 bp, Glycine max
  Clone ID: LIB3050-001-Q1-E1-H12
ggtatcggtcaggaattcacgggtcgaccacgcgtcaggacaattcgggcttctcgggcccgcgccgcagccccagtttcaacaacacgtggggccgtggcgggagccgtggtggcggtggtgccggtgccggtgccggtagaggggtggtggtgaaggcggagaaagtctgtaattattggattcaggggaattgtagttatggagagaggtgcaagttccttcacacttggagtgtgggggatgggttttctttgctgacccagcttgaagggcatcagaaggctgtgagtgcaattgcctttccctctggttcagataagctgtataccggaagcactgatgagactgcaaggatttgggactgccaatctggaaagtgtgtaggtgtgatcaatcttggtggtgaagtaggttgtatga

SEQ ID NO: 24156 - DNA, 233 bp, Glycine max
  Clone ID: LIB3050-001-Q1-E1-H2
ggtcgaggcccgcgtcagcacagacgtcccttcatggattttggtataatccctacactttgagggtggtatggacctgaaagttgaacgataggccatagcattacatagaagaacatcgcaagaataggagtcttcaacttcttgcatacaacccattcatagaacagtcctccagtgcctgtccatatgggaaaaccctgatgtgagtccatgcttactgttggctacat

SEQ ID NO: 24157 - DNA, 444 bp, Glycine max
  Clone ID: LIB3050-002-Q1-E1-A11
gggacgactcacgcgtcggacgaacaagacgacagaagggggacaaaagagcgagaaaccttgtctgaattctccaggggagattccttctggggatagtgggaccaatggatcagtgacaaacaaccaacaagtgaaccccgtacttgcagctgctgatacatctaattctaaagaagaagaaaagctagccattgaaaagattatgtccggtccgtatgatgcacatcaagcctttccagaagaacctgaagagcttgaagacgatactcagcataaaaatcaagacaaagattctggtgggaacatgaaaaacaacatggaatctttactctcaaagcctgcagtggcagaagagccagttatttctaaggaaattacttgttcaactcatttattctccaatgagatcttggaggagcttgagcctgctgagctatcagc

SEQ ID NO: 24158 - DNA, 357 bp, Glycine max
  unsure (1)..(357): unsure at all n locations
  Clone ID: LIB3050-002-Q1-E1-C4
tacggctgcaaaaagacaacaaaagggcaaagaggaagagataaaggaaggaagggaaagctctcttggagtctgcaaggttgtggaagcctacctgctggagaatccacaagtttatgcttaattattcatttgtttttgtcaagtatacagatactgtttcaagattaaattcaaacttattcaatttttgaatgatatatatagtgtgcaagcaaatatangcacaattagaatgtttgcaatgtattgaactccttaatatgtccttacccttcaagggctgctttgtggtttggcaaagtatttgtacttttgtagtaacaaagagtactctgatggtaataattcctcctg

SEQ ID NO: 24159 - DNA, 152 bp, Glycine max
  Clone ID: LIB3050-004-Q1-E1-A8
ggatagaggattcaatggcgactctgcctgcatactgactcgtcacaattctctcctcaccggcatcttcagcgcaatgacctgcgtggtggtagttcatgcctgggtgttcagcatgataacgcatctcacgttcacagtatgggccgccc

SEQ ID NO: 24160 - DNA, 131 bp, Glycine max
  Clone ID: LIB3050-004-Q1-E1-C9
ccactggaaatgacacacacaagggctgccaccaaactgaaagtaattcggccgctctacaggatccaatcttacttacgcgtgcatgctacgtcacagcccttcgatagtgtcacctagattcaaatcaa

SEQ ID NO: 24161 - DNA, 415 bp, Glycine max
  Clone ID: LIB3050-004-Q1-E1-G12
cagaagacgacagaagggggattctcgccatgccgaaagctaaatccgacgccaaagccgccgatagcaggttgaagcggaagggcgctggtgctgggaggaagcaatcgaggaaagctgctaaggaccctaacaagccgaagagacctccaagcgctttcttcgttttcatgtccgagttcagagagcagttcaagaaggagcatcctaacaacaaatccgtcgctgttgtcggcaaagctggtggtgaaaaatggaaatcgctatctgatgctgaaaaggcccctttcgttgctactgctgagaagaagaaacaggagtatgagaaaactatttcggcttacaataagcaattggagggaaagaattcagaggaagacgagtctgacaagtcaaagtctgaagtcaatgatga

SEQ ID NO: 24162 - DNA, 331 bp, Glycine max
  unsure (1)..(331): unsure at all n locations
  Clone ID: LIB3050-004-Q1-E1-G2
gaacaagcaaggctttaattaaccagtgcatgatgctgaattaaatgcagaataagtgatttatcctgatagtgatgatgaattggatggcgtcatgaggaatagtggattatttttatctagaaagtgtacgatggcacatcttttgtactttaaataggtgttgtggtatcaggctaaatcacttcagcctgcagattatgttctataattagacatcttagttatggttctctttgtgtgactgtgtgaacaataaaattgcttatgcatgaacattcagcaaaataatactatgttgtagaaccttttcacgataaanaaaacnnan

SEQ ID NO: 24163 - DNA, 347 bp, Glycine max
  Clone ID: LIB3050-005-Q1-K1-D6
agccgccataacaccccagaaagttatacttaaaggcgctactccaaactcgaaattctcaacaacattctcggtggcttatctttccactttattccaaaactggacctcactttaccccaatctaaatccaaacccgaaccaaccatgttcctaccaccccaattcacttccgaacctcctaaatccactctcaaattcctctgtagctactgctgcaaaatcctccctcgctaccccgacagcaagctccgctacctctgcggccacacccacatcctctcctactatcgctccattccattctcctagctattgctgaaactgaatgatctctactgcacctc

SEQ ID NO: 24164 - DNA, 318 bp, Glycine max
  Clone ID: LIB3050-006-Q1-E1-D11
agccgtcagtacagcagcgaaaggtccagatgcgggtactaaacacaatggtactggcgccaaatcaagacaaaacggtgaagctgcaagcagctcacagcccggtcgcgatgaccaaacactccatctagctccagcagacagaagaccacagacgggtcttgatgcgattcgacgctagattggtacggatgcatatacgatcacataatggtacagcgtccacagatcactcagacgcagcgtcgcgacagcagatctcaagggtatcattgccaaactacaccccaacgataacgcttccattaaccacacaaa

SEQ ID NO: 24165 - DNA, 397 bp, Glycine max
  Clone ID: LIB3050-007-Q1-E1-D7
ggaagtaatgacccggatctgaacgaggagatggagaagcagtttgtggaccttctcagtgaggagttgaggttgcaagagtctgttactgaagcatacacccggcacatgaacataactttggctgaagcaaaaagagtggcttctcagtaccagagagaggcagataaatgcattgctgcaactgaaacatgcgagcaggcaagagaacgtgctcaggccatacttaccaaggagaaaaagatgattttggtgtgggagaaacgagctcgtcaaatgggttgggaaggagaatacctgcataagttgtgttacttatattccttatggctataatcatgatcgtggttttatacaagtatacaagcaaaatgcttgagttgtcaaacttacgtta

SEQ ID NO: 24166 - DNA, 214 bp, Glycine max
  Clone ID: LIB3050-007-Q1-E1-D9
agggggatctggtgggtttgcattgtatgattatcagtagttgtacgacgcacttgatcattatttgatctcgtatggaagtatgcaccatcatctctatggttgtgtcatactcactgaggtatgtgtagatgccttcgatttgtcttatgcatctataggcgtttgggttatatgatgcagtctgtcttgaactatatcatcttcaacttta

SEQ ID NO: 24167 - DNA, 355 bp, Glycine max
  Clone ID: LIB3050-008-Q1-E1-B11
gctcaggtgaagaaaattgggcagaaccctagttgcctctgtgcagttcttctctctaacacagccaaaatggctggcgtcaaccctcaagttgctgtcaccatccccaagcgttgtaacctggctaatcgccctgttggttacaagtgtggaccttacactctgccttgaaagagttaaggttgttgctgaaaacaaagatgacagggcgtaaatgcactatggatgttagctactacaaactgtgactacatgtttgttgtattgtcttgtaacttcctagtgaataagaactagcagctcactagtgtaccctataataaaacatgtactttcggtgtcaaaaaaaaaaaca

SEQ ID NO: 24168 - DNA, 374 bp, Glycine max
  unsure (1)..(374): unsure at all n locations
  Clone ID: LIB3050-008-Q1-E1-C4
gctatgaatcatcaacaggatatgtcaaaccaactacttagtggactaggggccgttggtggttttagtaatcttcaatttgattggaaaccttctccttgagagccctttgtagatttatgaatgttgtggttcttgacagttgctcatgcaacatgagcaatggtatttgccttcggcccctgatgatatggctgaaagtatttgggttgggtagtcacagggcgtaggccactgtgctaatatatgaatttatatataagaaatgaaaatttgttggctggttgtgtggctgatggggctgatttttcttgtgaattcaagtgtaactttttatattaatttttcttatgagctttcgcaaaaaaaanaaa

SEQ ID NO: 24169 - DNA, 260 bp, Glycine max
  Clone ID: LIB3050-008-Q1-E1-E6
tcgtaaaaaaacacctcagggtgatggagcaaataaacaagcatttggtgttgtaacaaaaactagacatggttgtagcatcgtaatatcacgtgccccaggtgcagtcgccacaattcaacctcatggtgatgcctcgaatatcatagatctttgctacagtcacttacagactagatatcggtcatgcagactacactgcgactatatgctcattgtacaactgaactcctactcgattctgctatgacataacgaca

SEQ ID NO: 24170 - DNA, 109 bp, Glycine max
  Clone ID: LIB3050-009-Q1-E1-B7
acccacgcgctctatccagccgtcagcaacgacgcactcgatgggaacgtcactacggcttctatacgacgacatacggacggtgaatcacctcatcacgatccttctc

SEQ ID NO: 24171 - DNA, 180 bp, Glycine max
  Clone ID: LIB3050-009-Q1-E1-E9
aggcgtcaggctacgagtcaacgggagagtggggatggtagaagaacatagagaggcgctgagttcttgtagagagatgtaggtttgagttcgagtcatatgcatggggattcttcgcagatgcaagcgtcgccatccgatgatatatgacgggagtacatagtaatagtagcatcagag

SEQ ID NO: 24172 - DNA, 358 bp, Glycine max
  Clone ID: LIB3050-009-Q1-E1-F12
gcttttgtttcgcaacatggttgccgctaagaaaactaagaagacccatgagagcatcaacaacaggctcgctcttgtcatgaagagtggcaaattcaccctcggttacaagaccgttctcaaatctcttaggaactccaaaggaaaattgattatcattgctaacaactgcccccctttgagaaagtcagagattgaatactatgctatgttggcaaaggttggagttcatcattacaatgggaacaatgtggatttgggcactgcatgtggaaaataataacagattgtgctgccttagcattattgatcctggtgattctgatatcatcaagacactgcctggcgaacagtaaag

SEQ ID NO: 24173 - DNA, 115 bp, Glycine max
  Clone ID: LIB3050-010-Q1-E1-B6
attcccgggctgacccacgcgtcaacaccagacgacagaacgggtacgaggacacgtgatgacggcatgcctcgcaaatttgagttatcaggaactccctctgctccgacaggtg

SEQ ID NO: 24174 - DNA, 370 bp, Glycine max
  unsure (1)..(370): unsure at all n locations
  Clone ID: LIB3050-010-Q1-E1-C2
aggggacagtagtaaagtgagttaaaagaaccgataatagttgttccttcactctccgctctctctgccactgagccaagaagatggcctcacaggtttgcaaatctgcttccagagccgcgaggtcccttctatcctctcgttttcactctcaaggacgtgcgcttggggctgctgcggctgtttcattgagcagcaaagtgccttttttttacggaaagaacggttctggaaatggatccgcttcttcatcatcatcatcatcatggatttcaggagctcttgctcttcctgccgcagcttacatgttccaagatcangangtgcangcagctgagctggagcgcactttcattgccattaagcctga

SEQ ID NO: 24175 - DNA, 176 bp, Glycine max
  Clone ID: LIB3050-010-Q1-E1-E2
gactttcttttttcacctaattacttatcatacgtaatttgtggtactacgagtacattaagagtaattgcttgctccaaccccttcaatcccctaagctttcaacggccgctctagacgatccaagcttacatacacgtgcatgcgatctcataccgcttccagactctcacctc

SEQ ID NO: 24176 - DNA, 427 bp, Glycine max
  Clone ID: LIB3050-011-Q1-E1-B9
ccggctcgacccacccgtcaggcgaagaaaacgacagaagggcactcaaacaagctcaagttaattgctagagctcatcagctggttatggatggatttaactgggctcatgaacaaaaggtggttaccatttttagtgcacctaactactgttatcgatgtgggaacatggcttccattttggaggttgatgattccaagggccatacgtttatacagtttgatcctgctcccaggagaggagaacctgatgtcacccgtagaacgcctgattacttcctatgatgttgctgccgcatatcatactcctggcacagttacatctcattctgcacaaatttctagtactttgtgcatcctcatcctcgttggtgagattgctgtaagcacttaaaatctttgggtatgcactccaaacttttttggt

SEQ ID NO: 24177 - DNA, 358 bp, Glycine max
  Clone ID: LIB3050-011-Q1-E1-C9
agtcgtcagacgacaacacaacggggtgtgatcgcccacactggcttctacgacctcaggatctacggtgtcagagcaaacacgcatattaaaggcccagttcctaaaggatgtccaaacgtatcacacgcacactgctctcaagtttggttcaaccctacattttctccaccagagacttccccagtacaaggtatgacagttgaaactccgtgctgagcatagggatcctcaggatctaacaccacatattgataagtacataaacgatgtttctatattgaaaacgaagaaaggtactgcagaggaacttattgctgattttgaagcatcagagtgcaacaatgcaacatcacgc

SEQ ID NO: 24178 - DNA, 351 bp, Glycine max
  Clone ID: LIB3050-011-Q1-E1-G7
aggcgtcaggacacgagtcaacggaggggagtctacggtgtggagtagactagagttgggggactcaaaattcaccacaattggcggcacttggtgagcccaaagcacatcatgggttcactatcaggggatactagagatttcagatatgccaataccttcaaatggattcagaagctcctcattcagaatgacagtcacacgcacatttagactctctcgaacacactaatcgcacttagcaactgaacccgtttagcaaatgatagcgacctcagcgtatcctctatgagcaataactacggcacacttcattcctcgagaaaaaatagtgcacactgtggctcaaca

SEQ ID NO: 24179 - DNA, 444 bp, Glycine max
  unsure (1)..(444): unsure at all n locations
  Clone ID: LIB3050-013-Q1-E1-A1
taccggtctacgaattcncgggtccgaccacgcgtcaagtacggcggcaaaaaaacaacaaaaggggcagatttgaaaaaaaggaatggggcaaaggtaattggttcagaaatagacaaggaaagaattcctggtattgatatctatttgagtgatggtgataactggatgttcgcaggccatgaagtgcatatattggccacacctggtcacaccgaaggtcatgtaagcttctactttccaggttctggggcaatttttactggagacaccttgttcagcttatcatgtggcaagctcttagaaggaacccccgaacagatgctatcttctcttaaaaggatcatgtctttgccagatgatacaagtatttactgtgggcatgaatataccttgaacaattcaaagtttgccttgtctatagaacctgaaaacaaggaactc

SEQ ID NO: 24180 - DNA, 187 bp, Glycine max
  Clone ID: LIB3050-013-Q1-E1-B10
gaccacgcgtcaactgcgaaaagacgacaaaaagggaaaatttttggtaatccacatttttttcttctgttcctcaatcagacaatcacatcagaagcgtttaatttccttatcacaaaaatgggttgctgctacatgaagctgtgtgtgctcacaacaatgattctggtgttgagtttaaagaaaa

SEQ ID NO: 24181 - DNA, 369 bp, Glycine max
  Clone ID: LIB3050-013-Q1-E1-D8
tacagtgataaacgagaagctagatgacccggatatgactcaaacaaagcttagtttggatataattatgttgactatgaatggaagagagagaacggaaaatgactggaaacaactcttcactgaagcaggattcaatcactacaaaatatttcccatctttggttttagatctttgattgaggtctatccttgaacatttttatgatgtgtgtgtcacacttaacgtgttaattgtatttaatagtttgcgtgttgtgagctgaataaagctatgatggcatagcattgtcgcaacttctggtggaattacattatgttcctccccgctatgttgttaaatggtctgtgtacggatttcgcattcct

SEQ ID NO: 24182 - DNA, 104 bp, Glycine max
  Clone ID: LIB3050-013-Q1-E1-F1
acgcgtcaaatacggaggccaaaaaaacaacaaaaggggtttgtaaaaaaccataaactttccaatgcaaaaactaaattaaataacccggtattaaaacaaca

SEQ ID NO: 24183 - DNA, 296 bp, Glycine max
  Clone ID: LIB3050-013-Q1-E1-F4
acgcgtcaatacgggatgccaaaacaacacaaagggggacaacggttccttaacatgggaagcatttgcctcttaagtttagaaatctcattccaatttgctacgcacatcttatcttagacgaattcgagactcaccgacaactgatgagaatttttactccaatccctttcctaacagtgtgttcaacatgtctcacgaggaaatgaccaaccataatctagactaccatcggtttggtattggagcaccaatattctgtgtagtgtccctggttttgtcacatattttaagct

SEQ ID NO: 24184 - DNA, 339 bp, Glycine max
  Clone ID: LIB3050-015-Q1-E1-C10
gacagaagggggagagatgtactgtccaggtcaatcatattcgttgagttgaacacaggggtcaagattctctctcttgggtgatggacatggtatgctgaaactgatgttgtacctgaagctctcagcaaagtcattcaagttggctacacgcatattgactgcactagtgcgtacaagcatcaagcagagattgggtctgctcttaagacacgttttgatgatcgtgtggtgaagcgtgaggacttatggatcacttcgaacatctggtgttcagatcatgcatcataagatgtgccaacagcactgtgtaacacattacaggaattgcagcttgac

SEQ ID NO: 24185 - DNA, 457 bp, Glycine max
  unsure (1)..(457): unsure at all n locations
  Clone ID: LIB3050-016-Q1-E1-C3
gggtccacgcacgcgtccgagcngatgcgaaaaaacacaaaaggggacaaaaaaacaagacaccaaagtttcagtttctccctaacgttgttgttaaatgacagtagatctggtangtgctgccaagatggggatggangagaatatagcgatacaagaagctgcttccgctgggttgaagagtatggagcatctgattcgtgtgcattcttctcaaatcccttcttctgcttcgtcttcttctaacgcacaccaccaccgtcttaatctcaaccaccttgactgcaccgaaatcaccgacttcactgtctccaagttcaaacaagtcatcaacttgttgaatcgcacgggacacgctcgctttcgtagcgcaccttctcatccttctccttccacttctcttccttctcaacctcaacctcaaccacagccacaaccatatgcactgactcttgat

SEQ ID NO: 24186 - DNA, 99 bp, Glycine max
  Clone ID: LIB3050-016-Q1-E1-E6
acctaaatatgaataggagaaactattgcacactgttgcagttatttaatttgcatatcccatgcatgaggccccatcacccccatcccgctccaaaaa

SEQ ID NO: 24187 - DNA, 410 bp, Glycine max
  unsure (1)..(410): unsure at all n locations
  Clone ID: LIB3050-016-Q1-E1-F1
ggcaaaaaaaccaaaaaaaaaagaagaaggaatcaacctaagccaaattgccggtaacggtcaaacaaagtccttaaaaatcgggaaccgcttctcacttgccaaaaacaacaattccctctcaatttcaaaattttcagcttcaaaataataaaaccctaagagagggttgcaagcanaatgagaagcgcanagatgtggacggttttgatgtgtctgatggtgagcttcttcgctcgcattgaatcgctgtctgtgacggtgaacgacgtcgagtgcgtctacgagtacgtgctttacgagggcgacaccgtttcggggaactttgttgtcgtcgaccatgatattttctggagctccgatcaccccggcattgatttcacggtgacatctgctgcggggaatactgt

SEQ ID NO: 24188 - DNA, 391 bp, Glycine max
  Clone ID: LIB3050-016-Q1-E1-G3
ggatttccttaaatttccgtgaatgaattaattttggaatcccgcccaatctgtcggaaccaagcaagcaagcaattcctttggtttggtaaggttccttccctctcgcgcgccctaattcccaaatccctgtatcggtgttccgatggcggaggagaagagggcgccgtcgtccttcgttaaaaaaaggcaaccggcaaatgttcaacggtgaagctctggccaggtgagaacaccatagtttcctggaaaaaactgtttaaaggacgctaacaagcacaacggattcacttcggcgccacaacacgtcgcaatcgctccgggtcaacctgtggaggttgaagaaacagatccttctcagccaaaccgtttcagtgctgtaatagagaag

SEQ ID NO: 24189 - DNA, 357 bp, Glycine max
  unsure (1)..(357): unsure at all n locations
  Clone ID: LIB3050-017-Q1-E1-A1
acgcgtcaaaagacgacagnaagggggaaaaaatgaggaaagttgaagtattatctcaagttagaagaagagagacaacagaaattgcatgatgacgaagaagctcggaaacgtgaagatgctgataggaaaaagaatgaagaagaggaacgcttgcggaaattggacgagatagctgaaaagcagacgcagagagaaagggaacttgaagaaaaagagaaactcacgagagaagcattgttgggtacagctgctgctgaatcagctcctcctgcccgtccattggaatcgggatctgctgctcctgctgcagccgcagctgccgccgcagctccaacatcactgaaatatgtccct

SEQ ID NO: 24190 - DNA, 405 bp, Glycine max
  Clone ID: LIB3050-017-Q1-E1-A9
tacggtcaggaattcccgggctcgaccacgcgtcagaccgctgcgaagaccacagaagggggaaaaagagaatggagaaagaagaagatggcgtccaaccgaacggtgccgttttggaaggcaaccgggaatgcattcatcacatactcaaacaaatgccccaatccggtcaagaaattgcccaaaggaacccaaaaaggttaaaccaaccccccttaaaaaggccaatttggctcccccaaaatgggtcaacgccaaccctgaaaaacctactattcgttcagacaccccagagcagtgatccggaataattggaagctataaatgcataaatctttgagatctggaagttcattgtcattttgaacctttctgtgatgtttaaatcctttgcctccttttttt

SEQ ID NO: 24191 - DNA, 391 bp, Glycine max
  unsure (1)..(391): unsure at all n locations
  Clone ID: LIB3050-017-Q1-E1-G9
cggctcgagccacgcgtcagcccacacgttcgccaaaaaaaaagggatcacaaactaaatactggtttccaaccaaaaatggtaatttggccttccccaaccccaatcgtcaagggtgcttttgcttttgaagaaggaaactcctccaacgttgctccgggaacactctacaaagctctgacaaaagatgctgggactatcaatccaaagattatttggggcatccaaactattgaaatcgttgaaagaaatggaggaccgggnaccgtcaagaagataacagctagtgaaggttgacannnacagtttcgtgctgcanaaagtggatgcaattgacgaggctaacttggtatacgactacagcatantgggaaggacggggttgcatgaa

SEQ ID NO: 24192 - DNA, 398 bp, Glycine max
  Clone ID: LIB3050-018-Q1-E1-H10
agtgaggacacggtcaaatgggaagaaagaagtattgatagagtcgatgataatgaaggatatccacatcagcagttgagtcactcaacatacaatggagtcagaccttttctggtttatactacgaggaatggtagaaaggtctttggtggctaacgttgttagcaaggggtgacgtgtcatataaagaaagcaatccagcacatttgcttcgatgattgaatgaggggaaagagactgatatgggtatggggagattttggctgctagctaagattggatagaaggttgtatcagccttctacaatggctaagcctgtgtcacatcagaggaatatatttccatatctgtaaccttcaaccattaccatataataaagctctctttatgcccgcat

SEQ ID NO: 24193 - DNA, 442 bp, Glycine max
  Clone ID: LIB3050-018-Q1-E1-H11
aattcccggctcgacccaagcgtcagtccaggcgtcagaaggctgctaaatgaggacagaagggcatgtgggtaatggctcatactggcggaccttgacgcgccaagacacgttctgaagccacggcagaggactgtgcgataggtatatgcagttctgacagttccatcgagagccatggtggccgtgagtggaatcaacattgcctttaaccgtgaagcagttggtccagcattgatcccggctttgatgctggcacgggaagggaaattgaggtgggagactatagaagatataaggtgtggaatgtgtgtgaaagttatatgtgatcacataagccttgatgtgagaattgggttaccagatgtttggacaatagattcgagtgatacattacagatctatgaaaaagagtgtgaatgagtgcatttgatggaagatg

SEQ ID NO: 24194 - DNA, 330 bp, Glycine max
  Clone ID: LIB3050-018-Q1-E1-H5
aggcgtcagtgcgagacgacgagagatggggggtgctggtcggtcagtgcttcagcctcaaggctttgctattcctcattattcagatatatccaaagtaagttacgtgcctcaagggaaggatggcgtaactgggatggccctctgcaacactactactagagaagacgtggttgtgaagctcacgacgggaaatgttataccagtagctattggaagtgtcacgtggtggttcatcgatggggactcagatcttgtcaatgtttttcgtggagaaacttcaatcgctcttattcctggcgaaattagttatatcgttctaatcgggct

SEQ ID NO: 24195 - DNA, 141 bp, Glycine max
  Clone ID: LIB3050-019-Q1-K1-C9
tcaataaactacagaatgggaacttgtgctgataaagcatattgccgtaatgttttatatgcacattgcgaaggttgtatttattctagcatcaatattattggcatcaatttagaagttatccctaactaatgtgaattt

SEQ ID NO: 24196 - DNA, 187 bp, Glycine max
  unsure (1)..(187): unsure at all n locations
  Clone ID: LIB3050-019-Q1-K1-D9
acccacgcgtccggcgagaagactacagaatgggagcacagatacgaacaccgtgattcctctcgccgganatgtgttccattttgctgtgcatgcattgcctacgacttctaattctccgacaaagtccctccttccttcaatcgctcgggttcaaaaaggttcaacccagctttaattgctctcc

SEQ ID NO: 24197 - DNA, 329 bp, Glycine max
  Clone ID: LIB3050-019-Q1-K1-G6
taagactacagaatggcctcaaaacaaaacacatcaacaacccgtgcggattctcgtgggtggctgagagcattggcactacggtttcaactacaccgattgggccttcaagactgccccattttacctcaatgatactctagttttcaaatatgatgctccaaatgccaccagtttcccacacagtgtgtacatgttcaaaagttttgggagcttcttgaagtgtgacattaaaaaggctaagatgctatcaaatcccacacaaggttcaggaaaaggcttcaagtttgtgttgaaaaattggcatcctcactacttttcctgttgtg

SEQ ID NO: 24198 - DNA, 93 bp, Glycine max
  Clone ID: LIB3050-019-Q1-K1-G8
cccactcgttctgctctagatgatccaatcttacgtactcgttcatgctacgtcatatctctgggttggtttcacctaaattcggttgagtgt

SEQ ID NO: 24199 - DNA, 405 bp, Glycine max
  unsure (1)..(405): unsure at all n locations
  Clone ID: LIB3050-020-Q1-K1-B4
cgcgtccgcccacgcgtccgaacaccacagaaggggatagatgatatatcctttcttgaagtttctgctagtggctcttccaatgatgtttgaaacttggtgcattattgccatacgttaacatctgattcanaatatggttgtgcatttattgcactcgaccataaggacatttatttgaactgagacaggactgctgctatgttagagatggagttccttgctgacattttggtcaatgctgaaccattggccactggtttggcaaaagatgtgcatgggcagttgatggtgttagataaagaaacacttcttcgacatggaatttcaactcttaaaactcacatttttcactttcatatcaatgaaaatggcattttatgctttaattctgaaacaaaaatt

SEQ ID NO: 24200 - DNA, 138 bp, Glycine max
  Clone ID: LIB3050-021-Q1-K1-B7
aatcccctggccgacccacgcgtacgcccacgcgtacgacgggctggataagactacagaatggggagtgaaagaccacgaacaagaatgttggttgggcgggtgtgaatagattggaacatggaatatcttggtggt

SEQ ID NO: 24201 - DNA, 372 bp, Glycine max
  Clone ID: LIB3050-022-Q1-K1-F12
gggttagaatgttgcttctttcccaggcatcaatgctgatgtaaagcgaccagaatctgtgaagattgatgcacgtgatatcaatggaacaaggttttcagtcaacttgtctgaccttcctgcacgaatatttcagcatgaatttgaccatctacaaggaattcttttctttgagagaatgactgaagaagttcttgatggtatttgtggacagttacaggccctagaaacaaagtacgagggaatgactggactctcaagccctgaaaagatagaaaaccgcatgaagagaaaggtcgctgttggttttgggaaacgatgatcttcaaggtcaatattaggcataatactgaatgcacacttgacagacat

SEQ ID NO: 24202 - DNA, 399 bp, Glycine max
  Clone ID: LIB3050-022-Q1-K1-H6
catcaccaggatgaggacacaagtgtccctgttgagaaagttgaggttgttgaaacagcacgtgctgaggaaaagaaggggttcctcgacaagattaaggagaggctaccagggcacaagaagacagaggaggccacagctactactcctcctccaccaccacctgctgcatcattggagcatggtgaaggtgctcatcatgaaggagaggccaaggagaagaaaggtatattagaaaagataaaagagaagcttcctggttatcactccaagacagaggaggaaaaggaaaaggaaaaggagagtggtgctcattgatatttaagattgagacaaggcttttttgttggttggagatgcatgattgtggtgtgctttggtttcatttcatcatatgac

SEQ ID NO: 24203 - DNA, 352 bp, Glycine max
  Clone ID: LIB3050-023-Q1-K1-C1
ccactcgtccgtactgacgccagaagtttacagttttcggagtcgagagaacgcctgggcactagtctctgtcaaggtctataatcggttcgttcttcattcacgaatgatctggtaggactctttaacgactccatctctgtaggttttcaaactacgatctgggcattaacagtattccatgactagtcccttaccatatgatgatcatgatcataacataagttaattaccgtattaattcactactctattaccaattgaaacgacttttgttgtcaggtcattttcagattcttcattttgtcgatcatcatctatgtgtttcacatcatcattagatattttaatt

SEQ ID NO: 24204 - DNA, 283 bp, Glycine max
  Clone ID: LIB3050-024-Q1-K1-A11
taccggtccggaattcgcggcacgcatcaggcgacccgtcaggcgacgcgatccggacttgctgctacgaagacacagacaggggtggtagtgtggcagcgacacgtatcaacttcaataatcgcatcgcaaaagcagcttccggggcatctgatcgtctcccaaaatgaacgacgcagatgtctcgaagcaaatccagcagatggtgcggttcatcccccaagaaactgaggaaaaagccaacgagatctctgtcttcgccgaagaggaattcaatatcgag

SEQ ID NO: 24205 - DNA, 394 bp, Glycine max
  Clone ID: LIB3050-024-Q1-K1-D11
tgaaggttggaaattttaatccaattaaactttataggattccaattctctccctttgagggatagaaagaatgcaacattaaactttagtaatacttttgatctttctcttagcatctagttctacttgctcttctttcattcaagctttgtgagtgattcttagaagactctacaatgaacgattgggctcctcctttcatagctgcggctttgttttggctcttgagcccgggaatgatctttcagttgccggggaagaatgcaccctttgagtttatgaacatgaagaccactgtggcatccatgtttgtgcacactgttatttatggtttgtttcttatgctgttctttgttgttcttagtatccatctttatatttaagcagcaacat

SEQ ID NO: 24206 - DNA, 410 bp, Glycine max
  Clone ID: LIB3050-024-Q1-K1-E4
taatggccgtgtggttagcaattttgttgcacaggctattcgtaaacaaccattgactgtatatggtgatgggaagcaaacaagaagtttccaacatgtctctgatttggttaatgggctggtggctttgatggaaagcgaacatgtgggacctttcaacctgggtaacccaggggagtttaccatgttagagcttgctcaggttgtcaaagaaacaattgattcaagtgctacaatagaatacaaacccaaatactgctgatgatccacacatgaggaagccagatattagcaaagccaaggaactgctgaactgggagccaaaaatccctctgagagaagggttgcctctcatggttaatgatttccgaaatcgaattctgaatgaaaacgaaggaaaagggatgaaa

SEQ ID NO: 24207 - DNA, 444 bp, Glycine max
  Clone ID: LIB3050-024-Q1-K1-E9
cgggtcgacccacgccttccgcttgcaggaagacgacgaaagggggatggcttttcattagcagcgttaaagaagagagaagaaaaatgcgaaagttcgatccatggcccgttttcttcaagcgcgagtggaaacgcaactggcccttcctcgttggattcgcagtcaccggagctctaatcaccaaactttcccttggccttaccgaggaagatgctaagaattccaaattcgttaaggcgcacacaaggtgatttctgaatcgtgacatatgcctggctttgcactctatgttaggtttgtcaagattactttgcttgtctcgattttatggattgtaataacagaagagagatgctctagatagtctctttaagactgtatcccatgttcttattttcagttttggctgtttacctaaatctggttgaaaaaaaaccacaa

SEQ ID NO: 24208 - DNA, 439 bp, Glycine max
  Clone ID: LIB3050-025-Q1-K1-C12
ccgggtcggcccaagccttccgtccggttgcaagaggccaccagagggggtcaggatctgtgctttgcggtcctctgctttgtcagggctgactgctctgcagctcgataacttcatggaaccatcaactcgttatggcgtgttttctcctatcgacaggtccaagaacgagcggtctggctgtttcattcgctgtcgcaagacggcttgagtgttcgtgccagcaccgaggcgttatattccgaaccccttgtccaatgccgttggtcggtgatgttggggcaaaccatggcagcctacatatcgcattcgcacgctagaatgctttcgcgtgtgggattgtctacttgtcggcacgatgcatgagaaaggagaggtgatgcgctgggttgaacagtaaacgatttgagaagtcggcgtgcttcagatgcagtgtttc

SEQ ID NO: 24209 - DNA, 378 bp, Glycine max
  Clone ID: LIB3050-025-Q1-K1-D7
gcgagaagacgacagcaggggacacattaattcaacagtgcaaagacgatgaggaaattgttgctgttattgcccatgagttgggacactggaagctcaaccatactgtgtacacgtttgttgctatgcagattcttacacttctacaatttggaggatatacactggtgcgaaattcaaccgatctgtatcgaggctttgggtttgatacccagccagtcctcattgggctcatcatatttcagcatactgtaatcccacttcagcaattggtcagctttggtctgaaccttgtcagccgatcatttgaatttcaggctgatggctttgctaagaagcttggatatgcatctggactacgcggtggtcttgtgaaac

SEQ ID NO: 24210 - DNA, 434 bp, Glycine max
  unsure (1)..(434): unsure at all n locations
  Clone ID: LIB3050-025-Q1-K1-G12
cgggtcggcccaagccttcctaccggttgcaagaggccaccggaagggtataggtggaaatttaacctttccctccccaatttctgtccatgttttcatctgcggaaactcctncgttctcaaaaccctaacccgacgccaccattcatccgatccaatgagttcgagaggagccagcgcgctgctatctcgagccagcaggattcgctcgaagcttcaaacggcgctggaagccaccgttttggaggtggacgacgtgtcgtaccagcacgcgggccacgtcgccgtgaagggaagttccgacaaagaaacccacttcaacgtgaagatcgtatcgcccaagttcgagggccagagcctcgtcaaacgacaccgtctcgtctacgacctnctcgccgaggagctccagagcggcctncatgccctctctatcg

SEQ ID NO: 24211 - DNA, 355 bp, Glycine max
  Clone ID: LIB3050-026-Q1-K1-B7
gatggatgagaatcttggcttaaccaaagggtacatcaagaaggcactgaatggtggagatggagacaatgccttctttggcaccaaggtgagccactaccctccatgtccccatccagggcttgtgaagggtctgcgagctcacaccgactcaggaggcgtcatcctactcctccaagatgacaaggttggtggccttcagatgctgaaagatgggcaatggattgatgtgcagcctttgccaaatgccattgtcatcaacactggtgaccagattgaggtcctgagcaatggtagatacaagagttgctggcacagggttctggccacaccagatgggaacagaagatcaatt

SEQ ID NO: 24212 - DNA, 116 bp, Glycine max
  Clone ID: LIB3050-027-Q1-E1-A1
gcgtccaacccgcagcgacgacgacagaaggggagacagtgtggatcccacgatcacgactgatgggagccaacccacattgcacaacgtggagcactgatcaacagcagctttgc

SEQ ID NO: 24213 - DNA, 334 bp, Glycine max
  Clone ID: LIB3050-027-Q1-E1-B10
gatgggagaggttatgcaatatggtatgagatgatgggggttgtgtatagtaataaattaataataccgataatgatgtggttgtggataccaaacaccagtcctcatacgttcaataaataatgatagtagtagtacaattaagaacggaatgacgttagatccacgtccactggttccactacgctacacacaaagcccaagaatatttctacttctacttctactagtcaatttcctcatcgccttcttgtggagagagtgagagttcaccttacaattttcttggtggactcaactttttttttatgtcttcccatgtttaatgaattgt

SEQ ID NO: 24214 - DNA, 368 bp, Glycine max
  Clone ID: LIB3050-027-Q1-E1-E8
gttgtggaaagttgcatacaaatgctactgatggggctggcaattgcaatcgccatgcagatataattaatgaatccaaaaatcttgatgttgcggctaaaattacagccacaaactgtttttaaaacaacgataaccattcataggtttgaacgggtttcgcaagtgaggtgtgaagaaacctagttgtactatttaataagttttattgcatgtgttgcatattttattttctgtcagagcatttgtgcccataacgccttaatttgtcagtgtcaagcaacaatagtgctattctaaacttgttctttggcaaaaaaaaacagggataccaaaaaaaaaaagcggccgctctagaggatccaagc

SEQ ID NO: 24215 - DNA, 51 bp, Glycine max
  Clone ID: LIB3050-027-Q1-E1-F5
aaaaaccccccccgcaccgcaccaaaaaaagcgggcgctctagaggatcca

SEQ ID NO: 24216 - DNA, 378 bp, Glycine max
  Clone ID: LIB3050-028-Q1-E1-B2
gacacaaacacacggtcattggcattttatcgtacccacatagaccttttctataggtctaaaacaatattcccctccaaaggtgccatggtgtcctcaaggtggaaataaggattaaggaaaggtctcctgtaaagaagaagaagctgttcactccccaactattgtcacactcaggtaatctaggttgtgttttgcttaagaaggaccactatatctcaccaaacataaaagatggatgatccaaagggtagttcctcatggttaaaaattctaaatataagtgacatatttggctggaaagatcatggagagtatggagctcttgcagctatagtcataagcattcgtgttcctgtcttgttttcagctttgttc

SEQ ID NO: 24217 - DNA, 576 bp, Glycine max
  Clone ID: LIB3050-019-Q1-K1-B5.F1
gcaaaagatcaaggatgctttattatatatttaggctggggcaagtaattttaactagtagtcatcatattctagcagcacatgcagtagcgagtgatgatatgatgatcaaaagttccaattccaaaggaatggattggtgagaaaaaggatcatcatcatgatgatcagcttcaattaattgttcgtaaccctcaaaaggagtagaatacaataactcacctgaatctgagtgcatcttgtgtagctcagaattatagagatcattatagtcggatccaacagcaggaagcaccacctcattggagaaatcaaagacgttcaagaatgtccaatccatcatgtccccacggtccacttgctccgttccatcacattcgtacatagtagcagaacatgacgaggcagtggtggtgggggtacaattagtagtagtactagtagtactactctctgctatgctgtctgatttacataacaactttgatccaaacgatgaagaattagcaccaccgccaccaccatcactactacgttgaggttgagggtgttcttgaggtttttgtagtagcgggg

SEQ ID NO: 24218 - DNA, 361 bp, Glycine max
  Clone ID: LIB3050-004-Q1-E1-E5.F1
ttttttttttctttctttttttttttttttttttttttttttttttttttttttttttttatttttttttttttttttttttttttttttttttttttttgttttttttttttttttttttttttttttattttttttttttttttttttttttttttttttttttttttttttttttttttttttttttttttttttttttttttttttttttttttttttttttttttttttgtttttttttttcttttttttttttttttttttttttttttttttttttttttttttttttttttttttttttttttttttttttttttttttttttttttttttttttttttttttttttattttt

SEQ ID NO: 24219 - DNA, 480 bp, Glycine max
  Clone ID: LIB3050-004-Q1-E1-E5.F2
gcgagaaaacaacatttaaatttagccataaaatcgaatacaagatatgcataaacaaactttaagaggtaaaattagcacgggatgttggaagctaatatataaaaaaataaaagttttcaccctccaatttgcatcaatctttaacaatttatccatgaaagcgttttgaccaatcgcaacaggaaattctaaaacagaagaggcacaattatgcgttcaacacgaaccaaaatgaactcgttaattctcaaatgcaaatgtctgaagcaaaacagctgtaggcaaatgtcaacatactcagaggtctatctttcacgcatagttcaaccggaatatgtcattcaacacataatagcttccctgtggtgttggtatcaaatggaacatttggctgaacttgagggcgtgttgttcgccggcgagctggaggttgccgctgacaaagacgagcatggcggcgttgacgcctgagggctg

SEQ ID NO: 24220 - DNA, 526 bp, Glycine max
  Clone ID: LIB3050-004-Q1-E1-E5.R2
ggtggtggtgtgcgtgagagtgaagcgagaagcgagaagcgacatggatccagacgcgttggcaaaggcattcgtggagcactactactccaccttcgacaccaaccgcaacaatctcgccaatctctaccaggaaggttccatgctctctttcgagggtcagaagatccagggctcccacaacatcgtcgccaaactcacctcccttcccttccaacagtgccagcactccatcaccaccgtcgattctcagccctcaggcgtcaacgccgccatgctcgtcttcgtcagcggcaacctccagctcgccggcgaacaacacgccctcaagttcagccaaatgttccatttgataccaacaccacagggaagctattatgtgttgaatgacatattccggttgaactatgcgtgaaagatagacctctgagtatgttgacatttgcctacagctgttttgcttcagacatttgcatttgagaattaacgagttcattttggtttcgtgttgaacgcataattgtgc

SEQ ID NO: 24221 - DNA, 617 bp, Glycine max
  Clone ID: LIB3050-008-Q1-E1-F7.F1
tctaacggcgtttttttttttttttttttttttttttttttgtagaggaataattattattattattattaattagtgtttgaaaaaaatggagagatacgataaaagacgggaaaatatagactcaataaaaacaaagaaacaaaaaaggatcatggggaggaagaagagctatgaccagaggccgaccatgggggcaactgggcagaatacaaggaagaaagtgaagtgatgttctgaggaggagaagttagagaagaggaggttgctggtggcagcggcaaagaagattgaagatgatgagaagccatggtattagaagtcagaaacatcctatgatcataaaggttggtacccgagagttgaaatgggtctgttgatgtggaaacagtgaattgaggttgtcggagagtgacattctcggggaagttgagtttggccttgctgcccctaaaacgaaggcagcttcatcgtaggctctagctgctgcctctaccgtctcaaatgttcctaaccatactcttgctgctttgaatgggtctcttatctccgctgcccattttccccacggcctctgcctcacccctctatattttctccttccctcctccttcttt

SEQ ID NO: 24222 - DNA, 490 bp, Glycine max
  Clone ID: LIB3050-008-Q1-E1-F7.F2
gtagaggaataattattattattattattaattagtgtttgaaaaaaaggagagatacgataaaagacgggaaaatatagactcaataaaaacaaagaaacaaaaaaggatcatggggaggaagaagagctatgaccagaggccgaccatgggggcaactgggcagaatacaaggaagaaagtgaagtgatgttctgaggaggagaagttagagaagaggaggttgctggtggcagcggcaaagaagattgaagatgatgagaagccatggtattagaagtcagaaacatcctatgatcataaaggttggtacccgagagttgaaatgggtctgttgatgtggaaacagtgaattgaggttgtcggagagtgacattctcggggaagttgagtttggccttgctgcccctaaaacgaagggcagcttcatcgtaggctctagctgctgcctctaccgtctcaaatgttcctaaccatactcttgctgctt

SEQ ID NO: 24223 - DNA, 498 bp, Glycine max
  unsure (1)..(498): unsure at all n locations
  Clone ID: LIB3050-008-Q1-E1-F7.R1
agaacaagaggaacagagaatgtaaagaaggaggagggaaggagaaaatatagaggggtgaggcagaggccgtggggaaaatgggcagcggagataagagacccattcaaagcagcaagagtatggttaggaacatttgagacggtagaggcagcagctagagcctacgatgaagctgcccttcgttttaggggcagcaaggccaaactcaacttccccgagaatgtcactctccgacaacctcaattcactgtttccacatcaacagacccatttcaactctcgggtacaacctttatgatcataggatgtttctgacttctaataccatggcttctcatcatcttcaatcttctttgccgctgccaccagcaacctcctcttctctaacttctcctcctcagaacatcacttcactttcttccttgtattctgcccagttngccccatggtcgggctctggtcatagctcttcttcctgcccatgaatcttttttg

SEQ ID NO: 24224 - DNA, 366 bp, Glycine max
  Clone ID: LIB3050-008-Q1-E1-F7.R2
agaacaagaggaacagagaatgtaaagaaggaggagggaaggagaaaatatagaggggtgaggcagaggccgtggggaaaatgggcagcggagataagagacccattcaaagcagcaagagtatggttaggaacatttgagacggtagaggcagcagctagagcctacgatgaagctgcccttcgttttaggggcagcaaggccaaactcaacttccccgagaatgtcactctccgacaacctcaattcactgtttccacatcaacagacccatttcaactctcgggtaccaacctttatgatcataggatgtttctgacttctaataccatggcttctcatcatcttcaatcttctttgccgctg

SEQ ID NO: 24225 - DNA, 436 bp, Glycine max
  Clone ID: LIB3050-009-Q1-E1-H5.F1
aataccataatttcctccataaacatcttaatcatctaaagtcatgaatcatgaatgtacgtattggcaagctagtcttgcaattacagataatagaagtataatgttttttttaaaaaaaaatgaagagattatgataatgaaagaagaaaaatacagattccataaacattaaacaaaaagggtcatccgggagaagacgagctgtgaccagaaacctttgaccatggtggcaactggccagaatacaacgaagaaagtgaagtgtcctgagaagttacagaagaaacaaacgcgtaagaagaagacgacaacaacgaaggcgaagattgaagatgtatagaagccatggcattagacgtcacaaagatcctattaccatcataaaggttggtgttggtggggaacccctgagttgaaaatactcggaaacatt

SEQ ID NO: 24226 - DNA, 449 bp, Glycine max
  Clone ID: LIB3050-009-Q1-E1-H5.F2
aataccataatttcctccataaacatcttaatcatctaaagtcatgaatcatgaatgtacgtattggcaagctagtcttgcaattacagataatagaagtataatgttttttttaaaaaaaaatgaagagattatgataatgaaagaagaaaaatacagattccataaacattaaacaaaaaggatcatccggaggaagacgagctgtgaccagaaacctttgaccatggtggcaactggccagaatacaacgaaaaaagtgaagtgtcctgagaagttacagaagaaacaaacgcagaagaagaagacgacaacaacgaagacgaagattgaagatgatgagaagccatggcattagacgtcacaaacatcctattaccatcataaaggttggtgttggtggggaagcccgaaagttgaaaatactcgtaaacattggtcgcagttga

SEQ ID NO: 24227 - DNA, 399 bp, Glycine max
  Clone ID: LIB3050-009-Q1-E1-H5.R1
gggggaaatgggcagcagagataagggacccattcaaagcggcaagagtatggttaggaacatttgacacagcagaggcagcagctagagcatacgatgaagctgctcttcgtttcagaggcaacaaagccaaactcaattttcctgagaatgtcactctccgacaacctcaattcactgtttccaatcctccatcttctcttgtatctattacaacatcaatagacccagttgttcacagtactcgacctctccttcttccttctcaggcttcaactgcgaccaatgtttacgagtattttcaactctcgggctttcccaccaacaccaaccttttatgatggtaataggatgtttttgacgtctaatgccatggctttccatcatcttcaatcttcg

SEQ ID NO: 24228 - DNA, 509 bp, Glycine max
  Clone ID: LIB3050-009-Q1-E1-H5.R2
ccagcgtccgcccacgcgtccgcccacgcgtccgcccacgcgtccggcgagaagagacagaagggggggaaatgggcagcagagataagggacccattcaaagcggcaagagtatggttaggaacatttgacacagcagaggcagcagctagagcatacgatgaagctgctcttcgtttcagaggcaacaaagccaaactcaattttcctgagaatgtcactctccgacaacctcaattcactgtttccaatcctccatcttctcttgtatctattacaacatcaatagacccagttgttcacagtactcgacctctccttcttccttctcaggcttcaactgcgaccaatgtttacgagtattttcaactctcgggcttccccaccaacaccaacctttatgatggtaataggatgtttgtgacgtctaatgccatggcttctcatcatcttcaatcttcgtcttcgttgttggcgtcttcttcttctgcgttttgttcttctgtaac

SEQ ID NO: 24229 - DNA, 557 bp, Glycine max
  Clone ID: LIB3050-011-Q1-E1-A8.F1
gagaattgatgcattaaaataattcaaggaaactgttaatttaacttatgtgtcctatatatacttaaattacatccttcttaaggaacttcttgtatttgactgcaattggaggcctagttgaagatctagggctttacttttatggctctgatttgaagcagggaagtggcaaggcttgaagatgaaaggactattattacttgcattggagaaagtaaacatgcaagtatcttgttgggaattagaagggtgagatgcaagagaataccaactagatttctggtcacaagaaaagttggcatctaaaacatttgaattgaagctaatctgaggttcttcactaagggtgaactcagagttattataggtagaggggtcatagaaccaaggagtatcagaagggtgagcaaaccatgcttggattggaaagggtgttgtaggtagcggtttatggattgaagctgcaacctcttcttcttcattctctctttcttgtgagcattttggtggcctctagggcttgtgagtttgcaaattccttgtaacaatattgg

SEQ ID NO: 24230 - DNA, 478 bp, Glycine max
  Clone ID: LIB3050-011-Q1-E1-A8.F2
gagaattgatgcattaaaataattcaaggaaactgttaatttaacttatgtgtcctatatatacttaaattacatccttcttaaggaacttcttgtatttgactgcaagttgaggcctagttgaagatctagggctttacttttatggctctgatttgaagcagggaagtggcaaggcttgaagatgaaaggactattattacttgcattggagaaagtaaacatgcaagtatcttgttgggaattagaagggtgagatgcaagagaataccaactagatttctggtcacaagaaaagttggcatctaaaacatttgaattgaagctaatctgaggttcttcactaagggtgaactcagagttattataggtagaggggtcatagaaccaaggagtatcagaagggtgagcaaagccatgcttggattggaaagggtgttgtaggtagcggtttatggattgaagctgcaacctcttc

SEQ ID NO: 24231 - DNA, 570 bp, Glycine max
  Clone ID: LIB3050-011-Q1-E1-A8.R1
gactgcatttcccacctcaatattaatatatttctttccccacaagagagatcatggaaaaggatatcattcatctttctccaacatgggatggtgacaatggcaattccactgagaaaaggctcaggctatttggttttgagctaaacccttctaaagatggttatgccaaagaatctggtgaaggagatgaaagtgtgaactcctctaactcagtttcttctggaggagacaaaactgtgcaagagaaaccctctgccaaagactctgatgagagaaagtttgagtgccaatattgttacaaggaatttgcaaactcacaagccctaggaggccaccaaaatgctcacaagaaagagagaatgaagaagaagaggttgcagcttcaatccataaaccgctacctacaacaccctttccaatccaagcatggctttgctcacccttctgatactccttggttctatgacccctctacctataataactctgagttcacccttagtgaagacctcagattagcttcaattcaaatgttttagatgccacttttcttgtgaccagaatcta

SEQ ID NO: 24232 - DNA, 493 bp, Glycine max
  Clone ID: LIB3050-011-Q1-E1-A8.R2
gactgcatttcccacctcaatattaatatatttctttccccacaagagagatcactggaaaaggatatcattcatctttctccaacatgggatggtgacaatggcaattccactgagaaaaggctcaggctatttggttttgagctaaacccttctaaagatggttatgccaaagaatctggtgaaggagatgaaagtgtgaactcctctaactcagtttcttctggaggagacaaaactgtgcaagagaaaccctctgccaaagactctgatgagagaaagtttgagtgccaatattgttacaaggaatttgcaaactcacaagccctaggaggccaccaaaatgctcacaagaaagagagaatgaagaagaagaggttgcagcttcaatccataaaccgctacctacaacaccctttccaatccaagcatggctttgctcacccttctgatactccttggttctatgacccctctacctataataactctg

SEQ ID NO: 24233 - DNA, 529 bp, Glycine max
  Clone ID: LIB3050-011-Q1-E1-F6.F1
ccatcaatagccaaattaaaaataaaaagataaatatatacaatcgtgtaaacacatttgaagttatcattccatagcttgtccactctctcactagtaacacgttatcgtctaagcacaactagaatccaccggaagatacagcatctcatcacatgaacacgtgagccaaatatatgacacacagtaaatgtgtaaataaaatcatccataatccactcctttacatttgattctaaccaatcttcatgacacgttactaattccattttgttaatcacaaatcataatcacatgtcacgtacaaattcatcataaccacatgatcctaatctaatagtagaaatagtttcttccccaaacccaaagaaaaagaaaaattcatagatagagattaaaaaggttatattgaaagattaatgaaaattattaccaggttcagaaaatatcaagaatttccaaaattaaattgttgcagagagggcagttccctctgctcacccaaatctccctcgaacacgttctgcag

SEQ ID NO: 24234 - DNA, 540 bp, Glycine max
  Clone ID: LIB3050-011-Q1-E1-F6.F2
ccatcaatagccaaattaaaaataaaaagataaatatatacaatcgtgtaaaccacatttgaagttatcattccatagcttgtccactctctcactagtaacacgttatcgtctaagcacaactagaatccaccggaagatacagcatctcatcacatgaacacgtgagccaaatatatgacacacagtaaatgtgtaaataaaatcatccataatccactcctttacatttgattctaaccaatcttcatgacacgttactaattccattttgttaatcacaaatcataatcacatgtcacgtacaaattcatcataaccacatgatcctaatctaatagtagaaatagtttcttccccaaacccaaagaaaaagaaaaattcatagatagagattaaaaaggttatattgaaagattaatgaaaattattaccaggttcagaaaatatcaagaatttccaaaattaaattgttgcagagagggcagttccctctgctcacccaaatctccctcgaacacgttctgcaaaacgtgtgcc

SEQ ID NO: 24235 - DNA, 571 bp, Glycine max
  Clone ID: LIB3050-011-Q1-E1-F6.R2
ggtggagtataattgctgcgtgtgcatggtgcggcataaaggcgcggcgtttattccgtgcgggcacacgttctgcagaacgtgttcgagggagatttgggtgagcagagggaactgccctctctgcaacaatttaattttggaaattcttgatattttctgaacctggtaataattttcattaatctttcaatataacctttttaatctctatctatgaatttttctttttctttgggtttggggaagaaactatttctactattagattaggatcatgtggttatgatgaatttgtacgtgacatgtgattatgatttgtgattaacaaaatggaattagtaacgtgtcatgaagattggttagaatcaaatgtaaaggagtggattatggatgattttatttacacatttactgtgtgtcatatatttggctcacgtgttcatgtgatgagatgctgtatcttccggtggattctagttgtgcttagacgataacgtgttactagtgagagagtggacaagctatggaatgataacttcaaatgtggtttacacgattgaatatattt

SEQ ID NO: 24236 - DNA, 568 bp, Glycine max
  Clone ID: LIB3050-012-Q1-E1-B4.F1
gtaacacttagataaaaccattagttcatacaaaatttaatatttctgttgtaaaaaatcatagattttgagggatctaacatcgcccaatatcgtagtttctagcacaacttaaacttttgataagaaccaaacatacataattgacactatatatgtattgtaggcctgtatagacaggcataccatataatttactaagcatccttgaaatgtggtagtcacagacatattacatatcgttgatattccaactggtcaagtcaccgggtgccattcccaaatcaacacactagaccattttacatcttgtagggtgagctttgtattggccatattcatatttaatttgattaaaactttatgtcattaattaaatagtattctattcatttgtaggacgagcatccaaggtggaagaatggcattagcttgggttggagttggggttccttcgttatctccttcacctctgatttgtgaggaggttctaatgtttgatgtcaccagtggttggggaacaagggcagaggaagtcagatccacttcatcaccaagtcgctccagt

SEQ ID NO: 24237 - DNA, 523 bp, Glycine max
  Clone ID: LIB3050-012-Q1-E1-B4.F2
gtaacacttagataaaaccattagttcatacaaaatttaatatttctgttgtaaaaaatcatagattttgagggatctaacatcgcccaatatcgtagtttctagcacaacttaaacttttgataagaaccaaacatacataattgacactatatatgtattggaggcctgtatagacaggccataccatataatttactaagcatccttgaaatgtggtagtcacagacatattacatatcgttgatattccaactggtcaagtcaccgggtgccattcccaaatcaacacactagaccattttacatcttgtagggtgagctttgtattggccatattcatatttaatttgattaaaactttatgtcattaattaaatagtattctattcatttgtaggacgaagcatccaaggtgagaagaatggcattagcttgggttggagttggggttccttcgttatctccttcacctctgatttgtgaggaggttctaatgtttgatgtcaccagtggttgggga

SEQ ID NO: 24238 - DNA, 574 bp, Glycine max
  Clone ID: LIB3050-012-Q1-E1-B4.R1
gggacaagatttggagggcctaagtatcaaagagctttagaattatggagcatcagcttgaaagtgctctcaaacacattagatcacggaagaaccaactgatgtatgaatctatttcagagcttcataaaaaggataaggccctacaagaacaaaacaacactctcgctaagaagataaaggagaaagagaaggcactagcccaacaggcacaactggagcgacttggtgatgaagtggatctgacttcctctgcccttgttccccaaccactggtgacatcaaacattagaacctcctcacaaatcagaggtgaaggagataacgaaggaaccccaactccaacccaagctaatgccattcttccaccttggatgcttcgtcctacaaatgaatagaatactatttaattaatgacataaagttttaatcaaattaaatatgaatatggccaatacaaagctcaccctacaagatgtagaatggtctagtgtgttgatttggcgatggcacccggtgacttgaccagttggaatatcgacgatatgtaatatgtctgtgacaccacatttca

SEQ ID NO: 24239 - DNA, 566 bp, Glycine max
  unsure (1)..(566): unsure at all n locations
  Clone ID: LIB3050-012-Q1-E1-B4.R2
gggacaagatttggagggcctaagtatcaaagagctttagaatttggagcatcagcttgaaagtgctctcaaacacattatgatcacgngaagaaccaactgatgtatgaatctatttcagagcttcataaaaaggataaggccctacaagaacaaaacaacactctcgctaagaagataaaggagaaagagaaggcactagcccaacaggcacaactggagcgacttggtgatgaagtggatctgacttcctctgcccttgttccccaaccactggtgacatcaaacattagaacctcctcacaaatcagaggtgaaggagataacgaaggaaccccaactccaacccaagctaatgccattcttccaccttggatgcttcgtcctacaaatgaatagaatactatttaattaatgacataaagttttaatcaaattaaatatgaatatggccaatacaaagctcaccctacaagatgtaaaatggtctagtgtgttgatttgggaatggcacccggtgacttgaccagttggaatatcaacgatatgtaatatgtctgtgacta

SEQ ID NO: 24240 - DNA, 434 bp, Glycine max
  Clone ID: LIB3050-017-Q1-E1-G2.R1
atttttatccttttttgtttattttttttttttttttttctctttttttcttatttttattttttttttttattattttttttctaatttttttattttttctttcttttttatatttttttttatctttttattatttttttttttttatcctttttttaattcttttttttttctatatttctctctttctttattttttttattttttcttttattttcttttattgttttttttttttctttttttttcttctttttttttttttttatttgtttcttttatttttttattttttttcttttattttattcttttttttttttttttctttattttttattttttttttttttttttatttttttttttttttttttttttttttattttattttttttttttttttttttttttttttttttttttttt

SEQ ID NO: 24241 - DNA, 512 bp, Glycine max
  unsure (1)..(512): unsure at all n locations
  Clone ID: LIB3050-019-Q1-K1-B5.F2
gcaaaaaacaaggatgctttattatatatttaggctggggcaagtaattttaactagtagtcatcatattctagcagcacatgcagtagcgagtgatgatatgatgatcaaaagttccaattccaaaggaatgattggtgagaaaaaggatcatcatcatgatgatcagcttcaattaattgttcgtaaccctcaaaaggagtagaatacaataactcacctgaatctgagtgcatcttgtgtagctcagaattatagagatcattatagtcggatccaacagcaggaagcaccacctcattggagaaatcaaagacgttcaagaatgtccaatccatcatgtccccacggtccacttgctccgttccatcacattcgtacatagtagcagaacatgacgaggcagtggtggtgggggtacaattagtagtagtactagtagtactactctctgctatgctgnctgatttacataacaactttgatccaaacgatgaagaattagcaccacc

SEQ ID NO: 24242 - DNA, 570 bp, Glycine max
  Clone ID: LIB3050-019-Q1-K1-B5.R1
gggtttctgaaatcaggcttcccaatagccgtgaacgaatatggctagggtcttatgactctcctgaaaaggcagcacgagccttcgatgctgcctttactgtctacgtggccgccatgccaatttcaatttccccaacacaccttgcaacatggacactgctaccaatgctcctcctaaccaatctcttaccccaccagagattcaagaggttgctgctaagttcgcaaatcaggtgtccccgctactacaaaaacctcaagaacaacctcaacctcaacgtagtagtgatggtggtggcggtggtgctaattcttcatcgtttggatcaaagttgttatgtaaatcagacagcatagcagagagtagtactactagtactactactaattgtacccccaccaccactgcctcgtcatgttctgctactatgtacgaatgtgatggaacggagcaagtggaccgtggggacatgatggattggacattcttgaacgtctttgatttctccaatgaggtggtgcttcctgctgttggatccgactataatgatctctataattctgagct

SEQ ID NO: 24243 - DNA, 498 bp, Glycine max
  Clone ID: LIB3050-019-Q1-K1-B5.R2
gggtttctgaaatcaggcttcccaatagccgtgaacgaatatggctagggtcttatgactctcctgaaaagcagcacgagccttcgatgctgccctttactgtctacgtggccgccatgccaatttcaatttccccaacacaccttgcaacatggacactgctaccaatgctcctcctaaccaatctcttaccccaccagagattcaagaggttgctgctaagttcgcaaatcaggtgtccccgctactacaaaaacctcaagaacaacctcaacctcaacgtagtagtgatggtggtggcggtggtgctaattcttcatcgtttggatcaaagttgttatgtaaatcagacagcatagcagagagtagtactactagtactactactaattgtacccccaccaccactgcctcgtcatgttctgctactatgtacgaatgtgatggaacggagcaagtggaccgtggggacatgatggattggacattcttgaacgt

SEQ ID NO: 24244 - DNA, 491 bp, Glycine max
  Clone ID: LIB3050-020-Q1-K1-A1.F1
gtcactaagcaactttactgtatttaattgtacacaggcactacataccaatttaggattaaaaagttgaaccttatcttcctaataatccaagttttcattgatggttttccccatcgcaatcaaggagttcctctaacaatttgtcatccaagcactcaaataccacaacttgtttaccaatctcagtgttagatgatgaggacttcttgctaagagaagtcacattgcaaggagggtgttcatctgggaagttgagaatggccgtagcacctctcatctcaaaggcagcacgatcataagctcttgcggcctcctcagcagtgttaaatgtcccgagccacacacgagcaccatgtctagctgaatctctaatttctgcagcaaattttccccatggtctcctacgtactcctctatacttaatttgcgttggttccccttcattgaccttttcctttaaatcctccatttctgtcacacttatgaat

SEQ ID NO: 24245 - DNA, 407 bp, Glycine max
  Clone ID: LIB3050-020-Q1-K1-A1.F2
ggcactaagcaactttactgtatttaattgtacacaggcactacataccaatttaggattaaaaagttgaaccttatcttcctaataatccaagttttcattgatggttttccccatcgcaatcaaggagttcctctaacaatttgtcatccaagcactcaaataccacaacttgtttaccaatctcagtgttagatgatgaggacttcttgctaagagaagtcacattgcaaggagggtgttcatctgggaagttgagaatggccgtagcacctttcatctcaaaggcagcacgatcataagcttttgcggcctcctcagcagtgttaaatgtcccgagccacacacgagcaccatgtctagctgaatctctaatttttgcaacaaattttccccatggtctccta

SEQ ID NO: 24246 - DNA, 472 bp, Glycine max
  unsure (1)..(472): unsure at all n locations
  Clone ID: LIB3050-020-Q1-K1-A1.R2
attcataagtgtgacagaaatggagatttaaaggaaaggtcaatgaaggggaaccaacgcaaattaagtatagaggagtacgtaggagaccatggnggaaaatttgctgcagaaattagagattcagctagacatggtgctcgtgtgtggctcgggacatttaacactgctgaggaggccgcaagagcttatgatcgtgctgcctttgagatgagaggtgctacggccattctcaacttcccagatgaacaccctccttgcaatgtgacttctcttagcaagaagtcctcatcatctaacactgagattggtaaacaagttgtggtatttgagtgcttggatgacaaattgttagaggaactccttgattgcgatnggggaaaaccatcaatgaaaacttggattattaggaagataaggttcaactttttaatcctaaattggtatgtagtgcctgtgtacaattaaatac

SEQ ID NO: 24247 - DNA, 150 bp, Glycine max
  Clone ID: LIB3050-022-Q1-K1-F8.F1
ctatctccttataatttttttttttttttcttttttatctttaatttatcattttttcttctttttatccttatcattttacttttctctcttttcacattctttaatttttttttaatccttatctctcatcctttaaacttccactcc

SEQ ID NO: 24248 - DNA, 495 bp, Glycine max
  Clone ID: LIB3050-022-Q1-K1-F8.F2
ggaaaacaaagaaaggacattatcattagtcattaatggaaaaaaaaacttgcacttaacagaaactttgatttcgatctccttacaagttacaatgaagatacagatttaacatgaaggaaacaatacatcttcgaattaaccataccaatttacattgctctctggtcacactcgaaaaagaaaatgaaaacctgagctctcatcctttaaactgccactccctacggcacatggggcaatgcgcttgtgatgtctgagaattcacccatttcaggatacagtgcagatgaaatgcgtgattgcatacaccccaaatcagtgggcagtcatctccaggaagtttgcagtcaggacaacatccatcaaaggccatcctacaaatcccacaggtttcatcctgggcatcccaagtccatgaagcaacagcatgccattgcaagatgttcactttcatcttggtgcccaacaacagcaaaaagaattagggtttgt

SEQ ID NO: 24249 - DNA, 489 bp, Glycine max
  Clone ID: LIB3050-022-Q1-K1-F8.R1
ggggggggggggggggtggggggggggggggggggggggggggggggggggggggggggggggggggggggggggggggggggggggggggggggggggggggggggggggggggggggggggggggggggggggggggggggggggggggggggggggggggggggggggggggggggggggggggggggggggggggggggggggggggggggggggggggggggggggggggggggggggtggggggtggggggggggggggggggggggggggggggggggggggggggggggggggggggggggggggggggggggggggggggggggggggggggggggggggggggtggggggggggggggggggggggggggggggggggggggggggggggggggggggggggggggggggggggtggggggggggtgggggggggggggggggggggggggggggggggggggggggtgggggggtggg

SEQ ID NO: 24250 - DNA, 497 bp, Glycine max
  Clone ID: LIB3050-022-Q1-K1-F8.R2
gggtctccactacgcattcggacaaaccctaacttctttttgctgttgttgggcaccaagatgaaagtgaacatcttgcaatggcatgctgttgcttcatggacttgggatgcccaggatgaaacctgtgggatttgtaggatggcctttgatggatgttgtcctgactgcaaacttcctggagatgactgcccactgatttggggtgtatgcaatcacgcatttcatctgcactgtatcctgaaatgggtgaattctcagacatcacaagcgcattgccccatgtgccgtagggagtggcagtttaaaggatgagagctcaggttttcattttctttttcgagtgtgaccagagagcaatgtaaattggtatggttaattcgaagatgtattgtttccttcatgttaaatctgtatcttcattgtaacttgtaagggagatcgaaatcaaagtttctgttaagtgcaagtttattttttccattaatgactaatga

SEQ ID NO: 24251 - DNA, 486 bp, Glycine max
  Clone ID: LIB3050-022-Q1-K1-G11.F2
acaaataaaaataaatgaattgaattgaatcaccactgtcaaaagtatactacaatctaaaagctaaaactagcgaataaggcccaagtactatatatgtacaaggacaaattaatcccaaataacttaaaaaaaatataaaaaaacactgaataatttttttggatctatggatcagtattgagggatttcaatcttgggtatggtcaaattgaaacgggacttcttggatggatgaggactggtaacctcgtcatcgacgaaaaaccttgctgagaagtccggaaaagccgggaggttgagatcgaaatcgcggtggcttcctgtgtgagtggaccccactccctcagaggcggttacggcgctgttaccgccttcgtagtgacaacgtttgtgtcctcccaaggcctgtcctgtcgaaaacgtcttgtggcaaatggagcactcgtgggtcctaccaccaccgttcgacgccgaactcgtcgt

SEQ ID NO: 24252 - DNA, 510 bp, Glycine max
  unsure (1)..(510): unsure at all n locations
  Clone ID: LIB3050-022-Q1-K1-G11.R2
gactcaaaattaaccacaagcataagcacaagcacaagcacaagcacttctctaattccctttcacactctattacagatttcacaagtgcttacacttcaaatggctttggaagctcttcaatcacccaccacagccactccatcgtttagtccctttgaagaaaccagtctcagttacttagagacaccgtggacgaaaggaaagcgttctaagcgtagccgcacggagcaacaactgcaacacccttcatgcaccgaggaagagtacctcgctctttgtctcatcatgctcgctcgcggcggcgccggcagtgtctccaccgccaaacccgctgtctccgacaacaattctgcgccgctatccgccgccaaactgagctacaaatgttcggtttgcaacaaagccttctcctcttaccaagcactcggaggacacgaggccagccaccggaagctcgccggagaaaaccacccgacctcctccgncgtgacgacgagttcggcgtcg

SEQ ID NO: 24253 - DNA, 70 bp, Glycine max
  unsure (1)..(70): unsure at all n locations
  Clone ID: LIB3050-023-Q1-K1-F5.F1
gacgtgggatggacgcgtgcgtgagagcttgngatgcgcgagagcggccgctgttttggggtgttttttt

SEQ ID NO: 24254 - DNA, 548 bp, Glycine max
  unsure (1)..(548): unsure at all n locations
  Clone ID: LIB3050-023-Q1-K1-F5.F2
ggattaataaaccatattatttcaactggtatcaacttttaggcacgtgactagtttagtctctaagatttaatatgtacatgaaagtgaggaaaacaatattcattgaacgcatgctcaactttcagcactgtgcattgcagaatgcgtgacggaagggaattgtattttatttcatttggaggtcataagaaagctgttgcaaaaagcacatattgtcgtcatcccacaaactttccaacaagtcaccgccactcccctgttccaacaacatttggttattgaaacctggccacagatccgaccccctttcaatactatggtcggaattcgaaggaagcagtgatgatgaagcgtgtaacacaagtccactttggtttggctccagtgcttgtgatgtgggctgaagccgctccagcaagcgcggcatccaaacgtaacgcaacgtgtctctgaactgtttgctattcacatcgcactttagctgcttcgcttgntttatcactctggtcctccaatagttctttattttcgtggctgttcttcct

SEQ ID NO: 24255 - DNA, 562 bp, Glycine max
  Clone ID: LIB3050-023-Q1-K1-F5.R1
gaagtgaaatcatcaatcccctgtatatataaccactcttcctctcctccaaattaaaacacttatcatggatgttaagaaaggtgggtctgtagtacaagcacaagtgaagttgcagaagcataacgaaaaggagatgggcatgagaaaaggtccatgggcggttgaggaggacaccattctggtcaattacatcgccacacacggtgaaggccactggaattccgtggcacgatgtcgaggcatgcatgcatcttaattataatttaatttctgcatgtgccaagtaataatggtatatatgttaattatgagatttatcaattacaggtctaaggaggagtgggaagagttgcagattaaggtggctaaactacttgcgcccagacgtgcggcgtggaaatatcacactccaagaacaaatattaattctcgaccttcactctcgctggggcaacaggtatggtataaaaatattccactctctctctctctctatatatatattaatttgttttataagggtggatgtacacatatataacatagtatgaatgaatga

SEQ ID NO: 24256 - DNA, 497 bp, Glycine max
  Clone ID: LIB3050-023-Q1-K1-F5.R2
gaagtgaaaccatcaatcccctgtatatataaccactcttcctctcctccaaattaaaacacttatcatggatgttaagaaaggtgggtctgtagtacaagcacaagtgaagttgcagaagcataacgaaaaggagatgggcatgagaaaaggtccatgggcggttgaggaggacaccattctggtcaattacatcgccacacacggtgaaggccactggaattccgtggcacgatgtgcaggcatgcatgcatcttaattataatttaatttctgcatgtgccaagtaataatggtatatatgttaattatgagatttatcaattacaggtctaaggaggagtgggaagagttgcagattaaggtggctaaactacttgcgcccagacgtgcggcgtggaaatatcacactccaagaacaaatattaattctcgaccttcactctcgctggggcaacaggtatggtataaaaatattccactctctctctctctct

SEQ ID NO: 24257 - DNA, 169 bp, Glycine max
  Clone ID: LIB3050-027-Q1-E1-B7.F1
atggattttagaagaaatggtttttgtagaactgaagtatgttagaattgacgtagactaagggagagtacactgatctacttgagaagataatagtgtgcttattgcggggtaaagagcctcaatggtcaaagagaattgtagagagtgaatatttatggggaaaaga

SEQ ID NO: 24258 - DNA, 172 bp, Glycine max
  Clone ID: LIB3050-027-Q1-E1-B7.R1
ggaaaagaaggagaaaatgaaaaagattaaaaaaaaatagaagataaaaaaagataaaataaaaaaatgaaaaaaataaaaaaaaaaaaagaaaaaaaaaaaaaagaaagagaaaaaaaaaaaaaaaataaaaaaaaagggaaaaggaaaaaaagagaagaaaatggaagag

SEQ ID NO: 24259 - DNA, 515 bp, Glycine max
  unsure (1)..(515): unsure at all n locations
  Clone ID: LIB3050-027-Q1-E1-B7.R2
gacgtcctatcgctctcagacttgtgttacaaacaaaaacccttcttcaaaaccttttctctaaaatttcccacaacccatttctactctctactcattccacacccaactcacaaaaaacccattctttcttttgctcactcattttcttaatcatgtgtggcggtgccatcatagccgacttcattccccgccgtggaggccgccgcctcacggcctccgagctctggcctaactccttcggcaaagacggtgactttgacttcgattactcccacatcgccgatcaacaacgttccactctcaaaatgtccccacctcccaaagctagcgagcaagtggagaataagccggtgaagaggcagaggaagaatctctacagagggattcggcaacgtccgtggggaaaatgggccgcggagattcgcgatccaagaaaaggggtntcgtgtctggttgggcaccttcaacactgcagaagaagccgcaagagcctatgatcgtgaagctcgaaa

SEQ ID NO: 24260 - DNA, 231 bp, Glycine max
  unsure (1)..(231): unsure at all n locations
  Clone ID: LIB3050-009-Q1-E1-H5.F3
tgggtctattgatgttgtaatagctacaagagaagatggaggattggaaacgtgaattgaggttgtncgganagtgacattctcaggcaaaattgagtttggctttgttgcctctgaaacgaagagcagcttcatcgtatgctctagctgctgcctctgctgtgtcaaatgttcctaaccatactcttgccgctttgaatgggtcccttatctctgctgcccatttccccc

SEQ ID NO: 24261 - DNA, 122 bp, Glycine max
  Clone ID: LIB3050-009-Q1-E1-H5.R3
ttttttttaaaaaaaaattatacttctattatctgtaattgcaagactagcttgccaatacgtacattcatgattcatgactttagatgattaagatgtttatgcgaggaaattatggtatt

SEQ ID NO: 24262 - DNA, 502 bp, Glycine max
  unsure (1)..(502): unsure at all n locations
  Clone ID: LIB3050-011-Q1-E1-F6.R3
tccgtgcgggcacacgttctgcagacgtgttcgagggagatttgggtgagcagagggaactgccctctctgcaacaatttaattttggaaattcttgatattttctgaacctggtaataattttcattaatctttcaatataacctttttaatctctatctatgaatttttctttttctttgggtttggggaagaactatttctactattagattaggatcatgtggttatgatgaatttgtacgtgacatgtgattatgatttgtgattaacaaaatggaattagtaacgtgtcatgaagattggttagaatcaaatgtaaaggagtggattatggatgattttatttacacatttactgtgtgtcatatatttggctcacgtgttcatgtgatgagatgctgtatcttccggtggattctagttgtgcttagacgataacgtgttactagtgagagagtggacaagctatggaatgataacttnaaatggggnttacacg

SEQ ID NO: 24263 - DNA, 391 bp, Glycine max
  unsure (1)..(391): unsure at all n locations
  Clone ID: LIB3050-020-Q1-K1-A1.R3
aatttgctgcagnaattagngnttcagctagactggtgctcgtgtgtggctcgggacatttaactactgctgaggaggcctgcaggagcttatgatcgtgctgcctttgagatgagaggtgctacggccattctcaacttcccagatgaacaccctccttgcaatgtgacttctcttagcaagaagtcctcatcatctaacactgagattggtaaacaagttgtggtatttgagtgcttggatgacaaattgttagaggaactccttgattgcgatggggaaaaccatcaatgaaaacttggattattaggaagataaggttcaactttttaatcctaaattggtatgtagtgcctgtgtacaattaaatacagtaaagttgcttagtgac

SEQ ID NO: 24264 - DNA, 330 bp, Glycine max
  unsure (1)..(330): unsure at all n locations
  Clone ID: LIB3050-022-Q1-K1-G11.F3
cggtggtagnaactgctnctggcgccgccgcgnagcgagcatgatgagacaaanagcgaggtactcttcctcggtgccatgagggtgttgcagttgttgctccgtgcggctacgcttagaacgctttcctttcgtccacggtgtctctaagtaactgagactggtttcttcaaagggactaaacgatggagtggctgtggtgggtgattgaagagcttccaaagccatttgaagtgtaagcacttgtgaaatctgtaatagagtgtgaaagggaattagagaagtgcttgtgcttgtgcttgtgcttatgcttgtggttaattttgagtc

SEQ ID NO: 24265 - DNA, 263 bp, Glycine max
  Clone ID: LIB3050-022-Q1-K1-G11.R3
tcgtcgatgacgaggttaccagtcctcatccatccaagaagtcccgtttcaatttgaccatacccaagattgaaatccctcaatactgatccatagatccaaaaaaatattcagtgtttttttatatatttttttaagttatttgggattaatttgtccttgtacatatatagtacttgggccttattcgctagttttagcttttagattgtagtatacttttgacagtggtgattcaattcaattcatttatttttatttgt

SEQ ID NO: 24266 - DNA, 456 bp, Glycine max
  Clone ID: LIB3050-023-Q1-K1-F5.R3
ctgttgccccacgagatgaggtcgagaataatatttgttcttggagtgtgatatttccacgccgcacgtctgggcgcaagtagtttagccaccttaatctgcaactcttcccactcctccttagacctgtaattgataaatctcataattaacatatataccattattacttggcacatgcagaaattaaattataattaagatgcatgcatgcctgcacatcgtgccacggaattccagtggccttcaccgtgtgtggcgatgtaattgaccagaatggtgtcctcctcaaccgcccatggaccttttctcatgcccatctccttttcgttatgcttctgcaacttcacttgtgcttgtactacagacccacctttcttaacatccatgataagtgttttaatttggaggagaggaagagtggttatatatacaggggattgatggtttcacttc

SEQ ID NO: 24267 - DNA, 672 bp, Glycine max
  unsure (1)..(672): unsure at all n locations
  Clone ID: LIB3050-022-Q1-K1-G11.F5
ggccttcctgtgtgagtggaccccctccctcanagcggttacggcgctgttaccgccttcgtagtgacaacgtttgtgtcctcccaggcctgtcctgtcgaaaacgtcttgtggcagatggagcactcgtgggtcctaccaccaccgttcgacgccgaactcgtcgtcacggcggaggaggtcgggtggttttctccggcgagcttccggtggctggcctcgtgtcctccgagtgcttggtaagaggagaaggctttgttgcaaaccgaacatttgtagctcagtttggcggcggatagcggcgcagaattgttgtcggagacagcgggtttggcggtggagacactgccggcgccgccgcgagcgagcatgatgagacaaagagcgaggtactcttcctcggtgcatgaagggtgtntgcagttgttgctccgtgcggctacgcttagaacgctttcctttcgtccacggtgtctctaagtaactgagactggtttcttcaaagggactaaacgatggagtggctgtggtgggtgattgaagagcttccaagccatttgaagtgtaagcacttgtgaaatctgtaatagagtgtgaaagggaanttagagaagtgcttgtgcttgtgcttgtgctatgcttgtggntaattttgagtccccttctgtcgtc

SEQ ID NO: 24268 - DNA, 522 bp, Glycine max
  unsure (1)..(522): unsure at all n locations
  Clone ID: LIB3050-022-Q1-K1-G11.R5
tcgccggnanaaaacacccgacctcctccgccgtgacgacgagttcggcgtcgaacggtggtggtaggacccacgagtgctccatctgccacaagacgttttcgacaggacaggccttgggaggacacaaacgttgtcactacgaaggcggtaacagcgccgtaaccgcctctgagggagtggggtccactcacacaggaagccaccgcgatttcgatctcaacctcccggcttttccggacttctcagcaaggttcttcgtcgatgacgaggttaccagtcctcatccatccaagaagtcccgtttcaatttgaccatacccaagattgaaatccctcaatactgatccatagatccaaaaaaattattcagtgtttttttatatatttttttaagttatttgggattaatttgtccttgtacatatatagtacttgggccttattcgctagttttagcttttagattgtagtatacttttgacagtggtgattcaattcaattcatttatttttatttgt

SEQ ID NO: 24269 - DNA, 434 bp, Glycine max
  unsure (1)..(434): unsure at all n locations
  Clone ID: LIB3051-088-Q1-K1-F7
cccacgcgtccggcaatccaaatcgctttgggcaagagaatgctatccaatagggaatcggcacgtagatcgaggatgaggaaacagcagcacctggaaggtctcagtgcccaattggatcagctaaaaaaggagaacacccaaatgaacacaaacataggcatcagcacgcagctgtacctcaacgtggaagctgagaacgcgattctgagggctcaaatggaagaactgagcaagagattgaactctctgaacgaaatgataagtttgattaactccaccaccaccaccaacaactgcttgatgttcgatgaggcacaggagactacgactcagttgttcaatgattgtggcttcatggatgcttgggaatacggaataccactcaatcaacaaatcatggcttacgctgancatgacatngtgatgatgga

SEQ ID NO: 24270 - DNA, 387 bp, Glycine max
  Clone ID: LIB3051-071-Q1-K1-D6
gcttgaaagagtacccaaagcttgatgatagggttccttcctcttcttctctgtcagtgcagatggattggattatggaactgttggagagcaatttggaagcaaagtccaaaatttacaaggaccctgctttgtgttatattttcttgatgaacaatgggaggtacattgttcagaagaccaaagatagtgaattgggaaccctcttgggagaagattggatcagaaaacacgctgcaaaagttaggcaattccatgtgcactatcaaagaagctcgtggaataagctattagggattctgaagttggatagtaatgggtcaatgccccatattaacttggcaaagtcaatgaaggagaaactcaagtcgtttaacacagtttttg

SEQ ID NO: 24271 - DNA, 429 bp, Glycine max
  Clone ID: LIB3051-041-Q1-K1-D6
tgcttatactaactaactcttcttgagatactctttctcacacgccaagagtaacatgggatttccagtggggtacacagagttgatgctgccgaaggtgtttctgcaggtgctatccgtattgggcttgataagaaaactcatcaccgtcctcttgtgctacatgggcttccacgatttcttcgaatccgacattgcgtggccggagagggcgccggaattccagtcggtgtgggcggtgctcataagggaaatcctaccggtggtgaagttctcggagatggagatggagatggcggaggcgccggagagctgcgcggtgtgtctgtacgagttcgagggagaggacgagatcagacggctgacgaactgccgtcacatattccacagagggtgtctggaccgttggatgggatacgatcaaagaac

SEQ ID NO: 24272 - DNA, 395 bp, Glycine max
  Clone ID: LIB3051-017-Q1-E1-C6
agcccacgcgtccgcccacgcgtccgtacggtttctgtgactgtgctccacaaccgagtcgccatggcgtcgcaggagagtatccaatagatgcaggcacggcagaattaccggaatttatggcacaccgatctcatgagatccattcaagccgatactccctattgttgcctcgcgttgtggtgtgcaccatgtgtgtcttaccttcttcgcaaacgagctcactatgatgatatgtcaacgtgcacatgttgtgctggctacatgccttgcagtggcaggtgtggagaacgtaaatgtcctgaattttgcctttgcactgacgttttcctctgctttggaaattcagtcgcctcaactcgctttctagtgcaagatcaatttaacattcaaac

SEQ ID NO: 24273 - DNA, 340 bp, Glycine max
  Clone ID: LIB3051-010-Q1-E1-H3
attaattagggtttttgtgactgtgctccacaaccgagtcgccatggcgtcgcaggagagtatcgaaaagatgcaggcacggcagaattaccggaatttatggcacaccgatctcatgagatccattcaggccgatactccttattgttgcctcgcgttgtggtgtgcaccatgtgtgtcttaccttcttcgcaaacgagctctctatgatgatatgtcaaggtacacatgttgtgctggctacatgccttgcagtggtaggtgtggagaaagtaaatgtcctgaattttgcctttgcactgaggttttcctctgctttggaaattcagtcgcctcaact

SEQ ID NO: 24274 - DNA, 428 bp, Glycine max
  Clone ID: LIB3051-023-Q1-K1-A8
tgataatgtaattactagcttgcctcctcctgatgaagggcctaatttgagcgatcagtcgtcttgaggatcaattggcacttcttggaaaggtgttgagtgctggtgatgatcaagttggattagagcaactagatgaagatgcagatgaaattgcccttcagagtgcccgtcgctctcaaggatccatgagtgcaatgtcaggtgcaaaagggatggtttatatggagtacagtactgtgcgtaaaggccaacaaggacagatcaagagcaagccgaaagatccagcgaagagacatttcttgtttaaaagaagatatggggcaacctaaatgtgccgtctttgtaatggtaccatacgaaaagttatcaagtatgcaggattgatggcttacttgacataacgcttggtgcctttttcttaaaaa

SEQ ID NO: 24275 - DNA, 369 bp, Glycine max
  Clone ID: LIB3051-002-Q1-E1-F10
gcaaggcaccactctgagaagaaacgacgactaaacgtagatcaggtgaaggccttggagaagaacttcgaagtagagaacaaactggaacctgaccgaaaggtgaagctcgcgcaagaactcggcttgcaaccaagacaagttgcggtttggttccaaaaccgccgtgccagatggaaaacaaagcaattggaaagagattacggcgtcctcaaagccaattacggatcacttaaacttaactttgacaccctccaacaagacaacgaagccttactcaaacagataaaggaattgaaatcgaggctggtgcaagaagagaacaacaacaacactgaaagcgatgtttcggtgaaggaagagatgata

SEQ ID NO: 24276 - DNA, 384 bp, Glycine max
  unsure (1)..(384): unsure at all n locations
  Clone ID: LIB3051-015-Q1-E1-E9
aaggactcgacgaagaagggtgcgtggaagaaccagggcaccactctgagaagaaacgacgactaagcgtggatcaggtgaaggctttggagaagaacttcgaagtagagaacaaactcgaacctgaccgaaagttgaagctggcacaagaacttggcttgcaaccaagacaagttgcggtttggttccaaaaccgtcgtgccagatggaagacaaagcaattggaaagagattacggcgtcctcaaagccaattatgaatcacttaaacttaactacgacaccctccaacaagaccacgaagccttactcaaagagatanaggaattgaaatcgaagctggtgcaagaagagaacaacaacaacactgaaagcgatgtttccg

SEQ ID NO: 24277 - DNA, 249 bp, Glycine max
  Clone ID: LIB3051-108-Q1-K1-A3
gaagaaaccaaacgcggccttgaagttgcgagttgcgagttgcagagagagcaatgagtgaggaatcgtttatatatggcttcgtggctcgggggacgatggtgttagccgagtacaccgagttcactggtaatttccctgcaattgcagctcactgtctcgagaaactttcctattacaatatcaagttcacctacaattgcgaccaccataccttcaattgtctcgttcaagatggctacgcttact

SEQ ID NO: 24278 - DNA, 430 bp, Glycine max
  Clone ID: LIB3051-048-Q1-K1-G8
ctaaacctgctggtttcaagtttgaagcttcgagggaaacggctgttgttatcatgaagcatgttaaccttgttgagatcctcatggacgtgaaccaatggtccacagtgttcgctggcatagtctcaagagcaatgactttggaagtgttatcaacaggggtggcagggaattacaacggtgcattgcaagtgatgacagcagaagtgcaagtaccttcacctctggtgccaactcgagagagctattttgtgaggtattgtaagcagcacggtgacgggacttgggcagtagtggacgtgtcattggataatttgcgtcctagtccttctgccagatgtagaagaaggccctcaggttgcttaattcaagaaatgcccaatggctactcaaaggtcatatgggttgagcatgtagaagtggatgacac

SEQ ID NO: 24279 - DNA, 442 bp, Glycine max
  Clone ID: LIB3051-108-Q1-K1-H9
cccactcgtccgcccacgcgtccggtgaattgcaatcagaagaaaataaagtctccaatgagaaaaataagaaaagaaagctgaaaacaccggcgcagcttaaagccttggaggatttttataatgagcacaaataccccacggaggaaatgaaattagtacttgctgaggagttaggattgacagaaaagcaaatatctggatggttttgccacagaaggttaaaagataaaagattgatgaaagatgaagccgttgctaatgggagacaagatcgttcaagtggtgtcatccaagatcgtggcagtggacttgggcaagattcatgcggaagcagtaagcatgctgatcacaggtatctggatccgaaggaggttgagagccatggcctctacaatcacgaattgtcagttgcagatatgacccacagacgtaggaacca

SEQ ID NO: 24280 - DNA, 445 bp, Glycine max
  Clone ID: LIB3051-115-Q1-K1-G8
aagacacatacgaccacgcgattcgaattaatggaactagaaatggtgcccttgggctggtgcatgctgagcttcaagttctttctcccttggttcctgttcgtgaggtcaattttctacgcttttgcaagcagcacgcataggggttatgggcagtggtagatgtgtccatatataccatccgagaaacttctggagcacccacttttgcgaactgtacgaggcttccttctggttgcgtggtgcaagatatgccaaatggttactctaaggtgacatgggtggaacatgcagaatactacgaacgccaaattcaccagctctttagacccttgttgagctcatgcatggggtttggtgcacaacgtttggttaccactcttcaacgccaatgcgagtgcctacccattctaatgtactgagcatctccctctagagaacattc

SEQ ID NO: 24281 - DNA, 421 bp, Glycine max
  unsure (1)..(421): unsure at all n locations
  Clone ID: LIB3051-016-Q1-E1-G10
aacttcaatttattcatctctgacaccctcttaattctgcttccagttcctctgagtgatgggttcaaaacccgtggttgattttgagaatgtaagtgggagcaggatgacggataggcctttctttcaagcgttggagaaggaagagaactgtgatgaggattacgaggggtgtttccaccaaccggggaagaaaaggaggctcacaagcgaacaagttcagttccttgaaaggaactttgaggtagagaacaagcttgaacccgaaaggaaagtccaacttgcaaaagagcttggcttgcagccaaggcaagttgctatatggttccaaaaccgaagggcaaggttcaagaccaagcagctagaanaagactatggcgtgttgaaagctagttatgacagactcaanagtgactatgaa

SEQ ID NO: 24282 - DNA, 429 bp, Glycine max
  Clone ID: LIB3051-115-Q1-K1-G7
cggacgcgtccgcccacgcgtccgaataaatggaactagaaatggtgcccttcagctgatgcatgctgagcttcaagttctttctcccttggttcctgttcgtgaggtcaattttctacgcttttgcaagcagcacgcagaggggttatgggcagtggtagatgtgtccatagataccatccgagaaacttctggagcacccacttttgtgaactgtaagaggcttccttctggttgcgtggtgcaagatatgccaaatggttactctaaggtgacatgggtggaacatgcagaatacgacgaaagccaaattcaccagctctttagaccctcgttgagctcaagcatggggtttggtgcacaacgttgggttaccactcttcaagccaatgcgagtgcctagccattctaatgtcctcagcagctccc

SEQ ID NO: 24283 - DNA, 396 bp, Glycine max
  Clone ID: LIB3051-100-Q1-K1-D12
ttcaggagcttagagcactgaaactttccccacagttttacatgcaaatgggcccacccgggacgctcaccatgtgcccctcttgcgagcgtgtggctgttccgtcctccgccgtcgatgctgccacgcgtcatcatcccatggcccaagcccatgcccatgcccagattcagcacaagcccattggcccgtgggctttcgactctcccattacgcaccggccgtttgatgtcttccaccactgatcttgaaggtgttttggtcattgggaaattattattatttactattctgggcctacttgtaccaacctgtaagtgtgtaaccccaaaaggggaagaaaattgggggaaacagaaagaatgaaggaaccgtcgaaacaacctgctttggaat

SEQ ID NO: 24284 - DNA, 429 bp, Glycine max
  unsure (1)..(429): unsure at all n locations
  Clone ID: LIB3051-044-Q1-K1-G5
cccacgcgtccgcccacgcgtccgtccacgcgtccgctcgaacctgaccgaaagttgaagctggcacaagaacttggcttgcaaccaagacaagttgcggtttggttccaaaaccgtcgtgccagatggaagacaaagcaattggaaagagattacggcgtcctcaaagccaattatgaatcacttaaacttaactacgacaccctccaacaagaccacgaagccttactcaaagagataaaggaattgaaatcgaggctggtgcaagaagagaacaacaacaacactgaaagcgatgtttcggtgaaggaagagatgctgaccaccacgctctgtgaaaccgncattcctggatcgtacacgaaggatttgagttacgagtggtttaaacaggagtgataagggtggaggggtttcttctgtgttcca

SEQ ID NO: 24285 - DNA, 288 bp, Glycine max
  Clone ID: LIB3051-035-Q1-K1-B8
cccacgcgtccgcttttgttccccacagcagattcagcaaggccattttcaatgcttggccttggtgatattgttatccctggtatttttgtagcattggctttgcgatttgatgtatctagaggaaaacagccccagtatttcaagagtgcatttgtaggatacactgttggcttggtccttacaattgttgtgatgaactggtttcaggctgcacagcctggtcttttggatattgtaccttctggaattggatttttggctgctcattggttatggaatggtgat

SEQ ID NO: 24286 - DNA, 403 bp, Glycine max
  Clone ID: LIB3051-107-Q1-K1-C1
gcggtgaagtgtgtgatgcactctatccttctttctcttgaacccataattccatgactcggggtgggtcccactgcagcaacaacggccacaattcccggacatgcccttcgcgtgggggcggatgtgtgaagcttttcggggtcaggctgacggatggatcaatcattaagaagagcgccagcatgggcaacctaaacctctactccgccggcgcacatcaccaattccattcatatgcttcttcttccaacctcgccggcgacccctcatcccccaatccaagctccccatgctacgacccttcccaaggttacttgatcgatgaccccgcccatgtctacaccttcgctaaccgccgcagtgatagaaaaaaaggtgttccatggactggaaaagaaca

SEQ ID NO: 24287 - DNA, 265 bp, Glycine max
  unsure (1)..(265): unsure at all n locations
  Clone ID: LIB3051-002-Q1-E1-D7
aaagagggttagagaaataaaaagagaaagccgacagcacatagatagagagaggaaaacgacttaatattctttttccttgagacctgaaggggctaaggaaaattagaaggacacacaagtataaaggcggtgaaataaaagagaaagacaagaagaagacatgggaagacaccttgttgtgacaaagaaggggtcaagaaagggccttggactcctgaagaagacatcatattggtgtcntatattcaggaacatggtcctg

SEQ ID NO: 24288 - DNA, 433 bp, Glycine max
  unsure (1)..(433): unsure at all n locations
  Clone ID: LIB3051-039-Q1-K1-G12
cggacgcgtgggagaaataaaaagagaaagccgacagcacatagatagagagaggaaaacgacttaatattctttttccttgagacctgaaggggctaaggaaaattagaaggacacacaagtataaaggcggtgaaataaaagagaaagacaagaagaagacatgggaagaccaccttgttgtgacaaagaaggggtcaagaaagggccttggactcctgaagaagacatcatattggtgtcttatattcaggaacatggtcctggaaattggagggcagttcctgccaaaacagggttgtcaagatgcagcaagagttgcagacttagatggactaattacctgaggccaggaatcaaacggngcaacttcacagaacaagaggagaagatgataatccatcttcaagatcttttaggaaacagatgggct

SEQ ID NO: 24289 - DNA, 450 bp, Glycine max
  unsure (1)..(450): unsure at all n locations
  Clone ID: LIB3051-084-Q1-K1-A12
cccacgcgtccgtagagaaataaaaagagaaagccgacagcacatagatagagagaggaaaacgacttaatattctttttccttgagacctgaaggggctaaggaaaattagaaggacacacaagtataaaggcggtgaaataaaagagaaagacaagaagaagacatgggaagaccaccttgttgtgacaaagaaggggtcaagaaagggccttggactcctgaagaagacatcatattggtgtcttatattcaggaacatggtcctggaaattggagggcagttcctgccaaaacagggttgtcaagatgcagcaagagttgcagacttagatggactaattacctgaggccaggaatcaaacggngcaacttcacagaacangaggagaagatgataatccatcttcaagatcttttaggaaacagatgggctgcaatagcttcata

SEQ ID NO: 24290 - DNA, 445 bp, Glycine max
  Clone ID: LIB3051-047-Q1-K1-D7
ggagatgtaaaagtgattctggcaaccaacagaattgaaagtcttgatccagctttgctacggcctggtcgaattgacaggaagatagaatttcctcttcctgatatcaaaacaaggagacgcatctttcagatacacacatcgaggatgacattagctgatgatgtcaacttggaagaatttgttatgactaaagatgaattctctggagctgatataaaggcaatatgtactgaagccggtttacttgctctacgagaacgccgaatgaaggtgactcatgccgactttaagaaggccaaggataaagtgatgtttaagaagaaagaaggggtgcctgaagggctgtatatgtgaaatactatcctctatcatcctcgctcctcctgtctttttttcaatgttctagttatgcgaacaaatgataattcatttggattatgcg

SEQ ID NO: 24291 - DNA, 431 bp, Glycine max
  unsure (1)..(431): unsure at all n locations
  Clone ID: LIB3051-018-Q1-E1-G6
acgtcagcatggatcggataaaagggccatggagtcctgaagaggacgaagcgttacggaggttggttcagacttacggccctaggaactggtccgttataagcaaatccattccgggtcggtctgggaaatcgtgccgcttgcggtggtgcaacgagctgtctccggaggtggatcgccggcctttcacggcggaggaagacgatgcgatcctgaaggctcacgccaggttcgggaacaagtgggccaccatcgcgcgcttcctcaatggccgcaccgacaacgccatcaagaaccattggaattccaccctcaagaggaattgctccgagcctctctccgagcctcggcctctgaagagatccgccaccgtctcgggtagtcaatccggatccgatttgagcgaatcgggtttacccattantcttgca

SEQ ID NO: 24292 - DNA, 396 bp, Glycine max
  Clone ID: LIB3051-064-Q1-K1-H3
attatattctctcactctcttactctttcactctacttctctctcctattgcggctagggtttaggtgtttctttcaccgtctccgttccttcaatcttcttattctctttcatctctgatggagacgttgcgggtttagttctaaggggtggttctggccttgggtttttggaacgtacggtgtcgttttggggttgggaaaacaaattctgagagatggcaaccacgaacccttttgatttgttgggtgacgacgctgaggacccttctcagctcatcgccgccgagcaactcaaggcggcggctgcggcctcggctgccacctgggctcccaagaaggcgccggctcagcataacaagccggctcagctccctaccaagccgtcttcttcggc

SEQ ID NO: 24293 - DNA, 407 bp, Glycine max
  Clone ID: LIB3051-067-Q1-K1-C1
caattccatttgctctctggaccgagtcaggcggcggcgaatcggcatgactcggcgctgctgccagggcaccaacaacggccacaactcccggacatgcccgtcgcggggagggggcggcgtcaagctgttcggggtgaggctgacggatggatcaatcataaagaagagcgctagcatggggaaccttaacctctcctccttctcctcctccgccgccgccgcacatctgcaattccgttcatctccttcttcttccaacctccccgcggcctcatcgcccaatccaagctccccgtgctccgacccgccccaaggctacttgtccgatgaccccgcccacgtctccaccttcgctaaccgccgcggtgatagaaaaaaaggtgtgccatggactgaagaaaaca

SEQ ID NO: 24294 - DNA, 348 bp, Glycine max
  unsure (1)..(348): unsure at all n locations
  Clone ID: LIB3051-079-Q1-K1-B11
cccactcgttcgcccactcgtccggggaggagaaaagtggaaagaagacaaagatgacggcgagtgcttcgagccgggctgtttgtcangtggaagattgtagggctgatcttagtaatgcgaaggattaccatcgccgtcacaaagtttgtgatatgcattctaaggctacccaggcactagttggaaatgttatgcagagattctgtcaacagtgtagcaggtttcatgttcttcaagaatttgatgaatggaagagaagctgtcgtaggcgtctggcatgccacaataaaaggaggaggaaaacacttcctgatgcaactgtagttaatggatgctctctgaatg

SEQ ID NO: 24295 - DNA, 449 bp, Glycine max
  Clone ID: LIB3051-008-Q1-E1-A6
agaaaattgatacggattcctgggaatttgccaatgaacactttgttaggggtcaaaagcatttgttgaagaatatacatacaaggaaacatccacacagtgcagatcagcaaaaggcattgccacagcaagacaattgtgatgaaccatcccaagaagcaccaaatcatggcctttggaaagaagttgagaatctaaaacttgataaaaattcgctcacacaggaattggtcaaacttaggcaacatcaggaatctgctgagagtaagttgctgctcctgagtgatcgccttcaaggaatggaaaagcatcagcagcagatgttgtcattcttagtcatggttgtgcaaagccctgtgttcatggttcagcttcttcatcctaatgaaaataattggcgtctggctgaatcatggaatagattggatcaagatacacaagatgacaag

SEQ ID NO: 24296 - DNA, 474 bp, Glycine max
  Clone ID: LIB3051-083-Q1-K1-E1
tcgtccacgcgtccggatcttcgcaatctcagaagtccctggtgggtactggctgggccatcgtaagctgtgagctatgtcaaattcttggactctgaaacacttgtttctgcttctactgataatacattgaagatctgggatctcaataaaacctctcctgtgggtgcatccattaatgcttgcagcctaactctgtcaggacatactaatgagaagaattttgtgggtctatcggtggctgatggatatattgcatgcggttcagaaacaaatgagatttacacctactatagatcgcttcccatgccaatcacttcacacaaatttgggtccattgatcccatttctggtaaagacactgatgatgacaatggtcagtttgtttcaagtgtatgctggagagggaaatcagacatgcttattgcggccaattcaagtgggtgtgtaaaagtgttacagatggtttaagga

SEQ ID NO: 24297 - DNA, 431 bp, Glycine max
  Clone ID: LIB3051-059-Q1-K2-E10
gaaatatggggagagtgaagcttccgatcaaaaagattgagaacacaaccaataggcaagtcactttctccaagaggaggaatggactcatcaagaaagcttacgaactttctgttctttgtgatgttgatgtggctctcatcatgttttccccatcaggaagagccactttcttctctggcaacaaaagcattgaagaaattctagaacgatatgttaatctttcggagggtgaacacggaaggatgcataataaagagcacattcaaaagttgcttagtaagttgaaagatgaagctggtcaaatatgtcaagcccctagctcaatgacttcagattcccaaattgaggatcttcgaagagaaattttcacttgcaagtctcaattggaagagatggagaagcgactaaggatatttgaaggtgatcct

SEQ ID NO: 24298 - DNA, 427 bp, Glycine max
  Clone ID: LIB3051-045-Q1-K1-E8
ctaagtcccaaaacacacataaattgagcacattagagattaggttagtgtgacactcgcctcaccctctctctgtctctcccctgcggctagggttttgtctttcactcactctcttctctttcttttcttctcattccccttctctttcgatctgaacaataataattaaccatggaaccgtcgctgagttaacctttttcttctgcgcggtgctgttctcttttgttgtttgggttttttttttctttctgagaagggcttgttgttgttgtgtttcgaaataatggcgactacgaatccctttgatttgttgggcgacgacgccgaagacccctcacagttgatcgcggcggagcaactgaaggccgcggcagccgcggccaccgcgccacccaagaaggaccaggccaagcccggagctcgc

SEQ ID NO: 24299 - DNA, 404 bp, Glycine max
  unsure (1)..(404): unsure at all n locations
  Clone ID: LIB3051-030-Q1-K1-H12
cctcgtactgtaaaggaaatttgctctgttgccaatggggccacaaagaaggaaattggccgagctaaagaatacatagtaaaacaactgggtttggagaacggtaatgctgtggagatgggtacaatacatgcatgggacttcatgaggcgattctggtctaatcttcgtatgaataatcaagctgttaaagctgctcaggaagctgtgcataaatcagaagaatttgatataaggaggagtcccatttcaattgctgcagcagttatatacatcataactcagctttctgatgataagaaacctctcaaagatatatcacttgccacaggcgttgcagaaggaacgattaggaactcctacaaggatctttatccccatgtntccaaaataataccaaattg

SEQ ID NO: 24300 - DNA, 370 bp, Glycine max
  Clone ID: LIB3051-061-Q1-K1-D12
caaaactcatcatcaggaatgaggcctccaactctcaacattttcccctctaagcctgggcatgtagagccatcatcatccaaggccaaggctaacatagagctagtttctccacaaacaagtggatcaaagaggccatcagagccgtcgatggagttggccaaccctcgaaacgaaactgcttctgcccctcagccacccaaacctgtcaagcgagagagcaaccgcaaaggtccaacgtcaagttctgaacatgaaggacctaaaacaccagatcctaagacactcagaagacttgctcaaaataaagaggcagctaggaaaagcaagcttaggaaaaaggcatatgttcaacaactagagtcgagta

SEQ ID NO: 24301 - DNA, 374 bp, Glycine max
  Clone ID: LIB3051-005-Q1-E1-G9
aagaatttgaacccatggagactacttctcaagaaaatgcgcaacagaccaatgaaactatgatgggatcaatcggactgacaccaatggctcctcatggattctttcctgcatatttacctgttccatttcccatgtggccatcaactgtggctcccccgtttgaagaagttaagggaggagagacatcccaccatcagatccacaagccaatcccagtcattcccaaggaacctgttaatgttgacgaacttgtgggaatgtctcatctaagcattggggaagcaaaggtacgtgatagagagccttcccctctttccttaaagttgttaggagagccctcaaggcagtcagcattccatgcaaatgctcca

SEQ ID NO: 24302 - DNA, 444 bp, Glycine max
  Clone ID: LIB3051-042-Q1-K1-C7
gctatttccagagaaagggtcaagctcagggaagctgtgatttttctggtgctgccacccctagtcaaacaccacccactgcagcatctacatgtgtttacccctctagtcctagcaatgctggaacaggcaccacagcaactccaacaaccactacaccaacaacaggcacaccacccaccaccttaactccaaccacccccactactaccactccaggcacaaccaccggtaccagcccaaccactggcactggtaccggcaccggcaccggcaccaccataggttaccctaatgtgtttggaatgagtccaacatcttcaactggaacaggatgaggcttcaatgacccaaacaaaggagtggttcatttgcaagacattatcatgttgctagagtcccctggtatcacacttttgctaggaatgtttagggtctaataat

SEQ ID NO: 24303 - DNA, 384 bp, Glycine max
  Clone ID: LIB3051-072-Q1-K1-D1
gggaagttctatcttttggatccacatgcttaacttaactggatcacattggctatgttaaagatgggctgcaatagctttataccttccacagagaacagacaatgacataaagaactattggaacacccatttgagaaagaagctgaagaagatgcaagtaggttgtgaaagtggtagctttggagaaaggttttcagcctcaaggcaaatccctagaggccagtgggaaagaaggctccaaactgatatcccaatggcaaacagagccctcagtgaagctctttcaccagagaagccatcttgtaatttatctggcataaactcaaacccttcagatatgttcagcttcatctttttcacaaaaccaacttctacacaaac

SEQ ID NO: 24304 - DNA, 439 bp, Glycine max
  Clone ID: LIB3051-003-Q1-E1-G12
gagatgaattgcctaagcttcctccttcgcagaaccgatttggtcaacactcgcctagcagttcaatagatggtaagacatctgaaacaagcatggagtttggaaatggtgaattcagctcagaggagctaaagaaaataaaggagaacgataaacttgctgaaattgccatggctgatcctaagcgtgcaaaaaggattttggctaatcgtctatcagctgctcgctcaaaagagaggaagatgcggtacatttctgaattagagctcaaagttcaaacacttcagactgagacaaccacattgtctactcagtttaccaaattacagatgaataattcagagcttaaaagtgagaataatgagtacaaattaaggattcaagccttggaacagcagtcccaactgaaagatgctctgaatgagaacttggatgctga

SEQ ID NO: 24305 - DNA, 429 bp, Glycine max
  Clone ID: LIB3051-038-Q1-K1-E12
cccacgcgtccgcccacgcgtccgcccacgcgtccgcccacgcgtccgcacgttaaaaaaaaaaaaaaccaaaagcatgggtcagggaacaccgggcggtctgaaccggcagggtcttccgggggaccggaagccggacggcggcgacaagaaggagaaaaagttcgagccggcggccccgccggcccgcgtggggcgtaagcagcggaagcagaaggggccggaggcggcggcgcggctgccgacggtgacgccgctgtcgaagtgcaagctgcggctgctgaagctggagcgcataaaggactacctcttgatggaggaggagtttgtggcgaaccaggagaggctgaaaccacaggaggagaaggccgaggaagatagatccaaggtcgatgatctcagaggttcccctatgagcgttggtaacct

SEQ ID NO: 24306 - DNA, 425 bp, Glycine max
  Clone ID: LIB3051-025-Q1-K1-F6
cttctctaactttcgcatattcgaaaaccaaaagcatgggtcagggaacaccgggcggtctgaaccggcagggtcttccgggggaccggaagccggacggcggcgacaagaaggagaagaagttcgagccggcggcgccgccggcccgcgtgggccgtaagcagcgtaagcagaagggcccggaggcggcggcgcggctgccgacggtgacgccgctgtcgaagtgcaagctaaggctgctgaagctggagcgcataaaggactacctcttgatggaggaggagttcgtggcgaaccaggagaggctgaagccgcaggaggagaaggccgaggaagacagatccaaggtcgatgatctccgaggttctcctatgagcgttggtaacctagaggaactcattgacgagagtcatgccataggttcg

SEQ ID NO: 24307 - DNA, 439 bp, Glycine max
  Clone ID: LIB3051-027-Q1-K1-D8
gataactcaatgtataacattcccactgtacctagtgactacccgtctgctggaaatgagcctggtgcaaataacgagataaaaggtggaaggcctggtccatacatgcaacctcctccttcaacgtggacgaaccagaaccagaaccaaagggctccacttgacgtcaatgttgcttacgtggaagggcgggatgaggcggaaagaggagcttcaaatcaacctctgacacaggacttcttcatgtcctcggggaagcggaaacgtgatgaaattgcttctcaatataatgctggtggatatatacctcagcaagatggagctggagatgctgcttctcaaatttttgaaattgaagtgtatggagggggcatgtccattgatgcaggtcactctacttctaaaggaaaaatgccagcacaatcagacaggccagctt

SEQ ID NO: 24308 - DNA, 438 bp, Glycine max
  Clone ID: LIB3051-088-Q1-K1-D2
cccacgcgtccgcggacgcgtggggcaggaccctcctgaagatgctgttgtttcagtttgtggtcatgttttttgtaaccagtgcatttgtgaatatcttactggtgatgacaatcagtgccctgctccaaactgcaaaactcgactaagcacgccttcagtgttttccaaagtcacactgaatagttctttttctgatcagccttgtgataatttgcctgattactctggttgtgaagtggaggaatctgagttttgttctcaggctcagccatatgattcttcaaaaattaaggctgcacttgaggtgttgcagtcgttgtctaaaccacaatgctttgcttcccaaaacaattctgtgcagagcacttctggggaaagtaccgatggccttggtagctcctctagtgctgacagaatgaaatccttgaatgaaat

SEQ ID NO: 24309 - DNA, 435 bp, Glycine max
  Clone ID: LIB3051-034-Q1-K1-A12
atttgctcccagtacagagcttaaccgagcttcacaaagatgaatcgggaaaagttggtgaagatggccggttcggttagaactgggggaaagggtaccatgagaagaaagaagaaggctgtccacaagacaacaaccacagatgacaaaaggcttcagagcaccctgaagagaataggggtgaatgccatcccggctattgaggaggtcaatatctttaaggatgacgtagttatccagtttctaaatcccaaagttcaagcatccattgctgctaatacttgggttgtcagtggttctccacaaacaaagaagttgcaagatatactccctagcattatccaccaattaggaccagataacttagaaaacctgaagaagctagccgagcaattccagaagcaggctcctgaaagagccgtcggttcaaccaca

SEQ ID NO: 24310 - DNA, 345 bp, Glycine max
  Clone ID: LIB3051-093-Q1-K1-D1
tgttaccatttgctcccagtacagagcttaaccgagcttcacaaagatgaatcgggaaaagttgatgaagatggccggttcggttagaactgggggaaagggtaccatgagaagaaagaagaaggctgtccacaagacaacaaccacagatgacaaaaggcttcagagcaccctgaagagaataggggtgaatgccatcccggctattgaggaggtcaatatctttaaggatgacgtagttatccagtttctaaatcccaaagttcaagcatccattgctgctaatacttgggttgtcagtggttctccacaaaccaagaagttgcaagatatactccctagcat

SEQ ID NO: 24311 - DNA, 402 bp, Glycine max
  Clone ID: LIB3051-008-Q1-E1-F9
aattaacatttgctcccagcactgagcttaaccgagcttcacaaagatgaatcgggaaaaattgatgaagatggccggttcggttagaactgggggaaagggcaccgtgagaagaaagaagaaggctgtccacaagacaacaaccacagatgacaaaaggcttcagagcaccctgaagagaataggggtgaatgccatcccggctattgaggaggtcaatatctttaaggatgacgtagttatccagtttctaaatcccaaagttcaagcatccattgctgctaatacttgggttgtcagtggttctccacaaacaaagaagttgcaggatatactccctagcattatccaccaattaggaccagataacttggaaaacctgaagaagctggccgagcaatt

SEQ ID NO: 24312 - DNA, 413 bp, Glycine max
  Clone ID: LIB3051-041-Q1-K1-E7
gcagggcgaccggaagccggacggcggcgacaagaaggagaagaagttcgagccggcggcgccgccagcacgcgtggggcggaaacagcggaagcagaagggcccggaggcggcggcgcggctgccgacggtgactccggtgacgaagtgcaagctgcggctgctgaagctggagcggatcaaggactacctactgatggaggaagagttcgtggcgaatcaggagcgactcaagccgcaggaggagaaggccgaggaagacagatccaaggtcgacgatctccgaggctctcccatgagcgtcggaaatctcgaagagctcatcgacgaaaatcacgctattgtttcctcctccgtcgggcctgagtattacgtcggaatcttgtctttcgtcgataaggatcaattggagc

SEQ ID NO: 24313 - DNA, 315 bp, Glycine max
  unsure (1)..(315): unsure at all n locations
  Clone ID: LIB3051-050-Q1-K1-C1
atcaggagcgactcaagccgcaggatgagaaggccgaggaagacagatccaaggtcgatgatctccgaggctctcccatgagcgtcggaaacctcgaagagctcatcgacgagaatcacgctattgtctcctnctccgttgggcctgagtactatgtcggaatcctgtctttcgttgataaggatcagttggagcctggttgtgctattttgatgcataataaggttctttctggtgttgggcttcttcaagatgaagttgatccaatggtctctgtcatgaaagttgagaaggcctctctggaatcttatgctg

SEQ ID NO: 24314 - DNA, 435 bp, Glycine max
  Clone ID: LIB3051-020-Q1-E1-G2
cacgcgtccaacagcttttgttctagcacttcgctgtctgaggttctggattctcagtgtttgcggagcgcagcgtcatcttttagggaagaatggatcatcaagggcatagccagaacccatctatgggggttgttggtagtggagctcaattagcatatggttctaacccatatcagccaggccaaataactgggccaccggggtctgttgtgacatcagttgggaccattcaatccaccggtcaacctgctggagctcagcttggacagcatcaacttgcttatcagcatattcatcagcaacaacagcaccagcttcagcaacagctccaacaattttggtcaagccagtaccaagaaattgagaaggttactgattttaagaaccacagtcttcccctggcaaggatcaagaagattatgaacgctgacg

SEQ ID NO: 24315 - DNA, 358 bp, Glycine max
  Clone ID: LIB3051-101-Q1-K1-G3
cccacgcgtccgcccacgcgtccgcccacgcgtccgcccacgcgtccgctcaagtggccagccatgctcagaaatatttcatcaggcaaagcaatgtgtccaggcgaaaaagacggtccagcttgtttgatattgttgcagatgaagcagctgacactgcaatggtacagcaagacttcttgtctgctaatgagttaccaactgaaacagaaggcaataaccccttgcctgctcctccttccctcgatgaagagtggtgaatcaatgggattcacaaactcaaatgatggagagcctgccccatcaaagccagaaaacacacatccatcttatcctatgttatatcctgcgtattatt

SEQ ID NO: 24316 - DNA, 415 bp, Glycine max
  Clone ID: LIB3051-115-Q1-K1-C4
cccacgcgtccgtccacgcgtccgcccacgcgttcgcccacgcgttcgaaagaactaggtaggtggagtctgagaactctagcatgtactagtactactcctacattcctccatcttcctttgtactattttttttttaaccataaaagcaagagcacaaagatggtgagagctccttgttgtgaaaagatgggtttgaagaagggtccttgggctcccgaggaagatcaaatcctcacatcttacattgacaaacatggtcatggcaattggcgtgccctcccaaagcaagcaggcttgttaaggtgtgggaaaagctgtagactccgctggattaactatttgaggcctgatattaaaagagggaatttcacaattgaagaagaagaaactatcattaagctgcatgacatgc

SEQ ID NO: 24317 - DNA, 443 bp, Glycine max
  Clone ID: LIB3051-115-Q1-K1-G1
cccacgcgtccgcagtgctctgtcttctcccccaccaccgcactctctcagatattatgatttgatatcacacattcacatcctatcatcatcgacaacacgctatccccattgcttcttctcttctccctctctcgtttcctacttgacggcgccgtttcgttctccagaagatgcttctgagtacttcgcgctgcaactagacatgatgagttcaagtttcaagacatgggctgtgggatttgcacttggaaatgaacgagaggcaacgttggagagctgaagaggatgctttattacgttcttatgtcaaacagtatggtcctagggaatggaatcttgtgtctcagcgcatgaacacatatcttaacagggatgctaagtcgtgcttggagaggtggaagaactacctcaagcctggcatcaaaaaaggctctcttact

SEQ ID NO: 24318 - DNA, 268 bp, Glycine max
  Clone ID: LIB3051-069-Q1-K1-A2
gccacgcgtccgattaacacactacgcgtgcaaagaacctgtgctctcctcttgcttttgggagagaagaaagaagcgagaagatgtcagacgcgttctgcagcgactgcaagaggcagacggaggtggtgtatgaccactctgccggcgacacggtgtgctcggagtgcggcctcgtactggagtcccactctatcgacgagacctctgagtggcgtaccttcgccaacgagtccggtgacaacgatcccaatcgtgtcggcgggcc

SEQ ID NO: 24319 - DNA, 426 bp, Glycine max
  Clone ID: LIB3051-002-Q1-E1-E5
caaaatactactagtaccttaataaacaaataaataaataaggtgagagaaaaaaaaaaatgtagaggaacctggaaacttccacgaggttttcggtgaaaaccaaatttggggctttgcatcgcaagatttaccctttccaatcaaaattcttctgccttcccctaccaattctttctctcaaccgatttatctgagtgaggggtttggccaatgacgagtggttttggtgaatcaacgagagcgtctgcaccgagcccatcatgctcggggaacagttcaaacgatgccggtgaatttgaatgcaacatatgcttcgatttggcgcaagaccctgtgatcacactctgtggtcacctattctgttggccatgcctttataggtggctccaccatcactcccattctcaagaatgccctgtttgc

SEQ ID NO: 24320 - DNA, 436 bp, Glycine max
  Clone ID: LIB3051-092-Q1-K1-D6
cccacgcgtccgctcgatttccttctctataacacaacgctctcttctctggcgaccaaagtacttgttccagtgtctactctactcaaaaaggatttgggacatcatgtgcagtgattcgaaaagtaaactttcttccccaaccctcgtcgtcatggagaatagtaacattcagaagcagaatctggatggtctctacaactcggttttgcttgaattgtctgcatctgatgattatgaagctttcaaaagagaggtggaggaaaaaggcttagatgtgaacgaggcaggcttttggtacggtagaagaattgggtcaaagaagatgggatctgaaacgaggacccctctgatgattgctactttgtttggaagcgccaaggtgctcaattatattcttcttcagaaaggaggaggtgttgatgtgaacagggtc

SEQ ID NO: 24321 - DNA, 406 bp, Glycine max
  Clone ID: LIB3051-067-Q1-K1-C10
gtgcggcaagcagcaatggctttcaaatgtttgttgcttatttactacaaaaatggaagaggggataacttccgtcggcagggtcaaatgttaactctggtcgagtatactctgctgctgtatcgtgccttgttgccaacaccagtttggtaccgatttttcttgaacaaggattatggaagtctcttttcctcactgaccacaggattgtatctaactttcaagctaacatcagtagttgagaaggtccagtgcttcgtttctgccttaaaagcattatcaaaaaaggaagttcattatggggttcatgccacaacggaacaggtgaatgctgctggtgacatgtgtgctatatgccaggaaaagatgcaggcttccatattggtgagcctgtaacacatgttct

SEQ ID NO: 24322 - DNA, 411 bp, Glycine max
  unsure (1)..(411): unsure at all n locations
  Clone ID: LIB3051-075-Q1-K1-F1
ggaattcctcctgtctgtgaaagaggcagtacaagcagatatttcaatgctgcaagtgcagctgagcgtcctacatcttcagaattgtggccagagaagcccaatatggattctctatatatgccttgggatcatgttaatatgacacccacatttagaggtagaggcctttctatacggggcgagggtcctttaaggaatgtgaggagccgttctgcacttgatttggaatccaacctggctagggcccatttatcaaatactcatccacacaactcatactctactggtctaccagttgaccattcttctagcgtggtcgatctgtcaactcaaacttctggcactttgacacgggattggagcccaatgagttcatgtcctnctcatggaagggtgtcatcatcagat

SEQ ID NO: 24323 - DNA, 432 bp, Glycine max
  Clone ID: LIB3051-026-Q1-K1-B7
ctagaaatgatttcccgtaatacaaatcaacaagttgcatgaccgatgaagaacaacacaaataaacaagcaaagtcaatgacgattgaaatgataatcccgagagaatggccaaaaaatttgaggagccctaacctccatgaaattcaaatgagcctcgagaaggtgcatgtagaccaaccaatcaccattcccagtagaagaaggcattggcatgacatagccagaatctccaccccaaggaaaatggtacgatgcaaacacgggctttccccacccaaaatcaacctttgactccggaaacctttgaccagaagaaaccacaaaacttggtccttcttccttgccatgcccacaataaatcctagacaaaccaggagctggtcgatgtacctcaacccaatcaacaagtcccaaaaaatgctcttctgt

SEQ ID NO: 24324 - DNA, 375 bp, Glycine max
  unsure (1)..(375): unsure at all n locations
  Clone ID: LIB3051-046-Q1-K1-E4
ctagaaatgatttcccgtaatacaaatcaacaagttgcatgaccgatgaagaacaacagatataagcaagcaaagtcaatgacgattgaaatgataatcccgagagaatggccaaaaaatttgaggagccctaacctccatgaaattcaaatgagcctcgagaaggtgcatgtagaccaaccaatcaccattcccagtagaagaaggcattggcatgacatagccagaatctccaccccaaggaaaatggtacgatgcaaacacgggcttnccccacccaaaatcaacctttgactccggaaacctttgaccagaagaaaccacaaaacttggtccttcttccttgccatgcccacaataaatcctagacaaacc

SEQ ID NO: 24325 - DNA, 438 bp, Glycine max
  Clone ID: LIB3051-019-Q1-E1-H6
acgcgtccgaaaatattgaaaagccgcgagggaggtttcgtttcgtttcgttcagttcacacattctattctctatcgattcctcttccctttttctcaatccactacaccacagttatgaggagccaacttgtgtgtaatgggtgtaggagcatcttggtttaccctagaggagcaaccaatgtttgctgtgcgttgtgcaacaccattacctctgttcctcctcctggaatggacatgtcacaactctattgtggaggctgtacgacattgctaatgtacacacgtggtgctacaagtgtgagatgttcctgctgtcacactattaaccttgtaccagaatctaatcaagtcattcattgtgcgaactgccggacaacactcatgtatccttatggagcttcctcagtcaaatgtgcaatttgttgctatattact

SEQ ID NO: 24326 - DNA, 429 bp, Glycine max
  Clone ID: LIB3051-112-Q1-K1-F11
gccgcgagggaggtttcgtttcgtttcgttcagttcacacattctattctctatcgattggtcttccctttttctcaatccactacaccacagttatgaggagccaacttgtgtgtaatgggtgtaggagcatcttggtttaccctagaggagcaaccaatgtttgctgtgcgttgtgcaacaccattacctctgttcctcctcctggaatggacatgtcacaactctattgtggaggctgtacgacattgctaatgtacacacgtggtgctacaagtgtgagatgttcctgctgtcacactattaaccttgtaccagaatctaatcaagtcattcattgtgcgaactgccggacaacactcatgtatccttatggagcttcctcagtcaaatgtgcaatttgttgctatattactaatatcagtatga

SEQ ID NO: 24327 - DNA, 445 bp, Glycine max
  Clone ID: LIB3051-111-Q1-K1-D5
ggaacatcaagttgggttccaaaggctgtgtagtcatcttcatcggacaagcgtgcggggagctcacaacaaaagaatctgccctctcttgaaaatgatgttggtcaatccagtactagtagtgttataccatctgaacatttgttctgtgcatttgctgctgccaactgcccccttgaagataaatgttctcgcattcatggaaatcagtgcttatactgtagaaaattatgcttacatcctactgatcgaaaggaaaaagaaaaccatttgagaacttgtgagaaaaaggaaaaataccttcaggctttgaaagatagtcaagacgtagagtgcaatgtttgtttggaacgtgttctgtccaaacctaaaccagctgattgtaggtttggtctgcttcctgaatgtgaccatgctttctgtttatcctgtatccgcaattggc

SEQ ID NO: 24328 - DNA, 355 bp, Glycine max
  Clone ID: LIB3051-004-Q1-E1-G9
ggcaaacacaccaaacaccaaacaccaaactagttggctcaattctctttgaatggctttggaggctttgaattcaccaacagcagccaccactccgttccgtggctaccaagaagaggaggaggacgaggaggctgaccttcacttacgtgagccttgggctaaaaggaaacgctccaaacgaccgcgttttgagacggaggaagagtacctcgctctttgcctcatcatgctcgcacaaagcggtaacaccagaaacatccacaacaacaacacccaattaccgtcttcttcactgtcagacaaagaagcgtcgccgccggtgaaactaacacacaggtgcaccgtttgcaac

SEQ ID NO: 24329 - DNA, 416 bp, Glycine max
  Clone ID: LIB3051-032-Q1-K1-H6
ctcaaattacatggtcatagtgtacacctagttaggcaaacacaccaaacaccaggcaccaaactagttggctcaattctctttgaatggctttggaggctttgaattcaccaacagcagccaccactccgttccgtggctaccaagaagaggaggaggacgaggaggctgaccttcacttacgtgagccttgggctaaaaggaaacgctccaaacgaccgcgttttgagacggaggaagagtacctcgctctttgcctcatcatgctcgcacaaagcggtaacaccagaaacatccacaacaacaacacccaattaccgtcttcttcactgtcagacaaagaagcgtcgccgccggtgaaactaacacacaggtgcaccgtttgcaacaaggcctttggttcttatcaagcactc

SEQ ID NO: 24330 - DNA, 415 bp, Glycine max
  Clone ID: LIB3051-095-Q1-K1-G3
atggtcatagtctacacctaattagccaaacacaccacagcaccaaactagttggctcaaggctctttgaatggctttggaggctttgaattcaccaacagcagccaccactcccttccgtggttaccaagaagaggaggaggaggttgaccttcacctacgcgagccttgggccaagagaaaacgctccaaacgacctcgttttgagtcggaggaagagtacttggctctttgcctcatcatgcttgcacaaagcggtaacaacaacaacacccaattaccgtcttcgtcacagtcacacaaagaagcgtcaccgccgctgaaactatcacacaggtgcaccgtttgcaacaaggcttttccttcttaccaagcactcggtggacacaaggccagccaccgcaaggcctcgtcg

SEQ ID NO: 24331 - DNA, 440 bp, Glycine max
  Clone ID: LIB3051-105-Q1-K1-B10
gggttctcctgaatccgcaatggccgtttcaaccactttctccggtgccaaattggaggggctattgctcaaatgttcttcctcctcttcctcaccaccgccttcaaggtcatcattcaccacttttcccggccaaaacagaagaaccctcattcagagaggggttattcgctgcgacgctcagccctctgatgcatcatctgttgctccaaataatgccaccgctctctccgctcttgagcagctcaagacttctgcagctgatagatatacaaaggaaagaagcagcattatcgccattgggctcagtgtgcacactgcacctgtggaaatgcgtgaaaaacttgccattccagaagcagaatggcctagagctattgcagagctgtgtagtctgaatcatatttgagaagcagctgttctgagtaccctgcatcgaa

SEQ ID NO: 24332 - DNA, 442 bp, Glycine max
  Clone ID: LIB3051-102-Q1-K1-E2
ataaggctttgcatttcatttgagagagagagcgtcttacctttccattatcaaaatgggtgggtcggctatcacaggagcgaggctaaccctagggatagggttggcgatacctctttcctctcccacgcgctctcgaaccgtcgcaatggccgtatccgtcgaccccaagaccgacaacaaactcactcttaccaagtccgaggaagctttcgctgctgccaaggtacgcatgacctccctcttccttccttccttcctcctttcaattttgatttttgatttttgatttcaggagctgatgcctggaggtgtcaactccccagttcgtgccttcaaatccgtgggtggtcaaccaattgtgattgattcagtcaaagggtctcgtatgtgggacatcgacggcaatgagtacattgactacgtcggttcttggggtccc

SEQ ID NO: 24333 - DNA, 426 bp, Glycine max
  Clone ID: LIB3051-036-Q1-K1-G6
cccacgcgtccgaacatttggtggcaaaaggttgcaaaaagatggtggttgtcaatagaactgatgagagagttgctgcaatacgtgaagaactgaaggatattgagattatctacaaacccctttcagaaatgctcacctgtgctggcgaagcagatttagttttcaccagtactgcatcagaaaacccattattcttgaaagaacatgtcaaggaccttcctcctgcaagtcaagaagttggaggccgtcgctttttcattgatatctctgttccccggaatgtgggttcatgtgtctcagaccttgagtctgtgcgagtttacaatgttgacgaccttaaagaggttgtggctgccaataaagaggatcgcctaagaaaagcaatggacgcacaggcaatcattgctgaaaaatctaagcaat

SEQ ID NO: 24334 - DNA, 378 bp, Glycine max
  Clone ID: LIB3051-061-Q1-K1-B9
ggaggctacaatttttgagctacgttatcgaacaaatgtgggtgagttgcttgggcgtgtgcgcaaagagctgccatggggtgatgcaaaagttgccaagcaacttgttgatgcgcaactatatgaactacttggtgatcggacagcagcagatgatgaaaagccttctagaaagaagaaggagaaacctgctaaagtagaggataaggcagctcctgtttctacccctgaaaagtcacctgaagaagacgttaatccatttttaatattccctaatccagaggaaaatttcaaggtgcatactgaagtgccttttagtgatggtagtattttgagatgttgcaatacaagagatctgcttgacaaacacttaaaagc

SEQ ID NO: 24335 - DNA, 278 bp, Glycine max
  unsure (1)..(278): unsure at all n locations
  Clone ID: LIB3051-015-Q1-E1-B12
gacgacgcgtcaatatggcatggccagatacgctgtcatatgccagaaaaagggctgggtccattgttgagcctgagatccntgttgatggatctcatgacattcacaagtgtgctgccgtcaccgaacgtgtccctgcagcatgctacaaagctttgaatgatcaccacgtccttcttgaggggtacctattgaagccaaacatggtcacccccgggatcaaatctgctaagggttcccctcaggttggtgcggancacaacggttaaagcccttca

SEQ ID NO: 24336 - DNA, 379 bp, Glycine max
  Clone ID: LIB3051-061-Q1-K1-E11
ctacctctttctcttctatctcaacaactacaccttcttgctactggatcatgtctcgagttcaagggcaagtaccatgatgagcttatcgccaatgctgcgtacattggcactcctggaaagggtattcttgctgctgatgagtcaacagggacaattggcaagcgtttggccagcatcagtgtagagaacattgaatccaacaggcgagctcttagggagctgcttttcactgctcctggtgttcttcaatatctcagtggtgtcatcctctttgaggaaaccctctaccagagcacagctgcaggcaagccctttgtgaatgtcttgaaagaagctggtgtgcttcctggcatcaagggtgacaagggcacagtcg

SEQ ID NO: 24337 - DNA, 446 bp, Glycine max
  Clone ID: LIB3051-025-Q1-K1-E11
aaaaaccctacttggctcttttcttcacttgttcactttcttccaacctctaacctacctctttttcttctctctcaacaacttcaccttcttcctcctcgatcatgtctcacttcaagggcaagtaccatgatgagcttatcgccaatgctgcgtacattggcactcctggaaagggtattcttgctgctgatgagtcaacagggacaattggcaagcgtttggccagcatcagtgtagagaacattgaatccaacaagccaactcttaaggagctgcttttcactgctcctggtgttcttcaatatctcagtggtgtcatcctctttgaggaaaccctctaccagagcacagctgcaggcaagccctttgtgaatgtcttgaaggaagctggtgtgcttcctggcatcaaggttgacaagggcacagtcgagcttgctggaact

SEQ ID NO: 24338 - DNA, 370 bp, Glycine max
  Clone ID: LIB3051-094-Q1-K1-A9
cccacgcgtgcgcccacgcgtacgcctacctatttttcttctctctcaacagcttcaggttcttcctcctcgatcatgtctcacttcaagggcaagtaccatgatgagcttatcgccaatgctgcgtacattggcactcctggaaagggtattctcgctgctgatgagtcaacagggacaattggcaagcgtttggccagcatcagtgtacagaacattgaatccaacaggcgagctcttagggagctgcttttcactgctcctggtgttcttgaatatctcagtggtgtcatcctgtttgaggaaaccctttaccagagcacagctgcaggcaagccctttgtgaatgtcttgaaagaagctggtgtgc

SEQ ID NO: 24339 - DNA, 215 bp, Glycine max
  Clone ID: LIB3051-062-Q1-K1-B5
catggcgcggaaaagaagagattgtgaagaaggctcaggaagcccttttggtaagagccaaggctaactcagaggcaactctgggaacctacaagggtaactcacagcttgctgatggtgcctcagagagcctccatgtttcgaactacagctactgatcaatcgaagttggtgttgtttgaagagactagtgcgagtaggaatcggtattatgg

SEQ ID NO: 24340 - DNA, 428 bp, Glycine max
  Clone ID: LIB3051-067-Q1-K1-E7
aaccgttgtcttctcacttcgtcaaaaccaaccaaacccctccccaattctcaagccaaccagggtcttccttcaagagcaagtaccaagatgaactcattgccaatgctgcttacattggcaccccagggaagggtatccttgctgctgatgagtcaactggtacaattggcaagcgattggccagcattaatgtcgagaatgttgaagcaaataggcgtgctcttcgtgaactcctattcaccacacctggtgcttttgagtgcctcagtggtgtgatcttgtttgaagaaaccctataccaaaagacagcttcaggaaaacccttcgtagagttgatgaaggaaagaggagttctccctggtatcaaggttgacaagggcacagtagagcttgcaggaactaatggggagactactacttaaagg

SEQ ID NO: 24341 - DNA, 398 bp, Glycine max
  unsure (1)..(398): unsure at all n locations
  Clone ID: LIB3051-014-Q1-E1-G3
gaataaatggttaaggcaaaaaggattacggtgataaggaataatcctgcacctttgctggctttatgttggtattgggctacagatggtgtaggatcaaaagatatggttatccttccatataaggacagcttgttattatttagtagatacttgcaacagttggtcatggaatctctaagcaaggagtttgacttgaatggtaatcgggttaatcaaggaattagtgtctatggaaataaaggaagcacagatcagcatgcctacattcagcaactganggaaggtgtgcacaatttttttgtgacattcattgangtgctacgcgatagaccacctggtcatgattgggagcttgaacaagtgtcacatgtggtgactacctgtttggtatgcta

SEQ ID NO: 24342 - DNA, 436 bp, Glycine max
  unsure (1)..(436): unsure at all n locations
  Clone ID: LIB3051-114-Q1-K1-G5
ctgcctctgttccgccaagcgcagcattttcccaccgttcaggccaccggctgagttaggtttccggcgaggatgggtgctgctctgctgtcggagcttgcgacggagatagtcgtgccagtgtgcgccgtcatcgggatcgtgttctcgctggtgcagtggttcctcgtgtcgcgcgtcaagctcactcccgaccgcaacggaacgacgtcgtcgccgcgcaacaacaaaaacggctacggcgacttcctcattgaagaagaagaaagcatcaacgaccacagcgtcgttgtgaaatgcgctgagatacagaacgctatctccgaaggtgcaacatcctttcttttcactgaatatcaatatgtggggatcttcatggttgcttttgcaatactgatcttnctttttctgtgctctgtggaaggcttcagtacta

SEQ ID NO: 24343 - DNA, 339 bp, Glycine max
  Clone ID: LIB3051-002-Q1-E1-B9
cgtccgatggattaaaggatagtcaaactgtcctaagatatgactatggaaaatattatgcctcaaaaaccatttttgaggatggaaagaacagaatggtcttattgggttgggttaatgaatcctcaagtgtttcggatgatatcaagaaaggatgggctggaatccatactattccaagggccatctggcttcataaatctggaaaacagttggtgcaatggccggtggtggaacttgaaagcttacgtgtgaatcctgtccactggcccaacaaagtggtcaaaggtggtgaaatgcttcaagttactggtgttacttgcgcacaagctgacgttg

SEQ ID NO: 24344 - DNA, 437 bp, Glycine max
  unsure (1)..(437): unsure at all n locations
  Clone ID: LIB3051-025-Q1-K1-C4
cgaaaaaccatttntgaggatggaaagaacagtaaggtcttattgggttgggttaatgaatcctcaagtgtttcggatgatatcaagaaaggatgggctggaatccatactattccaagggccatctggcttcataaatctggaaaacagttggtgcaatggccggtggtggaacttgaaagcttacgtgtgaatcctgtccactggcccaccaaagtggtcaaaggtggtgaaatgcttcaagttactggtgttactgcggcacaggctgacgttgaaatttcatttgacgtgaatgagtttggaaagggcgaagtattggaccaatgggtggatccccaaattctgggtagtagaaagggtgcagccgtaaagggtggtttgggaccctatggcttgctagtttttgcttctcgtggcttgcaagagtacacggc

SEQ ID NO: 24345 - DNA, 352 bp, Glycine max
  Clone ID: LIB3051-031-Q1-K1-A9
catggccgtatctccaattttgtcgttgttggctatctgctatctcatttatggcacgggtggtcttcccattgaatctacccaccatgtttacagaaatcttcagactctatcttctgattcctctgatcaaccttatagaaccgcttaccatttccaacctcccaaaaattggataaatgaccctaatggaccaatgaggtacaaatgactttatcatctcttctaccaatacaattcaaaaggtgctgtatggggtaatattgtgtggccccactcagtatcaaatgatctcgtgtattggactcctctagatcatgccatctaccctcctcaaccttatgatatcaac

SEQ ID NO: 24346 - DNA, 396 bp, Glycine max
  Clone ID: LIB3051-093-Q1-K1-B1
attccattaaaagctataccatggccatatctccaattttgttgttggctatcttatctgtcatttatggcaatggtgttcttcccattgaagctacccatcatgtttacagaaatcttcagactctatcttctgattcctctgatcaaccttatagaactgcttaccatttccaacctcgcaaaaattggataaatgaccctaatggaccaatgaggtacaaaggactttaccatctgttctatcaatacaatccaaaaggtgccgtatggggcaatattgtctgggcccactcaatatcaaatgatcttgtgaattggactccactggatcatgccatctacccttctcaaccgtctgatataaacggttgttggtcaggctcagccacaatac

SEQ ID NO: 24347 - DNA, 451 bp, Glycine max
  unsure (1)..(451): unsure at all n locations
  Clone ID: LIB3051-054-Q1-K2-D11
ggccgtatctccaattttgttgttgttggctatcttctctctcatttatggcaatggtattcttcccattgaagctacccaccatgtttacagaaatcttcagactctatcttctgattcctctgatcaaccttatagaaccgcttaccatttccaacctcccaaaaattggataaatgaccctaatggaccaatgaggtacaaaggactttatcatctcttctaccaatacaatccaaaaggtgctgtttggggtaatattgtgtgggcccactcagtatcaaaggatcttgtgaattggacccctctagatcatgccatctacccttctcaaccgtctgatatcaacggttgttggtcaggctcagccacaatacttcctgggggcaaaccagccattntatacacaggaattgaccctaataatcaccaagttcaaaacttagcccta

SEQ ID NO: 24348 - DNA, 437 bp, Glycine max
  Clone ID: LIB3051-038-Q1-K1-E10
ctctcatgcttttttccacttgcaaacttcaaattcactctgacagtttttgcagctaagtaagaagaacttaacagacatataaacatagtgatcgttatgtctacgcaaccaaagcttggtcggattcccagtatcagagaccgagttgaagacactctctctgctcaccgtaacgaactcatttctctcctctccaggtatgtggctcaagggagagggattttgcaaccccataatttgattgatgaacttgacaacatccctggcgatgatcaagcaatagtggatcttaaaaatggtccctttggtgaaatcgtcaagtctgcaaaggaagccatagttttgcctccttttgtggcaatagcagttcgtccaagacctggtgtttgggaatatgtccgtgttaatgtctctgagctcagcgtggagcaatt

SEQ ID NO: 24349 - DNA, 455 bp, Glycine max
  Clone ID: LIB3051-085-Q1-K1-D11
caggtacacgtggaagatttattccgaaaggcttatgactttggcgggagtttatagtttctggaaatgcgtttccaaattagagaggcgtgaaactcgacgatatcttgagatgttctatatcctcaagttccgtgatttggcaaattctgttccgctagctaaggatgatgcaagttaactagctatataatttcaccaaaggcttgacagcagacataataagagtcatttatgtaaatataatagtctgcttctcgtgttttgaaatctagtgaggcgacctagaggagtttcatggaagacttgtcttgtctatgttaacttcgattatgtaagagatggcgagcactggttgttgaatttggatgtctcttgttttcgtttgattagtagtcatcaatgatatagacctggaaattacctgtgacttgaggatgttatccttactgatg

SEQ ID NO: 24350 - DNA, 430 bp, Glycine max
  Clone ID: LIB3051-008-Q1-E1-C12
aatgacacagttggaacagtggctagagcaagattcagcaatcaggatgtcattgctggagtgatccttggtacggggacaaatgcaccttatgtagagtgtgcacatgcaattccaaaatggcatggtcttctaccaaaatcaggagagatggttattaacatggagtggggtaatttccgttcctcgcatcttcctctaacagaatatgatcatgctctagatgcagagagcttaaaccctggagaacagatttttgagaagataatttctggtatgtatttgggtgaaattgtaaggagagttttgttgaagttggctgaagaagttgacttctttggagatactgttcctccaaaattgagaattcctttcgtacttaggacacctgacatgtctgcaatacatcaagatacatcttcagatctga

SEQ ID NO: 24351 - DNA, 402 bp, Glycine max
  Clone ID: LIB3051-106-Q1-K1-A9
tgctaatcggggagcccgcctttctgctgctggtatttttggcatcctcaagaaaataggaagagacacagtaaaggacgggaagaaatcagtagtagcactggatggaggattgtttgaacactatactaaattcagaagttccttggagagtacactaaaggagttgttgggagatgaggcagctgagacaattggcattgagcagtctaatgatggctctggaattggagcagccctcctggcagcttctcactcccagtatttggaagtgcaggagtcctgaagatgtggtttaatgtcaaggtaaatcagtgtaacactagtttcatttttttgtatacctactagatcaacagattgaaacagaaaagtcttcgttactagtcctagagagctttt

SEQ ID NO: 24352 - DNA, 389 bp, Glycine max
  unsure (1)..(389): unsure at all n locations
  Clone ID: LIB3051-013-Q1-E1-A6
accacgcgtccgtttcaaactcatcgatacaacaaacatgtgggtgagtttaagagccatcaagaggtttgttgacactgttgaagtaaggcagaagaagccctcattttcaaaggacacagcagctggaccagcaataaagttctttgataatgtatttggtgtctccgtgcccgaatctcgctttcttcccttggatgcaacatcagatctattacttcttcagtcagatctatacacttgtagagaaggtgttttaactcgaaatccagctagaactaaccctttaaatcctgtgatagacttgggacctgaatttgaaaagtttggtgactttcanagtcgcttcagatccattccaagcatcattgaggttggacagtttgatg

SEQ ID NO: 24353 - DNA, 325 bp, Glycine max
  Clone ID: LIB3051-054-Q1-K1-G11
gggccgacccactcgtccgcgctggttccctttctaaagccctcgcattcacgtccgtcgtcccgagcaggacgcgcgagctgcctagaaggcgacgccaaacgggcttgcgcggatcgagacgaccgggaagaagaagcaggacaacggcgtgtggtacgacgacagctcggcgccggtgcgcgcgcagaccatcgacgagctgcactcgctgcagcggaagcggtcggcgcccagcacgcccaagcggtcggcgcccaccacgcccatcaagggcggtgcccactcgcccttcgtcgacgcgatcagcgaggaggagcgccac

SEQ ID NO: 24354 - DNA, 440 bp, Glycine max
  Clone ID: LIB3051-063-Q1-K1-D7
ggccccccgccagataagtgccctatcgttgaaagccttaattaatttatacatataatggggtacataatatacatacatccctgatgaaagtggaggaaaaggttccctccaaaatagtgcatgctagtttagtttagtgtacaaagtggataactgggtgggtgacaggtgtatccgccccactcctgaagagctggagaattttggtactccggacttcactatatacaatgctggacagttcccctgtaatcgttatactcactacatgacatcctccactagtatagatcttaatcttgctaggagggaaatggtcatcctcggcacacaatacgccggggaaatgaagaagggtcttttcggtgtcatgcattatctcatgcctaagcgccaaatcctctccctacactctggatgcaatatgggcaaagatg

SEQ ID NO: 24355 - DNA, 433 bp, Glycine max
  Clone ID: LIB3051-065-Q1-K1-G9
ctcgtttcgtcttcacacttgcaacgcaacaacgtaacgttgctaattgcttgcacttcgcatggtcgcttcttttgtttcacattagctgtttttgtttttgtcttagttttacacctttcctcatttccgcagtagcaacctgcgaatcaacctctctgagaaaaaaaatggcgtcgaacgggaatggcagcgttgcgaacggtaacgggagcgctaggaacggacttgcgaagattcagacgcagaagaagcatgacgggatttgtcacgacgacagcggtccaacggtgaaggctcagaccattgacgagcttcactcgctgcagaagaagaaatccgcacccaccacccccgttacggggtttcaggctcctttcgccaccctcaccgaagaagaacgtcataagcaacaactccaatccatcagtgc

SEQ ID NO: 24356 - DNA, 324 bp, Glycine max
  Clone ID: LIB3051-003-Q1-E1-C4
aaaggatcattcatcacttcaaccggggcattggcaacactttctggggccaagacaggtcgctctccaagggacaagcgcgtcgtcaaggatgatcttactgagaacgagctttggtggggaaagggttcccctaacatcgagatggacgaacacactttcatggtgaacagagaaagagctgttgattacttgaactcgttggacaaggtcttcgtcaacgaccaattcttgaattgggacacagagaacagaatcaaagtccggattgtctctgccagagcttaccattcagtggtcagtcacaacatgtaattgaaaact

SEQ ID NO: 24357 - DNA, 444 bp, Glycine max
  Clone ID: LIB3051-104-Q1-K1-G11
gcgttcgccacgcgttcttaaaatgtggtgtttgatgagcatgatcgagaagttgattacgctgacgtgtcagggacagagggtactcgtgcagcttatcctatagagtacattccaaatgcaaagttaccttgtgttggccctcacccaaagaatgtcatacttttggcatgtgacgcatttggtgtactcccacccgttagcaagctaaacctggcacagaccatgtaccatttcatcagtggatatactgctttggtggctggcacagaagaaggtattaaggagcctcaggcaactttttcagcttgttttggtgcagcattcattatgctacaccctacaaagtatgcagcaatgcttgctgaaaagatgcagaagcatggtgctactggatggcttgttaacactgggtggtctgctggaagctatggtaatggaagc

SEQ ID NO: 24358 - DNA, 363 bp, Glycine max
  Clone ID: LIB3051-042-Q1-K1-C1
ctcttttttactattgtttgttttaggtactgggaagaccactctttccaccgatcgcaatatgtagttaatcggagatgatgaacactgttggggtgacaatggtgtctccaacattgaaggtggttgctatgccaaatgcattgacctctcacgggagaaagagccagatatttggaatgcaatcaggtttggcacagtgttggaaaatgtggtgtttgatgagcatgatcgagaagttgattactctgacaagtcagttacagaaaatactcgtgcagcttattctatagagtacattccaaatgcaaagttaccttgtgttgggccttacccaaagaatgtcatacttttggcatgtga

SEQ ID NO: 24359 - DNA, 417 bp, Glycine max
  Clone ID: LIB3051-116-Q1-K1-B4
cccacgcgtccgggcgggcacagaagataggtattaaggagcctcaggcaactttttcagcttgttttggtgcagcattcattatgctacaccctacaaagtatgcagcaatgcttgctgaaaagatgcagaagcatggtgctaccggatggcttgtcaacactggttggtctgctggcagctatggctatggaagtcgcattaaactacaatacacaagaaaaatcattgatgctattcactcaggaagtctgctgaatgcagagtacaagaagactgaaatttttgggcttgagatccccaccgaagtggacggtgtcccttcagaaattctagaccctgtgaacacttggtcaaacaaaaagggctacaaggagacactattgaaattggctggattgttcaagaacaattttg

SEQ ID NO: 24360 - DNA, 405 bp, Glycine max
  Clone ID: LIB3051-046-Q1-K1-E11
cagaagcatggtgctactggatggcttgttaacactggttggtctgctggaagctatggtaatggaagccgtattaaactacaatacacaaggaaaatcattgatgctattcactccggaagtctcctgaatgcagagtacaagaagactgaaatttttgggcttgagattcccaccgaagtggagggtgtcccttcagaaattctggatcctatgaacacttggtcaaacaaaaaggcctacaaggagacactattgaagttggctggattgttcaagaacaattttgaaaccttcaccaactacaagattggcaagggaaacaacaacctgacagaagagattctcgcagctggtccaatcttttgagacaatgttatgcaacatgttgtgtggttgggaatg

SEQ ID NO: 24361 - DNA, 357 bp, Glycine max
  unsure (1)..(357): unsure at all n locations
  Clone ID: LIB3051-044-Q1-K1-A10
gaacagctgaggctttggctgcacaagtgagccaagagaactttgataagggactcatatacccaccattcaccaacatcagaaagatttcagcacacatagctgccaatgttgctgctaaggcttatgaacttggcttggccactcgccttcctcaacctaaagatttagtgaagtttgcagagagctgtatgtataccccagcctacagaagctaccgatgaaaagtgataataataaataggcgctnttttctttttcatttatcatgaaatcatttcattggcaattttttaaatttttaccttccttaaggtcctggtatggtttttggaaagtatttggattgggtgggtt

SEQ ID NO: 24362 - DNA, 357 bp, Glycine max
  Clone ID: LIB3051-012-Q1-E1-H7
agcggacgcgtgggcggacgcgtgggcggacgcgtgggcggacgcgtgggcggacgcgtgggcggacgcgtgggtgcaagtggaagcccttttgaaaatgtagatcttggaaatggagaagttggccatgtaaatcaagccaacaacatgtacctgtttccagggtaggcatgcctttgtggcttatattttttcacggatcatgccactcagtggaaacattggcagaatgttcgaccgcaacatttcatttcaggattggtttggggacacttttatcacgtgctcgtcatataacagatggaatgttgcgagcagcagccgaatgcgcagtaatgcaggtgtggcaaaatggga

SEQ ID NO: 24363 - DNA, 370 bp, Glycine max
  Clone ID: LIB3051-078-Q1-K1-B5
atcaaatctctctttatatataaccctcacaatgcggaaatatgctgcagacagattcaggcaccttttcaaccgttcactccttcttctgcgtcaccgtcaccatcataatcaccatccctttccttattcttcttctgtttcatccctctccccattttctcgctctcgtttcttgtcctctactcctttctccatggcttctgattcccctttccctgtcaccgctcaaaacatcaaccccaaggttctgaaatgtgagtatgctgttagaggagaggttgtcacacttgcccagaatttgcaaaaggatttacaggccaatccaggttctcacccatttgatgagatactttactgcaacattgga

SEQ ID NO: 24364 - DNA, 418 bp, Glycine max
  Clone ID: LIB3051-006-Q1-K1-D5
cccacgcgtccgcccacgcgtccgggcaccttttcaaccgttcactccttcttctgcgtcaccgtcaccatcataatcaccatccctttccttattcttcttctgtttcatccctctccccattttctcgctctcgtttcttgtcctctactcctttctccatggcttctgattcccctttccctgtcaccgctcaaaacatcaaccccaaggttctgaaatgtgagtatgctgttagaggagaggttgtcacacttgcccagaatttgcaaaaggatttacaggccaatccaggttctcacccatttgatgagatactttactgcaacattggaaatcctcagtctctgggccagcagccaataacttttttccgagaggttcttgcattatgtgaccatccagctatattggacaa

SEQ ID NO: 24365 - DNA, 381 bp, Glycine max
  Clone ID: LIB3051-006-Q1-E1-D5
cccacgcgtccgcccacgcgtccgggcaccttttcaaccgttcactccttcttctgcgtcaccgtcaccatcataatcaccatccctttccttattcttcttctgtttcatccctctccccattttctcgctctcgtttcttgtcctctactcctttctccatggcttctgattcccctttccctgtcaccgctcaaaacatcaaccccaaggttctgaaatgtgagtatgctgttagaggagaggttgtcacacttgcccagaatttgcaaaaggatttacaggccaatccagcttctcacccatttgatgagatactttactgcaacattggaaatcctcagtctctgggcccagcagccaataactttttttccgaga

SEQ ID NO: 24366 - DNA, 287 bp, Glycine max
  Clone ID: LIB3051-113-Q1-K1-B4
caggcaccttttcaaccggtcactcattcttctgggccaccggcaccatcaccaggccttggcttcttcttcttctctctccccattttctcgctctcggttcttctcctctacgccgttctccatggcttctgattccccttttcctgtcaccggtcaaaacatcaaccccaagggtcttaaaatgtgagtatgctgttagaggagagggtgtcacacttgcccagaatttgcaaaaggatttacaggccaatccaggctctcacccatttgatgagatactttac

SEQ ID NO: 24367 - DNA, 427 bp, Glycine max
  unsure (1)..(427): unsure at all n locations
  Clone ID: LIB3051-040-Q1-K1-D4
cccacgcgtccgcccacgcgtccgcttttctattctattaattacagggaccatcaaaaccaaaaaagccaattaatagttattcttttggattcttattgttcatcgcagactcaacactctctccagacacttccttcatcaaatggcttctcacgacggcatctccgctgcttcttcagattccgtcttcaatcacctcgttcgtgctcccgaagatcctatcctcggggtaactgttgcttataacaaagatccaagtccagttaagctcaacttgggagttggtgcttaccgaactgaggaaggaaaacctcttgttttgaatgtagtgaggcgagttgagcagcaactcataaatgacgtgtcacgcaacanggaatatattccgattgttgggctagctgattttaataaattgagtgct

SEQ ID NO: 24368 - DNA, 440 bp, Glycine max
  unsure (1)..(440): unsure at all n locations
  Clone ID: LIB3051-105-Q1-K1-F8
cggacgcgtgggttccgcaaatggcttctcacgacagcatctccgcttctccaacctccggttctgattccgtgttcaatcacctcgttcgtgctcccgaagatcctatcctcggggtaactgtcgcttataacaaagatccaagtccagttaagctcaacttgggagttggtgcttaccgaactgaggaaggaaaacctcttgttttgaatgtagtgaggcgagttgaacagcaactcataaatgacgtgtcacgcaacatggaatatattccgatcgttgggcttgctgattttaataaattgagtgctaagcttatttttggggctgacagccctgctattcaagacaacagggttaccactgttcaatgctngtctggaactggttctttaagagttgggggtgaaattttggctaaacactatcaccaacggact

SEQ ID NO: 24369 - DNA, 385 bp, Glycine max
  unsure (1)..(385): unsure at all n locations
  Clone ID: LIB3051-109-Q1-K1-F6
attaatagtaatacaaacagcagcatgcgcccacccgttattctcaaaactaccaccgtgtttgtggaatctttcttctcgtcaccaccctgtgatcgcagactcaacactctcgctagacacttcctttcgcaaatggcttctcacgacagcatctccgcttctacaacctccgcttctgattccgtcttcaatcacctcgttcgtgctcccgaagatcctatcctcggggtaactgtcgcttataacaaagatccaagtccagttaagctcaacttgggagttggtgcttaccgaactgaggaaggaaaacctcttgtttttgatgtagtgaggcgagttgaacagncactcataaatgacgtgtcacgcaacaaggaatata

SEQ ID NO: 24370 - DNA, 455 bp, Glycine max
  unsure (1)..(455): unsure at all n locations
  Clone ID: LIB3051-106-Q1-K1-G8
ctctccctctctgttcgcactctgtctttcccctgtttccgcgtcactgagtcatggcgattcgcaactcgctcaccggccaattcctccgccgcagctccgtcgccggagcaaggctcatgtcttcttcgtcctcatggttccggagcatcgagcccgctcccaaggatcctatcctcggagtcactgaagctttcctcgccgatcagagtccaaacaaagtcaacgtcggagtgggtgcgtatcgcgatgaccacggaaaacctgtggttttggaatgtgttagagaagcagagaggagggttgccggaagtcaattcatggagtatcttcccatgggtggaagcataaaaatgatagaagaatcgctgaagctggcatttggagacaactctgagttcatcaaggataaaagaatagctgcagtgcatgctntatctgngactggtgcatgt

SEQ ID NO: 24371 - DNA, 415 bp, Glycine max
  unsure (1)..(415): unsure at all n locations
  Clone ID: LIB3051-093-Q1-K1-D2
cgcggatgaactgcgttctgatgttattttcagtgtttctagaactgggggccatttgggctcaagccttggtgtggtggaactcactgttgcacttcactatgtcttcaatgcccctcaggacaagatactgtgggacgttggtcaccaggttggttttcaacttccttgctgctttttgctttacttgttctaaactaaattggacaaccttgtatgaatttgcagtcttacccgcataagatactcaccggtagaagggaccagatgcataccatgaggcagacaaatggcttatctggcttcaccaaacgttctgagagtgaatntgattgttttggcactgggcacagctccaccaccatttcggcaggacttggaatggctgttgggagggatctgaaagggaagaaag

SEQ ID NO: 24372 - DNA, 387 bp, Glycine max
  Clone ID: LIB3051-053-Q1-K2-F1
cccacgcgtccgcccacgcgtccgggtcacaacaaccattggttatggttctcctaacaaggctaactcctacagtgtgcatggaagtgcactgggtgccaaagaagttgatgccacaaggcagaaccttggatggtcacatgagccattccacgtgcctgaggatgtcaaaaagcattggagtcgccacacccctgagggtgctgcacttgaagctgaatggaatgctaagtttgctgagtatgaaaagaaatacaaggaggaagctgcagaattgaaatctattatcaatggtgaattccctgctggttgggagaaagcactttcgacatacactccagagagcccagcggatgccaccagaaacctgtctcaaacaaaccttaa

SEQ ID NO: 24373 - DNA, 352 bp, Glycine max
  Clone ID: LIB3051-042-Q1-K1-D7
ccaacttccgctacttcctactccaaccactttcttttttcccgcagtcatgggcagggtcaagatcggaatcaacggatttggaagaattggccgtttggtggccagggtggctctgcagagagacgatgttgaactcgttgccgttaacgatcctttcattaccaccgattacatgacatacatgtttaaatacgacagtgttcacgggcactggaagcatcacgatgtcaccgttaaggatgagaagacccttctcttcggtgacaagccagtcactgtttttggacacaggaaccctgaagagatcccatggaagtcgactggagctgacatcattgttgagttcacc

SEQ ID NO: 24374 - DNA, 381 bp, Glycine max
  Clone ID: LIB3051-062-Q1-K1-B9
cccacgcgtccgcccacgcgtccgcccacgcgtccgacaacttctgctacttcctacgccaaccgcacttctgctccgcaattatcatgggcaaggtcaagatcggaatcaacggatttggaagaattggccgtttggtagccagagtggctctgcagagagacgatgttgaactcgttgccgttaacgaccctttcatcaccaccgattacatgacatacatgtttaaatacgacagtgttcatggacactggaagcatcacgatgtcaccgttaaggacgagaagacccttctcttcggtgacaagccagtcactatttttggacacagaaaccctgaagagatcccatgggggtcaactggagctgacatcattggtg

SEQ ID NO: 24375 - DNA, 424 bp, Glycine max
  Clone ID: LIB3051-018-Q1-E1-H11
aattcccggccgacccacgacgtcagcccacgcgtccggtctcaacttctgctcttccaactcctacaacgcttttctctgcactcatgggcaaggtcaagatcggaatcaacggatttggaagaattggccgtttggttgccagagtcgctctgcaaagagacgatgttgaactcgttgccgttaacgaccctttcattaccaccgattacatgacatacatgtttaaatacgacagtgttcacggacactggaagcatcacgatgtcaccgttaaggacgagaagacccttctcttcggtgacaaggcagtcactgtttttggacacagaaaccctgaagagatcccatgggggtcaactggagctgacatcattgttgagtccaccggagttttcaccgataaggacaaggctgccgcaca

SEQ ID NO: 24376 - DNA, 453 bp, Glycine max
  Clone ID: LIB3051-087-Q1-K1-E1
tttctcaacaacttctgctacttcctactccaaccgcacttctgctccgcaattatcatgggcaaggtcaagatcggaatcaacggatttggaagaattggccgtttggtagccagagtggctctgcagagagacgatgttgaactcgttgccgttaacgaccctttcatcaccaccgattacatgacatacatgtttaaatacgacagtgttcatggacactggaagcatcacgatgtcaccgttaaggacgagaagacccttctcttcggtgacaagccagtcactatttttggacacagaaaccctgaagagatcccatgggggtcaactggagctgacatcattgttgagtccaccggagttttcaccgataaagacaaggccggcgcacattttgaaggtggtgccaaagaaggtattatttctggccccagtaaggatgcccccatg

SEQ ID NO: 24377 - DNA, 441 bp, Glycine max
  unsure (1)..(441): unsure at all n locations
  Clone ID: LIB3051-059-Q1-K2-D8
tttctaatctcattctccttctgttcaaacactctctctcatggcatcagataagaagattaggatcggcatcaacgggtttggaaggattggccgtttggtggccagggttgcccttcaaaggaatgatgttgaacttgttgctgtcaacgatcctttcatcaccactgattacatgacatacatgttcaagtacgacaccgttcatggccagtggaagcattttgatgtgaaggtgaaggactctaagacccttctctttggtgagaagcccgtcaccgtttttggaatcaggaaccctgaggaaattccatggngtgaggttggtgctgattatgttgttgagtcaactggtgtattcactgacanggacaangctgctgctcacttgaagggtggtgccaagaaggttgtcatctctgccccaagcaaagatgcacc

SEQ ID NO: 24378 - DNA, 448 bp, Glycine max
  Clone ID: LIB3051-063-Q1-K1-F4
aacttctgctacttcctactccaaccgcacttctgctccgcaattatcatgggcaaggtcaagatcggaatcaacggatttggaagaattggccgtttggtagccagagtggctctgcagagagacgatgttgaactcgttgccgttaacgaccctttcatcaccaccgattacatgacatacatgtttaaatacgacagtgttcatggacactggaagcatcacgatgtcaccgttaaggacgagaagacccttctcttcggtgacaagccagtcgctatttttggacacagaaaccctgaagagatcccatgggggtcaactggagctgacatcattgttgagtccaccggagttttcaccgataaggacaaagccgtcgcacatttgaagggtggtgcaaaagaggttattatttctgcccccagtaaagatgcccccatgtttg

SEQ ID NO: 24379 - DNA, 220 bp, Glycine max
  Clone ID: LIB3051-097-Q1-K1-H1
tcgtccgctttttctttttttttttatgatttctgttttagctacacaaagtgtttattccgaattcgcactggtttaatctcgatttagataaaaatttggaacggtgtatcgttgatattcaagctcagactcaattctataatccactgatgcaaagtggacaatcaaattaattacacatgaactttaaccccattctttgtcataccaataaaca

SEQ ID NO: 24380 - DNA, 436 bp, Glycine max
  unsure (1)..(436): unsure at all n locations
  Clone ID: LIB3051-039-Q1-K1-B6
gttcatctcttgtggaggaagacaagcttagccttgcaactacacttctcgaaaaggccaaggctaaaggggtttctttgttgcttccaactgatgtggtcatagcagacaagtttgctgctgatgctaacagcaagactgtgccagcatcaagcatcccagacgggtggatgggattagatattggtcccgattccatcaagacatttggtgaagcattggataagacccagaccgtcatttggaatggaccaatgggtgtttttgagtttgataagtttgccacaggaacagaggccatagccaagaaactggcagagctgagtgggaagggagtaacgaccatcattggaggaggtgactctgttgccgctgtggagaaggttggtcttgcagacaagatgagccacatctncactggtggtggtgccagctt

SEQ ID NO: 24381 - DNA, 410 bp, Glycine max
  Clone ID: LIB3051-070-Q1-K1-B12
gctgcaaccaatgtcatctttggccttgctctgggatacaagtctgtcattattcctatttgggccatcgcaatcagcatttttgtgagttttacttttgctgcaatgtatggcattgctgtggctgcccttgggatgctgagcaccattgcgacagggttggctattgatgcctatgggccaatcagtgacaatgcaggaggtattgctgagatggcaggcatgagccatcgtattcgtgagagaactgatgcccttgatgctgctggcaacactactgctgccataggcaaaggatttgctaatgggtctgctgcttttgtgtctttggccctaattggtgcatttgggaaccgaacttgaattttgacttgtgatgtcttgacttccaaagtctttattggactcat

SEQ ID NO: 24382 - DNA, 431 bp, Glycine max
  Clone ID: LIB3051-010-Q1-E1-G8
actgatttgcctcttcttctagttggatatggatttggtgcctcctttgttgcactatttgcccagttgggtggtggaatatacacaaaggccgctgatgttggagcagaccttgtcggaaaagtagaacagggaatacctgaagacgaccctaggaatcctgctgttattgctgatctggttggtgacaatgtgggagattgtgctgctcgaggtgctgatctttttgaaagtattgcagctgaaataattagtgccatgatacttggtggaacaatggcacaacgctgtaaaattgcagatccatctggcttcatcttgtttcctcttgttgttcactcattcgatctgatagtttcatcagctggaatattttctatcaagggtacacgtgaaactggagttatagttcctgtggaggattcaatgac

SEQ ID NO: 24383 - DNA, 443 bp, Glycine max
  Clone ID: LIB3051-101-Q1-K1-H3
tggggttgtggctgtgaacaacaacatcaacaactatgaatccaaggcaacttccaccgtcaccattaagggcattctcagccttctaatggaaagcattgatgatgagaattgtgatggtggtggaagcaagaagagagttatttctcttggtatgggtgacccaactctcaccacattgttccacacaccaaaggttgttgaagaggctgtcgctgatgctcttcaatctcgcaagtttcatggctatgctcccactgctggacttctccaggctagaattgcaattgctgaatatctatctcgtgacctttcttatcaattatcacgagatgatgtcttcatcacttgtggatgcacacaagccattgatgtttcggtggccatgcttgctcgccctggtgcaaacatcttgcttccaaggccaagctttccaatctatg

SEQ ID NO: 24384 - DNA, 265 bp, Glycine max
  Clone ID: LIB3051-002-Q1-E1-A1
taagcagtgtgaggagcttgggattcttgttgacagagatgatcagggcactctgcttcagattttcaccaagcctgttggggacagggcaacgatattcatacagataattcagaggatccggtgcatggtggaggatgacgaacggaacgtgtagcagaacggtgcatgtgggggttttgggaaaggcaatttttctgagcttttcaaatccattggagaatatgagaacactttggtagctaaaagaaccgcgtaagcacat

SEQ ID NO: 24385 - DNA, 473 bp, Glycine max
  Clone ID: LIB3051-068-Q1-K1-H8
accggcttcgcggaggtgcgcctctacggcgacgtggtgctccgctacgtcagctacaaggacgccgcgccgcatgcgccacacgcagatccgtcgcggtggttcctgccgggattcgaggccgcggcgtcgtcgtcttcgtttccggagctggactacgggatccggcggctggaccacgccgtcgggaacgttccggagctggcgccggcggtgaggtacctgaaaggcttcagcggattccacgagttcgcggagttcaccgtggaggacgtgggaacgagcgagagcgggttgaactcggtggttctggcgaacaactcggagacggtgttgctgccgctgaacgagccggtttacggaacgaagaggaagagccagattgagacgtatttggaacacagcgaatgtgctggtgtgcagcaccttgcgcttgttactcacgacatcttcaccacactgagagagatgag

SEQ ID NO: 24386 - DNA, 441 bp, Glycine max
  unsure (1)..(441): unsure at all n locations
  Clone ID: LIB3051-067-Q1-K1-E3
gccaatacccatgtgcaacgaaattcaagcccaagcccaagcccaagcccaagcccaacctgggttgaagctcgtcggttgcaagaacttcgtccgaaccaatcctaagtcggaccgctttcaagtcaaccgcttccaccacatcgagttctggtgcaccgatgccaccaacgcctctcgccgattctcttggggacttggaatgcctattgtggcaaaatctgatctctccaccggaaaccaaatccacgcctcctacctcctccgctccggcgacctctccttcctcttctccgctccttactctccctctctctccgccggctcctccgctgcctcctccgcctccattcccagtttcgacgccgncacctgccttgccttcgctgccaaacacggcttcggcgtccgcgccatcgccttggaagtcgccgacgcgga

SEQ ID NO: 24387 - DNA, 383 bp, Glycine max
  Clone ID: LIB3051-042-Q1-K1-E5
gctaaagggaaggttttgatgcaagctatgtatggagtaaaggtgcagacagtattgttatgcagtgtgtttgctgcggctttttcgggctctacaaagaatatgtcagatttggatgtggctgatgtatattcttgggctccaacctttaaaagtttgcaagatcttgtaaatggggaaattagagttagaagtgggcgatttactatattgaatgagttggaagtagttgattcctctgtgaaggaattatatcctattatccagggcgtctcagatgccattgagacagaatcacttgcgaagattgttggggaattaggcagagcaacagagaagctttcacaaggactagatcttcttacaaaggaagtcgatagctt

SEQ ID NO: 24388 - DNA, 465 bp, Glycine max
  Clone ID: LIB3051-093-Q1-K1-A2
cccacgcgtccgcccacgcgtccgcaactttggaagagaggctgaaaaagcttattcccaagagcaaggatgagatcctcagcttgtcttggatgactttggctatgcagtcactttgtgagagccataatgacattaaaaccatcataacagagcttgagcttcctgtacatgattgggatgagaaatggatagacgtgtacttggacattagtgtgaagttgctagatatatgcattgcatttagctctgaattatcacgcctgaaccagggtcatcttttacttcagtgtgcattgcacaatttaggttcttcctcttcagagcagtatgttcgggcatgttcttcacttgatggttggaaacagcatattggttctggaaaccctaggattgagaaatgtggcagcattttggatgatcttctgcggtcacttgatctttcaaaaggtaaaaagtccgctt

SEQ ID NO: 24389 - DNA, 415 bp, Glycine max
  Clone ID: LIB3051-028-Q1-K1-H8
gtcactccttgctcttagccctgctcctcttcgccgccgtggccaccggcgcgatggcggtgtccgatttcgacgccgtctgacatactgatccgtcaggtggtgccagatgttggcgaagccgaagaggaggacaacctgctgaacgccgagcaccacttcgcgagcttcaaggccaagttcgccaagacctacgccaccaaggaggagcacgatcatcgcttcggcgtcttcaagtccaacctccgcagagccaggctgcacgccaagctcgacccctccgccgtccacggcgtcaccaaattctccgatctaactccggccgagttccgccgtcagttcctcggcctcaagccgctccgcttcccggcgcacgcccagaaggcgcccatcctgcccaccaaggatcttccca

SEQ ID NO: 24390 - DNA, 336 bp, Glycine max
  Clone ID: LIB3051-029-Q1-K1-F2
ttttacttcccctatggctcgtcacttcttgctcttagccctcctcctcttcgccgccgtggccaccgccgcgatggcggtggccgcgtccgacgccgacgacatcctgatccgtcaggtggtgccagatgttggcgaagccgaagaggaggacaacctgctgaacgccgagcaccacttcgcgagcttcaaggccaagttcgccaagacctacgccaccaaggaggagcacgatcatcgcttcggcgtcttcaagtccaacctccgcagagccaggctgcacgccaagctcgacccctccgccgtccacggcgtcaccaaattctccgatctaac

SEQ ID NO: 24391 - DNA, 375 bp, Glycine max
  Clone ID: LIB3051-042-Q1-K1-E10
gtgtcttccaagattggagttattgaatccttgttggagaaagttaatgttctcttgcttggtggaggaatgatctttaccttttacaaggctcagggttattcagttgggtcatctcttgtggaggaagacaagcttagccttgcaactacacttcttgaaaaggccaaggctaaaggggtttctttgttgcttccaactgatgttgtcatagcagacaagtttgctgctgatgctaacagcttgactgtgccggcatcaagcattccagatgggtggatggcgttggatataggtcctgattccatttagtcatttgttgaatcatcggtttctactctttcctttatttgcaatgtactcttgtgtgttttt

SEQ ID NO: 24392 - DNA, 414 bp, Glycine max
  Clone ID: LIB3051-103-Q1-K1-E3
cccacgcgtccggcacctttctcttcctccgatggctaatctctcactcttgttcttggggggcctcctattctccgctgccgtagccaccgtcgaacgaatcgacgatgaagacaaccttctgatccgtcaagtggtgccggacgcggaggaccaccacctgctcaacgcggagcaccacttctccgacttcaagacaaagttcgccaagacctacaccacgcaggaggagcacgaccaccgtttccgtatcttcaagaacaacttgctccgcgccaagtcgcaccagaaattggacccctgcgccgtccacggcgtcaccaggttctccgatctcactccgtctgagtttcgcgggcagttcctcggcctgaagccgctccgtcttcccttcgacgctcataatgctccgat

SEQ ID NO: 24393 - DNA, 288 bp, Glycine max
  Clone ID: LIB3051-012-Q1-E1-H6
agcaagacaaagagggtatcccaccagaccaacagaggctgatctttgctggaaagcagcttgaggatggccgtacccttgccgattacaacattcagaaagagtccaccctccacctggtgctccgtcttcgtggtggcatgcaaatctttgtcaagaccctcactggaaagaccatcacccttgaggtggagagctctgacactattgacaatgtcaaagctaagattcaagacaaagaaggtatcccaccagaccaacagaggctcatttttgctggaaaacagc

SEQ ID NO: 24394 - DNA, 429 bp, Glycine max
  Clone ID: LIB3051-032-Q1-K1-F12
gaggaagcatatccctacacaggaaaagatggtgtctgcaaattctcagctgaaaatgttgctgttcaagtccttgactctgtgaatatcaccttgggtgctgaagatgaactaaaacatgcagttgcatttgttcggccagttagtgtggcctttcaggtggtgaatgggttccatttctacgagaatggagttttcactagtgacacttgtggtagcacttcccaggatgtgaaccatgccgttcttgctgttggatatggagttgaaaatggtgtcccatattggctcataaaaaattcatggggagaaagctggggtgaaaatggctacttcaagatggaattggggaagaacatgtgtggtgttgcaacttgtgcatcttatccaattgtggcataaattgcataacaatatggtccctggtga

SEQ ID NO: 24395 - DNA, 402 bp, Glycine max
  Clone ID: LIB3051-042-Q1-K1-B8
ctaaaattaaattaccatatatagtcacattttctttacactttgtgaggtctaaaatgttgtccatttttcacaaggggtttgctcacccacctgaagagcttaaaagccctgcatctaacagtggctccaacaagcctaagattcctgaggaaactctaagagaatttctttctcatcatccccataacactttttctctgagttttggtcactctgctgttctagcttatactcgtcctgatccaccttcctttgttcatcaaaggttgttttgtgggattgatgacatatactgtatctttttggggagcttgaacaatttgtgctcactcaacaagcagtatggtttggcaaagggcaccaacgaaaccatgtttgtgattgaagcttacaagacac

SEQ ID NO: 24396 - DNA, 446 bp, Glycine max
  unsure (1)..(446): unsure at all n locations
  Clone ID: LIB3051-047-Q1-K1-F12
ttcaggacaaagagggtatcccaccagatcaacagaggctcatctttgctggaaagcagcttgaggatggccgtacccttgctgattacaacatccagaaggagtccactcttcacttggtactccgtctacgtggtggaatgcaaatctttgttaagactctgaccggaaagacaatcacccttgaggtggagagctctgacaccattgacaatgttaaggctaagattcaggacaaagagggtatcccaccagaccaacagaggctcatctttgctggaaagcagctagaagatggccgaaccttggctgattacaacatccaaaaagaatctaccctccacttggttctccgccttcgtggtgggatgcaaatctttgtcaagactctcactggaaagaccatcacccttgangtggagagctctgacactattgacaatgtc

SEQ ID NO: 24397 - DNA, 341 bp, Glycine max
  Clone ID: LIB3051-053-Q1-K2-E11
ctaccctccacttggtgctccgtctgcgcggtggtatgcaaatctttgtgaagaccctgactgggaagaccattactttggaggtagagagctcagacacaattgacaatgtgaaggcaaagatccaagacaaggagggtatcccaccagaccaacagaggctcatttttgctggcaaacagcttgaagatggccgaaccttggctgattacaacatccaaaaagaatctaccctccacttggtgctccgtctgcgcggtggtatgcaaatctttgtgaagacccttactgggaagaccattactttggaggtagagagctcagacacaattgacaatgtg

SEQ ID NO: 24398 - DNA, 393 bp, Glycine max
  Clone ID: LIB3051-060-Q1-K1-H7
ctttgcagcactgggttctgatggaggagtgaagctgtattggggtattgcagctgatggatctgtggtgatctctgatgatctagaagtcataaaagagggttgtgccaaatcctttgctccctttccaacagggtgtatgtttcacagtgaaggaggtctgatgagctttgagcatccaatgaacaagttgaaggcaatgccaagagtggacagtgaaggggccatgtgtggggccaacttcaaagttgataagttcgccagagtcaacagcattcctcgagtgggaagtcaatccaattggatggaatgggaccaacattagcttaaaaataaagccttaggataatgtaaaataaacaaaaaaatgtcatctatgtatgctcctttcct

SEQ ID NO: 24399 - DNA, 418 bp, Glycine max
  Clone ID: LIB3051-067-Q1-K1-F6
agacactccgtgaccgtggtccataccctgcagatcaagttgtgaaggatcttgatggcagggttggctttgttgtctatgacagcaaggttggcagtgtctttgcagcactgggttctgatggtggaattaagctgtattggggtattgcagctgatgaatctgtggtaatctcggatgatctagatgtcatgaaagaggggtgcgccaaatcctttgctccctttccaccagggtgtatgtttcacagtgaaggaggattgatgagctttgagcatccaatgaacaagttgaaagcaatgcctagaatagacagtgaaggggccatatgtggagccaacttcaaggttgacaagtacgcaagggtcaacagcatacctcgagtatgaagccaggctaattggatggaatggaccca

SEQ ID NO: 24400 - DNA, 446 bp, Glycine max
  Clone ID: LIB3051-088-Q1-K1-B9
ctggaaagaccatcacccttgaggtggagagctctgacactattgacaatgtcggagccgagattcaggacaaagaaggtatcccaccagaccaacagaggctcatttttgctggcaaacagcttgaagatggccgaaccttggctgattacaacatccaaaaagaatctaccctccacttggtgctccgtctgcgcggtggtatgcaaatctttgtgaagacccttactgggaagaccattactttggaggtagagagctcagacacaattgacaatgtgaaggcaaagatccaagacaaggagggtatcccaccagaccaacagaggctcatttttgctggcaaacagcttgaagatggccgaaccttggctgattacaacatccaaaaagaatctaccctccacttggtgctccgtctgcgcggtggtatgcaaatctttgtg

SEQ ID NO: 24401 - DNA, 380 bp, Glycine max
  Clone ID: LIB3051-100-Q1-K1-E5
taccttttcaactttcaagggcagatctttttgagacgccactggtaagacaatcacccttgaggtggagagttcagataccatatataatgtaaagtccaagattcaagacaaggaagggatcccaccagaccagcaacgtctcatttttgctggcaagcagcttgaggatggacgtacacttgctgattacaacatccaaaaggagtccactccttacttggtgctgcagctccgtggtggaatgcaaatctttgttcatacattgaccgtaaagacaatcactcttgatgtccagagctcttacaccattgacaatgttaaagctaagattcatgacaaagagggtatcccaccagaccaacaaaggcttatctttg

SEQ ID NO: 24402 - DNA, 449 bp, Glycine max
  Clone ID: LIB3051-114-Q1-K1-A8
aagaaagaaaaccctagcttaccttttcaactttcaagatgcaaatcttcgttaagacactcactggtaagacaatcacccttgaggtggagagttcagataccatagataatgtaaagtccaagattcaagacaaggaagggatcccaccagaccagcaacgtctcatttttgctggcaagcagcttgaggatggacgtacacttgctgattacaacatccaaaaggagtccactcttcacttggtgctccggctccgtggtggaatgcaaatctttgttaagacattgaccggaaagacaatcacccttgaggtcgagagctctgacaccattgacaatgttaaggctaagattcaggacaaagagggtatcccaccagaccaacaaaggcttatctttgcaggaaagcagctagaagatggcagaaccttggctgattacaatatc

SEQ ID NO: 24403 - DNA, 434 bp, Glycine max
  Clone ID: LIB3051-117-Q1-K1-H11
agccattcgtattgtcgcagagaaagaaaaccctagctcaccgtttcaagatgcaaatcttcgttaagaccctcactggtaagaccatcactctcgaagtcgagagttcagataccatagacaatgtaaaggccaaaattcaagacaaggaagggatcccaccagatcagcaacggctcatttttgctggcaagcagcttgaggatggacgtacccttgctgattataacatccaaaaggagtccactctccacttggttcttcgtctccgtggtgggatgcaaatctttgttaagaccttgacgggaaagacaatcacccttgaggtcgagagctccgacaccattgacaacgttaaggctaagattcaggacaaagagggtatcccttcagatcaacagaggctgatctttgctggaaagcaacttgaggat

SEQ ID NO: 24404 - DNA, 401 bp, Glycine max
  Clone ID: LIB3051-053-Q1-K2-B1
cccacgcgtccgcccacgcgtccgcgattttcgattctcttctctgcaactatgcctaaccctaaggtcttcttcgacatgaccatcggcggtcaacctgccggccgcatcgtgatggagctctacgccgacgtgactccgagcaccgccgagaacttccgcgcgctctgcaccggcgagaagggcgccgggcggagcggcaagcccctccactacaaaggctcgtccttccaccgcgtgatcccgaacttcatgtgccagggcggcgacttcaccgccggaaacggcaccggaggcgagtcgatctacggcgccaagttcgccgacgagaacttcgtgaagaagcacactggtcccggcatcctctccatggcgaacgctcgtcccggaaccaacggatc

SEQ ID NO: 24405 - DNA, 430 bp, Glycine max
  Clone ID: LIB3051-062-Q1-K1-D6
ctaatccctatttttcttcctcagtagtgtcatttacgcttctcttctctgcggcagctatgcctaaccctaaggtcttcttcgacatgaccatcggcggtcaatctgctggccgcatcgtgatggagctctacgccgacgtcactccccgcaccgccgagaacttccgcgcgctttgcaccggcgagaagggcgtagggcggagcggcaagcccctccactacaagggctcgtccttccaccgcgtgatcccgagtttcatgtgtcagggtggcgacttcaccgccggaaacggaaccggcggcgagtcgatttatggcgccaagttcgccgacgagaacttcgtgaagaagcacaccggtcccggcatcctctccatggcgaacgccggtcccggaaccaacggatctcagttcttcatttgcacgga

SEQ ID NO: 24406 - DNA, 402 bp, Glycine max
  Clone ID: LIB3051-069-Q1-K1-G7
gcgattgtcgattctctactctgcaactatgcctaaccctaaggtcttcttcgacatgaccgtctccggtcaacctggcgggcgcatcgtgatggagctctacgccgacgtgactccgagcaccggcgagaacttccgcgcgctctgcaccggcgagaagggcgcctggcggagcggcaagcccctacactacaaaggctcgtacttccaccgcgtgatcccgaacttcatgtgccagggcggcgacttcaccgtcggaaacagctaccgaagcgagtcgatctacggcgccaaattcggcgaccaagaacttcgtgaattaagcacacttgtcccgggatcctcttcatggcgaacgccggtcccggaaccaacggatctcagttcttcatctgcacgact

SEQ ID NO: 24407 - DNA, 439 bp, Glycine max
  Clone ID: LIB3051-038-Q1-K1-F9
ggagaagcggactgggaacaagtgttacatgctttccgctagagatctgagcattatatggggtgacactactcattattgggagtggacaaccctaccagagtccaggttcgaagaagttgctaggcttcgagctgtgtgttggtttgacattactgggaggatgaacacccgcgttttgtcgccaaatactaattatgcagcttttcttgtgttcaagatgatcgatgccggtggatttcactacgatcctgcggtgttatcagtaggtattttgggaggcaatagcagtaccaaaaatgtttgtttggatcccaacttagtagataatcgacttgatgatagattccatggactccaacgtccaactgtgaggagcgatgggtggctggagattgagatgggtgagttcttcaatccaggcctagaagaagatgag

SEQ ID NO: 24408 - DNA, 401 bp, Glycine max
  Clone ID: LIB3051-002-Q1-E1-F11
cacacgcgtccgtctctgtaagccttgctttcaattttctccttacaaaaaaatcctttcccttctctagtccccataactagcaaaagaagccaatagaaaactgttccatatagtttcccattcaaacttgttttgattttcattttaactcaatggagaatagaacaagctctgtactcccacctggcttcaggtttcaccccactgatgaggaactaattgtgtactacctttgcaaccaagcctcatcaaggccatgccctgcatcaatcattccagaagtggatatctataagtttgatccatgggaattacctgataaaacagactttggagaaaaggagtggtacttctttagcccacgagagaggaagtatccaaatggggtgaggcctaat

SEQ ID NO: 24409 - DNA, 446 bp, Glycine max
  Clone ID: LIB3051-063-Q1-K1-F1
cccacgcgtccgctctaagctttgctttcaatcttctccttacaaaaaaaaatcctttccctctcttgtcccaataattagcaaaagaagccaacagaaaactattccatatagttttcaattcaaacttgttttgattttcattttaactcaatggagaacagaacaagctctgtactcccacctggcttcaggtttcatcccactgatgaagaactaattgtttactatctttgcaaccaagccacatcaagaccatgccctgcatcaatcatcccagaagtggatatctataagtttgatccatgggaattacctgaaaaaacagactttggagaaaaggagtggtacttctttagtccacgagagaggaagtatccaaatggggtgaggcctaatagagcaaccgtgtctgggtattggaaggccactggcacagataaagc

SEQ ID NO: 24410 - DNA, 337 bp, Glycine max
  Clone ID: LIB3051-110-Q1-K1-E11
cgatgatgtggggtatcccgaagagttgaacttggacagaagttctggtgatgattctatggaagaggatttgcctgagactaagcaaattgattctaagtttaatgttgatgaacttaaagacaaaatagagattgaagagcctattgtgaaggaggaaagtagtactatagctgttggagatggtctgtctgcaggagaaagtgatatccaccaagatattgacattagtccagttgctccaacagagaaacgaaaatttaatgaacaagcatcagttgggaacaatgagcctgcaaaaaggcaacgcatgtggaacactgaaacagttaaaggt

SEQ ID NO: 24411 - DNA, 445 bp, Glycine max
  Clone ID: LIB3051-096-Q1-K1-C12
ttctttctttttcattttgttttgctaccctaatagacacgaggactatttaaaaacccggacgcgtcgtatcgttccaccggcgccgtcaacctccaaggctcgaaccaccatccttccactcaaccgcgcacttgcactcgtcggctcaagctaccaccgcagcacgcctcagccgccgccagttaacaagcatttgctcataaagaaggaaggaagatggtgtttgggcaagtagtggttggtcctcctggctctggaaaaacaacttactgcaatggcatgtctcagtttctcagtcttattggaaggaaggttgctgctatcaatttggatcccgctaatgattcgttaccctatgaatgtgctgtgaacatcgaggatctcgtgaaactaagtgatgtaatggtggaacattcgcttggaccaaatggaggtcttgtgt

SEQ ID NO: 24412 - DNA, 455 bp, Glycine max
  unsure (1)..(455): unsure at all n locations
  Clone ID: LIB3051-067-Q1-K1-A11
cggactcgtgggcatccagctaagtataggatgctggtcggaatggttgatgtcatattttcggatgtggctcagcccgatcaggcaaggattttggggctgaatgcttcatattatctgaaagcaggaggtcattttgttatttcaatcaaggctaactgcatagactccacagtccctgccgaggcagtgtttgaaagcgaagtgaacaagttgaaggcagatcaattcaaaccattcgagcaagtcacccttgaaccatttgagagggaccatgcctgtgtggttggtggatacagaatgcccaataagaacaaagatgctgctgagtagattgctttccggtagccagtaggcttaatgtcatttcacgagattgtgttaattntgttttgaaacctcggttatcaaacatactttgtaccttttctatagtagtaatgtagtcaagtttg

SEQ ID NO: 24413 - DNA, 168 bp, Glycine max
  Clone ID: LIB3051-013-Q1-E1-H4
atttcagaaaatcataattttcgcagcaacaaaactacaagtttaccataacatatcacaagatggcccgttctccctcgcaagccaaacgtattggtgttcctgttgctcaatctatctccctaattcccgtccatcggcgatgttacgcagtggcatccgatgtat

SEQ ID NO: 24414 - DNA, 398 bp, Glycine max
  unsure (1)..(398): unsure at all n locations
  Clone ID: LIB3051-071-Q1-K1-E3
atcaaagaaaggggtggtggctgcttcgaaagcttaataatttgtttatttccagaacatcagagggttcgcagcagcaaactaacaaattactcatatcatataataagatggcccgttctctctcgcaagccaaacgtattggtgtccttgttgctcaatctatctccctaattcccgttcatcggcgaggttacgcagtggcatccgatgtatcggtaagagttggattgggtaatattgggcgaaggaatggaatcgtgggaggtgtagaagagaagcctgatacaagagatggttcaaaagcctactcaactgattgggccccagacccagtaacaggttactataggcccattaaccacacccctgaaattgaacccgtggagcttcngcat

SEQ ID NO: 24415 - DNA, 421 bp, Glycine max
  Clone ID: LIB3051-030-Q1-K1-F12
accgtccacgcgtacgttaaagatcttgcaacatctgatgcaattaaaatttcccgtgaagtgggccgtactggagataggaccattggagttttgacaaagattgatcttatggacaagggtactgatgctgttgatatattggaaggaagagcatataggttaaagtttccctggattggtgttgtgaatagatcacaacatgacataaacaagaatgttgacatgattgctgctaggcgtagagaacgtgagtacttcaatagtacccctgaatataaacaccttgcgaacagaatgggttccgagcatctggcgaagatgctctcaaagcatttggagacagtaatcaagtccaaaattcctggcattcaatctctaattaacaaaacaattgctgaacttgaagctgaactaactc

SEQ ID NO: 24416 - DNA, 339 bp, Glycine max
  Clone ID: LIB3051-075-Q1-K1-C12
caaggatatcgtcgtctaattgaatcttctctaataactattaggggccctgctgaggcagctgttgatgcggttcactcgctgttaaaggacttggttcacaaagctatcagtgagactttggacttgaagcagtatcctggtctccgggttgaggttggggctgctgctgttgattcactagaaagaatgagggatgaaagcaaaagagcaacactgcagctagttgatatggagtgtggctatctgactgttgatttctttcggaagcttcctcaagatgttgataagggtggcaatcccacacattcaaatttttgatagatataatgattcata

SEQ ID NO: 24417 - DNA, 291 bp, Glycine max
  Clone ID: LIB3051-112-Q1-K1-H2
aacgacgtagtgcgctcgcaaagagactatagttataccggagtgcacaagctgaaataggttcagttgcttggtctaagtagatatatgtatgccagatcacgtttatacgagagccagcagtgtcattattcattgtttccctatttccagttcattattcatactcattttttgttgtcatcttatccacttgtattgtcatcttaaatagatgagacgattctgaaaagggaaaaaaaatgattttttgggttatacaattgagtgtccccgtatatttcatttttc

SEQ ID NO: 24418 - DNA, 403 bp, Glycine max
  Clone ID: LIB3051-025-Q1-K1-G6
cgggaaaattctgcattcgtgagcactcgtgtggattggaaggagaccccagaagcacacgtattcaaggctgatattccagggctgaagaaggaggaagtgaaggttcagattgaagatgataaggttcttcagataagcggagagaggaacgttgagaaggaagataggaataacacgtggcatcgcgtggagcgtagcagcggcaagttcatgaggaggttcagattgccggagaatgcaaaagtggataaagtgaaggcttctatggaaaatggggttctcactgtcactgttcccaaggaagaggttaagaaggctgatgtgaagaacattcaaatctctggttaagcaaaagcaaattgttgctggtcttttgtgtttatctttggtgtttgagaaa

SEQ ID NO: 24419 - DNA, 322 bp, Glycine max
  Clone ID: LIB3051-044-Q1-K1-H1
acggcaccaccaccagcaccaccaccagcaccgttctattcttctttcacaatgggtatgtctcgtgattccatgcacaagaggcgcgccaccggcggcaagaagaaagcttggaggaagaagagaaagtatgagcttgggaggcagccagcaaacacaaaactatcaagcaacaagacggtgaagaggattaaggttcgcggtggaaacgtgaaatggcgtgctttgaggcttgataccgggaactactcttgggggagtgaggctgtgacccgcaagacaaggattcttgatgttgtgtacaatgcattcaacaatgagc

SEQ ID NO: 24420 - DNA, 352 bp, Glycine max
  Clone ID: LIB3051-107-Q1-K1-A3
tgccgatcttcaatctctgagccaatcgctttccgatccatctcaccatgatttgctccgcgagattcaattgcgcgttgaggaccttgcgaagcttgcagaggctgcacctgttcgtcgatctaaagttgaggatatgagtgctgatgttgtagatagcaatccttatcgtcggcttatggcacttcacagaatggctattgtggacaactatgaactaatacgcgatttatacggagccatagacggagtaagcggtgtacgaagtgtttcggctgagatgctaactagatgtggcatatgtacactcttgctgaatgattatgacatagtagagctagcgaacctgaat

SEQ ID NO: 24421 - DNA, 435 bp, Glycine max
  Clone ID: LIB3051-107-Q1-K1-A5
cgccgatcttcaatctctgagccaatcgcttcccgatccatctcaccatgatttgctccgcgagattcaattgcgtgttgaggaccttgcgaagcttgcagaggctgcacctgttcgtcgctctaaagttgaggatatgagtgctgaggttgtagatagcaatccttatagtcggcttatggcacttcagagaatgggtattgtggacaactatgaaagaatacgcgatttctccgttgccatagttggagtaggtggtgtacgaagtgtttcggctgagatgctaactagatgtggtataggtagacttttgctgtatgattatgacaaagtggagctagcaaacatgaataggttgttctttcgtccagatcaggttggcatgacaaagactgatgcagctgtacagactctgtcagacataaaccctgatgt

SEQ ID NO: 24422 - DNA, 414 bp, Glycine max
  Clone ID: LIB3051-046-Q1-K1-H2
ccggaactagattcactgccacactctcctatgcaacttattctcaaggcttcacaagacaaacgcttcgtatgtgaggcagctgagaaaagccttgatagcactgactacttggatttgccctatttctttattgccaaaattgcaaccatgccttaagaataagaatcctcgtatccgtgcaaaggcatcaatgtgcttttctcgaagtgtttcacgactgggggaagaaggcataaagacatatgggattgacaaattgatccaagtagctgcatctcagttgagtgaccagctccctgagtccagggaagcagcccgaactctacttcttgagcttcaaaatgggtatgagaaatcttctcatgatctcatgccagctactcctgtccataatgatcataataatgtcaa

SEQ ID NO: 24423 - DNA, 397 bp, Glycine max
  Clone ID: LIB3051-110-Q1-K1-D3
gttcagcaacaacgtgatcggactcctgaacttcctgaccttcctcctctccatcccgatgctggtggccggagtgtggctgagcaagcagggcgccaccgagtgcgagcggtggctggagaagccggtgatcgcactcggcgtcttcctcatgctcgtctcactcgccggcctcgtcggcgcgtgctgtcgcgtgtcgtggctcctctggctctacctcctcgtcatgttcgtcctcatcgttcttctcttcgccttcaccatcttcgccttcgttgtcaccaacaagggcgctggcgaagttgtgtctaatagagggtataaggagtataggcttggggattactcgaactggttgcagaagagggttaacaacactaagacgtggaacaagatc

SEQ ID NO: 24424 - DNA, 378 bp, Glycine max
  Clone ID: LIB3051-095-Q1-K1-B1
tccgcccacgcgtccggccggaaaacaggtcggttaggtgttaccggcaaacctcgctggaatgtcgaggattcagctctacggatttcatgtctcaaatgaagaatctgatcgaacagaaccagcaacaggccaggcagatcctcatccaaaatcctatgttaaccaaagcgcttttccaggcacaaattatgcttggaatggtgcaagcacctcaagtggttccaaaagttcagccaatggtttcacagaacaatcagcagccagtacaaccaacacaacagccaaatattcagcctgctccattattgcctgggcatggtggtgcacaggatcaagcaggtgtatctcaaacccaaattcctctgaggaaacacc

SEQ ID NO: 24425 - DNA, 430 bp, Glycine max
  unsure (1)..(430): unsure at all n locations
  Clone ID: LIB3051-015-Q1-E1-H10
acgacgcgtcagcccacgagtccgcccacgcgtccgcccacgcgtccgccttgcagtgccgccaaagcaaccctgccctaaaaattgaacagggcagagagcgagtgaacatgggaacctccgcgaacgctgtcgcaggtggtcgtggcggcgcccctgtccccaaagacgtcgactacgccaattacttctgcacctacgctttcctctaccaccagaaggagatgctctccgaccgcgttcgcatggacgcttatttcaacgccatttttgaaaacaaacgccacttcgctggcaagactgttttggatgtggggactggaagtggcattcttgctatatggtcggcacaagcangtgcgaagaaggtgtatgcagtggaagctaccaagatgtcggaacacgcacgtgcactcatcanagcgaataa

SEQ ID NO: 24426 - DNA, 378 bp, Glycine max
  Clone ID: LIB3051-001-Q1-E1-H9
cggagctgtctgtgcaaatttgcgttgttcttcgcggcacacctcactcactgaacggtaagtatggcggacaaggctgttacaatccgaacccgaaagttcatgaccaacaggcttctttccaggaagcagtttgtcgttgatgtccttcatccagggagggcaaatgtttccaaggctgaacttaaggagaagctggctaggatgtatgaagtgaaagaccctaatactgtatttgtcttcaaattccgaacacattttggaggtggcaaatccactggatttggtttgatttatgatacagtggagaatgccaagaagtatgagcccaaatacaggcttatcaggaacggccttgacaccaaggtagaaaagtca

SEQ ID NO: 24427 - DNA, 408 bp, Glycine max
  Clone ID: LIB3051-001-Q1-E1-C10
agcaggaagttccatcaaccctagtgagagaacctatccagaggagatgatacagacaggaatatctaccattgatgtcatgaattctattgctagaggtcaaaagatccctctattctcagctgctggtctcccccataatgaaattgctgcacagatatgccgtcaggctggcttagtcaagcgactagaaaagtctgataatcttctcgagggtggaggagaagaggacaattttgccattgtgtttgcagctatgggagttaacatggagactgcacagtttttcaaacgtgactttgaggaaaatggctcgatggagagagtgacccttttccttaatctggcaaatgatcctacgattgagcgtatcatcactcctcgtattgctcttactactgctgaata

SEQ ID NO: 24428 - DNA, 372 bp, Glycine max
  Clone ID: LIB3051-062-Q1-K1-B12
caaacttggcaagatgctcattttgggatctatcttcaagtgtttggatcccataatgactattgctgctggtcttagtgtaagagatccatttgtaatgccgtctgacaagaaggatcttgcatagtctgccaaagcccaatttgctgctcgtgactatagtgatcatcttgcactcatccgggcttatgatggttggagagatgctgaagcgcatcatgctggttacgagtactgttggcgaaattttctttcttctcaaacacttagggccattgactctcttctaaagcaattctcttatttgctcaaagatatttgtctggctaataacaattctgaaacctacaatacatggagtcatgaagagca

SEQ ID NO: 24429 - DNA, 196 bp, Glycine max
  Clone ID: LIB3051-074-Q1-K1-B4
ctttattggcctcaagctcgtcagacatactctccagagatcattgactatataaagtcactggatgctgatgaagatattgcccttttgaagttacatggatggaatctgccagttgaatgcgcgcgcactcttcaaaatctaaccatgcttctgaagaaaggagtgaagagagggatgaacccctttgccattg

SEQ ID NO: 24430 - DNA, 438 bp, Glycine max
  unsure (1)..(438): unsure at all n locations
  Clone ID: LIB3051-045-Q1-K1-D2
cccacgcgtccgtaaaaaacagagcaactactcaattcttcactctgtttccccttacgttacacactctaacacatggattcaccttcctccttcttcaactcaccctcttccggcttctgctccgaatcttcctctccggaagccttctcgtgggaagggtacctacccttcaacgagaacgacccgtaggagatgcttctatacggcatgatcgccggcgcgacaaccgaggagcactccggcgagagggcgagctcggaggagagtgctgcagcacggaaggagaagtcgtaccgcggcgtacggcggcggccgcggnggaagttcgcggcggagataatggactccacgcgccacgggatgagggtgtggctggggacattcgacagcgccgaagccgcggctctggcttacgaccaagccgngttctccatg

SEQ ID NO: 24431 - DNA, 399 bp, Glycine max
  Clone ID: LIB3051-051-Q1-K1-A2
gagcaactactcaattcttcactctgtttccccttaccttacacactctaacacatggattcaccttcctccttcttcaactcaccctcttccggtttctgctccgaatcttcctctccggaagccttctcgtgggaagggtacctacccttcaacgagaacgacccggaggagatgcttctatacggcatgatcgccggcgcgacaaccgaggagcactccggcgagagggcgagctcggaggagagtgctgcagcacggaaggagaagtcgtaccgcggcgtacggcggcggccgtgggggaagttcgcggcggagataagggactccacgcgccacgggatgagggtgtggctggggacattcgacagcgccgaagccgcggctctggcttacgac

SEQ ID NO: 24432 - DNA, 385 bp, Glycine max
  Clone ID: LIB3051-084-Q1-K1-B4
tcgctgaactattatccagaggtcctggaatgactgttcccggaggttggtgcatagggaagggggagaatggcaccgatccctgctctgaagtcggtgatactaacgttctgaggcctggcccaggttccaagagacttgaaacattaatcaactcattgttgtcgaatgaaaagttccggccaagacagtgcatgtgaggtgaaaaacaagaatcaactggctaaggccaaagacagttctggaggattattttccactggctttagtttacatgtgcacatttagttagcatgatcagtaaattagtttttcttttcagtaggagaagaaatagtgaaagcatacacactcttcaatattgagaagaaaaaagtgtgagaca

SEQ ID NO: 24433 - DNA, 294 bp, Glycine max
  Clone ID: LIB3051-096-Q1-K1-B4
tcgccttcttagacacatatgattgatacggactttatcatggacatgaaattctgagagcaggggctttaaaagagcttgctcgggaaaaagcccagtcggctacaaaattagccacttgttagatctgatggcgcgttagctggggtcaaaggtactcctgaatatgtgcggcagtgctgtgaatgtagtcttaagcgccttgatgttgaatgcattgaccgatactctcatcattcagttgacacttgagatccaaatgtagacaccgatatgggagctcaaaaagctggc

SEQ ID NO: 24434 - DNA, 374 bp, Glycine max
  Clone ID: LIB3051-075-Q1-K1-A2
cagaaagtggagaagaaaaagatggagaaaatagagcacaaaacggtgaggacgaatggaataaacatgcacgtggcatccattgggtcaggcccagttgtactgttcctccacggcttcccggagctttggtacacgtggcgccaccagcttctgtccctctccgccgtgggctaccgggccatcgcccccgacctccgcggctacggcgacaccgacgccccgcccgacgcttcctcgtactccgccctccacatcgtcgccgacctcgtcgggcttctcgacgctttgggaatcgagcgagtttttctggtgggccatgactggggagcctccatagcctggcatttctgcttgctgaggcccgatcgtgt

SEQ ID NO: 24435 - DNA, 449 bp, Glycine max
  Clone ID: LIB3051-108-Q1-K1-B4
ctcaccggcatctcgctggtggcgctgcaattcaaggccttgctgaagaaaaatctcttgctgtcatggcggaacaagagagccagcctcttacagttactctcccctctcatattcattttcctcatcttcgcaatcgacaaggccatcaaggcacagacctcgacctcctcctcctacaagagcgtcactgaccctcccatggaaccttctccccccatcactccctgcgaggacaagttcttcatcaaactcccctgctacgacttcgtctggagcggccacgccagccccacgttccagaccatcgtcgcccgcatcatgaacaacaaccccggccgtcccatccctccctccaaagtgaagtcttttaaggaaaagagtgaagtggatgcgtggcttctcagcaaccctatgcggtgccctggagcgcttcatttttcggagag

SEQ ID NO: 24436 - DNA, 449 bp, Glycine max
  Clone ID: LIB3051-083-Q1-K1-A2
cccacgcgtccggcagattgtttttgtctgttctaattggggaatcctatctgcttcagtttgatcaggggttccactaatccggccctaccaatggcaaagcttgcttatgccagttttaccaaatggcatgctcgagtttctggatgcacctgtcccctacatagttggtatcaagaacaagaccaatgaagttcagtcaaagttaactaataatgttatcctgattgacgtcagcagaaaccaggtgaagtcatcaacagtacctcaactgccaaggcagaaagagttaatctcttctttacgtccttatcatgaaactcttgtgggagaaagttacttgggtaggagaaggccagtgtatgaatgcacggaagtgcagacagaagctgctaaggggttcctatcggagttaaggtcttatttggattctctttgctataacattc

SEQ ID NO: 24437 - DNA, 439 bp, Glycine max
  Clone ID: LIB3051-082-Q1-K1-G3
cccacgcgtccgaaaaaaacaaaagcaaaacacaataaaaaaaaaaaaaaaaaaaaaaaaaggaaatgagttaattcattcgagcaacaacaataattaagttaattatacaaaattttactgaattatatattctgcagtaatgtatgaaaattctgatatcattaaaaaattgtttcaattcttgttttcttctaatgggatttataattttgtgtttaaaggtactaaattttaacatatggtattgcctcatttaatgtttgaatgatttaacttatttggcttaatgctttattgatgatattgttctacttcattgatcaccacgatgagcaatttcaattatgggcaagaatttatagtctttgcaatttatataaatcatattatgttattttttattcaacttacaatccaatatttgcatattgattct

SEQ ID NO: 24438 - DNA, 443 bp, Glycine max
  Clone ID: LIB3051-004-Q1-E1-B8
gagaaaccaaacacaaggaattagaatggcaaaggtaagagatcagaagctatacgtcaccgttccgagtctctttcggtgcccaatctccatggacgtgatgcgctctcccgtaagcctctgcaccggcgtcacatacgatcgcgccagcattcagcactggctcgactcaggacacgacacgtgtcccgccaccatgcaggttcttccctccaaagacttcatccccaatctcacgctccaccgcctcatccgcctctggctcctctcctccccctcctcctcctccgccgccgaacctccctccccctcctcctccgccgaccacctccgccctctcctccgccaaatccaaacctccgacgacaacgtccccggtattctctccaaaatcgccgaattcgccaagaaatccggtgagaatcgccggtctctcgccgcct

SEQ ID NO: 24439 - DNA, 414 bp, Glycine max
  unsure (1)..(414): unsure at all n locations
  Clone ID: LIB3051-005-Q1-E1-B8
caattttcaaagccagacagacaaacatgtccgagaatattgagtccaattctccttcgctttccctctttatctgaaaggtatggagtgttttgacttctggaagagataatggtgcagtgcctagacggattaaagcatttgtgtgctgctctggtaaattgttgtgatgccgattcgtcaaagcaacctacaggtttagaaaatccagaagttcttgcaagagaaacagtgtttagtgtaagtgagattgaagcgctatatgaattgttcaagaagatcagcagtgcagtgattgatgacggactaattaataaggaagaatttcagttggcattgttcaagacgaacaaganagagagcttatttgcagatagggtgtntgacttgtntgatacaaagcacaacgggata

SEQ ID NO: 24440 - DNA, 427 bp, Glycine max
  unsure (1)..(427): unsure at all n locations
  Clone ID: LIB3051-091-Q1-K1-G3
cccacgcgtncggtgaaatggttggagctaaatctcgtaatatctcttatttaaaagggagggtagcttcttggattggaagtcctacctcggttgccataccatttggagttttcgaacatgttctttctgataaaccaaaccaggcagtggctgagagggtcaataatttgaaaaagaagttaattgagggagacttcagtgttctcaaggagattcgtgaaacagttctacaattgaatgcaccatcccatttggtagaggagttgaaaactaaaatgaagagttctggaatgccgtggccgggtgatgaaggtgaacaacgatgggagcaagcttggatagctataaaaaaggtgtggggctctaaagtggggaatgaaagagcatacttcagcacaagaaaagtgaaactcgaccacgaata

SEQ ID NO: 24441 - DNA, 429 bp, Glycine max
  Clone ID: LIB3051-096-Q1-K1-G3
cgcagttcaagaattgaattcgttaatattttttcttctcttttatctgaatggcgaagcgcaggcttgaagacgggaagaagggcgtggtcgatctcatgcctcttttcgccaaggaactcctcgccggtggcgtctccggcggctttgccaagaccgtcgtcgctcctctcgaacgtgtcaagattctctttcagacgcgaaggaccgagtttcagagcacagggttgattggatcagctgttagaattgcgaaaacggaaggccttttgggtttctacagaggaaatggagcaagtgttgcaaggattattccttacgcagctattcattatatgtcctatgaggaataccgcagatggattatacaaacttttcctcatgtttggaaaggccctacccttgaccttgtggcaggctcactctctg

SEQ ID NO: 24442 - DNA, 460 bp, Glycine max
  Clone ID: LIB3051-101-Q1-K1-G11
gttcttgctttcaacgataaacctgtgaagaatctgaagagcttggccaacatagttgagagctgtgatgatgattatctaaagtttgatctggaataccaacagaaggtagtgttgaagactagcactgctaaggccgcaaccttagacatcctcaccacacattgtataccttctgcgatgtctgatgacctgaagacataaaaagttttggtgaaagttatttaaattactcccattggcctcatcttaatttttttttaagtgttattacacctagttcactataagattgcggtactattggatctgcactagtcaatgagataaaaaggcttcacatacagatgattagagaatcagaggatggggaaggaattagcataatacaacttacgcttcattaaattatcattaagtttatctctttcgagttggggtgttctgtactctatttata

SEQ ID NO: 24443 - DNA, 448 bp, Glycine max
  Clone ID: LIB3051-105-Q1-K1-G3
gcggcacaacaagtacggcgctttgccttcggcagctgagacttacaactatcgcacaaaaaagacccgttgctgccaaaccgggctcactttcaccaattcattattcccattttctccagaaccacaagaagaagaagtttgtaacaataatgggaatgaagggtgctcccgccactctctccgacgacgacgtcgttctcaagtccccaaacgaccgtcgtttgtaccgcctcatccacctgcccaacggccttcgcgccctgctcgttcacgatcccgagatttaccctgaggggcctccgaagcatgtttcaaacgaggacgaaattgaagaagaagatgatgatgatgaagaaaaagacgaggatgaagaaaaaaaagaagaagatgaagatgatgatgatgaagatgaagaagaagaagaaggaaatgaaatggatggggt

SEQ ID NO: 24444 - DNA, 443 bp, Glycine max
  Clone ID: LIB3051-105-Q1-K1-H1
gcacaacaagtacggcgctttgccttcggcagctgagacttacaactatcgcacaaaaaggacccgttgctgccaaaccacgctcactttcaccaattcattattcccattttctccagaaccacaagaagaagaagtttgtaacaataatgggaatgaagggtgctcccgccactctctccgacgacgacgtcgttctcaagtccccaaacgaccgtcgtttgtaccgcctcatccacctccccaacggccttcgcgccctgctcgttcacgatcccgagatttaccctgaggggcctccgaagcatgtttcaaacgaggacgaagttgaagaagaagatgatgatgatgaagaagaagacgaagatgaagaagaagaagaagaagatgaagatgatgatgatgatgatgaggaagaagaagaaagaaatgaaatggatggg

SEQ ID NO: 24445 - DNA, 392 bp, Glycine max
  Clone ID: LIB3051-020-Q1-E1-B12
agcaaagcttattccatcatacatgactcatgtcagcacacgtgtggcatgaacaataggttatttggcaccagagtatgcaataagggggcagctgacacgtacagcagatatttacagctttggtgtccttctcgtggagatagttagtggaagatgccacacaaattcacgattaccaataggagagcaatatcttttggaaatgacatgggaacgttatcagaatagagaattggtagggcttgtagacatatcactagatggccatttcgatgccgaggaggcatgtaagtttctgaaaattggacttctttgcactcaggacacgtcgaagctccgggcgaacatgtcatctgtggtcaaaatgctcacaagagagatggatattg

SEQ ID NO: 24446 - DNA, 410 bp, Glycine max
  Clone ID: LIB3051-107-Q1-K1-G11
caagaggtctttcctggggtggttgtgcctgatgttagagccttttctgctgcttcaagagatgggttggttcctggggatgtgatccttgaggtcaatggaagtgagttttcaaaaccaggtccaagtgcggtttctgaagttgttgatgttatcaagaggaaccccatgagatatgttttgctcaagattaaaaggggggagcagaattttgatataagggtcaccccatatgagaattttgatggaactgggaaaattggagttcagctatcccctaatgtgaagatagctaatgttaggccaaaaaatttggtgcaagctgtggagtttactgggcaagagttttggggtctggcctctaatgttttacatgggttaaagcagacttttttgaacttctcccagtc

SEQ ID NO: 24447 - DNA, 421 bp, Glycine max
  Clone ID: LIB3051-070-Q1-K1-F1
gaattctggttcatttttctttgtctgaatcgaacacacgtgagtatgtctgatcacgaggaccatgcagactacgcagacaatgaatcctttgcaaagcgtaggttcagggataggtccaaggaggcattgtccaaacaagccgttaagttagccaaacaagctgaagagcatgaaaggttcatcaacaaggtgactcatcttttgggggttcttggctttggttggttttgcttcatctttggggcaaggccacaagccgttcccttggtatattgtttgttctatgtggtatttgttcctctccgttggatatattacaggttcaagaaatggcattactatctcctggatttttgctattatgccaatacaatcttcttggtttacctccttttctacccaagcaatgaaaagcttt

SEQ ID NO: 24448 - DNA, 412 bp, Glycine max
  Clone ID: LIB3051-107-Q1-K1-G3
gccatccctcacagggatgtttacctgtctgataaaagtgctccatgggatgattctgttggtggatatagatcttctgcgagtaggactcattatgaaccgtcattatattcaaattctggatcaagtacaggagctcctttagcctttgatgtactctgtccatcaaaagtctactgtggcgtactttcttgtcaattgaattctggatttggcactggatccctatggtccagacagccttttgagcaggtcgacgtgtatgataaaattcataatgctgcaacagacgatgttggaaatacgcctagtgcaactactcatgaaattactgtaggtgtggatattgatggcaagctctttcaatcttttagacactgtatgttgaaactcttaaaattggaacggtctg

SEQ ID NO: 24449 - DNA, 424 bp, Glycine max
  Clone ID: LIB3051-111-Q1-K1-A2
catccttctcttcagatgatgaaggtttctatgcatttgaatcagaggatgacgtagatcgttcgattagatatgttggaaccaattaccctcatgttaagcggcgtaagaaattgcctgaccctgtagaaaaagagaaaggtgtcagtctttggtcaatgattaaggataatatagggaaggatctaacaaaagtttgccttcctgtttattttaacgaacctctttcctccctgcaaaaatgttttgaagaaatggagtattcatatcttctggaccaagcatatgaatggggaaaaaggggtaatagcctcatgaggattctctatgttgcggcttttgctgtatctggctatgcttcaactgaaggaagagtttgcaaaccatttaatccggtacttggggaaacatatgaagctcacta

SEQ ID NO: 24450 - DNA, 458 bp, Glycine max
  Clone ID: LIB3051-112-Q1-K1-A2
ctggaagcccaggtggccagctcatatcacctggatcagcattttcaacttctggcacctgaaccgcattccctgatagaccccctacacttgaattccccaaaggggaaacaccaaagatcttgggtgttgaacacttctccacccgaagatggggttctagactgggatctggatcattgacgccagacagtgcatggcaaggttcaagactaggttcgggatccttgactcctgatggtgttgggcttgcttcgcgattaggctctgggtgtgtgacacctgatggtctggggcaggaatccaggttaggttctggctgtttgacacctgacagtgctgggccaaccaatcaaaacaacatctctgtgcaaaaccagatttctaaagaagcaactcttgcagattcagacaatggacatccaagcaatgcaacattgggtgatcacagagtttca

SEQ ID NO: 24451 - DNA, 395 bp, Glycine max
  Clone ID: LIB3051-109-Q1-K1-E2
cccacccgttcgcttctaaatatatggggggaaacttttagatctcctcaatgaacggaaaaaggtttgcatgagggaggatgggaaacagcatgtttgcattgttggcttgcaagaatatagagtatctaaagttgagacaatcaaggaatttattgagagaggtaattccacaagaagtactggtacaactggagcaaatgaggaatcctctcgatcgcatgctatacttcagctttgtatcaagagatcagctgatgggactgaatcaaagcctacccgacttgtgggcaaactatcttttatagatctggctggaagtgaacgttgtgcaaatacgacagataatgataagcagactaagattgaaggggcagaaataaataaaagtttac

SEQ ID NO: 24452 - DNA, 430 bp, Glycine max
  Clone ID: LIB3051-031-Q1-K1-B8
cctaaccttccttccattcactactcctccttcacttaaaaaatttcagccttgcagggcctcaacttttacaattattacaatttagcatcactctttctcttcctcaatccaatcccctctcgatcgaaccaagaaaatttaagaacccaaaccatgtatttatcggagaagcctcgccccatcgatttctacaaggaggaaggcgcgcgtgacatgatgatcgaggtcgtctccaacggcgacctccctcctccgcctcctccgccgcctccgccgatgatcctcggcgagagcagcggcgaggaccccgaggtcgagataaaggccccgaagaagcgcgccgaaacctgggttcaggacgagacgcgctccctcattggccttcgccgcgagatggactcgctcttcaacacctccaagtccaaca

SEQ ID NO: 24453 - DNA, 364 bp, Glycine max
  Clone ID: LIB3051-078-Q1-K1-F1
actacccctgttgttcaacgcatttcagaatgcttcgtcaaaccacatggtttaacccaggtggcaaaccaaatatgtcatttaacacaatgggatattgttatgttgtctatgcactatatccagaagggtctactcttcaagaaacccacacctcttgttgatcaacatgatttcatagagaatctcttggagaagctcaaacactctctttctctcactctctcccatttctatcctttggctggccgatttgtcacccacaaaacacaagaccctccttcttatgctgtttctgttgattccaaaaacagtgatggagccagattcatctatgcaactctggatatgaccatatctgaca

SEQ ID NO: 24454 - DNA, 455 bp, Glycine max
  Clone ID: LIB3051-080-Q1-K1-F1
tcgcccacgcgtccgcccacgcgtccggatttgtgcacatagagacaccatctccacctgctgctggtggttatggcaatactgcatatagctacggaaaaaagccccattcctcctctgagaataccccgaaatatggttcaaagaaagcattgcttggagataatggagatagaggagatgcaacaagggttgctaaggctttcaagaaatcatcaccaaggatatgtaaatactggatcaacaacaattgtgcacatggtgaacaatgcctgtatctgcattcatggtttcatggtgatgggttttccacagtaacgaaacttcatgaacataagaagggtatcactggcatcgcacttcctgttggatccgacaaactttattctggcagcactgatgggacaagtaagatatgggactgccatactggtcaatgtgctaaaagcatcaat

SEQ ID NO: 24455 - DNA, 442 bp, Glycine max
  Clone ID: LIB3051-002-Q1-E1-A6
gcatgatgtgttttctgggtgtggttcacttcactgttgattcaggcacgctgtggtggaggaactagcggagtttggtgccacagtgtacacttgttccaggaatgaatcagagttgaatgcatgcttgaaggagtggagcagaagggattttcggtttctgggttggtttgtgatgcgtcttctccaccccaaagagagaaactcattcagcaagtggcaactgccttcaacggcaagctcaacatacttttgcttggcaacaaacaagttgttaatgagataacatctcaaacgccgattaagccgatggcagaaacgcatgaagtttcaaccttggtgactttcctttgtctgccagcagcatcctacatcactggacagattgtttctgttgatggaggattcactggtaatggatttcaaccaacatgagaaattc

SEQ ID NO: 24456 - DNA, 472 bp, Glycine max
  Clone ID: LIB3051-077-Q1-K1-F8
tctcctccatggacccaacttcgatccctacccctccggccaccaccgtccccttcactgtgggacccatcaatcacgtgacccccgccgacaacaccaacaccaaccaccctccttacgatgagatgatatacacagcaatcggggctctgaaggagaaagatggttcgagcaagcgagccataggaaagtacatggaacaagtgtacaaggaccttccacccacccactctgctttgttgactcaccatctcaaccgattgaaatccgctggtcttctcatcctcgtcaaaaaatcctacaagctccccggatctgatcctcttcccgtgctccaggcccaaaagccccgcggtcgccccccaaagctcagatcccagcccaacactgagctcacatggcctgcgctagccctcaacgacaaccctgctcttcaatccgcaaaaagaggcccgggtcgtcccaaaaagat

SEQ ID NO: 24457 - DNA, 437 bp, Glycine max
  Clone ID: LIB3051-116-Q1-K1-G11
ctctctctctctgtctctctgtctcctccatggccatctgcttcagtcccaaacacccgtgcttacgatgagatgatatagacagcaatcggagctctgaaggagagggatggttcgagcaagcgagccataggaaagtacatagaacaagtctacaaggaccttccacccactcaccctgctttgttgactcaccatctcaaccgattgaaatcctctgccctcctcgtcctcgtcaagaaatcctacaagcttcctggatctcatcatctgcctgcgctccagccccaaaagacccgtggtcgtcctcccaagcccaagccccaccccgtctggcctgctgcagccctcaccgacagccctgctcttctatccgccaaaagaggccccggtcgtcctaaaaagattggtgtcagcccgccaggcccaaggggtcg

SEQ ID NO: 24458 - DNA, 367 bp, Glycine max
  Clone ID: LIB3051-084-Q1-K1-F1
attgatctctcctggaagttgattttatctgtccttcagtatacaccagcaattgataggtggagcattggatgcatttttgcgaaggtgttgccaggaaagccacttgtttcctggtaaaagtgtcgtgcatcaattagatttgattactgatcttcttgggacaccaccacctgaaactattgcaggagttcgaaatgacaaggcaaggaagtacttgatggaaatgcggaagaaatctcctgtgccatttgaacagaaatttccgaatgcggatccattggcacttcgcctattgcaaagacttttagcatttgatccaaaggatcgaccaactgctcaagaggcactagctgatcccttcttt

SEQ ID NO: 24459 - DNA, 371 bp, Glycine max
  Clone ID: LIB3051-088-Q1-K1-F1
ctatatgctaatgagcctgctaatgcggaaaatccagttagcatgcctgttggtacagctgagccagaacgaacaagagatgctggtagtggtggcaatactaatcatgccagacctgctagcaatattgtaaacattgtaaagccagtaggctattcagcttcagtagccagtggaatgcaggatgttttagtaacctttgtggcttcaaagtctgatggaacagaagtgatggttgacaacaagtatctaaaagcatttaatccacttgttgtgatcaatttctatgagcagcatgttcgctacagccctacattgtgaccaaacagagaatagagtgtgcttttgagtttggagttaggttcacacga

SEQ ID NO: 24460 - DNA, 430 bp, Glycine max
  Clone ID: LIB3051-020-Q1-E1-F8
agcatcacttgccacgcttggagccctgaccaatccatggttgctttatgcccaaacaataatgaagtgcacatctataggttggttgaagacaaatgggaaaaggtgtatgttcttcaaaagcatgaccaggtaatttctgggatagactggagtgcaagatcaaatagaatagttactgcatcccatgatcggaattcatatgtctggaaccttgaaggatcagaatgggtgccaactcttgttatccttagactaaaccgtgctgccctttgtgttgaatggagtccaaaagaaaacaaatttgcagtgggaagtggagccaaaactgtttgtatatgctactatgagcaggagaacaactggtgggtcagcaaacttatcaggaaaagacatgattcttccgtgacaagtgtttcttggcatcctg

SEQ ID NO: 24461 - DNA, 437 bp, Glycine max
  Clone ID: LIB3051-027-Q1-K1-A6
cccacgcgtccgcaaacttccttcgcttgtagtactgccctaattccccaaattcgggtcttttttttttcttttttttttttttgttctttcttctcagatcccggtggccttttccctccctttctcaggaaaattcccccgattttctcgagaaagtgaaacggaattatgagctttcaggacatcgaggccgggcgccccttcggttcgaggcgcgggttgatgaatgggaagcaagaccccacgcaagcggtggctgccggcatattccagatcaacactgccgtctccaccttccagagactcgtcaacaccctcggaacccccaaagacaccctcgacctccgcgaaaagctccacatgacatgactacatattgggcaattggtaaaggatacatcagctaaacttaagcaagccagtgacattgatca

SEQ ID NO: 24462 - DNA, 247 bp, Glycine max
  Clone ID: LIB3051-028-Q1-K1-A6
gatcttttgactttgccttcattgatgctgtacaaggagaactatgtgaactaccatgagaggcttataaagctggtcaagattggggggttgcttgtgtatgacaacagactgtggggtggacgtgtttgctggcctgaagacaaagttccaccacacgctggatcagggagggacgctgcaattgaatttaacataacaatcacaaacgattctcgtggtgaatttgctcttacttccgtagggg

SEQ ID NO: 24463 - DNA, 439 bp, Glycine max
  Clone ID: LIB3051-026-Q1-K1-G11
aaaaatgtcgtcgttgataacagatttgctccgtcaaaccggcggcaccgccgtcatcgacggcggtctggcgacggagctggagcgccatggcgccgacctcaatgatcctctttggagcgccaagtgcctcttttccttccctcacctcattcgccaagtgcaccttgattacctggaaaatggtgcagacattataatcacagcatcttaccaagccaccattcaagggtttaaagccaaaggctattctgatgaagagagtgaagccttgctcagaagcagtgttgaaattgcacgggaggcacgcgaagtttactataaaaattgtgctggatgtcgttcgggtgatggggatgatgatggtagaatcctcaaacaacggcctatcttggttgctgcatcagtagggagctatggggcttatttggccgacggg

SEQ ID NO: 24464 - DNA, 457 bp, Glycine max
  Clone ID: LIB3051-103-Q1-K1-H9
aggcagcctcggatgttgttgttgtcgtcgtcgtgttcttaggttttgttctgagacgcggtttttcattcttctaatggcccagtccttcggtcagaccgagatcaactgggacaagctagataaaactagattctatgtcgtaggagctggactctttacaggtgtttcggtggcactttatcccgtttctgttgtgaaaactaggctgcaggttgccacaaaggatgctgtagagagaaatgtgttttctggtgcaaaaggactacttaaaacagacggcatccctggtttgtatagagggtttggcacagttatcactggtgcaattcctgccagaatcatattcctctccactctagagaccacaaaggtgactgccttcagaatgcttgagccatttagactatctgaaacttctcaggctgccattgcaaatggagttgcatgcatgaca

SEQ ID NO: 24465 - DNA, 428 bp, Glycine max
  Clone ID: LIB3051-113-Q1-K1-F9
cccacgcgtccgcgcagccttttcaccaaattgtcgaccaaccatcttcgttatttgcaggtttggtttcctttgaattacaatttacaagacaaggaaggcagcctcggatgttgttgttgtcgtcgtcgtgttcttaggttttgttctgagacgcagtttttcattcttctaatggcccagtccttcggtcagaccgagatcaactgggacaagctagataaaactagattctatgtcgtaggagctggactctttacaggtgtttcggtggcactttatcccgtttctgttgtgaaaactaggctgcaagttgccacaaaggatgctgtagagagaaatgtgttttctgttgcaaaaggactacttaaaacagacggcatccctggtttgtatagagggtttggcacagttatcactggtgcaat

SEQ ID NO: 24466 - DNA, 354 bp, Glycine max
  Clone ID: LIB3051-114-Q1-K1-F1
atttgccaactaagaaaccccaaaagttgttccaaatctggatttcaaaacaaaatataggttcgccgcaacccatttgaatctctgagagaaggggcatatcaaaatcaattttttttttttctttcttcttttccctgaagagcaaatgggggcgtatagagctgatgaggattacgattatttgttcaaggtggtactgattggggactctggtgtgggaaaatcgaaccttttgtcgaggttcaccaagaacgaattcagccttgaatcaaagtccaccattggggttgagtttgccaccagaagcattagggttgatgataaagttctcaaggctcagattttggacac

SEQ ID NO: 24467 - DNA, 399 bp, Glycine max
  Clone ID: LIB3051-002-Q1-E1-F9
cccacgcgtccgcatttgaggaacttgccatgggagtgcacagaggaggaactgattgagcttgggaagccgtttggcaaagttgttaacacaaaatgcaatgttggggcgaatagaaatcaagcttttattgaatttgcagatttgaatcaagccattgcaatgatatcgtactatgcctcatcatcagagcctgctcaagtacgtgggaaaactgtatacctacaatattcaaataggcaagaaatagtgaataacaaaactactgcagatgttcccgggaatgtattgttggtaacgattgagggtgcagatgcacgtcttgtcagcattgatgtcctgcacttggttttttcagcctttggatttgtgcataagattaacaatttcgagaagaca

SEQ ID NO: 24468 - DNA, 395 bp, Glycine max
  Clone ID: LIB3051-114-Q1-K1-D11
gagacatcagtgcctccttctggtctttctggtgttggtctcctactctgcgcgatcgtaatcagcgctgggcggctggagccccatcaaggacgtaaacgacagccacgtggcggagatcgccaactactcgctgagcgagtacgacaagcgttctggggccaatctcacccttgtcaaagtcgtcaagggcgagactcaggtcgattccggcaccaactaccgactcgtcctcaaagccaatgatggatccgccacggccagttacgaagccatcgtttgggacaagccttgtctccatttcatgaatctcacttccatgaaacccctttattaatcgtaaacccatactttatttcactggctctcttatcatatttcatgtgttagctatt

SEQ ID NO: 24469 - DNA, 381 bp, Glycine max
  Clone ID: LIB3051-032-Q1-K1-G2
cttgtgttgtgctggtgcattcttctacttcaattctcagccatgtcggtggttgcttgcgattgcaaccacaccacagagaaagataaccttagtggtgaaagtgagagctttcacaagttttttgagtgctggatttctgagcaaaaacaacatctgaaggaccttttaactgctgaatcaacccagctaattagtgatgaggagcttcaggcactgaatgataaagtggttgagcattatgagtactactacaaggccaagtcaaggtgtgcaaagcaagatgtattggccatgctgttcccaacatggatgagttccttggaagaagcttttctttggattggtggatggagaccaactatggcatttcacttgata

SEQ ID NO: 24470 - DNA, 373 bp, Glycine max
  Clone ID: LIB3051-046-Q1-K1-G7
gtgcattcttctacttcaattctcagccatgtcggtggttccttgcaattgcaaccacgaccacagagaaagataaccttagtggtgaaagtgagagctttcacaagttttttgagtgctggatttctgagcaaaaacaacatctgaaggaccttttagctgctgaatcaacccagctaattagtgatgaggagcttcaggcactgaatgataaggtggttgagcattatgagtactactacaaggccaagtcaaggtgtgcaaagcaagatgtattggccatgctgtccccaacatggatgagttccttggaagaggcttttctttggattggtggatggagaccaagtatggcatttcacttgatatattc

SEQ ID NO: 24471 - DNA, 438 bp, Glycine max
  Clone ID: LIB3051-047-Q1-K1-G7
gcaaaacttttcaaacccaaaaaaaatccaaaaaaagaaaaacaaaacgcttaacgcaatacaaaaaccacagtttcaatcacatctctctctctctttctcgcaaatttctactttctgggttttctatttgagattcgttgttccaatgagcgatcacttggtggtgttcgttgaccgtctcgcgcgccctgtccccgttgacccggtggcgcagccgccttccgagccgtctcctcctccggcccccgtgaatgctgacgcttccgggagctccggcaccgctccggtggaggattgtgacggagagggcggcggcgaggaggagccgctgatccagatggcggagtgccgcatctgccaggaggaggacggcgtttccaacttggagacgccctgcgcctgtagcggcagtcttaagtatgctcacagaaagtg

SEQ ID NO: 24472 - DNA, 402 bp, Glycine max
  Clone ID: LIB3051-020-Q1-E1-F5
aatttctctatcaggttgttactctatttataactcagatatttgagaaggctttaagagatggtgcttttgggacttctcttggtgggatttctctcgcagctgggttcatcagtttcagcttctggttatggttggatggatgcacatgcaaccttctacggatggggtgatgcctctggcaccatgggtggagcatgtggatatgggaacttgtacagctagagctatggaggacagactgctgctttgagcatagccttgttcatcaatggtttaagctgtggggcatgtctccatattaggtatgttaatgatcatatgtgcgtgccttctacgctcacttattgtcactgcaaccagtttctgtctccgttacaaaggattccctattaatgcatg

SEQ ID NO: 24473 - DNA, 426 bp, Glycine max
  Clone ID: LIB3051-048-Q1-K1-F10
cccacgcgtccggttactctatttataactcagatatttgagaaggctttaaaagatggtgcttttgggacttctcttggtgggatttctctctcagctgggttcatcagtttcagcttctggttatggttggatggatgctcatgcaaccttctatggagggggtgatgcctctggcaccatgggtggagcatgtggatatgggaacttgtacagccagggctatggaacaaacactgctgctttgagcacagccttgttcaacaatggtttaagctgtggggcatgtttcgagattaggtgtgttaatgaccaaaggtggtgccttccacgctcagttattgtaactgcaaccaatttctgtcccccaacaatgcactccctattaatgcaggtggatggtgcaaccctccccttcaccacttc

SEQ ID NO: 24474 - DNA, 441 bp, Glycine max
  Clone ID: LIB3051-034-Q1-K1-F5
cccacgcgtccgcccacgcgtccgcccacgcgtccgaaaagaagaagaagaagaagagaggaaagtagtagaagaatacagggcagagctgcagccaacaccacccatggctgaatccgtttcagtggacatggagatgatctttctcggcggaaaggaacatcatattcaaactggctgtggttctgtatctgtaatagtctgtggggatcaagaaaaaccagctctgatcacttatccagatatagcgctaaattatatgtcatggttccaagggttatttttctggccaaaagccacttctttggttcttcacaacttctgcatctatcatatcaatccttctgggccttaattgggaaccggttcaatttggtctgatgatccatcccttctgcttgagacttagcagatcaaataattgaggttctcaattatttt

SEQ ID NO: 24475 - DNA, 445 bp, Glycine max
  Clone ID: LIB3051-035-Q1-K1-F5
cagctttctgtcgcaaattgatgatatttgggtgttgatgcgcttctgtcatttggtttagattcaggatgaaaatgtcactggtttggcctctcttaacgaggcgaggattcagcacaagctctgagaatcttgttgcttctgtgctctttgagagattgccagtggtcattcccaaaattgatcctgtggtttatgcatttcaagaattctcgtttcgatggcgacaacaatatcaacgcagataccctgatgaatttcttgacaaatctgatgcaagggggaaaggtgattatcagattgactatgtgccagcaccacgaatcactgaagccgaccaaagtaatgaccgaaggtcattacaaagagctcttgacagaagactctaccttcttctctatggtaatgcatatggggctccaagtgggaagcctgtgtggcattt

SEQ ID NO: 24476 - DNA, 413 bp, Glycine max
  Clone ID: LIB3051-066-Q1-K1-E10
caggaaaattaaaaagatcgaccaaaatgatgagtgctttacgaacaaatggattaagaatgtgaggtttctcagggcttcgtactttcaatcctttggatactatgttgagacctggaatagattttcattctaaggtatccattgcaacttcttcacggcgagcaagagctaccagatgcgtgcccaaagccatgtttgagcgtttcactgagaaagcaatcaaagtaattatgctagcccaggaggaagcaagacgtcttggtcacaattttgttggaacagagcaaattctattgggtcttatcggcgaaagaactggtattggttgctaagtgcttaaatcaatggggatcaaacctaaagatgcacgaatggaaattgaaaaaattattggaaggggtaatggattt

SEQ ID NO: 24477 - DNA, 429 bp, Glycine max
  Clone ID: LIB3051-040-Q1-K1-F9
cttttggggagaccaccggagatatgtacggacggagtgattcttacgaatccgatttggcgcttctggattcgattcgccgccacttgctgggagagtccgaattgatattcggagccccgaatttcggttcgggtcggagctccagtttcagcagcttggactcgtgtttgagtgatgattggggagagcttccgtttaaggaggacgattcagaagatatggtgttgtacggcgttctccgtgacgcagttaatgtggggtgggtcccatccctcgatgccggctcgcccgagagcgtctcgtcgggttttccggcggtgaagctggagcctgatgtcatgccggcgttgattaatccgtgtccgccttcggcgccggcggtggaggagaagaagttgttccgccgaaggggaagcactaccgcgg

SEQ ID NO: 24478 - DNA, 430 bp, Glycine max
  Clone ID: LIB3051-011-Q1-E1-E8
agctagttctagatcgcgagcggccgctcgcgatctagacccacgcgtccgcccacgcgtccggtgactgggggtgactctgggattggacgagcggtgtgtaacttgtttgccttagaaggtgctaccgtgggcttcacatatgtgaaggggcatgaggacaaggacgcgagggacacgttggaaatgatcaagagggctaagacttcggatgctaaagatccaatggcggtaccagctgatttgggttacgacgagaattgcaagagagtggttgatgaggtcgtgaatgcttatggttgtattgacattctggtcaacaatgcagctgagcaatacgagtgtggaacagtggaggacattgatgagcctaggcttgagagggtctttcgtacaaatatcttctcctatttcttcatgaccaggcatg

SEQ ID NO: 24479 - DNA, 445 bp, Glycine max
  Clone ID: LIB3051-075-Q1-K1-C8
agcttggctacttctgatgctgaaaatcacagttccgaagccggtgttcagcttgtggaaagcgtctcagcatgcagtgttgagtctgttcagccaactaaggtcgattccccccctagcagtgtgtcgacaaatggggtttcttccccttctgtgccagcaaactcagaatcatctgatgctgctgctgctgcttctaagtctcccattcaggagcaagtttcaggcaccaaagaggacaaaaatgtggatgccaaagatggtgagagtgattcctcatgtggggttcctattgattcattccctaagcctgttgtgagtgtgaacattgagcctgagccaaaggttgtgcagcaggatatagtagacatgtacatgaaaagcatgcagcaattcactgagtcgctagcaaaaatgaagcttccgatggacttggaaagtgaac

SEQ ID NO: 24480 - DNA, 369 bp, Glycine max
  Clone ID: LIB3051-079-Q1-K1-G2
ggaaaaatcaagtttactcctgtatatccatattaaccttctggaatcagcatgactacacctaatggacggttcatgacacataaaaagatctgtttgtctatgagtgactttcatccagaaagttggaatcccatgtggtctgcatcaagcatattaacagggcttctctcattcatgatggacaacagtccaaccactggcagtgtaaacaccaccactgctgacaagcatcgtctagcaaaatcttacatttctttcaactgcaagaatgctacattcaggaagatgctccctgagtatgttgagaagtacaaccagcaacagctttctgagcaggctgctacatagagggtctcatcggatacg

SEQ ID NO: 24481 - DNA, 434 bp, Glycine max
  Clone ID: LIB3051-116-Q1-K1-E8
gtggtgtataacactcgatccagcacattaacaatggaaacgcagctttacgtgttcgctctctagactctgctctcaaacgccgtcgttttggaactctttttcttttccctttgattcttctctgtctttgtaaccgaaagaggggaaaatataattaataccgatttcgcaaccaattcttctcttgcgttgaattgggacaacgagaaattttggatctcagtttttggcaggaaaaaaaattgcatttgagtaaaaataacagagtgtagtgtagggtcttgttcttgatactgtgctaaatttgttggatggcggagaaatcatgcatcaagcgccttcagaaggaatatagagccctttgtaaagagccagtttctcatgttgtggctcgtccttcaccgagtgatattcttgagtggcattatgtg

SEQ ID NO: 24482 - DNA, 415 bp, Glycine max
  Clone ID: LIB3051-069-Q1-K1-E6
cccacgcgtccggtccgccatctccgccgtcctcctccagctctgcagccactgcgggcaggtggtcgtctccagagcgctgtaccgtgggacccacgcgctcctctcacactttctcccgcgcacgtgcggaatatccactagcttcagggaggcgacggatcttgacatgggtgatgctgccataatagaagggaaaacaaaagggctttacttcgaatctgcttccaaccccacccttacggttgcgaacatacctgaactgtgccacatggcacaccggaagggagtgactgtggtggtggacaacacgttcgcgcccatggtgctttcgccagcgcgtcttggtgcttatgttgtcgttcacagtatctccaagttcatcagcggtggggccgatatcattgcatgagcg

SEQ ID NO: 24483 - DNA, 380 bp, Glycine max
  Clone ID: LIB3051-045-Q1-K1-B9
cccacgcgtccgatcgtaacaagatcacatttgttttgttttgtgttgtttgtgttggggttgtgttgttgatctgataataacaacatggagggtgagaacaagaagtacatcacatctgaggagctgaaggagcacaataagccaggggatttgtggatttcaatccaagggaaggtttacaatgtttcagattgggcaaaggaccaccctggaggagaggttcccttgttgaaccttgcaagccaagatgtgactgatgcattcgtagcataccatccaggctcagcatggaagtatcttgatcccttcttcacagggtaccacctaagagatttcaaggtctcagaggtgtcaaaagattacagaaagcttgtgtc

SEQ ID NO: 24484 - DNA, 438 bp, Glycine max
  Clone ID: LIB3051-059-Q1-K2-B2
atacaactgaatctaattgcaattcctgtgagccgtggcaaagcttttgaatttagtgcgctctcctctctgtttacccttccagatattgcagatacagcaagatcatgagtgggacttcggaaaagaaacttgtaagaatcgatgttagttctgatactgtatgcccatggtgctttgttggcaaaaaaaatctagacaaggccatagctgcctccaaggataaatacaactttgagataatatggcatccctttcaacttagccctgatgcccctaaagaaggcattgacaagagggagtattacagaagaaaatttggatctcaatcagaacggatggaagctcggatgtcagaggtgttcaagaatgttggcttggaatatagcttgtctggactcacgggaaacactattgacagccacaggcttatatatt

SEQ ID NO: 24485 - DNA, 431 bp, Glycine max
  Clone ID: LIB3051-015-Q1-E1-G10
acgcgtcagcctcaaaccaaaccctcccgaattgaggtgacttgattttccctcttctctttttctctctcgtgagtctcgtccctgaagcgaaattctagaatggcggaagaagctcctgcatctgaaacctccgtcacaatgcctcaaccggcggaagtcatcaccgtcgacggaaccctaacctcttccgagaatgacaagagcggaatctccgtcgatgccgccgcgcacggcggtgaaaagacggtgtccaacgctgaaccttccggtagcgatcctcagaagtctctggagttggcgaacgagctgatggaaaaaggaaacaaggcaattaaggagaacgattttggagaagcagctgataacgtcagccgtgctctcgaaatcagagtggcacattatggtgaacttgctcctgagtgtgtgca

SEQ ID NO: 24486 - DNA, 415 bp, Glycine max
  Clone ID: LIB3051-079-Q1-K1-C7
gtttccttctctctttcaccgataaaacaaactaaattcttcttctttctactgaaaacgatagtaatggcgacgaatccaatcgaagcggggaacggcgacgccgctcctaaccctaacgcgactaccaaaccctccgtctacctccaagacacggaggagctgaagcgagtcttcagccgcttcgacgctaattgcgacggcaagatctccgtcaccgagttggacaacgtcctccgctccctcggatccggcgtcccgccggaggatatccagcgcgtcatggacgacctcgacaccgaccacgacggattcattaacctctcggagttcgccgtcttctgccgctccgacaccgcggatggcggcgacgccgagctccacgatgctttcaacctgtacgatcatgacaaga

SEQ ID NO: 24487 - DNA, 423 bp, Glycine max
  Clone ID: LIB3051-025-Q1-K1-E1
tcggaaagggtgcttcctgagtggtacacagagtaaggggtagagttaatacttagcacagaaatagtcaatgtggaccttgcggcaaaatctctgatcagtgcgggaggagaaacattcagttatcagattttgattgttgcaactggctcaacagatataaagctgacagattttggtgtacaaggagctgatgcgaaaaacatcttttatttgaaggaggtcgatgatgctgacaaattgtatgaggcaatcaaggcaaagaagaatgggaaagctgtggttgttggcggaggatacattggtctggagcttagtgcagtgctgaaactcaacaagtacgatgttaccatggtctacccggagccttggtgtatgccacgactgtatacagctggtatagctgaattctatgatgagtat

SEQ ID NO: 24488 - DNA, 397 bp, Glycine max
  Clone ID: LIB3051-031-Q1-K1-A7
cccacgcgtccgacccggagccttggtgtatgccacgactttttacggctggtgtaggtgaattctatgagggatattacgcaaataagggtgtaaatatcattaaaggaactgttgctgttggattcacttctaattctgatggagaggtaaaagaagtcaaactaaaggatggcagggtcctggaagctgatattgttgttgttggtgttggaggaaggcctcaaacagtcttagtcaaagggcaggttgaagaggagaagggtggaatcaagaccgatgctttcttcaaaactaatctctccgatgtatatgctgttggtgatgttgctactttccctttgaaattatacggtgaattgagaagagttgaacatgttgatcattctcgcaaatc

SEQ ID NO: 24489 - DNA, 424 bp, Glycine max
  Clone ID: LIB3051-037-Q1-K1-H9
cccacgcgtccgcggacacagaaccgagcttgcagcagcgatttctcatttcattggtcacacttcaacaatggcgaaaaccttcaaatacatcatcctcggtggaggagtttccgctggttatgcggcgagggagtttgccaaacagggcgttaagccaggggagttggctatcatttcgaaagaagcggtagcaccttatgaacgtcctgctctgagcaaggcttacctttttccagagtcccctgctagacttcctgggttccatgtctgtgttggaagtggaggagaaaggttgcttcctgagtggtacacagagaaagggatagagttaattcttagcacagaaatagtaaaggtagaccttgctgcaaaatctctgatcagtgctggaggagaaacattcagttatcagattttgatt

SEQ ID NO: 24490 - DNA, 160 bp, Glycine max
  Clone ID: LIB3051-046-Q1-K1-C6
cgactttttacggctggtatagctgaattctatgagggatattacgcaaatgagggtgtaaatatcattaaaggaactgttgctgttggattcacttctaattctgatggagaggtaaaagaagtcaaactaaaggatggcagggtcctggaagctgata

SEQ ID NO: 24491 - DNA, 425 bp, Glycine max
  Clone ID: LIB3051-059-Q1-K2-B12
accaaagccaaaaccatgttaggcactcctcacaccctcatactccttctcttcctcttgctcatcaccaccttctcccactcccttgtcttcaacataaccaacttcgacgaccctgccgccgccaccgccatatcctacgagggcgacggaagaaccaccaacggctccatcgacctcaacaaagtcagctacctcttccgcgtcggaagggccatctactccaaacccctccacctgtgggaccggtcctccgaccttgccatcgacttcgtcacgcgtttcaccttctctattgagaagttgaacttaaccgaagtcgcctatggagacggcttcgcgttttacttggctccgttggggtaccggattccgccgaactccggcggcggaacctttgggcttttcaacgctaccaacaacag

SEQ ID NO: 24492 - DNA, 356 bp, Glycine max
  Clone ID: LIB3051-061-Q1-K1-G8
cttatataatccattcttctccctggttttttctttcttcattccccattaccatgggttgcctttccaccaccccttttcttcccttcactgcaaaaaatgcttctactagaatccctcctcccacatcattctcttacagcaagcaacgtagtaacagggatcccaagaaggttgtctgcgcctgcatcgctcctcctcaaaacttcaagagccaggactcttccgccattcatttcaatggttcgtccaaatcagagcaattgagcactgcgcgggatcatgaggatgattctgatgttcttattgagtgtagagacgtgtacaagtcttttggggaaaagaaaatcttaaat

SEQ ID NO: 24493 - DNA, 427 bp, Glycine max
  Clone ID: LIB3051-062-Q1-K1-B8
ctcagaaagattttcaaaacttgctgtccaattatggtggtgctccaagagacattgggactgagctgtccactgctgcccttagtccacagccatttggggtgccagacatgccttttaagcctggatgctcaagtgatattgccatcaatgatcctggggttttgaataatggcttgtgggctaatcagactcaacgaatgcgaacatatactaaggttcaaaaatgtggctctgttggaagatgtattgatgtcacccgttacaagggatatgatgaactccggcatgatttggctcggatgtttggaattgaaggacagctagaagatcctcaaaggaccgagtggaaactagtatatgtggatcatgaaaatgacattcttcttgttggtgatgacccttgggaagaatttgtaagctgtgt

SEQ ID NO: 24494 - DNA, 376 bp, Glycine max
  Clone ID: LIB3051-062-Q1-K1-C10
acttaatttccacttctaattaacaaagttaagcaagcattgacttggtacctataaggagtaatggctgtggctttgacgattgtgttgagcttgctctcggttctctcttctgcatcttgtgcacgaatggtgggggggaagacggaggtccccgacgtgagaacaaacagggaagtgcaagagcttggaaggttcgcggtggaggagtacaaccgcggtttgaaacagtggaagaacaatgggagtgaacagttgaacttttcggaggtggtggaagcgcagcaacaagtggtgtcaggaatgaagtactacttgaagatctcagctactcataaaggggttcacaaaatgttcacctcttgtgtggtggtca

SEQ ID NO: 24495 - DNA, 359 bp, Glycine max
  Clone ID: LIB3051-063-Q1-K1-B12
aaaaaataaataaataacaaatttaaagctagcatagactagaaacctaaaaaatagaaatggctagaaggctatgacgattgtgttgagcttgctctcggatctctcttctgcatcttgtgcacgaatggcgggggggaagacggaagtccccgacgtgagaacaaacagggaagtgcaagagcttggaaggttcgcggtggatgagtacaaccgcggtttgaaacagtggaagaacaatgggagtgaacagttgaacttttccgaagtggcggatgcgcatcaacaagtgatgtcacgaatgaagtactacttgaagatctcagctactcataaaggggttcacaaaatgttcacct

SEQ ID NO: 24496 - DNA, 401 bp, Glycine max
  Clone ID: LIB3051-037-Q1-K1-A6
cttccgaaactctggacaatctttactccgagaagaggtcactgaccttgatattacagagattgttagcaaatggaccggtataccattatcaaacctccaacaaacagagagagaaaagttagtcttgctggaacaggttcttcacaagagggtggttggtcaggatactgctgtaaaatctgtcgctgatgcaattcgccgttcaagggctggattgtctgatccaaatcggccaattgcaagcttcatgttcatgggtccgactggtgttggcaaaactgagcttgccaaggctttggctggttacttgtttaacactgaaaatgctcttgttagaattgatatgaatgagtacatggagaaacatgctggttcacgtctaggtggagccccttctg

SEQ ID NO: 24497 - DNA, 355 bp, Glycine max
  Clone ID: LIB3051-042-Q1-K1-A6
gtgaatcctccgccgagcacttcccgccaccactcgatccgccgaaacctgagaatgtcccttaacaacaacgattcaaagctgaacccttcttctctgctgaattccgtcaccaaattactatggggccaatcgctcccgccggggctcctcgtcgccaccgtccgcaccgcctggaactccacgtggcacctcatgatgtcgcagctcgccccctccgactcctcaggcggctactcccgccccgccttcaaattccgcttctcctcaaccaccccttcccagggcagcagcctccacctctacgtgggcctggcatgcccatgggcccaccgcaccctcatagtgcgcgcgc

SEQ ID NO: 24498 - DNA, 329 bp, Glycine max
  unsure (1)..(329): unsure at all n locations
  Clone ID: LIB3051-072-Q1-K1-B8
gtttacatcacgagaaacaacgccacgctgaaatcccttttttgtgtccatgggcagcagcaggctgaggctagtgttgggcttgtctgttttgagttgtgtgcttgtgacatcctcagctcaaacgtgcagaaaccaaacattctcaaacagggtgtttgccacatgtcgtgatcttccacagttgacggcttacctgcactggacatacgaccaggctagtgggaggttggagatagcattcaaacacgctggaatcacctngaccaacaggtgggttgcatgggccatcaatcccagaaacaccctcgacccaaccatgattgggg

SEQ ID NO: 24499 - DNA, 354 bp, Glycine max
  Clone ID: LIB3051-049-Q1-K1-A6
tcgtccacgcgttcgtccactcgtccgtgcatgcaggccggtgctttggaggatgttgttagggcatctcatcttgagatcattgagcttaagcatactgggggtgaattaaaggcagaattgaacttacttaagcagcatatagaagctcaagtcaaggagcttgaccatagaatgcatcggatagaggaacttgaagagaaagagagagtggcaaacgaaaatattgaaggactgatgatggacattgctgctgctgaagaagaaattaacagatggaaagtggcagcagagcaagaagctgccgcaggcagaggcgtcgaacaggaatttgtggcacagttgtcagcactt

SEQ ID NO: 24500 - DNA, 426 bp, Glycine max
  Clone ID: LIB3051-054-Q1-K2-A6
ggcaactctaacgtttctggaactctgggcccagaacttggccagctacagcatctgcggtacttggagctctacaggaatgagataacaggaaagattcctaaggaacttggtaacttgaaatcacttattagcatggatttgtatgataacaagttggagggtaaaattccaaaatcatttggaaagttgaagtcacttaaattcttgcggctaaacaacaacaagttgacaggatccatcccaagagaactcactcgtctcactgatctcaaaatctttgatgtttctaataatgatctctgtggaacaataccagttgagggaaactttgaatctttcccaatggaaagttttaaaaaccacagggttagtggtcccgagcttgaaggacttggttcatatgaatttggatgctgaagaaga

SEQ ID NO: 24501 - DNA, 468 bp, Glycine max
  Clone ID: LIB3051-083-Q1-K1-B8
gttatggcaggacagaacttgtgcgcatactattgcagattgctgaaagaaacagctaggatgttgatgatgacttggcgttgggttttgcctcccattatggcaagatatgaactatggattgcttggtggaagatggaaatgccatacactttatgggccctttgatgagagctgctgagaggcgttgcatgcaagtagttgagtggtttgtgcagaggggttgtcgagacatgctactatgccttgaacttacagctgccacttatagctgccatgttcacattgcagctgatcttctgacgcacgtacctcatgatgtcctagcagcactgagtgttgaaattcttaatgcgcgtgctgagcgcaacagaggatctcttgatggtgtagcattatttctccaatctgacttcttaagtgatcctgcagctacttatgctgttgcagatattattgctaaatcag

SEQ ID NO: 24502 - DNA, 434 bp, Glycine max
  Clone ID: LIB3051-060-Q1-K1-A6
gtttctcatccctaatgggaaaatgtttcctacagtgggaaggattcacatggctccttgcagtgatgaatatttgtttgttgaaattgctaataaggccctgttttggcagcagcaaaactattatggtgttgatttgacgcccttacatgggactgcctttcaaggatacttttctcagcctgtggtggatgcttttgatccaaggttgttaatagctgctcctatgttccatgtgttagactttaccaaaataaaggaagaagagctgtatgaaattgacattcctctcagattcacagccactgtgggtgccaggctacatgggttggcatgttggtttgatgtactgttcaatggaagtactgcacgaaggtggcttaccactgcccctggttcacctacaacccactggtatcagttacgctgtgttc

SEQ ID NO: 24503 - DNA, 433 bp, Glycine max
  Clone ID: LIB3051-087-Q1-K1-B8
gtctgatcatcacatccagcgtgtgacgctcattaatcatatcactaggtctgatgatgagaatgttggatctcatgggcgtactggcaatctagggtattcaactgaatgcggtgtctggagcaaaccttattatgtcaatcggaattgctgtcgcgttctgtgtgcatatagtacatgcttttacggtaagcttgggggataggagccaacgagcaaagacagcattgtgtaccatgggggcttccgtattcagtggaatcacacttacaaaattagtcggagtcctcgtcctttgcttctcaacatcacaaatttttgtggtgtattacttccaaatgtatctggccttggttctcattggcttcttacacggtcttgtgtttctacctgtggttttgaacttgtttggtcctccattaagatatacagt

SEQ ID NO: 24504 - DNA, 417 bp, Glycine max
  Clone ID: LIB3051-039-Q1-K1-E2
cggacgcgtgggctttgatgaagtcatatactctgttgacatgccacaggaaatgaaggaacagggtgtacaataggacagattggtgcttttgaagggtgttagtggtgcattcaggcctggtgttctcacagctttgatgggtgtaagtggagctggtaagactactttgatggatgttctggctggtaggaaaaccggaggatatattgatggaagcatcaaaatttctgggtaccctaagaagcaagaaacatttgctcgtatctctggctactgtgagcaaaatgatatccactcacctcatgttacagtttacgaatccttgctctactctgcatggcttcgtttaccttcaggtgttgattccaaaaccagaaaggttagttagtgtgaactacaaacagtaaaacatgt

SEQ ID NO: 24505 - DNA, 305 bp, Glycine max
  Clone ID: LIB3051-039-Q1-K1-E3
actttgccgacaagccacaggaaacgaaggacggtacgtacaagaggagagaggggagctaatgaagggagtaagaggagcatacaagcctggagttctcacagcttttatgggtgtaagtggatctgttaagactacttttatggatgttctgtctggttggaaaaccggaggatatattgatggaatcatcaaaatttctgggtaccctaaaaagcaagaaacatttgctcgtatctatggctactgtgagcaaaatgatattcactcacctcatgttacagtttacataatcctagctctac

SEQ ID NO: 24506 - DNA, 248 bp, Glycine max
  Clone ID: LIB3051-069-Q1-K1-A6
tggttggattgaccggcttcagtggtctcttaactgaacaacgaaagagactgactgtggcgggtgaattactggctgacccgtccataattttcatggatgagcctacttctgggttagatgcaagagctgctgcaattgttatgagaacagtcatgaatactgtggacactgcaagaaccgttgtttgcaccatacatcagactaacattgacatatatgaagcattccatgagctattactaatg

SEQ ID NO: 24507 - DNA, 383 bp, Glycine max
  Clone ID: LIB3051-063-Q1-K1-G11
gtgattgtgggaaaaagatgccgcagaggcactcgaagaacaacaacgatcttgcgttgttcacgtacgatgagaagcgaaaactaggttatgggacccagaaggagaggttgggcaaggactccattaagcccttcgatgcttgctctctctgcctcaaatccctaattgatcctatgagctgccagaaaggccatctcttttgcaaagagtgcattcttcagtgcctcttgtctcagaagaaagacattcaaaggaagcttgcagcccatgctgctcagcagaagcaagaaaaagaggaagaagaagagaagttgaagttgcaaaaggctaaagagcttgatgcatttgatcaacaaaatcatggtgcttgtccacaattc

SEQ ID NO: 24508 - DNA, 468 bp, Glycine max
  Clone ID: LIB3051-071-Q1-K1-A6
tctgcttcttcttcttctctattcctatgtttccataacaacaccgccgattcattgcgtcagcgtcactaacttcatcatcataaaacattttcatataaataaatatattcattcattcattcattcacataataatcattaactatcattctctcttctctctctctctttcaattttagacagacaaaagaaagaaagaagagaacaacagagcaatggaaggaggaggagctgctccgtcggccgacaccgtgatgtccgacgcggcgccaccgtcgcagcagcctccggtggcgatggggatcgagaatattccggcgacgctgagccacggtggcaggttcatccaatacaacatattcggcaacatattcgaagtcaccgtcaaatacaagccacccatcatgcccatcggaaaaggcgcatacggcatcgattgctcagtttgaactcggagacgaatg

SEQ ID NO: 24509 - DNA, 440 bp, Glycine max
  Clone ID: LIB3051-104-Q1-K1-B5
gaccgactcgtcctctttgctagctcaccgttagcatcttgatttccggtgagttaattgttcattttgcaaatgccaccttatataggtaggttattaacaatttaacttattgttctgtacattactttgtgttttccaaactctaccttcctctacttttgcacttttgatacctactatactgtaaatttataacgtaaattttttaaaatgctattttttaaatcacacttattgacaatacaaaagattgcattatgaaattgacaagcattaatgcggtctggatacattttcacgtagttatgaaaaatttggcttacaacgcatgtattatatctagagtttaatatcttacatgtgcacatctttggttcataaattatttatgtcaaattcctaagatgataaatagcttaatcaatcccacatatcta

SEQ ID NO: 24510 - DNA, 413 bp, Glycine max
  unsure (1)..(413): unsure at all n locations
  Clone ID: LIB3051-104-Q1-K1-B7
cgcgtccgctttgctagctcaccgtgagcatcttgatttccggtaagttaattgttcatttttcaaatgccaccttatataggtagtttattaacaatttaacttattgttctgtacattactttgtgttttccaaactctaccttcctctacttttgcacttttgatacctactatactgtaaatttataacgtaaattttttaaaatgctattttttaaatcacagttatggacaatacaaaagattgcgttatgaaattgacaagcatgaaggcggtctggatacattttcacgtggttatgaaaaatttggcttccaacgcaggtattatttctagagtttaatatcttacatgtgcacatctttgnttcataaattatttatgtcaaattcctaagatgataaatagc

SEQ ID NO: 24511 - DNA, 435 bp, Glycine max
  Clone ID: LIB3051-104-Q1-K1-B8
ctttgctagctcaccgtgagcatcttgatttccggtaagttaattgttcatttttgaaatgccaccttatataggtaggttattaacaatttaacttattgttctgtacattactttgtgttttccaaactctaccttcctctacttttgcacttttgatacctactatactgtaaatttataacgtaaattttttaaaatgctattttttaaatcacagttatggacaatacaaaagattgcgttatgaaattgacaagcatgaaggcggtctggatacattttcacgtggttatgaaaaatttggcttccaacgcaggtattatttctagagtttaatatcttacatgtgcacatctttgtttcataaattatttatgtcaaattcctaagatgataaatagctaaatcaatccaacatatctattgctgatc

SEQ ID NO: 24512 - DNA, 439 bp, Glycine max
  unsure (1)..(439): unsure at all n locations
  Clone ID: LIB3051-074-Q1-K1-A6
cccacgcgtccgtgagtcttcaaaaagctcatatgatgaagaattccctggctgctgagatgcggatcagaaatagattttactgcagaatgcaacaagggtcactgatactgcacagttcatgaagatatatcggagtagagaagttggtcaatcatatataacctgcgtttggactacttttgttgcaatggtgcatgcgctatggctaatgattaaaattagacctgaagtgatactttgcaatggacctggaacttgcattcccctctgtgctattgcatttatatttaaggatcgtattcccttccttattcttctatcatttccataatttcatttatccacttcatttgataaattatggttctactgaaattgntcaagcttctgtgcaggtactgggaatcagatggtcattaattntctacgttgagag

SEQ ID NO: 24513 - DNA, 391 bp, Glycine max
  Clone ID: LIB3051-075-Q1-K1-A6
accacgcgtactgtgggatgaaaagtccacccgtttgacaaactgtgatcctcatggggaacacgcagttgtcaattgtaacaatcctcaagaggtagaagataacagagaaattatcttcacatatgatgttgatttccaggagagtaatgtgaagtgggcttcaagatgggatgcctatttgctgatgagtgatgaccaaattcactggttctcaattgtgaactcattgatgattgttctctttctttcgggcatggtagcaatgataatgctgcgtacactttaccgtgatatttcaaagtacaatgagttagagacccaatacgaagcacatgaagagactgttttgaagcttgtccatggtgatgtttttaggccatcaaacaac

SEQ ID NO: 24514 - DNA, 452 bp, Glycine max
  Clone ID: LIB3051-069-Q1-K1-G11
gcttcttagagggactttcggaagacaattcagagagttcttagtgtccagtattccggtccggacggtgttcaaatatctccagagtgtcgccaccttatttcaaggatctttgtttttgacccggcagagagaatcaccatgtctgaaatctggaaccatgaatggtttctgaagaatctcccggcagacctgatggacgagaagataatgggcaatcaatttgaagagccagaccaacccatgcagagcatcgatacgatcatgcagataatttcagaagctaccgtaccagcagttgggacctattcttttgaccagtttatggaggaacaaatttatgacttggaatctgaatctgatgctgaatctgatcttgatatagatagcactggggagatagtgtatgccatatagtttgatcttagctacacttgaaagacaacaacata

SEQ ID NO: 24515 - DNA, 431 bp, Glycine max
  Clone ID: LIB3051-103-Q1-K1-B1
gcagggcagaggagaaggccttgtgattcatcatgacgaatgaacccaacaacaagtgacgaggtttttctgtgtttagttggcccagatacccgctacaccttcgctggtaatctctataatgctttgcgccgcaacagaatcaatacctttttcacagaagataatcatcatgatgagctactactcatgaatggcgaccaaatttcaccctttgctctaagagcaattaaagaatcaaacttgttaattgttgttctctctccaaactacgcatcatccccaaggaatcttgatgaatttgtggccatcgttcggtgtataaagaggaagaagcaactgctgcttcccgtcttttacaaagtggaacgaggggaaataatggatgcaatatttagtggacctgatcaacaagcgctctgtgtattcga

SEQ ID NO: 24516 - DNA, 416 bp, Glycine max
  Clone ID: LIB3051-107-Q1-K1-B8
cccacgcgtccgcccacgcgtccggccatatatggatgaaatatttcatataccacaggcagagcagtactgcaagggaaattttggaagttgggaccctatgattaccactcctcctggcctgtactatctttcacttgcccatgttgcttctttgtttccaggcttttactgtgtagaagctgcttcaatttctgacttgtgctctgctgcaattcttcgatcaattaatggtgttttagcagttgtctgtagtttaattctatatgacatagttactcacttgaagccaacacttaatgataggaaggcgatgcttcatgcagtggtcctatccttgtacccccttcactggttcttcacttttctctattatacagatgttgcatctgttactgcggtgctggctatgtatc

SEQ ID NO: 24517 - DNA, 292 bp, Glycine max
  Clone ID: LIB3051-110-Q1-K1-B8
cccacgcgtccggccttttctttcctagctactacactttcattctttgcttcagagaatgaactagctaggatggtcagtgttgaagagatccgtaatgcacaacgtgcagagggccctgccactgtcatggctattggcaccgcaacttctccaaactgtgtcgatcagagtacctatcctgactattatttccgcatcaccaacagcgagcacatgaccgagctcaaagaaaaattcaagcgcatgtgtgataagtcgatgattaagaagcgatacatgtacttaaaat

SEQ ID NO: 24518 - DNA, 433 bp, Glycine max
  Clone ID: LIB3051-111-Q1-K1-B8
ataacaagaaggcatgtgtgggacataattgaaaatgcaaagagagggcgtgccattgttgttacaacgcactctatggaagaagctgacattctaagtgaccgtataggaatcatggcaaaaggaagtcttcgctgcattggcacctcaatcagattgaagtcccgctttggtactggttttattgctaatatcagcttcaatggaaacaatatcgaacatagtcctgccaatggagatgcaatatctacagaacgtcgtgaggcaatgaagaaattctttaagaatcatttagatgtagtgccaaaagaggagaaccataacttcctaactttggagattcctcatgacagagaggcgctcatgacgaatttcttttcagagctccaagatagagaagaagaattcgcatatctgatatccagctgggtct

SEQ ID NO: 24519 - DNA, 381 bp, Glycine max
  Clone ID: LIB3051-079-Q1-K1-G10
cttcttgttaaggttgtcggtgatgcaattgttgttggttttgtgctaagagaagaaggtgttgggaaggtttctttcgtcttttgatgatgatgtcacacaacttaacggggcagcttgtgggtgcagagatacatggctttcacacgttggatgatttggatgttagtaatactatggaggaagcaaaaagcagatggcttcgtcccaatgagattcatgccatactctgtaatcacaaatatttcaagatcaatgccaagccagtaaatttgcccaaaagtggtactattgtactatttgaccgcaagatgcttatgaacttcagaaaagatgggcacaattggaaaaagattaccgatggaaaaactggtaaagaag

SEQ ID NO: 24520 - DNA, 387 bp, Glycine max
  unsure (1)..(387): unsure at all n locations
  Clone ID: LIB3051-079-Q1-K1-G11
cttattgttaaggttgtcggtgatgcaatagatgtcggttctgtgctaagagaagaaggtgtggggaatgtttctttcgtattttgatgatgatgtcacactacttaacggagcatcttgtggttgcatagatacatggctttcacacgttggatgatttggatgttagtaatactatggatgaagcataatgcagatggctttatgccaatgagattcatgccatactctcgaatcacatatatctcacgatcaatgccaagccagtaaatttgcccataagtggtactattgtactatttgaccagacgatgctaangaacttcagaatagatgggcacaattggaaaaagaaaaccgacggaaaaactgtttaagaatcccatg

SEQ ID NO: 24521 - DNA, 431 bp, Glycine max
  Clone ID: LIB3051-114-Q1-K1-B8
ctctgattggagtaaatggatatgttcaatttaaattcatgaagggattcagtgcggatggaaagatgatgtacgaggaagcaagccaagttgctaatgatgcagttggaagcataagaacagttgcttctttctgtgctgaagacaaggttatggaactatacaagaataaatgtgagggccccatgaaaacagggatactgcaagggttgatcagcggatcaggatttggggtttcatttttcttactgttttgtgtttatgcaaccagtttctacgcaggagctagacttgtggatgctgggaaggcaacattctcagatgttttccgggttttctttgcattaactatggcagctattggagtttcccaatcaagctcctttgctcctgacttaagcatagccaagtcagctactgcttccatattt

SEQ ID NO: 24522 - DNA, 412 bp, Glycine max
  Clone ID: LIB3051-094-Q1-K1-F8
aatttttcatcaaagaccaaactagctttattcgactcaaccactatcctccatgccgttatcctgaccttgctcttggcgtcggtcgacacaaggaccctggtgccttaaccattcttgcacaggatgaggttggaggacttgaagtgagacgtaaagcagatcaagagtggataagagtgaaacccaccccagatgcttatatcatcaacattggtgacactgttcaggtgccagtgtagtaccatattgaaaactgaaaattttgaaatttcggtgtctggttctaacacactctatgattggttgaaatttattagaaactacaaaatcatgaaaggaccgttaagtaagacgtcagaagcacaattttcttgtaattttcaataaatttaaaccaatggtaagtgtg

SEQ ID NO: 24523 - DNA, 419 bp, Glycine max
  Clone ID: LIB3051-107-Q1-K1-A6
aaaatttcatttggaaaagaatctgtcaattttgcggtgtgatatttaggttggagagaagggaagatgccgttgtaggtgttagaggcgacagtgtctagtttcgatgtggtttttgagaagttccgatcagagtgctctacagaacaaggccaatctcattctcttcttgtcggacaatgacccggctacctatctcagctggtgccctgattgtgtgagagcagaacctgtgatatacaagaagctggaggcttcacctgatgacattgctctattgagagctcatgttggatatagaccaacatggatgaatcctcagcatacatggatgatggatcctaggatcaagctcactggagtgcctacgttgatccggtgagatatcaacaccgtcaaatgtcgcttggaggatcatt

SEQ ID NO: 24524 - DNA, 412 bp, Glycine max
  unsure (1)..(412): unsure at all n locations
  Clone ID: LIB3051-108-Q1-K1-A10
cccacgcgtccgcccacgcgtccggagagatggcagcttctggttcgtggaagagtgggagtggttcttcgatgggtctggagaggatgagcgtggagcagctgaaggcggtgaaagagcaagccgatctggaagttaatcttctccaagacagcctctccaacattcgcaccgtcaccacccgcctcgagatcgcctccttcgccctcaacgatctctccctccgcccccagggcaaccacatcctcgtccccctcaccgncttcctctacgtccccgccacccttcacgactcccaacacgtcctcgtcgacgtcggcaccggctacttcatcgagaaaaccatgcccgaaggaaaagattactgcgaccgcaaaatcaacttgctcaaatctaactttgatcaactcgt

SEQ ID NO: 24525 - DNA, 358 bp, Glycine max
  unsure (1)..(358): unsure at all n locations
  Clone ID: LIB3051-110-Q1-K1-G7
gagaagggtcagcattgccttggaaatcttgatgaggccaaggttgcttttccttgatgagccaaccagtggacttgacagtgcttcagctttctttgtgactcagacactacgtgccttggcaagggatggaagaaccgtgatagcctctattcatcaaccaagcagtgaagtgtttgagctatttgaccaattatacttgctctctagtggcaaaactgtttattttgggcaagcttcagaggcatatgagttctttgcacaagctggctttccatgtcctgctttgaggaacccttctgatcacttnctcaggtgcatcaattctgactttgacaaagtcaaggccacccttaaa

SEQ ID NO: 24526 - DNA, 442 bp, Glycine max
  Clone ID: LIB3051-116-Q1-K1-A6
cccacgcgtccgcccacgcgtccgtggaccttttcccactgctgttaccagcttgttggatcttacacggcttgatcttcacaataacaagttgacagggcctattcctcctcaaattggacggttgaagcgtcttaaaatactaaatttgaggtggaacaaactacaggatgcaattcctccagaaattggtgagcttaaaagtttgacgcatctgtacctaagcttcaacaatttcaagggagaaattcccaaggagctagcaaatcttccagaccttcgctatctatatctccatgaaaaccgtttagctggaagaataccaccggaattgggcacactgcaaaatcttcggcacttggatgctggtaacaatcatttagtgggtaccataagggaactcattcgtattgaaggttgctttcctgcactacgcaatctg

SEQ ID NO: 24527 - DNA, 365 bp, Glycine max
  Clone ID: LIB3051-112-Q1-K1-G11
ggctgctaaagtagatgctaatggtggtggtggtaagggtggggtttctgcagtttctgggaaggttccagcagtggcacatacattggctgaaaagcctgatgaggtcgcattcaatattagttaccatgctcagttcagtcctcatttttcccctttcaagtttgagctggaacaagcttactatgccactgcatgagagtgttcgtgaccgtatgattcggcaatggaatgaaacgtaccttcattttcacaaagttgatcccaagcaaacttactacttatcgatggagctccttcaaggtcgagctttgaccaatgccattggaaatctgaatatacaagatgcatatgctaatgctttg

SEQ ID NO: 24528 - DNA, 322 bp, Glycine max
  Clone ID: LIB3051-002-Q1-E1-A4
ggagaacgggctagaacaaaggacaacaatcttctcgggaagttcgagcttacagggatccctccagcaccaagaggagtgcctcagatcaatgtctgcttcgacatcgacgctaacgggattctgaatgtctctgcagaggataagactgctggtgtgaagaacaagatcacgatcacaaacgacaagggtaggttgagcaaggaggagattgagaaaatggtgaaggatgcagagaggtacaaggcacacgatgaagaggtgaagaaaaaagtggaggctaaaaattcgcttgagaattacgcgtataacatgaggaaca

SEQ ID NO: 24529 - DNA, 426 bp, Glycine max
  Clone ID: LIB3051-117-Q1-K1-G11
cccacgcgtccgggaaaggacctggtttcttctctgagatcggcaagagaggcagagatatcctcacgaaggattacaattccgatcaaagattcaccatctacttctgcaccaactccggtctcgacctgaagtcaacactggtgaagagtagaggactttcctctggtgatgtggctgcagaatttaagtataagaacaaggcggttaatgtcaaagttgatactgaatcaaatgtgttgacgacattcactgtctctgatgttgtgccatccgcgaaaaccattgcttctattcgtctgcctgattacagttctggcaaggttgaggttcagtatcttcatgagcatgttgcttttactcttggtgttggtttagaccgctcccctgttattgactattctgggacgatgggtactcctagca

SEQ ID NO: 24530 - DNA, 441 bp, Glycine max
  Clone ID: LIB3051-006-Q1-E1-H1
accaagcgtccgatcagaacatcgaggaaatagcagcattggatgccattgatgcagggaagttgtaccattggtgcaaggctgttgacattcctgctgcagcaaatactattcgttactatgccggtgctgcggataaaattcatggggaggtcttaaaagcgtctagggagttccatgcatatactttgttagaaccaattggtgttgtaggacacattattccgtggaatttccccagcaccatgtttgttgccaaggtgagtccttccttggctgctggttgcacaatggtcctcaagcctgctgaacaaacacctccctcggccttgttttatgctcatctttgcaacctggctggaattccagatggagtgcttaatgtagtacccggatttgggcaaactgcaggtgctgcaataactcacacatggacattga

SEQ ID NO: 24531 - DNA, 447 bp, Glycine max
  unsure (1)..(447): unsure at all n locations
  Clone ID: LIB3051-008-Q1-E1-H1
aaaagcattataccaatagtggtgcttattggagccatgtagtgtttgagcaccctgcaacatttcaaacactagctatggatccaaaggagaaggaaatgatcattgatgatctcataacattcagcaaggcaggggagttctatgcaaggattggaagggcatggaagagagggtatctgctttatggtcccccagggaccggtaagtccacgatgattgcggccatggcgaatttcttaggctatgatttgtatgatcttgagttgactgctgtgaaggacaacactgagttgaggaagctcctcattgagacatctagcaagtctataattgtgattgaggatattgattgttcacttgatttaaccggtcaacgaaggaagaaaaaggaagaagtggaagagaaggatcaaangcaaaaacaacaaggaatgcaagaaagag

SEQ ID NO: 24532 - DNA, 399 bp, Glycine max
  unsure (1)..(399): unsure at all n locations
  Clone ID: LIB3051-013-Q1-E1-H9
tgacgatccattgataaagacacgagcagtccttgagcttgacgatgacattatgatgccatgcgatgatgttgagcgaggttttaacgtgtggcgtcagcacccagatcggattgttggattctatcctcggctcattgatgggagcccgttaaaatataggggagaaaaatacgcccggtcgcataaggggtacaacatgattcttactggtgcagcttttattgattctcaagtggctttcaagaggtacgggagcaaggaagccgagaaaggtanggaactggtggacaagatatttaactgtgaagacgtgctcttaaactatttgtatgcaaatgcaagctcatcgtcaaggactgttgattatgtgaaaccagcttgggcaattgacacttc

SEQ ID NO: 24533 - DNA, 450 bp, Glycine max
  Clone ID: LIB3051-025-Q1-K1-H9
tgatggagttgcaaggcttgaaggccgtggacaaggaggagccgccgaggattctgcatttcaatccgaggctgagaggtgattggagtgggaagccagtgattgagcagaacacttgttataggatgcagtggggttctgctctcaggtgtgaggggtggaagtctcgtgcggatgaagaaactgttgatggacatgtgaaatgtgaaaagtggattcgtgatgacaataatcgttctgaagagtggaaggcgacatggtggttaaacagattgatagggcgaaaaaagaaggtgacggtagactggccatatccttttgctgagggcaagttatttgttctcaccataagtgctggcttggaaggttaccatgttagtgtggatgggaggcatgtgacatcctttccctatcgcacgggatttgctcttgaggatgctactggactat

SEQ ID NO: 24534 - DNA, 390 bp, Glycine max
  Clone ID: LIB3051-008-Q1-E1-E3
accaagcgtccgagaacccaggccatgactcagatgaatggtgtttactgttctagcaggcctatgcgtattggagctgcaactccaaggaaatcatctggccatcaacaaggtgggcagtcaaatggcacagccaaccaatctgaagcagattctacaaacacaactatatttgttggaggactcgaccctaatgtttcagatgaagatctcaggcagccattctcccagtatggtgagatagtctctgttaagatacctgttggaaagggctgtggttttgtccaattcgcaaacagaaataatgctgaagaggccttgcagaagctaaacgggacatcgattggcaagcaaacagttcgtctttcttggggccgtaatccagcaaat

SEQ ID NO: 24535 - DNA, 427 bp, Glycine max
  unsure (1)..(427): unsure at all n locations
  Clone ID: LIB3051-114-Q1-K1-H1
gagacaacaaagctcttcaagtagctcttgcttctcagtcagttgtgcagattggatttttgttagccttgcctatgttgatggaaattggcttggagaggggatttcgtgaggctttaagtgaatttgtactaatgcaactacagttggctcctgtatttttcacattttctcttggaacaaaaacacactattatggaaggacattgcttcatggaggtgcagagtacaaaggcactggtcgtggttttgtggtgtttcatgccaaatttgctgataactataagctctattctcgcagccattttgttaaaaggattgaattgatgattctgcttgtggtctaccatatatttggccatggatacagaggagtggttgcctatattttaattaccgtaaccatgtggttcatggtanggacatg

SEQ ID NO: 24536 - DNA, 415 bp, Glycine max
  Clone ID: LIB3051-055-Q1-K1-A2
cgcgaatttcattgctagagtgttatttagagtattagcatcaatggctccaattgcagtgggagacatgattccagacggcattttggcttacttggatgaagaaaacaaaccccaaactgtctccattcactctctcgccaccggcaagaaagtcatcatctttggggttcccggtgccttcactcctacttgcagcttgaagcacgttcctggcttcattgagagagcagaagagctgaaagggaagggtgtggacgaaataatctgtatcagtgtgaatgatccatttgtgatgaactcatgggccaaaacattcccagagaacaagcatgttaagttccttgctgatggtgcagccaaatacaccaatgcccttggtcttgagcttgacctcactgacaagggtctcggc

SEQ ID NO: 24537 - DNA, 455 bp, Glycine max
  Clone ID: LIB3051-066-Q1-K1-C11
gtttgcttcccaagtctctcgaagcatctttctttctcttcctgcagaagctatccgtgttagggggttcccaagtctccaacaagcaaagtacatggttgatttggaaatccaggtccccagcgcattcgacccgtttgccgaggcgagagaatcagatgcccccggggcaaaggagtatgtgcacatacgaattcagcagaggaatggaaagaagagtctgacaacagtgcaagggctgaagaaggagttcagctacgagaagatcctcaaggacctcaagaaggacttctgctgcaacgggactgtggtgcaggacaaggagcttggcaagattatccaactccaaagcgaccagcgcaagaacgtatcccatttcctcgttcaggccggtcttgtccggaaagaccaggtcaagattcatggattttgatttaacgattggtccttgttat

SEQ ID NO: 24538 - DNA, 316 bp, Glycine max
  unsure (1)..(316): unsure at all n locations
  Clone ID: LIB3051-066-Q1-K1-H11
cccaagtctctcgaagcatctttctttctcttcctgcagaagctatccgtgttacttgttcccgagtctccaacaagcaaagtacatggttgatttggaaatccaggtccccagcgcattcgacccgtttgccgaggcgagagaatcagatgcccccggggcaaaggagtatgtgcacatacgaattcagcagaggaatggaaagaagagtctgacaacagtgcaagggctgaagaaggagttcagctacgagaagatcctcaaggacctcaagaaggacttctgctgcaacgggactgtggtgcangacaaggag

SEQ ID NO: 24539 - DNA, 282 bp, Glycine max
  Clone ID: LIB3051-069-Q1-K1-B3
acgctctcgaatcatctttctttctcttcctgcagaagctatccgtgttacttgttcccaagggtccagcaagcaaattacatgggtgatttgcaaatccaggtccccagcgcattctacccgtttgcctacgcgagagaatcagatgcccccggggcaaaggagtatgtgcacatactaattcagcataggaatggaaagaagagtctgacaacagtgcaagggctcaataaggagttcatctacgataagatccttaaggacctcaagaaggacttctgc

SEQ ID NO: 24540 - DNA, 399 bp, Glycine max
  Clone ID: LIB3051-050-Q1-K1-E5
aacgaaaacactttctctccgattctcagcatccaatcagaggttccatttctcttgattccctctcacccaagttccaatcgctcactactgcactatatgcttccaactaagagaccttgcgaaggactggttgcagaagaagagactcacaacaacaacgacaacaacaacaacagcaacaacaacaacaacaacaacaacaacaacaacaacaataacaacagcaacaacagcagcagcagcagcagttctctcaagaagaatcggatcgccgctgccagaaccgccgattctacggtgaagaactacgaaagcaccgaccagagcttcaacaacaacaacagcaacagcggaaacgcgagtgagggagcgtcggatatggctttgggtgaatcg

SEQ ID NO: 24541 - DNA, 443 bp, Glycine max
  Clone ID: LIB3051-004-Q1-E1-C5
gtttgggatgttggaggacaagagaaactaaggccactttggaggcactattttaacaacacagatggcctgatttatgttgttgatagcttggatcgtgagagaataggtaaagcaaagcaggaatttcagacaatcataaatgacccatttatgctcaatagtgtcatcttggtgtttgccaacaaacaagacctgagaggggcgatgacgccaatggaagtatgtgaaggactaggtctctttgatctaaagaatagaaaatggcacatacatggcacttgtgcactcaagggagatggtctttatgagggcctggactggttggcttcaacactgaaggaaagaaaagctgctggatactcttcaataggaacctcatccttctaatctaagtattttgtcattgaggaacgtgcaaggtttggccagtttcattcaag

SEQ ID NO: 24542 - DNA, 435 bp, Glycine max
  unsure (1)..(435): unsure at all n locations
  Clone ID: LIB3051-030-Q1-K1-G8
tctaattctgcaacaagttccaaactttcaaatctcaccgccccaaaaattctttttgggttacccatttgactttagcctctgcaacagagtctcagatctctgcattccaattcccatggctggtcgctatgacagtaaccccttcgatgaggaagaagttaaccctttctctaatcctggaagtgttcccgctgccaccaattcaaggcttccacctcttaagccagaacctgttgattataattatggctttggtgcgacagttgatatacctcttgattcatcaatggatttgaaaaagaaggagaaggaacttcaagccaaggaaactgaattgagaaaaagggaacaggaagtgagacggaaagaagaagctgcttcacgagctggaattgntcttgaggaagaagattggccggctttttttccaat

SEQ ID NO: 24543 - DNA, 446 bp, Glycine max
  unsure (1)..(446): unsure at all n locations
  Clone ID: LIB3051-086-Q1-K1-F11
attaaaacaaaaaatgtgcgctgccatatccgtagtggaacaagaagagttgctcgaaaaaggggaggtgttcaagatcaaaggcagggacaagcatggccgcaagatccttcgcattatcgccaaattcttcccagcacggttggtgagtgttgaggttctgaaaaagtacctggaggagagggttttcccgaagctgatggggaagaggaaattcgcggtgctgtacgtgcacaccggcgtccagaggagcgagaattttcccggaatctccggtctccggtggatctacgatgcgattccggcgaacgtgaaggagaatctcgaagccgtttattttattcacccgggcttgcatgcccgccttttcctcgctacattcggccgctttctctttaacgctgggctgtatggaaagctgangtacgtaagcagggttgattatc

SEQ ID NO: 24544 - DNA, 374 bp, Glycine max
  Clone ID: LIB3051-003-Q1-E1-F7
gaggagaggagagaagagaggaagttttggggtttgaatctatagaatagaatcaaaccaaattgaaagaagatcgatcgatcgatcgatggctctggtcggagttgaagtgaagcatgcggcggagggcgcaccggaggagaattgctccgccaagcccaccaagcagggcgagggcctccgccactactattctcacaacatccacgagcatcagctccgtcgccgtcaaaaggagcataacctcagacgtcttgaggctcagagaaacgagctcaattccagggtgaggatgctgcgcgaagaagtacagcttttgcaggaaccaggctcttatgttggtgaagttgtcaaagtcaggggcaagaacaaag

SEQ ID NO: 24545 - DNA, 387 bp, Glycine max
  unsure (1)..(387): unsure at all n locations
  Clone ID: LIB3051-016-Q1-E1-F11
agcgagaggagaggagagaagagaggaagttttggggtttgaatctatagaatagaatcaaaccaaattgaaagaagatcgatcgatcgatcgatggctctggtcggagttgaagtgaagcatgcggcggagggcgcaccggaggagaattgctccgccaagcccaccaagcagggcgagggcctccgccactactattctcacaacatccacgagcatcagctccttctccgtcaaaagacgcataacctcaaccgtcttgaggctcagagaaacgagctcaattccagggtgaggatgctgcccgaagaattacagcttttgcanggaacaggctcttatgttggtgaagttgtcaaagtcatgggcaagaacaaagtccttgtc

SEQ ID NO: 24546 - DNA, 430 bp, Glycine max
  Clone ID: LIB3051-065-Q1-K1-C12
aattgaaagaagatcgatcgatcgatcgatggctctggtcggagttgaagtgaagcatgcggcggatggcgcaccggaggagaattgctccgccaagcccaccaagcagggcgagggcctccgccactactattctcacaacatccacgagcatcagctccttctccgtcaaaagacgcataacctcaaccgtcttgaggctcagagaaacgagctcaattccagggtgaggatgctgcgcgaagaattacagcttttgcaggaaccaggctcttatgttggtgaagttgtcaaagtcatgggcaagaacaaagtccttgtcaaggtccacccagaaggaaaatatgtcgttgatattgacaaaagtattgacattacaaagattactccatccactagagttgcacttcgcaacgacagttatgttctt

SEQ ID NO: 24547 - DNA, 453 bp, Glycine max
  Clone ID: LIB3051-069-Q1-K1-B9
cccacgcgtccgcaagacgagagaatagaggaagcttggggtttgaatcgaatcgaagggaagcgattcatcgatcgatcgatggctcttgtaggagttgaactgaagcatgcggcggagggcgtaccggaggcgaattgctccgccaagcccaccaagcagggcgagggcctccgccactactattctctcaacatccacgagcatcagctccttcttcgccaaaagactcataacctcaaccgtctcgaggctcagagaaacgacctcaattctagggtgaggatgctgcgcgaagaattacagcttctgcaggaacccggctcttatgtcggtgaagttgtcaaagtaatgggcaagaacaaagtccttgtcaaggtccacccagaaggaaaatatgttgttgacattgacaaaaatattgacattacaaagattactccatccactaga

SEQ ID NO: 24548 - DNA, 432 bp, Glycine max
  unsure (1)..(432): unsure at all n locations
  Clone ID: LIB3051-091-Q1-K1-D4
ggaagttttggggtttgaatctatagaatagaatcaaaccaaattgaaagaagatcgatcgatcgatcgatggctctggtcggagttgaagtgaagcatgcggcggagggcgcaccggaggagaattgctccgccaagcccaccaagcagggcgagggcctccgccactactattctcacaacatccacgagcatcagctccttctccgtcaaaagacgcataacctcaaccgtcttgaggctcagagaaacgagctcaattccagggtgaggatgctgcgcgaagaattacagcttttgcaggaaccaggctcttatgttggtgaagttgtcaaagtcatgggcaagaacaaagtccttgtcaaggtccaacnccagaaggaaaatatgtcgttgatattgacaaaagtattgacattacaaagattactc

SEQ ID NO: 24549 - DNA, 433 bp, Glycine max
  Clone ID: LIB3051-096-Q1-K1-A4
acagaggaagttttggggtttgaatctatttattagaatcaaaccaaattgaaagaagatgggtcgatcgatcgatggctctggtcgcagttgaagtgaagcatgcgtcggatggcgcacctgaagagaattgctccagcgagcccacccatcatggcaagggcctgcggcactactattctcacaacattcacgagcatcaggtccttctccgtcaaaagacgcataacctacaccgtcttgaggctcatagaaacgagctcaattccagggtgaggatgctgcgcgaagaattacagcttttgcaggaaccatgctcttatgttggtgaagttgtcaaagtcatgggcaagaacaaagtccttgtcaaggtccacccagaaggaaaatatgtcaatgatattgaccaaagtattgacattacaaagattac

SEQ ID NO: 24550 - DNA, 430 bp, Glycine max
  Clone ID: LIB3051-010-Q1-E1-G10
ccgccctttacaatatcttatctgaaacactcttctcatatctctctcactcaaacctactttctcctttctttctcttctggaaacaattactaaaggatgagtaaacaagacgtcttgaaagttcagagctgtgttctcaaggttaatatccactgcgatggttgtgagcaaaaagtcaagaaactgctgcagaaaatcgatggggtttattctgtgagaatagatgcagatgaagggaaagtggtagtggcaggagatgtggatccagcgaaactggtaaaaaagctaaagacgggatggaagcatgctgagatatggcagaaccagaaaggagaaatgatgtacaatcacaagtatcccatcaaccagaacatgatgcaacttgggggaatggacaataattagtctcaaaatcaaaatggtcaga

SEQ ID NO: 24551 - DNA, 443 bp, Glycine max
  Clone ID: LIB3051-006-Q1-E1-A9
gggccgacccacgaatccacccacgcgtccggtttcattgctctctctcttgtgcggacacaatttttgatggggatatacctcagcactcccaaaacagagaaggcctctgaagatggtgagaacgacaagcttcgcttcggtttgtcttccatgcagggctggcgtgctaccatggaagatgctcatgcagctcatccatgtttggacgagtccacgtcatactttggtgtttatgatggccatggaggcaaagcagtttcaaaattctgtgccaagtatctacacctgcaggtgcttaagagtgaagcttacttagctggagatttaggcacatctttacagaaatcttttctcagaatggatgagatgatgcgtggacaaagagggtggagagaattagcaatcttgggggataaaatagaaaagttgtctggtatgct

SEQ ID NO: 24552 - DNA, 435 bp, Glycine max
  Clone ID: LIB3051-006-Q1-K1-A9
cccacgcgtccggtttcattgctctctctcttgtgcggacacaatttttgatggggatggacctcagcactcccaaaacagagaaggcctctgaagatggtgagaacgacaagcttcgcttcggtttgtcttccatgcagggctggcgtgctaccatggaagatgctcatgcagctcatccatgtttggacgagtccacgtcatactttggtgtttatgatggccatggaggcaaagcagtttcaaaattctgtgccaagtatctacacctgcaggtgcttaagagtgaagcttacttagctggagatttatgcacatctttacagaaatcttttctcagaatggatgagatgatgcgtggacaaagagggtggagagaattagcaatcttggggggattaatagaaaatttgctggtatgctagatggctttat

SEQ ID NO: 24553 - DNA, 400 bp, Glycine max
  Clone ID: LIB3051-116-Q1-K1-G3
cggacgcgtgggttggccattctatgatttttactcatgactcctccaagttgatagtagcaggtcacgataaaaggatatatgttgtgcatgttgggggggcagatgaagttaagtcagaattactgcatacttttacaccccttcgcgaatcacaagatcaagaattacctccaactgagccacccataacaagattgtttactagttctgatgggcagtggttggcagctgtgaactgctttggggatatatatgtatttaacttggagatactaagccagcactggttcatttcaagattggatggcgcctctgttacagctggtggctttcctccccagaacgacaatgtactgatagttacaacttcctcaaatcaagtgtatgcatttgacat

SEQ ID NO: 24554 - DNA, 435 bp, Glycine max
  Clone ID: LIB3051-060-Q1-K1-A3
cacgcgttcggctatgcgaaaaatgaaaaatgagtttatggtaaagggcgatggtctgcgtgcaaaagataaagagcgtgtacttgttcttgctgctacaaacaggccttttgatcttgatgaggctgttattaggaggcttcctcgacgattaatggttaatttgccagatgctccaaacagagaaaaaattctcagtgtcattttggcgaaagaagatttggcacctgacattgattttgaagcaatagctaatatgacagatggatattctgggagtgacttaaagaatctgtgtgtcacagcagctcactgtccaatacgagagatcttggagaaggaaaagaaggagagaagcttagcattgtctgagaacaaacctttacctggattgtgtagcagcggtgacattcgtcccttaaagatggatgattt

SEQ ID NO: 24555 - DNA, 424 bp, Glycine max
  unsure (1)..(424): unsure at all n locations
  Clone ID: LIB3051-063-Q1-K1-A6
aagtatggacataaaattctacagggcattcaaaatgagaacaagaacatgaaaaaatcaggtaangacgtggttactgagaatgaatttgagaaaaaactacttactgatgttattccaccgactgatattggggtcacatttgacgatattggagctttagaaaatgttaaggaaaccttgaaggaattggtcatgcttcctcttcaaaggcctgaattgtttggcaaaggacagctggccaagccttgcaagggaatattgctttttggcccccctggcacaggaaaaacaatgcttgcaaaggctgtggcaactgaagctggagcaaattttattaacatttcaatgtccagcattacatccaagtggtttggtgaaggagaaaaatatgtcaaagcagtcttttctcttgccagcaaaa

SEQ ID NO: 24556 - DNA, 469 bp, Glycine max
  Clone ID: LIB3051-083-Q1-K1-G5
cccacgcgtccggctgttcaccattttcaattttctaagtggtttggcttggtttgacatacataaacctttcaagatctcagaggggcagaagatcaaagccaagacatcctctcgtatataaagagtgtctctgatttgatctttgtttcttctctttctctcgtttgagatttttcagtactccaccaaggttttgtcagaaaagcttgaatttttcgcctaccctttacaatgatctcttcgttgagacagcctgttgtagggatcagtggttctgatcttcttttgaggcaaagacatgcaactccaattaaggcaaggtcgtttttaccctctttgtcaagagaaaagggtcaaggatctcttgtttcagttcaaaagccactccacattggtgcttctcttggtgttggaaattttgtgtcagtgaagagtgatgctaaaagggggtgattggtgaagtgtg

SEQ ID NO: 24557 - DNA, 325 bp, Glycine max
  Clone ID: LIB3051-030-Q1-K1-D1
ctcacgcgtccgaaggtcccaattttttcgtaaaccctagaacacacactctctctcggagaagaagaagctgctgcagaagagaatttccaaaatgtcgatgtcgaagagttccaagatgcttcagtacatcaactaccgtatgcgtgtcaccattcaggacggtcgccagctcgtcggaaaattcatggccttcgaccgccacatgaacctcgtcctcggcgactgtgaggagttccgcaagcttcctccggccaagggcaagaagccagccgaaggcgccgaccgcgaggaccgccgcacgctcggcctcgtcctcctccgc

SEQ ID NO: 24558 - DNA, 283 bp, Glycine max
  Clone ID: LIB3051-030-Q1-K1-D6
ctctcatctgtcaacaacattcttcaaatcacaagctgacctattcgtttcaccattcaagacagtctccagctcctctgaaaattcatggccttcgaccgccacatgaacctcgtcctcggctactgtgacgagttccgcaagcttcctccggccaagggcaagaagccagccgaaggcgcctaccgcgaggaccgccgcacgctcggcctcgtccttctccgcggcgaggaggtcatctccatgaccgtctagggccctcctccgccggaagagtcccgct

SEQ ID NO: 24559 - DNA, 382 bp, Glycine max
  Clone ID: LIB3051-006-Q1-E1-C2
atggaggttgcggcaaccttcgatcttaatcccacggggcaacgttggatctgttgaacttcttcttttatatgcactctgtgatttcgctacaccctcactccgcttcgccaccctatgggggacaacaacagcaacaacgatgccttcatgcgcaaccaaaacgccgccgttcaggcccgcaccaaagcgcagaaccgttccaacgtccttcagctcaaactgattggacagagtcacccaaccggtctaacagcgaacctgttgaagctcttcgagcctaggcctccgttggagtacaatccgcctccggagaaacggaaatgtccaccgttatcagggatggctcaatttgtgagcaagtttgcccagcctggcgatc

SEQ ID NO: 24560 - DNA, 427 bp, Glycine max
  unsure (1)..(427): unsure at all n locations
  Clone ID: LIB3051-006-Q1-K1-C2
gtggcggttgcggcaaccttcgatcttaatcccacggggcaacgttggatctgttgaactgcttcttttatatgcactctgtgatttcgctacaccctcactccgcttcgccaccctatgggggacaacaacagcaacaacgatgccttcatgcgcaaccaaaacgccgccgttcaggcccgcaccaaagcgcagaaccgttccaacgtccttcagctcaaactgattggacagagtcacccaaccggtctaacagcgaacctgttgaagctcttcgagcctaagcctccgttggagtacaagccgcctccggagaaacggaaatgtccaccgttatcaaggatggctcaatttgtgagcaagtntgcccagcctggcgatccagaatatgctccacctgtcccagaaaccgagactcctgcacaaa

SEQ ID NO: 24561 - DNA, 397 bp, Glycine max
  Clone ID: LIB3051-006-Q1-K1-C10
cccacgcgtccgcccacgcgtccgcccacgcgtccggtctgcaccaataacccctagagcagctgcagtagtatgaacacctgttgtggcatctccacctgtgtcatgtccaccctctcagcttcactcaccatctctaacaaggtcacctctacttcaccctgaggatggagatgcaccacgtcgtaaaacatctaagactccaaagactccaagaacccctagaacccctagaaccccacttataatctctaatttgactccaaagttcatcaccccttttggaaaccctatgaaaaaagctctggaggtcaccaaccttgatcctcaagatgcttggcttccaatcacttgaatcagggaatggaacaagtactaatctgcttttcacaccctt

SEQ ID NO: 24562 - DNA, 407 bp, Glycine max
  Clone ID: LIB3051-017-Q1-E1-C10
cccaagcgtccgctggaggtcaaattgacaaacatcatcatacaacaacttgatgatgcagccggtgatgtttccggacttgctgtcaaatgtcctgctccgttagtgaggaaggtgagtgaggtaagggttgtggaaatgaccagtaaactatgtgacaaattgctaaatgggaaggatcagcatcgcgacattgctagcatagctttgaagacagttgttgcagaagtttctactcagtctcttgcacaatctattctccagactctcacgccgcaattgataagaggaattactggtcctggaatgggttccgagattaaatgtgaatctctggatattttatgtgatgtccttcataaatttgggaatctaatggcagcggatcatgaactattactaagttc

SEQ ID NO: 24563 - DNA, 433 bp, Glycine max
  Clone ID: LIB3051-026-Q1-K1-C2
cagatgaaattccttcagaacaaaatggtgttgaccaacaagccaaggacaatagtgttgtctccaaaacagatgaaaacccccactctgaaattacttcaggagaaaatgaccaaatggtaacagaaaatgttggcgatgatgaagaaaactctgagacgaaagaagcaaaggaaactgaaagtgaagaaaacaatgggatgaaagaaggaaaggtaaccgaaggtgaagacaagaaacgacaagctgtggaaaattttctgccgctgcttacaaggacaacatggatgttgtctcacgtgaggatttgaagagtgtctttgagaaatttggtacagtgaagtacattgatttcaagattggagcagagtcaggatacattcgctttgaagaaactgaagctgctcagaaagcacgtgctgctgcagttatt

SEQ ID NO: 24564 - DNA, 429 bp, Glycine max
  Clone ID: LIB3051-027-Q1-K1-C2
gatagggcttggtctaatcaatggtgaatggattcttgcatacaagactctatctggagctaaaagacttcaaagaatccgttcatcttgcgttacagtttgccgctctcattttgagctatgattggtgtactgggctgcttggaagtttcacattgacaagggcattgacaatgtctacagcctgcattcatggctaggccttgcatgcctttacctattcaccatacagtgaggtgctggctgcgcaacattatggtacccacgatggtcaagaaatagtagagctgccttattgccatggcatgtgtactatggtatctatatctaatgcttggctatagccacatctgctactggtattcatagaaaagctacattccttcagttaacaacatcatatcacgcgtttccaatgatggacttttg

SEQ ID NO: 24565 - DNA, 351 bp, Glycine max
  unsure (1)..(351): unsure at all n locations
  Clone ID: LIB3051-047-Q1-K1-C2
caacattctccaaaatcacctcaaaaaatttcaagtgctcgccatggctgatggcagtagtagcaacaccaagagcaattccctgatcctccatcaccccacaaacttgaagggtggttggaatgctgccatcttcatcatatttgtggaatttgctgagagatttgcttaccaagggttggcaagtaatctcatccaataccttacaaatgttctgaatgaaccaatcacacaagcagccaaagatgtgaacacatgggttggtgcctnctctctcttccctttgcttggtggcttcatagctgattcctatctgggtcgcttcaacaccatactctngtcctcagtcat

SEQ ID NO: 24566 - DNA, 232 bp, Glycine max
  Clone ID: LIB3051-024-Q1-K1-A4
aagaaaagtaaacactgccacagcaagagtgttcaaatgggagagggaaaaggaagagtgtgcgtcactggatgcacaggattccttggttcatggataatcaagagcctccttgaacatggatatgctgttaataccactataagatctgacccaggacgcaagagagatgttggcttcctcacaaacctacctggtgcatcagaaaagcttaagatggttcaacggctga

SEQ ID NO: 24567 - DNA, 434 bp, Glycine max
  unsure (1)..(434): unsure at all n locations
  Clone ID: LIB3051-104-Q1-K1-D4
gttgaggatagcacaaagaaaagtaaacactgccacagcaagagtgttcaaatgggagagggaaaaggaagaatttgtgtcactggaggcacaggattccttggttcatggataatcaagagcctccttgaacatggatatgctgttaataccactataagatctgacccaggacgcaagagagatgttagcttcctcacaaacctacctggtgcatcagaaaagcttaaaattttcaacgctgatctcagcgacccagagagttttggtccagcagttgagggttgtgttggaatttttcacactgccaccccaattgattttgcggtgaacgagccagaggaagtggtgaccaaaagagccattgatggagcactaggcatattgaaagcaggcctaanagcaaagactgtgaagagggttgtttacacttc

SEQ ID NO: 24568 - DNA, 378 bp, Glycine max
  Clone ID: LIB3051-054-Q1-K2-C2
cccacgcgtccgcccacgcgtccgcgagaaagcatggtaggtcagacagtgaaccctctgttgaacatccagatgatgaaattgaagggaagaggagtagactggctggaaatgagagcagaatcaatataactgggcctcggcctcaatctcacagcttctgcttccagagctcaactgtcagctacggtggtccaaatgggatgtattatacatcctcaagggcaaggaggagtggaagtgatggagtgacctttgaagagaggaaggaggctgatagttcaacaaggaaagcttctcacctaatttctagaggcattcgtggcaagggacattctctctcaagaaatctgaattcagatgggtaggtagatacta

SEQ ID NO: 24569 - DNA, 430 bp, Glycine max
  Clone ID: LIB3051-005-Q1-E1-C3
cccggctggccccacgcgtcagaaatactagttctactcttatcattgtgaaacaaattgcccaattgttcgaggttgaatatcaggttgaaccttgcagcaaaggctacaatagtagtgcttgcattgatgtcagaaagacaagcttccctatgcaaactggtggatatgtcatctatggtgttggtcatcagcatgttggtgcaaatgaatcaactctatacggacaggatgggggagttatttgttcttcaataccaaaatatggaaatggaaacgaagcagggaatgagaaagggtatgttgtaggaatgtctacatgttaccctcgacgaggtactatcaaaataaaagatggtgaaaccctaactctagagattatctacagcaacaaccaaagccacagtggagtaatggggcttttctacat

SEQ ID NO: 24570 - DNA, 412 bp, Glycine max
  unsure (1)..(412): unsure at all n locations
  Clone ID: LIB3051-032-Q1-K1-A4
cccacgcgtccggcttccctatgcaaactggtggatatgtcatctatggtgttgggcatgagcatgttggtgcaaatgaatcaactctatacggacaggatgggggagttatttgttcttcaataccaaaatatggaaatggaaacgaagcagggaatgagaaagggtatgttgtaggaatgtctacatgttaccctcgacgaggtactatcaaaataaaagatggtgaaaccctaactctagagattatctacagcaacaaccaaagccacagtggagtaatggggcttttctacatcttggtggctgaacaactgtcacaccaacacctnctttgacattattatgtgtcctaagtaaattcatcttggaatggatccaagagactattatattatatgatatctatatg

SEQ ID NO: 24571 - DNA, 415 bp, Glycine max
  Clone ID: LIB3051-053-Q1-K2-G4
tgggacccgaatacgaagtcgacgctgacacagatccctctgctggggacgaaggctggtccacgagacggggcggcatggacgcagaggctgaaggaagagtacaaggctctgatagcgtacacgcaaatgaacaagtccaacgacaacgattggttccgcatctccgccgccaatccggaaggcactcgctggaccggtaaatgctggtacgtctacaacctcctcaagtacgaattcgacctccaattcgatgtccccgtcacttacccttccaccgcccccgaactcgaactccctcaattggatggcaaaacccaaaagatgtataggggtggaaagatctgcttgactgtgcacttcaagcctctctgggccaaaaattgccccagatttggaattgcacatgcacttt

SEQ ID NO: 24572 - DNA, 442 bp, Glycine max
  Clone ID: LIB3051-111-Q1-K1-A3
actcaagcgtccgccgaatacgaagtcgacgctgacacagatccctctgctggggacgaaggctggtccacgggacggggcggcatggacgcagaggctgaaggaagagtacaaggctctgatagcgtacacgcaaatgaacaagtccaacgacaacgattggttccgcatctccgccgccaatccggaaggcactcgctggaccggtaaatgctggtacgtctacaacctcctcaagtacgaattcgacctccaattcgatgtccccgtcacttacccttccaccgcccccgaactcgaactccctcaattggatggcaaaacccaaaagatgtataggggtggaaagatctgcttgactgtgcacttcaagcctctctgggccaaaaattgccccagatttggaattgcacatgcactttgcctaggccttgcaccgtgg

SEQ ID NO: 24573 - DNA, 419 bp, Glycine max
  Clone ID: LIB3051-037-Q1-K1-A4
aatacattgatgagttgaaacagattgttgaggagtggaaagcaaagaagtcttggcttgcacaagaacgagtagacgaggtcataaaaagttctgaaaaattgaagaattggttggatgagaaagaagctgagcaaacaaagacttctggattcagtaagccagcatttacatctgaagaagtatatctgaaggtgcttgatctgcaaaccaaggttgccagtattaatagaattcccaagcccaaacctaaggttcagaagcccgtaaaaaatgaaaccgaaagcagtgagcagaatacagagaattctgattctaactcagctgatagttcctctttaagtgattcatccgttaacagttcagaaagcacaagcgaagaaacggtaactgagcaaactggaggtcatgatgagcta

SEQ ID NO: 24574 - DNA, 434 bp, Glycine max
  unsure (1)..(434): unsure at all n locations
  Clone ID: LIB3051-016-Q1-E1-F1
cgcgtcaagacgaaacagagggattataaaaagagaagttactcgatagttcaaatcagaagatggttcctgtcacaccaactcaataacagatcaaaccaaacccaaactgttaggtttcctttgtttggtgtgaagccatggctgattcttcttccaacctgaaatccgacgcgataatggagcagatgaagcaacacctcgccaccgacgctggcaaacaagtcaccaataaaattggactcgtttatcagtttcacattgctcctaagaaacttggattcgacgaggtcgtctacaccgttgatctcaagaaaggagaagtcaccaaagggtcatatgaangaagaaagcctgatgcatctttttcgtttaaggatgangactttgttaaggttgccttaaggaagatgaatccgcagattgctttcatg

SEQ ID NO: 24575 - DNA, 429 bp, Glycine max
  Clone ID: LIB3051-030-Q1-K1-D8
atggagcagatgaagcaacacctcgccaccgacgctggcaaacaagtcaccaagaaaggtggactcgtttatcagtttcacattgctcctaagaaacttggattcgacgaggtcgtctacaccgttgatctcaagaaaggagaggtcaccaaagggtcatatgaaggaggaaagcctgatgcatctttttcgtttaaggatgaggactttgttaaggttgccttagggaagatgaatccgcagattgctttcatgaggggtgcgatgaagattaagggaagtttgagtgctgctcagaaatttactccggatatcttcccaaagccttctaagctgtgagctgagatttctgcaactacctgcacaaggttgctagaaatatcggttggctgcagtcaaacaaatagatagcaatcatagtagcatcaa

SEQ ID NO: 24576 - DNA, 411 bp, Glycine max
  Clone ID: LIB3051-030-Q1-K1-H9
cccacgcgtccgctttcacatcatttctcaatcttacttgcttgcactctcatcagaggaggaaagcttttgataaagaaagaaacagaaagaaccttgtaacttttggcttgaaaagccatggccagggagcaaattcaggtgctaaatgcgcttgatgtggcgaaaacacaatggtaccatttcactgcaatcatcattgctggaatgggcttcttcaccgatgcatatgatctattctgcatatcccttgttacaaagttgcttggccgcatatactatcacgttgatggcacagcaaagcccggaacattgccttcaaatgtttcagctgctgtaaatggcgtggctatctgtgtaacactctcaggccagcttttctttggctggcttggtgataagatgggaagg

SEQ ID NO: 24577 - DNA, 429 bp, Glycine max
  unsure (1)..(429): unsure at all n locations
  Clone ID: LIB3051-112-Q1-K1-F2
tcgctcaatcttccttgcttgcactctcatcagaaaaggaaagcttttgataaagaaggaacgggagggaaccttgtaactttgggctggaaaagccatggccagggagcaaattcaggtgctaaatgcgcttgatgtggcgaaaacacaatggtaccatttcactgcaatcatcattgctggaatgggcttcttcaccgatgcatatgatctattctgcatatcccttgttacaaagttgcttggccgcatatcctatcacgttgatggcgcagcatagcccggaacattgcctccaaatgtttcagctgctgtaaatggcgtggctttctgtggaacactctcangccagctttttcttggctggctcggtgataagatgggaagaaaaaagtctatggcatgactctgatgctgatggtaatatgc

SEQ ID NO: 24578 - DNA, 398 bp, Glycine max
  Clone ID: LIB3051-069-Q1-K1-C2
cccacgcgtccgcccacgcgtccgcccacgcgtccgggatgttttaattctcttgcaagaaggtgacactgcttacaaagtctgtttatctgaggtagagtgggagagagtcacagcagttaccagctacttgaagctttttgttgaggttatcaatgttttcactaagagcaagtatccaactgcaaatatatatttccctgagctctgtgatgttaagttgcatttgattgaatggtccaagaattcagatgagtttatcagttctttggcgtcaagattgagaagcaagtttgatgagtattgggagaaatgtagcttaaggttggctggtgctgcaatggtagacccttcgttcaagatgaaattggtagattattattatccgcaaatttttg

SEQ ID NO: 24579 - DNA, 393 bp, Glycine max
  Clone ID: LIB3051-046-Q1-K1-A4
aaaatattttgttgtcagaaactgcctgcctaatgtcaagtcagatatgcttttgtcagcatggaatcctccatccgaatggggaaaatagagatttatccccttaagatccatttaacagagacgatgtacagaatgatgtgggaatatttcttcccagaagaagaacaagattcccaacgtcgtcaggaggtttggaaggtttcaaccactgctggtgcaaggcgtgtaaagaaaggttcatcagttcttgaagcttctgcttcaaacagtcacacaacaaaagagtctgaggcttcatccaaatctggcatatctgcaatgctatttcccacatcaagtcagccttcaacccatgttgactcagctcaagcatccaaaacacaaaatgtc

SEQ ID NO: 24580 - DNA, 395 bp, Glycine max
  unsure (1)..(395): unsure at all n locations
  Clone ID: LIB3051-036-Q1-K1-F1
cccacgcgtccgcagagagtgaagagaagagaagaggttgatgggtcggcgaaagaacaagagcagcaacaatcagtgctcctcaagcaaggaagacgctgacatgaatagcaaccaccttcggtttgaagaagctgacgaggctgtcgacgagagttccaacctcgaccaatccatgtgcgacatcgaagaatccgatgataaaaccagcgccgactattacttcgattcctactctcattttggaattcacgaagaaatgttgaaggacagtgtgagaaccaagacatatcanaatgttatttatcagaaacaaattttattcaagaaataagtagttcttggaggtggggcttggactgggaatttatcactaatttggggccaaacaaggg

SEQ ID NO: 24581 - DNA, 431 bp, Glycine max
  Clone ID: LIB3051-040-Q1-K1-H1
cccacgcgtccgggaggacaagaaatatatgttgggccgctgggtcgtcactctagtcatttgatcaagtattttgagagcattgaaggggtgagcaaaatcaaagacggatataacccagctacttggatgttggaagttacaacttcagcacaagaacttagtttgggtgttgattttactgacttgtacaagaattctgatctatataggagaaacaagcagcttatacaagaactgggtcagcccggctcccggttcaaaggatctttatttccctactcaatactctaagtcattctgggcccatggccaaccttgctaatgaaaccaccgttgtcataatggcgtaatccaccatacactgctgtgaggtttttcttcactactttcatagccctgatgtttggaacaatgttctgggacctcgg

SEQ ID NO: 24582 - DNA, 360 bp, Glycine max
  Clone ID: LIB3051-058-Q1-K2-A4
agagatttgagagggctcctcctcctcctcctcctccccatctaagttaccgtgaaggacgtccccgagattatgatgctctgtctggctcaaaacgttcttatgctgctatagatgatgttcctccacgatatgctgatactggtgctcgccaatcaagagctcgactggactatgactatggcggtagtgcttcacagtatggagatgcttatggtgatagacttggaagatctagtatgggatatggtggtggcagcagaagttctatttccagtcaagattcacatgggttgtatagcagtcggcagggcatgagttatggaggaggttcttttggtagtggtgatgttggtggca

SEQ ID NO: 24583 - DNA, 446 bp, Glycine max
  Clone ID: LIB3051-083-Q1-K1-C2
gtggcactgctgctcttgggtttgcccaatatgttcccaatgagaaccttctcatgacaaaggagcagctttttgatatgacttgtatgacacttggcggtcgggctgctgagcaggttcttatagggagaatctcaacaggagcacaaaatgacttggaaaaagtgaccaagctgacgtatgcccaagtagcagtttatggttttagcgacaaagtaggcctcctctccttccctccaactgagggctcatatgagttttccaaaccatacagcagcaaaactgctgcaatcattgatagcgaagtgcgtgattgggtggacaaagcatacaaacatacgattcagcttatcgaggaacacaaggagcaagttactcaaattgcagagttgctgcttgaaaaagaagtacttcaccaggacgacttgcttcgagttttgggcgag

SEQ ID NO: 24584 - DNA, 418 bp, Glycine max
  Clone ID: LIB3051-084-Q1-K1-C2
aaacgatgcgccactgctagcgcatactctgaactctcaccatatatatataatgcgcgggcggtgcgcatggagataacctacgcatcccctagcttctccgacctccgcgccatgccgtcgacggcgaccgccgcgcgtcccgtcaggatcattcccctgcagcacccgaccgccacgacgtcgtcgccgcagccgaacgccgccttctcgcgctggacggcgaagctccggcgaatgacgtggctggagtggattgaattcttcctcccttgcctccgctggattcgcatctacaactggcgcgagtatttccaggtcgatctcatggccggaatcaccgtcggcgtcatgctcgttcctcagtcgatgtcgtatgcgaaatttggctggacttcaaccgatatatggactctac

SEQ ID NO: 24585 - DNA, 387 bp, Glycine max
  Clone ID: LIB3051-066-Q1-K1-A4
cccacgcgtccgatttattggacatactgctagtgttgaagatctgcaatggagccctacagaatctcatgtttttgcttcttgttctgtggatggaaacattgcaatatgggatacccgtttggggaagtcaccagctgcatcttttaaggcacataatgctgatgtgaatgtaatgtcatggaacaggttggctagttgtatgttggcctcggggagtgatgatgggactatttctattcgtgatctcagactgctcaaggaaagaaattctggtggagcccatttcggaatttaccagcacccaattacattcattgagtggagtccacattaagccttttcattggcaggttcttcatctgataatcaacttaccatattgga

SEQ ID NO: 24586 - DNA, 446 bp, Glycine max
  Clone ID: LIB3051-087-Q1-K1-C10
ggcgttttgggcgcaagggggctgtatttaacctgatatgtggtgaattggatgaaagggtcatgtcgataatgaaagatatagaaaaagagaattctaagtgtcaggttcttttgttttctgctacatttaatgacaccgtcaagaatttcgtttcaaggacagtcaggatggatcataataaactctttgtaaagaaagaagaactatctttagatgcagtgaagcaatataaagtgtattgtcctgatgaacttgctaagattgatgtggtaaaagattacatatttgaaataggagagaatgtggggcaaacaattatatttgtgcgctcaaaaattactgcaagattaacacatgaagcacttgttaagttgggctatgaggttacatctatacaaggttctcttagtaatgaagagagagacaaaattgtcaaagagttc

SEQ ID NO: 24587 - DNA, 455 bp, Glycine max
  unsure (1)..(455): unsure at all n locations
  Clone ID: LIB3051-035-Q1-K1-G4
cccacgcgtccgagagacccaattattgtatctgttggatggaggcgttaccagacaaccccaatttatgccattgaggatagtaatggaagggatcgtatgctaaaatatactccagaacacatgcattgccttgctatgttttggggccctcttgctcctcccaacactggggttgtagcctttcagaacttatcaaacaatcaggcaacatttaggattactgcaactgcagttgtacttgagtttaatcatgcagcaaggatagtgaagaaaatcaaattggttggttatccatgcaagatattcaagaagacagcacttatcaaggatatgtttacctcagatcttgaagtagctcgttttgaaggtgcagctattcggacagtcagtgggattagggggcaggtcaagaaggctgcanaagaagagataggtaatcaagcgaaaaggaa

SEQ ID NO: 24588 - DNA, 400 bp, Glycine max
  Clone ID: LIB3051-049-Q1-K1-H1
tcgcggacgcgtgggcggacgcgtgggtggcacaagaaagttttgaagactagagacccaagtatggtatctgttggatggaggcgttaccagacaaccccaatttatgccattgaggatagtaatggaagggatcgtatgctaaaatatactccagaacacatgcattgccttgctatgttttggggccctcttgctcctaccaacactggggttgtagcctttcagaacttatcaaacaatcaggcaacatttaggattactgcaactgcagttgtacttgagtttaatcatgcagcaaggatagtgaagaaaatcaaattggttggttatccatgcaagatattcaagaagacagcacttatcaaggatatgtttacctcagatcttgaagtagctc

SEQ ID NO: 24589 - DNA, 442 bp, Glycine max
  unsure (1)..(442): unsure at all n locations
  Clone ID: LIB3051-070-Q1-K1-A4
cccacgcgtccggggggcgcgggttttagacgggagtgcgaatgcgatgatgaagggagagggaagcgaagacgatcgtccatggcaatcttaccacactgtttacacaaccgccaaagcaggaatggaattggttgacaaggagaaagttcaaagggtagtttatgaaatgagcaaaggatccaaatattttcaaaacgaggaacgcaaggaagcttttattaagcagaaaattgataacctgcgaattcagtgtgcaaacctcacacaagaagacttggcccattatcaaaaggttgctgatagaagaattgttgagctggaagcttcgcgtgacctttcaaggatttggttacatgtagatatggatgctttctatgctgcagttgagactttaagtaaccctacattaaagggcangccaatggcttgtgggagcatg

SEQ ID NO: 24590 - DNA, 436 bp, Glycine max
  unsure (1)..(436): unsure at all n locations
  Clone ID: LIB3051-050-Q1-K1-H9
cccacgcgtccggaatttaagggacaggctttatcgtgaacttgagcggaatctggctatgaaagttgaagatggtgaaacagctgatacatttgttgtcagtgggcgtggaactttgcatatcaccatacttatagaaaatatgcgaagagaaggatatgaattcatggttgggcctcccaaagttatcaacaagaaggtggatgaaaaactgttggaaccgtatgagattgcaactgtggaggtaccagaagagcacatgggagctgttgttgaacttcttggcaagagacgaggacaaatgttcgatatgcaaggagttggattggaagggactacactacttaaatttagaatccaaaccggtggccttcttggattgcggaattcaatnttaacttgcctcccgagggactgctattctcaacactggttt

SEQ ID NO: 24591 - DNA, 386 bp, Glycine max
  Clone ID: LIB3051-075-Q1-K1-A4
ggaatctagtccaattcctttcacaaatgcaacgtactacagggttggattttatggtgttagagttgggaaacttgataaaaaggagtatgtatatcgtgagcctcgtgatgtacgtctaggtgacataatggaaaaacttagtcacacatacgagtctagaatggatggtaatcacactttgcatattattccagattctagacaagtgaaggcagaggagttgcagcctggtgtctgttaccttcagattactgccgttgatccagtaatggaagatgaggatttaggaagtaggagagaaagaattttctctctctctactggaagcgtccgagcccgcgtatttgaccgattcttgtttgacaccccatttaccaaaaatg

SEQ ID NO: 24592 - DNA, 392 bp, Glycine max
  Clone ID: LIB3051-077-Q1-K1-A4
atcgactaataatacatcagagctgtcagcataggcagggactcttggtgaaactttggatggagatgcaaagtgggggaaaacattggatgagcgtcacaaacaaaaaataatgagagaagtagaacaactacggcatgccaaccttgttaaaaaattagaacagaagctttcctttgctgaaagaaagttaacgatagctgaaaaagccttaatgaaggtggagtcgtttttgaagccatcagaatacaaagcagatcctgaaagtataactgatgaagagagatttatgtttcgcacattatgattgacgatgaaagctttcttacttcttggtagacgtggggttttagatggtactattgagaacatgcacttgcattggaagtacc

SEQ ID NO: 24593 - DNA, 337 bp, Glycine max
  Clone ID: LIB3051-037-Q1-K1-E12
cccacgcgtccgccacaacggactaccttatacttcttccactactaatgggcatggcatggataaacattcatgtattcatctatagctccaaaccactcaaatcctctaaaaatcctgcggctcctcgcccttttacaatcataggaaacatctaggagctaggcaaccagccttaccaatcacttgccaagctttctcaaatttatggtcctataatgagtctcaagcttggtaagactaccaccattgtcatttactctccacaagttgccaaagaagctctacaagcacatgatcaaattggtgctaatacgacaatctgtaatactctagg

SEQ ID NO: 24594 - DNA, 231 bp, Glycine max
  Clone ID: LIB3051-039-Q1-K1-C4
gcacaatggactaccttctacttcttccactaataatcaccatagtatggataaacattcatgtattcatctctagcttcaaaccactcaaatcctctaaaaatcccccgggtcctcgcccttttccaatcataggaaacatcttggagcttggcaaccagcctcaccaagcacttgccaagctttctcaaatttatggtcctataatgagtctcaagcttggtaagacta

SEQ ID NO: 24595 - DNA, 429 bp, Glycine max
  Clone ID: LIB3051-039-Q1-K1-C8
gcacaatggactaccttctacttcttccactaataatcaccatagtatggataaacattcatgtattcatctctagcttcaaaccactcaaatcctctaaaaatcccccgggtcctcgcccttttccaatcataggaaacatcttggagcttggcaaccagcctcaccaagcacttgccaagctttctcaaatttatggtcctataatgagtctcaagcttggtaagactaccaccattgtcatttcctctccacaagttgccaaagaagtgctacaaaaacatgatcaaattcttgctcataggacagtccctgatactcttcgagcactcgatcatcacatactttctgtggtgtggatgccacctttagcacaatggaggacccttaggcgagtttgtgctaccaaagagttctcttctcatcagc

SEQ ID NO: 24596 - DNA, 439 bp, Glycine max
  Clone ID: LIB3051-078-Q1-K1-C5
gcacaatggactacctttttcttcttccactaatcaccatagtgtggataagcattcaggtactcatctctagcttcaaaccactcaaatcttctaaaaatcccccggggcctcacccttttccaatcataggaaacatattggagcttggcaaccagcctcaccaagcacttgccaaactttctcaaatttatggtcctataatgagtcttaagctcggtaacactaccaccatagtcatttcctctccacaagttgccaaagaagtactgcaaaaaaatgatcaaatcttagctaatagaatggtcccagattgtgttcgagcacttgaccatcacatactttcggttgcatggatgccacctttaccacaatggagggcccttaggagagcttgtgccaccaaagtgttctcttctcagcagctcaatttcacaca

SEQ ID NO: 24597 - DNA, 339 bp, Glycine max
  Clone ID: LIB3051-007-Q1-E1-H2
atttgcatcgcatcgcacagagatgaattcaattacaagaagcggatcgcttagtatcatcctcgttgttttcttctctttgcacttcattcttggtttttccgacgactcatcacctgcttcaaaagatgctacaaagacagaacctcatgccggaagaagcactagtgctatagttatcattgtattaattgtgcttgtgttcttttctttgttctcctttgtactttttaagctgtggcggaagaagaaaagggaggagcaatatgctcgtcttttgaaattagttgaagaggatgatgagttagagcttgagcttggcctaagggactgagactc

SEQ ID NO: 24598 - DNA, 416 bp, Glycine max
  Clone ID: LIB3051-062-Q1-K1-H1
tctagttcgagttcgacaacaaacgtggtgactctgaaggcggcgtgggttctcccggagcggaggcagaacatccgtgaggtgtacgaggtggggcggaagttggggcagggtcaattcgggactaccttcgagtgcacgcgccgcgcgtccggggggaaattcgcgtgcaagtcaattcccaagcggaagctgctgtgcaaggaggactacgaggacgtgtggcgggagattcagataatgcaccacttgtcggagcacgcgcacgttgtccgcatcgaagggacgtacgaggattcctcggcggtgcacctcgtcatggagttgtgtgagggtggcgaagtgtttgacaggatcgtgcagaaaggacactacagcgagagacaggctgccagggtgataaagacgattgttga

SEQ ID NO: 24599 - DNA, 459 bp, Glycine max
  Clone ID: LIB3051-082-Q1-K1-A4
actaaacacaaaccccaaaaaccaaaatcacaactcccaaagcaaaaacccaaatcccagaggatggtagtaacatgagatgacagacgaccgcgtgcatccaatcccaaacctagctatgtctccggccaccgtccactggacctctgacgccatccacggcggacccctccgtcgtgtcgacctcgactccggcaccaacggctgggcctcccctcccggtgacctcttcctcctccgctcccccaattatttcaccaaacgccagaaatcacccgccggcgactacctcctctccccctccggtatggactggctcaaatcccaatccaaactcgacaacgtcctctcccggcccgacaaccgcatggcccaggcccttcgccaggcccaggcccaaagcaaatccctcaaaagcttcatcttcgcagtcaacctttaagtccctggaaaagaaca

SEQ ID NO: 24600 - DNA, 405 bp, Glycine max
  Clone ID: LIB3051-085-Q1-K1-A4
ctccaaatacgatttcgtcaaggtgaaggtgtggttgggtgataatgcggatcactactatgtgctctcccgatttttgctcagcagaatgctaacggtaaccaagattccaaaccacgttgctatcaaaattgctctcgaattgaagaagctgctcacagataacagccttctagatgtctctcaatctgacttggaagtcaacctatttaagcttatggagcggcggggatatggagaagaatacataaatcgttacaagatgatgacgagatttcatcatcaaagagttccgttagtaatccttgtttgtggaactgcttgtgttgggaagtctactattgccacccagcttgcacagaagctaaatttaccaaatgtattacagacagatatggtttatga

SEQ ID NO: 24601 - DNA, 436 bp, Glycine max
  Clone ID: LIB3051-009-Q1-E1-C8
cccacgcgaccgaaaagcgcaaattaaagcgcaaaaaccattctccttcggtgctcttgaaaacatgggaaaacagagcacagaattctctgccctcaactgcatcgacctctccaaccctgagatcaaccaatccgtcaatttactcaaacaggcatgtttggattccggttttttctacgttgtcaatcatggaataagccaggaattcatggaagaggtttttgcacagagcaagaaattcttctctcttcctcacaaggagaagatgaagattctcaggaatgaacaacacaggggatacacccctgttcttgatgagttgcttgatcctgaaaaccaagtgcatggagactacaaagaggggtattatattggagttgaaaaaggttaagatgacccagaatcgatataacctttttatggaccgaataac

SEQ ID NO: 24602 - DNA, 459 bp, Glycine max
  Clone ID: LIB3051-009-Q1-E1-C9
attcgccggtcgatccatgcgaccacatagcgcaaattaaagcgcataaaccattctccttcggtgctcttgaaaacatgggaaaacagagcacagaattctctgccctcaactgcatcgacctctccaaccctgacatcaaccaatccgtcaatttactcaaacaggcatgtttggattccggttttttctacgttgtcaatcatggaataagccaggaattcatggaagaggtttttgcacagagcaagaaattcgtctctcttcctcacaaggagaagatgaagattctcaggaatgatatacacaggggatacacccctgttcttgatgagttgcttgatcctgataaccaagtgcatggagactacatagacgggtactatattggagttgaaagatgtgaagatgacccagaatcgaataaaccttgttatggaccgaataactgggccgcac

SEQ ID NO: 24603 - DNA, 425 bp, Glycine max
  Clone ID: LIB3051-019-Q1-E1-F10
cacgcgtccacaacgcgtccgcccacgcgtccggcaaattaaagtggttcacgaaccttagcataggctctccttgggtgctcttcaaacatgggaaaacagagcataccccaattctctgccctcaactgcatcgatctctccaaccccgagatcaatcaatccgtcaacttactcaaagaggcatgtttggattccggttttttctacgttgtcagtcatggaatacggcaggaattcatggacgaggtttttgcgcagagcaataagttcttctctcgtcctcacaacgagaagatgaagacgctcaggaatgaacaacacaggggatacacccctgttcttgatgagttgcttgatgctgaaaaccaagtacatggagattacaaagaggggtattatattggtgttgaggaaggtgaaga

SEQ ID NO: 24604 - DNA, 430 bp, Glycine max
  Clone ID: LIB3051-048-Q1-K1-F1
gaataactggcccgcaccaggtgttcttccagggtggagggagaccatggaaaagttcgatagagagacattagaagtagggaaagcagttgcaaagataatagcccttgcacttgatttggatgctaatttttttgatcagccagaaatgcttggagagcccattgcaactctgcgtttgctgcactatgaaggtcaagtttcggatcccttgaaaggattatatggagctggagctcatactgactatggtttaattacactgttagcaacagatgatgtctcgggtcttcaaatatgcaaagatagggatgctaaacctcagaaatgggaggatgtagcaccattgaagggagcattcatagtgaatcttggtgacatgctggagcgctggagcaactgcgttttaagtccacactgcacagagttc

SEQ ID NO: 24605 - DNA, 437 bp, Glycine max
  Clone ID: LIB3051-102-Q1-K1-C5
cgcaaattaaagcgcaaaaaccattctccttcggtgctcttgataacatgggaaaacagagcacagaattctctgccctcaactgcatcgacctctccaaccctgacatcaaccaatccgtcaatttactcaaacaggcatgtttggattccggttttttctacgttgtcaatcatggaataagccaggaattcatggaagaggtttttgcacagagcaagaaattcttctctcttcctcacaaggagaagatgaagattctcaggaatgaaaaacacaggggatacacccctgttcttgatgagttgcttgatcctgaaaaccaagtgcatggagactacaaagaggggtattatattggagttgaaaaaggtgaagatgacccagaatcgaataaacctttttatggaccgaataactggcccgcaccaggtgtt

SEQ ID NO: 24606 - DNA, 420 bp, Glycine max
  unsure (1)..(420): unsure at all n locations
  Clone ID: LIB3051-086-Q1-K1-C11
taaattcttctgcctcaatgctttcattcaatggaagtccatactggatggcacctgagggggtaatgaatacaaatggctatagtcttccagacgatatatggagcttgggatgcacaattattgaaatggcaacatcaaaacctacatggaatcagtatgaatgggtagctgccatatttaaaattgggaacagcaaagatatgcctgaaatcctcgagcatctttcgaacgatgcaaaaaatttcatcaagctatgcttacaaagagacccattagctagcccgacagcccataagttactagaccaccccttcattcgagatcaatcggcaacaaaagctgcaaatgtcagcataaccagagatgctattccttgcatgtttgatggaagccgtacaccgnctgtgttagagtccc

SEQ ID NO: 24607 - DNA, 385 bp, Glycine max
  Clone ID: LIB3051-032-Q1-K1-A5
cgagcccaagatcagtgctgagaaagcggtgcaactgtgtgatcggaacttgggcgttggagctgacggagttatctttgtcttgcctggcatcagtggcaccgattataccatgaggatttttaactctgatggtagtgagcctgagatgtgtggcaatggagtgcgatgctttgccaaatttgtttctcagcttgagaatttacatgggaggcatagttttaccattcatactggtgctggtctgattattcctgaagtcttggaggatggaaatgtcagagttgatatgggggaaccaattcttaaagcctcagatgtgcctactaaattacatgcaaataaagataatgctgttgtaaaatcagaactagttgtagatgga

SEQ ID NO: 24608 - DNA, 435 bp, Glycine max
  Clone ID: LIB3051-096-Q1-K1-A12
tcggtgaagcatcccccggttgtggtgagtggaatatgccaatgaagaggaatccagcttacagagggaaatggcatgccccgctaatcgaaaatcctgcttatatgggaatcctgaagcctcatgacattccaaaccctgactactttgaaattaaaaaacctgattttgagcctattgctgatattggcatcgagatttggacaatgcacgatggtatattggacgacaacatcttgatagctaaagatgataaaattgccgactactaccgggacactacatgctaatcccaattttaccgtcgagaaagaaaaacagaaggaagaacattcggaagctgcatcaagttgtcttgctggcttccagaagaacgtatttgacctgttatacaagatcgcagacatttccttactgagtgcatacaagcttaaa

SEQ ID NO: 24609 - DNA, 280 bp, Glycine max
  unsure (1)..(280): unsure at all n locations
  Clone ID: LIB3051-101-Q1-K1-A4
accacgcgtccgatcttgattccagtagtgctctctatggtatgggttgcactcctgagtatgtagtttatcatgagttaatcctgaccacaaaggagtacatgcattgtgcaacagcggtggagccccagtggctggctgagctgggacccatgtttttgtctgttaaagattctgatacatcattacttgagcataagaagatgactantcaagagaaaacagccatgatggaggagatggagaacttgaagaaggtgcaagcagaggttgagaaaaa

SEQ ID NO: 24610 - DNA, 445 bp, Glycine max
  Clone ID: LIB3051-108-Q1-K1-A4
gcttcaatggtcactggaagtattgggatgcttccttctgctagcctgggggcttcgggacctggactttttgaacccatacatggttctgcacctgatattgctggacaggacaaggcaaatccatttgccactgttcttagtgctgctatgcttttgagatatggcctaggagaagaaaaggcagctgaaagaatagagaatgcagtgatggacactttgaacaggggatttcgaactggtgacatatattctgctggaacgctggtaggatgcaaacagctaggtgaggagatactgaagtcagttgaatctaacgttcctgctggtgctgctgcaatgtgattttgaaaccaactcgccatagcattttgggttctggtttaggttggaggccactatgactgccaaagccgagaaagtctccctagtctattaagttctg

SEQ ID NO: 24611 - DNA, 384 bp, Glycine max
  Clone ID: LIB3051-090-Q1-K1-H9
cccacgcgtccgcccacgcgtccggagtatgttgttttcgacgaggctgattgtttatttggcatgggtttcgccgagcagttgcatcagattcttgctcagctcggggagaaccgtcagaccttgcttttcagtgccacactgcccagtgctcttgctgaatttgccaaggctggcttgagagaccctcagcttctccgcctcgacttggaaactcgaattagccctgacttgaagcttgccttcttcactttgaggcaggaagagaagtactccgcgttgctgtatttgattagggagcacattggttctgatcagcagacattgatttttgggtccaccaaacctcatgtggaagttctcaaccttttggttcctgaaaaa

SEQ ID NO: 24612 - DNA, 181 bp, Glycine max
  Clone ID: LIB3051-090-Q1-K1-H11
cacgcgtccgtccacgcttccggatattttgtttcgacgaggctgattgtatgtgcaggttttacgacgggcagttgcatcaaattcttgctcagctcgtggagaaccgtcagaccttgcttttcagtgccacactgcccagtgctcttgctgaatttgccaaggctggcttgagagaccc

SEQ ID NO: 24613 - DNA, 401 bp, Glycine max
  Clone ID: LIB3051-111-Q1-K1-A12
ggattggctgttgtggattaaagagtaatcttctcttgagcggacgcgtgggcggacgcgtgggcagggaactactcaattgcagtggtgcaagctaattcatccttggaagaccaagcacaagtatttacctctccctccgcaacctttgttggtgtatacgacggtcacggtggtcctgaagcttcccgtttcatcaccaaccacctcttctccttccttcgcaaggagggtggtttgtcggaggaagttataaagaaggcgttcgaggcaacggaagatgagtttttgcgtgtagtgagggaatcatggattgcgcggccacagatagcttccgtgggttcgtgttgtcttctgggagcgatttcaaagggagttctttatgttgctaatctcgggga

SEQ ID NO: 24614 - DNA, 396 bp, Glycine max
  Clone ID: LIB3051-046-Q1-K1-G1
acaacaacactctgaaactaacaacaacaataaaagaccatgtcggtgaaggagtgcgagcaccacaaggggaagaagaggaagatcttccggcaagtgttctggtgcttagtggtgttccttttcatcgtgctggtcacaattcttttgatatgggcaatccttagacccaccaaacccaccttcacgctccaagacgtcaccgtctacgccttcaacgccaccgtggcgaacttcctcacttcgaattttcaggtcacgctcatctcgcgtaacccgaacgaccgcatcggtgtttactatgatcgcctcgaaaccttcgtgacctaccggagccagcaggtcacgtaccgaaccgccatcccttcgacatatcaaggccataaagagatcaat

SEQ ID NO: 24615 - DNA, 397 bp, Glycine max
  unsure (1)..(397): unsure at all n locations
  Clone ID: LIB3051-113-Q1-K1-G6
ataaaagaccatgtcggtgaaggagtgcgagcaccacaaggggaagaagaggaagatctttcggcaagtgttctggtgcttagtggtgttccttttcatcgtgctggtcacaattcttttgatatgggcaatccttagacccaccaaacccaccttcacgctccaagacgtcaccgtctacgccttcaacgccaccgtggcgaacttcctcacttcgaattttcaggtcacgctcatctcgcgtaacccgaacgaccgcatcggtgtttactatgatcgcctcgaaaccttcgtgacctaccggagccagcaggtcacgtaccgaaccgncatcccttcgacatatcaaggccataaagagatcaatgtttggtctccgtttgttatggcaccaaca

SEQ ID NO: 24616 - DNA, 363 bp, Glycine max
  Clone ID: LIB3051-034-Q1-K1-H9
caacaacaaagaaaaaaacgagcagaagaagtcccacatcggataagctgaagaatcaacacccctgtgagaagcaggcgatgaaaccgtacagaggaataaggatgcgaaagtgggggaagtgggtggcggagatcagagaacccaacaagaggtcgaggatttggttgggttcgtacacgacacccatggccgccgcacgcgcctacgacacagccgttttctacctccgaggtcccaccgcacgccttaacttccccgaactcttgttccaggacgaccaggaggagggcaatgattcggtgcagcacggtgcagcagcaaggaacatgtccgctgattccattcgccgaaaagccacgc

SEQ ID NO: 24617 - DNA, 444 bp, Glycine max
  Clone ID: LIB3051-111-Q1-K1-H1
ggaagggtgttggaagatggtaatggaaaggattctgtggcggaaggaatttcgacgaaggaatatccaaaattctcggctttctttaagaagattaccatatacttggatcagggtttgtaccaggataaccatgttgttgtgtgggatagtgctcattcggcggctgcgcagcagcgtgatggttttgaggtgaagaggaaaggagataaggaattcactgcggtggttaggatggcgatgaattattcgcctgacaagtttgtggtttcaccgcaactggctagagttttaggggttgagtttgactcgcgctgcaggatcatagctgctctttggcactatgtgaaggctaagaagctgcagagtcccaatgacccttcgttcttcatgtgtgatgcttctctccagagggtgtttggggaaggagaagatgaaattctc

SEQ ID NO: 24618 - DNA, 270 bp, Glycine max
  Clone ID: LIB3051-077-Q1-K1-A12
accacaccaccccttcttccttttcatcaggtttattccttttcttttggttcaattgtgctggatggagagtgcaagaatcagcaaatggttaaatcttctagtttgtgtactgctattgcttaaggcagaaggatctcttgttccattgactttggtgaacaatgcagaatcaaaaggagctgtttgtttggatggaaaccccccagcataccactttgacaacggatttgaaaaagggattaaaaacttgattggtcacattgaagg

SEQ ID NO: 24619 - DNA, 436 bp, Glycine max
  Clone ID: LIB3051-113-Q1-K1-H9
accacaccaccccttcttccttttcatcaggtttattccttttcttttggttcaattttgctgaatggagagtgcaagaatcagcaaatggttaaatcttctagtttgtgtactgctattgcttaaggcagaaggatctcttgttccattgactttggtgaagaatgcagaatcaaaaggagctgtttgtttggatggaagccccccagcataccactttgacaacggatttgaagaagggattaagaactggattgttcacattgagggaggaggatggtgcaacaatgtagagagttgcctttaccgtaaggatagtcgcttaggttcatctaagcaaatggaggatctttacttttctgcaattttaagcaacgaacaagagtataatccagatttctacaattggaatagagtcaaggttaggtactgtgat

SEQ ID NO: 24620 - DNA, 440 bp, Glycine max
  Clone ID: LIB3051-106-Q1-K1-B10
cgagaatggacaaggaagtggagcttggttcccttgaaggtgaaatggccacccagcacaggtcacaaccacagaagcgcaagggtggtcttgttaccatgcctttcatcattgcaaatgaggcacttgcgagggtggcaagtttgggccttttgcccaacatgatactgtatttgatggggacctacaggcttcaccttgcccaagcaacccagatacttctctggtcccatgctaccagcaatttcacacctgtggtgggtgctttcattgctgattcttatctgggtcgattcctcgctgttgggttgggttcggccatcacttttctgggaatgacactgctgtggttaacagctatgatcccacaggcacggcctcccacttgcagtagcaataaagctggaggctgtaaatcggcaacaggagggcaaatggca

SEQ ID NO: 24621 - DNA, 382 bp, Glycine max
  Clone ID: LIB3051-116-Q1-K1-H1
ctgattaacgagaatggacaaggaagtggagcttggttcccttgaaggtgaaatggccacccagcacatttcacaaccacagaagcgcaagggtggtcttgttaccatgcctttcatcattgcaaatgaggcacttgcgagggtggcaagtttgggccttttgcccaacatgatactgtatttgatggggacctacaggcttcaccttgcccaagcaacccagatacttctctggtcccatgctaccagcaatttcacacctgtggtgggtgctttcattgctgattcttatctgggtcgattcctcgctgttgggttgggttcggccatcacttttctgggaatgacactgctgtggttaacagctatgatcccacaggca

SEQ ID NO: 24622 - DNA, 437 bp, Glycine max
  Clone ID: LIB3051-003-Q1-E1-H9
accacgcgtccgctctccctcactctcaccatggaggcgcaaccaccaaccccctcgactgcgccgccgcctctgccgccacacctcagctaccccgactccgtggaatcctcgcctcgctcccgcaacaccgactcctgggacgagcccttcgcgccggcgtccaccaagctccgtctcatgtgcagctacggcgggcacatcgtcccccgcccccacgacaagtccctctgctacgtgggtggcgacacgcgcatcatcgtgtccgaacgcgccacctcactcgcagacctctccatgcgcctctcgaaaactttcctgaacggaagactcttcacgctcaagtaccagctccccaacgaggacctcgattccctcatctccgtcaccaccgacgaggacctcgagaacatgatcgacgagtacgaccgcaccgc

SEQ ID NO: 24623 - DNA, 418 bp, Glycine max
  unsure (1)..(418): unsure at all n locations
  Clone ID: LIB3051-037-Q1-K1-E4
ggcgcaaccgccaaccccctcgaccgccccgccgcctccgccgcagcacctcagctaccccgactccgtggaatcctcgccacgctcccgcaacaccgactcctgggacgagcccttcgcgccggcgtcgacgaagctccgcctcatgtgcagctacggcggccatatcgtcccccgcccccacgacaagtccctctgctacgtcggcggcgacacgcgcatcatcgtctccgaacgcgccacctcactcgcggacctctccacgcgcctctcgaaaacattcctgaatggaagacccttcacgctcaagtaccagcttcccaacgaggacctcgattccctcatcttcgtcaccaacgacgaggaccttgagaacctgatcgacgagtatgaaccgaacgncggcggcggcaacttc

SEQ ID NO: 24624 - DNA, 403 bp, Glycine max
  Clone ID: LIB3051-010-Q1-E1-H5
accacgcgtccggttgattgttgattggagatgtgaggtggcccgtaataccccatatgaagttaatatcacaatccctgttgagggttatgagccaattgaatttgtgcttacaaaaacatgtgactataaacaggatccagggggaggtcgcacaagaggatgggcaatatttggagtgctatcttgcatattttttgtctcttcaacactcttttgttgtggagggttcatttacaagacaaaagtggaacgccagcgtggaattgatgcattgcctggcatgacaattctttctgcgtgcttagagacagttagtggagctgggcaaggctactcacggccagaagacatcaatagtgcatttggcagtgaaacctcttgggaacgtcctcctggtcct

SEQ ID NO: 24625 - DNA, 415 bp, Glycine max
  unsure (1)..(415): unsure at all n locations
  Clone ID: LIB3051-029-Q1-K1-G1
gaaaatcctgtttcccgataaaaaccccgttcgtacatggtctggtcacgcggatcgggttgattgagatgcacaccgcgagcaggagcaacggcggcggcggcggcgtgctggcgtcgcggacgagttcgcggtcggtgacggagacggtgaacgggtcgcacaagttcgtgataaagggatactcgctggcgaaggggatcggagtcggaaaacacatcgcgagcgagacgttcacggtaggagggtaccagtgggcgatatacttctaccctgacggcaagaacccagaggacaacttcgnctacgtctncgtcttcatcgggctcgccttcgagggcaccgacgtccgngccctgtttgagctcacgctgctcgaccagagcggggaatgggaagcacaaggtgcatagcc

SEQ ID NO: 24626 - DNA, 440 bp, Glycine max
  Clone ID: LIB3051-026-Q1-K1-F9
caaaagcctacaagaaatggacaaagaaaatatcagaaatcaagccaccaactagtcccttaagaaggagggcaaaatcatcaaagaagcaaccagaaaaagagctttatgctatcatatcacaacgcaaacatgagaggaaagaccactttgattccatgttctcatctctaatttcaaagtatggtgggggtcaaatgccagaaccctctgaagaggaatttgaagctgcacagagaaaggtggaaagtggaaggtcctcaaaaaaattaaagcgaaaataacaaacttatatctgtgtacaattcgtttaagtgtgaacggtacttcagcttttgttagtggaaattcttcttttctgatgaagtacgggaagttagttattttcatgtgtatgttaatgttactggttactgtcaatagtgtcaatggtgaaacag

SEQ ID NO: 24627 - DNA, 472 bp, Glycine max
  Clone ID: LIB3051-087-Q1-K1-F4
ctcatccctctcaacgacgaccttgccattcccaaccccaacgccgtttcccctccctcagattgggcactctccggacttcaacccttctcgctcgccgtctccgtctccttcgcccacccgcaccctctacgagctccgatcccgtaggtctctcggcaagaaaccctccaccagtcgccaaggcaaaattcgcaccctcggcgatctcaaacgcccctcccgcgacgaccatgattccgggtccgatcctgatttcgaacccgaccagtactacaccggctgctaaaagagtgggatgcttgttcgagatcctaccagaggaaacaacaacaacaatttggatgatattttcgatcaagcaaggcatgttgctagtgatgcgcccccggagaatcctcgaagctcttcgaggtcgagaagttttagtggcacggcgaggttgctctccggagagactgtgccatctgct

SEQ ID NO: 24628 - DNA, 417 bp, Glycine max
  Clone ID: LIB3051-059-Q1-K2-D5
cccacgcgtccgcacaatcccaaattcccaattctctcttccttctccacaccaattggcaaaaccctaacccccaaattctccttcagcgattcatctctcttgaatcgaatcgatggcacggatgggcccagggttccgattccaccccaccgacgaagagctggtggtgttctacctgaagcgcaagatgaccggaaacctctcccgctacgaccacatcgccgttgtcgacgtctacaagctcgagccctgggaccttccccgttagcacccaattatcttcttccttccccttttttgtggtctcaatagataggcttttgagaattttggaagtgttttaatttgtttcggtgtttcagctctgtcgaagctgaagacgaaggacttggaatggtacttcttcagcgcgct

SEQ ID NO: 24629 - DNA, 430 bp, Glycine max
  Clone ID: LIB3051-065-Q1-K1-A8
aacttcttcttgagtgttttctcagttcctcacatcatgtaccgctttggaacctccctcggctgcaaagctagaattgccaggagcagcactcaacagattggaagtagggtcacttggaacaggaattatgcggccaaagacattaagtttggtgtggaggctcgggctctgatgcttaagggtgtcgaagagctcgctgatgccggtaaagtaacaatgggccctaaggggcgtaatgtggttattgagcaaagttttggagcacctaaagtgacgaaagatggagtaaccgttgctaagagcattgaattcaaggacaaagtcaagaatatcggtgccagtcttgtaaagcagggtgctaatgctactaatgacgtggctggtgatggaaccacttgtgctacaattcttactaaagcaattttta

SEQ ID NO: 24630 - DNA, 421 bp, Glycine max
  Clone ID: LIB3051-066-Q1-K1-A3
cccacgcgtccggttttgttgttggtgggtttcagcgttccgcttcaacttcaaattctcagtgaagccaattcagttcagtccaaatcccaaatccgaagtgagatttgcgatggagaggcttcagcgaatgttcgcaggtgcaggtggagctctagggcaccctcccccagattccccaactctcgattcctccgagcaggtctacatctcctcactcgctctcctcaagatgctgaagcacggaagggctggggttcccatggaagtgatgggtttgatgcttggagaattcgtggacgagtacaccgttcgtgtggttgatgtcttcgcaatgccgcagagtggtactggtgttagtgttgaagcttgtgatcatgtttttcagactaatatgcttgacatgctcaaacaaaccgga

SEQ ID NO: 24631 - DNA, 433 bp, Glycine max
  Clone ID: LIB3051-064-Q1-K1-A2
acggatatttcccaaaaccaattgcatcactctcgtccgataccgacgctgccctagaccacgggcaagcggggtcgcacaccgccttcatccggtagggcaaaaatgagtcgaggaagtggaggtggatacgatcgtcacatgactattttctcccctgaaggacgtctctttcaagtggagtatgctttcaaggctgtgaaggctgcaggaatcacctcgattggtgtacgaggaaaggattcaatttgtgtcgttactcataagaaggttccggataagcttttggacaacacaagtgttacacacctctttccaatcaccaaataccttggattattggctactggcatgacagctgatgctaggacactggtccaactagcaagaaatgaaacagctgaatttcgctttacatatgggatatgagatg

SEQ ID NO: 24632 - DNA, 295 bp, Glycine max
  Clone ID: LIB3051-106-Q1-K1-A2
ggccacgaaaaaaagaaaacccagaaaaactctgaagaagagttcgttgctttctgcttgactgcgaagatgaacggaggcccatctggtttcacaaatgctcccgtcacaagggctttcatcatcacttcggcgcttttcacaatcttctttgggatccaaggccgtttcagcactctggggttgtcgtatcaggatatttttggaaagcttcgcctttggaagttgatcatttccatattttccttctcgtcaacaccagagttgatgtttggattgtatcttctatattact

SEQ ID NO: 24633 - DNA, 343 bp, Glycine max
  Clone ID: LIB3051-075-Q1-K1-D12
gaagtaatgacccggatctaaaggaggagatggagaagcagtttgtggaccttctcagcgaggagttgaagttgcaagagtctgttactgaagcaaacactcggcacatgaacataactttggctgaagcaaaaagagtggcgtctcagtaccagagagaggcagataaatgcataactgcaactgaaacatgcgagcaggcaagagaacgtgctcaggccatactcacaaaggagaaaaagatgacttacgtgtgcgagaaacgagctcgtcaaatgggttgggaaggagaataactgcataagtcatggtatttatatgctttatggctataatcatgatc

SEQ ID NO: 24634 - DNA, 429 bp, Glycine max
  Clone ID: LIB3051-040-Q1-K1-D8
aaataacaaggctcctcggttagaattcctgatcggtcatggctgattttcagacctctacccacagagccaagtggattttctctcctcaacagctggttgagaaatatagagctgccaatcagagagccaaacaaattctagagaagtgtggagcaacactaatggaagtagatgttgatggatcgttgtcatatcctgaaccccaaatgactgcaaaggatagtgctgaaaagcattctcgaacaaaacctcttactattgaagaagaacaatgtataaaggtattttatgaaaacaagctacaagaagtatgtaacaatttccgcttccctcataagatccaggcaacagcccttatctattttaaaagattctatctgcaatggtcagtgatggaacatcaaccaaaacacattatgttgacct

SEQ ID NO: 24635 - DNA, 434 bp, Glycine max
  Clone ID: LIB3051-051-Q1-K1-B10
agagaagaagcatatatatcaaaatggctgcagagatggagagggagtcattgataactgaagctcctaatgcaccagttactgcacagagaagggtcagaaatgacttagaaaattctctaccaaaaccatacttgccaagagcattgaaagctcctgatacgggtcacccaaatggaacagcaggccacaggcaccacaacttatctgttcttcagcagcattgtgctttttttgatcaagatgacaatggaatcatttacccttgggaaacttacatggggctgcgttctattggatttaatgttgttgcatctgttattatggctattgttatcaatgttggattgagttaccccactctacctaattggttcccttctctcttttttctatctacatacacaacatacccaaagcaaagcatgggagtg

SEQ ID NO: 24636 - DNA, 310 bp, Glycine max
  Clone ID: LIB3051-106-Q1-K1-A6
aacgtgttcagtaagtatgctcgtacagttcctgacaagctcacacttggggaggtctgggacatgacagagggaaacagaaatgcgtttgacatatttggctggcttgcagctaaacttgaatggggggttctgtacattctggctagggatgaggaaggtttcctctctaaagaagctgttagaagatgctttgatgggagcttatttgattaatgtgctaaaatgcatgctactagtgatgccaagatgggttgaaattggattatgtagtactatatagtgtgtatgtatagttacgttatgtgtc

SEQ ID NO: 24637 - DNA, 359 bp, Glycine max
  Clone ID: LIB3051-037-Q1-K1-B4
cggacgcgtgggcggacgcgtgggcggacgcgtgggaaaaaaaatcgtagttggaggcgccgcactccactccactccaatcaatcagatactagcgatggggaggaagcgaaaggtagcaccgaaatcttctgtatccgccgagcccccgctgaagcaacaccaaccaaaacccgaaaatgccgctcaggaatacgaagaagaggtcgaagaggaagttgaggaagacgaggtagaggaagaggtcgaagaggaagacgaagatgaggaggacgaagaggacgaggaagaagaagaagaagaccataaagaccaataccagcaccaacaacaacagcaagacgaagacgacgacccga

SEQ ID NO: 24638 - DNA, 421 bp, Glycine max
  Clone ID: LIB3051-094-Q1-K1-C7
cccacgcgtccgctaatcagaaaaaaaaaaccctagtaatgccgccgatggggaggaggcgaaaggtagcacccaaatcttctctatccaccgagccacctctcaagcagcaacaaccaaaacccgaaaatccccctcaagaatacgaagaagtcgaagaggaagttgaggaagaagaggtagaggaagaggtcgaagaggaagaagaagaagaagaggagagaaagatggagaagcaacaacaacaagcaccatctaaggaaacaaaagcacagagtgatgaatcagttaaagaaagcagcactgaagggcttccaatggaggatagtccctatgtgaaatacaaggatttggaagattataagcgtcagggttatggtacacaaggtcatcaagaaccaaagacaggtcgtggagcttg

SEQ ID NO: 24639 - DNA, 464 bp, Glycine max
  Clone ID: LIB3051-074-Q1-K1-C10
ccggagatgacgccggcgatcgcgagtgggatctcacacgccgccgccttaaacaggagtggcgtcagccggcgccggattccacgtgacacggaggagcaccggcgcgtgggtggactgtcactggcgtttgaagctccggctagtggctcgtcgccgaggatggtgcaccagtttcgggcgcgtgaggagatgacgtcgacgccgcgagggcgccacatggcgacgtcggcgccggtgaacgtgccggactggagcaagatactccgagtcgactcggtcgagtcgataaacgacgaggacggggacgaatcggaaatgatgccaccgcatgaatacttggcgcgtagccagaagatggtggctaactcggtgtttgaaggagtgggccgcacgttgaagggccgcgacttgagccgggttcgtgacgccgtgtggaaccagaccgggttcgacggttaaca

SEQ ID NO: 24640 - DNA, 269 bp, Glycine max
  unsure (1)..(269): unsure at all n locations
  Clone ID: LIB3051-069-Q1-K1-B5
cccatttttgtactaagaagcatttgttacatttatgtaaccaaaggaaaatcaaaagtacgcangaggtgaagctcggtggcgaaatcaacatgcaacgcagtgaaagcatgcgactaaaggagaaaaaagtgaaggatttgatggttgacaagaagaggctagtggaggtgccgtacatggcgtncctggcccacacaatgactacactggtggcgaacaaggttgtggcggtgccggtggctgcgccgccggngcaatggatcgga

SEQ ID NO: 24641 - DNA, 446 bp, Glycine max
  Clone ID: LIB3051-082-Q1-K1-B10
gccgtacatggcgtgcctggcccacacaatgactacactggtggcgaacaaggttgtggctgtgccagttgctgcgccgccggggcaatggatcggagccggagggtccatgatcgttgagtctgataagcaaaccggaaccgtacggaagcactacatagggatggtgactatgcttgacattgtggtccacattgctggtgataaccacttgagtggtgacgatgatgatatcaccaaagaccttgatcaaaggatgtctggccctgtctcctccatcattggccactcctttgaaggccttagcttgtggactctcaatcctaataccaggttatatatatatagtgttttgtcttttatattacttttcattgagagaatcaaacatgggaaatttattggtatgtgtgaaaataccagggattctttacatgacacaaata

SEQ ID NO: 24642 - DNA, 419 bp, Glycine max
  Clone ID: LIB3051-108-Q1-K1-G5
tcgggcaaaagatgtcacaagagaaatggatcaacaaggcaatcttaaaacagaaaattgtaggcatgacaatgacgagaagggttatggtggagcaaagtacaccattggtagtgtggaccacattactacaccatttattgtagaggccaatcttaaatcagaaaatcagatacaagacaatggccaaaagggttatggtggagcaaaggacacaattggtagtgtagaccacattactacaccacttgctgaaaaggccaaagctgctggtagcaccactgctcagtatgttggggagaaagcagcacaagccaaagatgctactgtgcaaactggcaagagtgctgcaaaagttgcctcagatttgagggacaaggctttggccacaaggtggagtgctgcacattattctactg

SEQ ID NO: 24643 - DNA, 429 bp, Glycine max
  Clone ID: LIB3051-011-Q1-E1-D8
aggtggacctttcccttttctcttttgaaacagagaatggctggtggaggagtagagattggaggaccaggaaaaagggctcatctttacgagcacaagttcagttggtatttcgtctatacatgcttcgttggggcccttggcggttctctctttggctatgatctcggtgtttcaggtggggtgacttcaatggatgatttcctgaaggaattcttcccaaaggtttacagaaggaagcagatgcatctgcatgaaacagactattgtaaatatgacgaccaagtgctgacactgtttacatcatctctttatttctcagcacttgtcatgacattctttgcttccttcttgacaagaaagaagggaagaaaggccagtatcattgtgggagcccttagcttcctggctggggctatcctcaatgcc

SEQ ID NO: 24644 - DNA, 412 bp, Glycine max
  Clone ID: LIB3051-009-Q1-E1-C10
accaggccttggagaagattgtgtgctttaccagcattttgggtagggttattgtacgatgaactttctctaaaaagtgttttggatatgacagctgattggactccagaagaaagacaaatgttaaggaataaggttcctgtaactggtctgaagacaccattccgagacggtttgctgaagcatgttgctgaagatgttctaaagttggcaaaggatggcttggagagaagaggcttcaaggaatcgggatttttgaatgaggttgccgaggtggttagaacaggtgtcactccagctgagaggcttttggaattgtatcatggaaagtgggagcaatccgtagatcatgtgtttgaggaattgctttattaaggtagtattgtctttcaaaggtctgtggaagattgtg

SEQ ID NO: 24645 - DNA, 418 bp, Glycine max
  Clone ID: LIB3051-018-Q1-E1-C6
agctcggaggttactttaagggatgtcccaccggaagctttcaaggctatgcttaactttttatatgatgggcaattgaatgacaaagttatagattctggtgctttgttgctccaactccttctattagctgatcaatttggagtgacttttcttcaacaagaatgctgcaaaatgcttttagaatgtctctcagaggactcagtatgtctactcctccaagtggtttcttcaatgccatcatgtagacttattaaagaatcattgcagaggagaatttccatgaactttgactattatatcagtgcgagtactgactttgtgttattagatgagacaactttaatcaatatcattaagcatccagatctgacagtaacgtctgaagagaaagtccttaatgcaattctaatgtttg

SEQ ID NO: 24646 - DNA, 377 bp, Glycine max
  Clone ID: LIB3051-004-Q1-E1-A12
cccacgcgtccgaaaagagaaggctaaatcagagacaagggattggttaaacaatgtggttggagagttagaatcccaaattgataactttgaagcggagcttgaagggctttccgttaagaaaggaaagagcaggccacccagattgacacatttagagacatcaattactcggcacaaggctcatataaaaaaatgtgaattcattttgaggctactagataatgatgaattaagtcctgaggaggttaatgatgtcaaagatttcttagatgactatgttgagcgtaatcaggatgattttgatgaatttgatgatgttgacgaactatacagttcattaactttagataaggtggagactctagaagatcttg

SEQ ID NO: 24647 - DNA, 440 bp, Glycine max
  Clone ID: LIB3051-027-Q1-K1-C6
gtcttgaagcacaaaatctttcatcggatgagagagaaaagcggagtgaattgataggccttctttgtgggtgcatgcaagtaattattcagaaactagggtctttggattctaccaaatatgtgttggtgcagtattctgatcagataatgagactattcttcagggtctttgcttgtagaaatgccactgcacacgaggaggcaatgctagccattggagcccttgcctactcaataggccaggagttttccaattacatgccagaattttacaagtttctcgagatggaccttcagaactttgaggagtaccaagtttgtgctgtcactgttggtgtcataggggacatatgcagggcattggagttaaaaatactgccttattgtgatgggattatgacacaactcctcaagaatttgtcaagtgataatttgcac

SEQ ID NO: 24648 - DNA, 429 bp, Glycine max
  Clone ID: LIB3051-006-Q1-K1-A8
tgcaaactgtttttctctcttagcttaaaagttctctcttgctatccctcctcgattaaccccattaataataagcaccatcaatttccttaattgcttcatatataggaaaatacaatgaccaagatctttgtgctgttatgtctgctcttcttagcttcttctgggtttgtccatggctcttctaagaaggatcatattaggttatttgagctcaagaaaggtgatttttctataaaggtcaccaattggggtgcaacacttgtgtccgtaatacttcccgataagaatgggaagttgggtgatattgttcttggatatgattctcccaaggcatacacaaatgatacatcatactttggagctactgtgggccgggttgctaacagaattggaggagctcagttcactctaaatggaatccattac

SEQ ID NO: 24649 - DNA, 470 bp, Glycine max
  Clone ID: LIB3051-068-Q1-K1-D8
ggaacgagtatctgcagagcatgagagacccttctaaggctcagagctggggtcaacagcgtgttcagccttacatttcacaaaccagaatcacttgcatcactgtaggaaatgaggtattcaactacaatgatacacagctcacagcaaatcttctcctagcaatgcaaagtgtgtataatgcccttgttaatctaggactagcacaacaagttactgttacgactgctcattctttcaacattttagccaattcttttcctccttcatctggggcattcaggcaagatctgatacaatacattcaacccctccttagctttcatgctcaaatcaaatcacccttcctcattaatgcatatcccttttttgcatacaaggacaatccaaaccaaatctccttgaactatgtgctatttcagccaaatcaaggggccactgatccaaacaccaatttgcattatgataac

SEQ ID NO: 24650 - DNA, 364 bp, Glycine max
  Clone ID: LIB3051-010-Q1-E1-A1
attccattttcatttctttcgcaaaagttgcaactacttcctcagaaaaaaagtttctaagttaaggaaatccagagagacaaaaatggccggtgacggtgcagctacatgcatagacatcctccttgccatcattctccctcctcttggagtctttctcaaatatggctgccaggtggagttctggatttgtttggtgctgaccctttttggttatatacctggaattatctatgctgtctatgctatcaccaagtgatcaccctttaactttgtgtggacaataaacaaatgtcatgggcgtttctgtctttcaactcagatattagtgtttctttaatatatcgccaatgttgtcatattc

SEQ ID NO: 24651 - DNA, 437 bp, Glycine max
  unsure (1)..(437): unsure at all n locations
  Clone ID: LIB3051-102-Q1-K1-F2
acgcccacgcgtccggcttcgcaaaagttgcaactacttccacagaaagaaaaaaagtttctaggtgaangaaatccagagtgaagaaaaaaaaatggccggtgacggtgcagctacatgcatagacatccttcttgccattattctccctcctcttggtgtctttctcaaatatggttgccaggtggagttctggatttgtttggtgctgaccctttttggttatatacctggaattatctatgctgtctattctatcaccaagtgatcgtcaccctttaacttttgtggacaataaacaaatgtcatgggcgtttctgtctttcaactcagatattactgtttcttcaatctatcgttgtcaatgttgccattttcttttgttctgtttttaaaaacccttctgtttttagcttaagcgagagtggaatgtgtag

SEQ ID NO: 24652 - DNA, 411 bp, Glycine max
  Clone ID: LIB3051-032-Q1-K1-C6
caaaattttacttccaaacccaaccaaatcaaagaaatgaaggataaggagacatgccctattgcgaaaaaggaagcctctgattcaggtttattcggaagaggaagctacaaattctgggcactagctgccatgctgctcttggcattctggtccatgttcaccggcacagtctctctccgctggtccggcaccctcaacactttctcccacgcgtcccttcacgaccacctcgacgtcctcgaaatcgaagagcgggagaagctggtgaggcacatgtgggacgtgtacacgaataaccgtaggatcaggttgccgcggttctgggaaaaggccttcgaggctgcctacgaggatttgaccagcgacgccgccgatgttagagacgttgccgtcgccgagatcgttaac

SEQ ID NO: 24653 - DNA, 332 bp, Glycine max
  Clone ID: LIB3051-038-Q1-K1-C6
taaggatcgcctgcctcctgcaaattgtttcggggaaggccatgtcgatatcaaagacttgcaggtcagatatcggccaaacactccttcggttcttaaaggcattaccctaagcatcaacggaggggaaaagattggagttgttggtcgaacaggaagtggaaaatcaactttaattcaagttttcttcaggctggtggaacctacaggaggaaaaataatcattgacggcattgacatatccgacttggggcttcatgatcttaggtcacgggttggtatcatccctcaagagcctgtactttctgaaggaaccgtcagaagtaccattg

SEQ ID NO: 24654 - DNA, 429 bp, Glycine max
  unsure (1)..(429): unsure at all n locations
  Clone ID: LIB3051-117-Q1-K1-G2
aaaattcttggccaacagctttcttgtaattcctcttgcttgggtaaacatttggtaccggggttattttcttgcttcatctcgcgagttaactcgtctggattcaattacaaaagcaccagtgattcaccatttctctgaaagcatttccggggtcatgacaattcgcgcattcagaaagcagaaggaattttgcggagaaaacatttaacgggtgaatgctaatttgggaaatgatttccacaacttcagttccaatgcgtggttgggtttccgcttagaattgcttggaagcttagttttttgcctttctgcaatgttcatgatcatgttacccagcagtatcataaagccagaaaatgttggttggtctctctcatatggcttgtcattaaatgccgggatgntctgggctatatacatgagctg

SEQ ID NO: 24655 - DNA, 381 bp, Glycine max
  unsure (1)..(381): unsure at all n locations
  Clone ID: LIB3051-017-Q1-E1-A8
atcagcttcttctctgcatcatcacaatggctgaagtacgttcacaacaacaacaaccccagcatgtgcaagtccacgcaaccacaacacacaccccacaacaccatggcggggaaggtggcagcggcattctgaacctcatcccggagatgtccctcacgggttcccaactcctagctctcctcgccggcgttccccttggtgcaatgctgctcctcctctccggcatctcgctcatcgccagcctcttggggctggcggtggcgacgccgctcttcatcttcttcagcccgctgctggtccccgccgccttcgccatangaatggcggtgaccgcggtgctggcggcgggggcgtgcgggctggcggggctcgtgttgt

SEQ ID NO: 24656 - DNA, 345 bp, Glycine max
  Clone ID: LIB3051-085-Q1-K1-E8
cttcatcatcatcttcttcttctctgcatcatcacaatggctgaagtacgttcgcaacaacgtgaaccccagcatgtgcaagtccactcaaccacaacacacacgccacatcaccatggcggggaaggtcgcagcggcattctgaacctcatcccggagatgtccctcacgggttcccaactcctagctctcctcgacggcgttccccttggtgcaatgctgctcctgctctccggcatctcgctcatcgccagcctcttggggctggcggtggcgacgccgctcttcatcttcttcagcccgctgctggtccccgccgacttcgtcataagaatggcggtgacc

SEQ ID NO: 24657 - DNA, 450 bp, Glycine max
  unsure (1)..(450): unsure at all n locations
  Clone ID: LIB3051-082-Q1-K1-D8
cccacgcgtccgcccacgcgtccgcccacgcgtccgcaggctgcaaggtctttgggtccgtcnggaaattgtacttgcgatcataatgaagctgttgacagcattgtgtgtaccctacgttttggccaaaggtgtatttccagtgcttgggtatcccttggtaataaattctgccgtctatcggtttgcatggttgggatgcctctctttcagttttgtgtgcttctgtgccaagagattccatgtctggttcacaaatctccataattcaatacgcgatgaccggtatctgattggccggaggttgcataactttggagaacatgctgagaaagcaaatgtagcagaaacttctacaggggagcaggaagctattttactaggtacaggtttaaaccaacaagatcacgaagcagatgttggactacngttgaggcacgtaaatcaaca

SEQ ID NO: 24658 - DNA, 375 bp, Glycine max
  Clone ID: LIB3051-042-Q1-K1-D2
cccacgcgtccgaagagaactccaagaagaggcaggcactttacgtaatgaatcctaataagttcagagcgtgtgagtttctcataaatttccatgaagggacacgtggtgataaaattatagtctttgctgataatctgtttgctctcactgagtatgccatgaaactccgcaaaccaatgatatatggtgctacaagccatgttgagagaacaaaaattttgcaagcattcaaaactagcaaagatataaatactatatttctttccaaggtgggcgacaactcaattgatattcctgaagcaaacgtaataattcagatctcttcacatgctggttcaaggcgacaagaagcccagcgtctgggtcgtattc

SEQ ID NO: 24659 - DNA, 443 bp, Glycine max
  Clone ID: LIB3051-088-Q1-K1-D8
cccacgcgtccgttccattccattccttcattgctatgcccacataacaacaccgaaaaggatggcacttgtgagccacgtttgtgtgagatgtgtagccacacccacttccccagagtccccaaattcggcacccttgccagacccaaggcaaaccaaggttctccttccgaagaagaagcctcagaaatggtccaccggggtggctcccggggagtacggtggccctcccaccaccaccaaactccgcaaatactggggcggcgatgacgaagaccctttggcctctgatgactatatgtggaacaaggagtttatgggtcgcttccaaaagttgattgaggaacccaatgctcaaccccctcctgcaaaggaagagccttcagggtttctaagcttaaatagagtcatgagcctggacagtttgaaagttgatttgagca

SEQ ID NO: 24660 - DNA, 434 bp, Glycine max
  Clone ID: LIB3051-011-Q1-E1-H5
agtgtttcgttcaggtcgttacagtcggaaccgggaggttctagaagttggttgagttcgttcggaagcgagcgcgagcgaccggggaaggaacgcaagggatggtccataacggttcacgatctttccggttcaccggtggccgcagcttctatggtcacgcctttcgtcgcttcgcccggttcggaccgggtgagctgctccaaccctggttcgtggctaattcttcgcccgagcgacggcacgtggaagccatgggggaggctcgaggcgtggcgcgagcgcggcggctccgacggcctcggctaccgcttcgagctcataccggacaccaacggcggcatgagcgccgccggtatagtgcttgcggaatccacgctgagctccaacaaaggagggaagttcgtcatcgatttgagttgccgcaacgccgt

SEQ ID NO: 24661 - DNA, 403 bp, Glycine max
  Clone ID: LIB3051-006-Q1-K1-H6
ttcaaaagcatataagagatggggttagaagggaaggaaacgccgtcgtttatgagggattttctcgataagtgtggtggctgcgccgttattgacggtggttttgccactgaacttgaaaggcatggggcggacctcaatgacgaactctggagtgccaaatgccttattagctccccacatcttgtccgaagggttcacctagattacctcgatgcaggagcaaacataatattaacagcatcttatcaggccactattcaaggttttgaggccaaagggttctctagagaagaaggtgaaactatgcttaaaagaagtgtggagattgcacgtgaggcacgagaaatttattatgataggtgcaccataaattcttctgactttattaaagatgaaagat

SEQ ID NO: 24662 - DNA, 377 bp, Glycine max
  unsure (1)..(377): unsure at all n locations
  Clone ID: LIB3051-018-Q1-E1-H9
acctaaccctacaattatgccccattaacacaaatcgcaattaccccaaattcctcaccctaccgtagatccatctcctcttccttcgtgaattctggttcagggtggttgccatgtatggcacttagtattttttttccctttttaggattattangggtgggtgggttgtgtctcgcttagggttccaaagtttgtcgctttgaatggaacctcgtgttgggaataagtttcgcctgggtaggaagatcggaagcggctcctttggggagatctatttaggcactaatattcagacaaacgaagaggttgcaataaagctcgaaaatgtcaagacaaagcatccccaattgctgtatgagtccaagttgtacaga

SEQ ID NO: 24663 - DNA, 365 bp, Glycine max
  Clone ID: LIB3051-037-Q1-K1-A12
aaaatattaaactctgtacactattgtatccaacactttgtgaagtgactactatgacgaaaccttgtacaaatttgttgtatggtttaatgtatcactatttattaaaaaaaaaaaaaaaaaaaaaaaaaaaaaaaaaaaaaaaaaaaaaaaaaaaaaaaaaaaaaaaaaaaaaaaaaaaaaaaaaaaaaaaaaaaaaaaaaaaaaaaaaaaagtaactgacattcaaatagttcaaatgacttgggtataggctcgaaagactaatcttaccgtctagtacctgaaaaacatacgaagtttccctcatgataacaggagcactcgggcaaattctatcagttaacgtcaatgatcacatgcat

SEQ ID NO: 24664 - DNA, 419 bp, Glycine max
  Clone ID: LIB3051-036-Q1-K1-G8
cccacgcgtccgcccacgcgtccgcccacgcgtgcgcaaatttgcaaccttctgaataaacctgacatagtgaaccaagcagggcaagaacacaaacccttacaatcgaaatttgtgttgcagaaaagccatgacgggggaagagactaccgggaagaagagggtggtgacagaatccctgggatggctaacggaatcgtcgataatgccaaagaagcaccgagccatagcgggcgttggcgcatcctcaattctcgaattgaaggccgaactgtacaagtctcaggaagattccaaaaagtctcgcgaattggcaggccccgatgccgagtaccaacgcgccaagaacaaaatcgcccccaaagacaaattctccgtcaaaaaccgcggcgtcgatgcccgcgctcacaaggacaagc

SEQ ID NO: 24665 - DNA, 443 bp, Glycine max
  unsure (1)..(443): unsure at all n locations
  Clone ID: LIB3051-066-Q1-K1-F12
cggacgcgtgggcaaatttgcaaccttctgaataaacctgacatagtgaaccaagcagggcaggaccgcaaacctttacaatcgaaattggggttgcagaaaagccatgacgggggaagagactaccgggaagaagagggtggtgacagaatccctgggatggctaacggaatcgtcgataatgccaaagaagcaccgagccatagcgggcgttggcgcatcctcaattctcgaattgaaggccgaactgtacaagtctcaggaagattccaaaaagtctcgcgaattggcaggccccgatgccgagtaccaacgcgccaagaacaaaatcgcccncaaagacaaattcttcgtcaaaaaccgcggcgtcgatgcccgcgctcacaaggacaagcttgagttgaaagcggtgagtgatggaacggcgagctatgtggcgctcg

SEQ ID NO: 24666 - DNA, 420 bp, Glycine max
  Clone ID: LIB3051-059-Q1-K2-C6
agaagttattaatgagaaggtggacatatgggctcttgggtgtctcctttttcgcatgtgctacttcaaaagtgcttttgatggggagtcaaagctccaagtcttaaatggaaactaccgcattcctgaattaccaaaatacaattcacctgtgacggacttgataagagacatgctccaagctagaccagataacagaccagatatcacgcaggtctggtttcgtgttaatgagcaactacctattaatttacagaagtcattacctgacagaccacctgaattgccctcatccaacgatcatgaaggtgtgtcaatgccctcaaacagatcacctgcaatgcctcgtaggaacccaccttctccaccttcatctggagaacccaaaacttcaccacagccatcccctgcttctagggg

SEQ ID NO: 24667 - DNA, 455 bp, Glycine max
  Clone ID: LIB3051-002-Q1-E1-G4
tgatcactcagttacaagagagaaaattgaaggaagagctataacaccgagaaagcaaaatggcaagtctactatgtcaagggaagagttcgtggcctgaggttgtgggaacaaacggggtggtagcagtggagaagattgagagagagaatgataatgttcgtgcaagattggtgggagaaggatctatggtgacaatggacttttggtgcaaccgagtttgggtttgggtcgacaaaattggggtggtcactcgtgtgccaaagataggttagctaggcatgcaccttgtatgtatgtatcatgtatggaataatatatatatatatataatagccattaattacttacattaatggttcttatatatatatatatatacttcttactcttaaataaggcatcgcatgctcaggacgattatgcacattaatcccatcatgtcttcaacttga

SEQ ID NO: 24668 - DNA, 402 bp, Glycine max
  Clone ID: LIB3051-062-Q1-K1-C6
ctcagttacaagagagaaaattgaaggaagagctataacaccgagaaagcaaaatggcgggtctactatgtcaagggaagagttcgtggcctgaggttgtgggaacaaacggggtggtagcaatggaaaaaaatggaaagaaagaatgataaggttctgccagaatggttggaaaaaggatctatggtaccattggactttgggggcaaccaatttgggttttgggtcaccaaaatggggggggcaattcttgtgccaagaataggttactctggctatgcacctggatgtgtggattaagtgttggaaaaatatatatatatatataatcgccataattctctcacataaggggctcatatatatatatatatacactttacactctaatatagggtatca

SEQ ID NO: 24669 - DNA, 420 bp, Glycine max
  unsure (1)..(420): unsure at all n locations
  Clone ID: LIB3051-041-Q1-K1-A8
gtcaaacttagccttcttgtttcatctataagagtagcaaccatgtggtctgcagtaacagatcccattagagctttttttgcaaattttctccgccatttcatccacaaagacttccatgaagcagtggccagaatgaccataatagatgctttcctcttcgttattgtgcactccattgataagttggggatatggccacgcttgccggttttcttagggctattgtacctggcgattcggcggcggcttcatcaggagtacaacctcttcaacgttggaacaacaccggtgggggttaggtttaaccattctgattttccatacagaacagctgatggaaaatataatgaccctttcaacgaagttgctggcagccatgggactntctttggcaganatattctccctgtggatcag

SEQ ID NO: 24670 - DNA, 287 bp, Glycine max
  Clone ID: LIB3051-044-Q1-K1-F7
cccacgcgtccgagcagtttcttggaattgtaggcgatacagcaaacactgttgctaagaagccacccccacctcctcctctggtgtcacgcaaaccggcgttcattgatgcattcttgtataagatgaagaagaatccaaatcttttgttgaacaagaccatttggtcacggagatcgactatcttgccagaatttggtgatagcactggcaagaattacaatgggaaaaccactattcggtgtaagatcacttaaggaaaaggtggtcattaggttgggaaagtt

SEQ ID NO: 24671 - DNA, 294 bp, Glycine max
  Clone ID: LIB3051-079-Q1-K1-E9
ctagaaatgaagcagcacggtgttgttcgacttcatttcgaagatccactcaagagaggaagagaaaaaaaaaaaaagagagataattaataattaacaaatatttagtgttggtgttagtgagagtggagatgaaggcggagacggtgacgctgttgctggtgaacctggcggggataatggagagggccgacgagtcgctgcttccgggagtgtacaaggaagttggcacggcgcttcacaccgaccccaccggtttgggttacctcactctcttccgatccatcgtacagt

SEQ ID NO: 24672 - DNA, 391 bp, Glycine max
  Clone ID: LIB3051-048-Q1-K1-A8
cccacgcgtccgatggacatcaaaacctttgctttcgccccatcttctccgccgttaccggtaatcgccgccgccaagctcgccggaatctctccctcgattgatacctctctctctcctgactcacctcccgcatttatcttctccgatgggctcaagttgcatggagcatatgctcttctacgttatatcggccgagttgccagccttcccaatttctatgggcaaaatgcattagaatctagccagattgatgaatggctggactatgctcctatcctctcatctggccctgcttttgagaatgcatgcaaatatatagatgaatacctggaaaaaggtacctttttgggtgggtaatcaatggccattgccaaacctaccatttggg

SEQ ID NO: 24673 - DNA, 431 bp, Glycine max
  Clone ID: LIB3051-041-Q1-K1-H5
ccacaggggtatgattttgtctttggcaatgtctcctgatggtcgctatatggcatctggcgatgaagatggcacaatcatgatgtgggacctctctagtggccgctgtctcacacctttgattgggcacacatcatgtgtctggtccctcgctttcagttctgaaggttctgtgatagcatctggatctgctgattgcactgtaaaattgtgggatgtaaatacgagcaccaacgtttctagggctgaagaaaaaggtgggagtgctaacagacttagatcgctgaaaactctaccaaccaaatctactccagtttactcattgcggttttctcgaacgaatcttctttttgcggctggtgctctatcaaaaagtggctaatatatgagtatgtctactaatagataagatcagatcataggggttgaag

SEQ ID NO: 24674 - DNA, 384 bp, Glycine max
  Clone ID: LIB3051-042-Q1-K1-H5
ctgtattatttccttcttcagcttagctcaaccacttccacttcaacaatcaacatggcttcatcactcgcaaccatactcgtcgccttgccccaaaccccgcaatgccgtagcaccttccgatccgatccacccaaactatccctaaccctaaaacccaaggccactgttacatgtaaggccaccctgtccactaccctggagactagcatccagcagcagcagcagcaagatgaccaaaaacaaaagcccgtggccgaggtgtggcgcaagatccacggggaggacaactgggccgggcttctggacccgatggacccggttatgcgaggcgagctgacccgctacggcgagatggcccaggcctgctacgacgcattcgac

SEQ ID NO: 24675 - DNA, 385 bp, Glycine max
  Clone ID: LIB3051-058-Q1-K2-A8
ctcgtattgatttttatgctctcactcgaatcttgcatttgaggcattacattggatgtctttattttgtgcctgcacctggatttgaagcttacggggaccccactagttaccctggaagttctaataacaaaggcagcaatagtgaactaattgatgaggaacctttgaagttacaaaggctaggctatcaaggacctgaaattgacctggagaatcagagttggagagttttaaatggaccatttatttctgtctggcttcacaatgtggcttggggtgctgaaaacaccaaggcagcaccagatgcaaagttctcagatggttatctggacttgatcattacgaagaattgcccaaagttaccattgctgtcgttgatgtc

SEQ ID NO: 24676 - DNA, 458 bp, Glycine max
  Clone ID: LIB3051-108-Q1-K1-G8
atttgttgtctgttacgttaacgtccctgcctccgattctttccacttcttacttggggtctagtttctcttttccctctcacacaacacaagagaacacgaataaaacgcactgcacgtgaatcgcaattattagggtttacacaccctcgcagatggtttgagattgcgaattcgacgacgatgatggaaggagcgagcaatggagggatgctgtaccacgaggtgcaggagtcgaagctctgcgcggtgcattgcgtgaacacggtgctgcagggcccgttcttctcggagttcgatttggccgcgcttgcctccgatctcgaccgcaaggagcgtcaggtcatgctcccagcgctcgcgtcggcggatttcgagtcgcacaatgtctcgctcgacggagatttcagcatccaggttatacaaaaggctctggaagtttgggacctacaagttat

SEQ ID NO: 24677 - DNA, 392 bp, Glycine max
  Clone ID: LIB3051-083-Q1-K1-C6
gaacagtgctcatgaatgttacaggaatcaagaagggctgaagagcatgatactggtacaagataatatcgaaggatgagtccattgtaaaatcacgatctatgcactacaaatttgctgctagtgactctccagaagctccgtaggtggtggcaactcctatgaaagtcagctcaatcagcatgtctggaaagcgacatggttaaacctctgtgtacattatctctttaaaggtttcaaatttctagtgttaggagtgtctatgaagtttgaacaatatacttgcttgtatccaagtttgaaatgctactatccctctgtaaagcacttattaggttgccctgtatgtattaccttctgtgttgcgattagtctgggattgctgactgaat

SEQ ID NO: 24678 - DNA, 265 bp, Glycine max
  Clone ID: LIB3051-053-Q1-K2-H5
agcgtacgcatcaacctcgctaatgatggattcctctgtcgcagatccaccgctcaagggaagaatgcgagtagtgtgtgttgcacgagagatcccaaattcaaaactaacattactactgatgaagagtttctgccacgtcagagtggtgatcttaccattatgtatgatgtgatcagaacttatgattcaaattactgtgctgatgttactattgcgaaccataacccacttgggaagcttgaccactggaaggtgagcttgg

SEQ ID NO: 24679 - DNA, 452 bp, Glycine max
  Clone ID: LIB3051-069-Q1-K1-A12
cccacgcgtccgggaagcccatctcactaccggaaactacccctccgggacccctcttgttcggcgccggccaccgttgacgacgtcttctcctccgctgcaaccactactggcggctatgactccgattccgatttggtgaacctcaagatcagcttgttgggtgattgccatattggaaaaactacttttgtgatcaagtatgtggggaatgagcaagaaaagggaagcttacagatggaaggattgaatctaatggacaaaactttgtctgttcaaggagctcgtatttcgtttagaatatgggatgttgcaggagataaaaggtccctggatcaaattcccatggcttgtaaagatgcggttgcgattttgattatgttcgatctcaccagtcgttgtacactaaatagtgttgttggatggtatagtgaagcaagaaagtggaatca

SEQ ID NO: 24680 - DNA, 402 bp, Glycine max
  Clone ID: LIB3051-011-Q1-E1-G10
gcgtcagacactatgtaactctttattttattttctttctttctttctccgatcgcatagctcgctcgcaaccaccatgccttcccgaagaagaactctcttgaaggtcatcattctcggtgacagtggggtggggaagacatctttgatgaagcaatatgtgaataagaagtttagtaatcagtacaaggcaaccattggagcggattttttaaccacagaagtgcaattcgaagataggcttttcatcttacagatttgggatacagctggccaagaaagattccaaagccttggagttgctatctatcgtggtgctgattgttgtgttcttgtatatgatgttaattcgatgaaatcatttgagaaccttaataactggacggaggaatttctgattca

SEQ ID NO: 24681 - DNA, 434 bp, Glycine max
  Clone ID: LIB3051-065-Q1-K1-A6
ctccgatcgcatagctcgctcgcaaccaccatgccttcccgaagaagaactctcttgaagggcatcattctcggtgacagtggggtggggaagacatctttgatgaaccaatatgtgaataagaagtttagtaatcagtacaaggcaaccattggagcggattttttaaccaaagaagtgcaattcgaagataggcttttcaccttacagatttgggatacagctggccaagaaagattccaaagccttggagttgctttctatcgtggtgctgattgtcgtgttcttgtatatgatgttaattcgatgaaatcatttgacaaccttaataactggagggaggaatttctgattcaagcaagtacttctgatccacagaagtctccttttgttgtcataggacacaaaatagatattgatggtgggaacagcag

SEQ ID NO: 24682 - DNA, 357 bp, Glycine max
  Clone ID: LIB3051-093-Q1-K1-H10
cccacgcgtccgctccgatcgcatagctcgcaaccacaatcatgccttccggaagaaggactctcttgaaggtcatcattctcggtgacagcggagtggggaagacgtctttgatgaaccagtatgtgaataagaagtttagtaatcagtacaaggcaaccattggagcggattttttaaccaaagaagtgcaatttgaagataggcttttcaccttacagatttgggatacagctggccaagaaagattccaaagccttggagttgctttctatcgtggtgctgattgatgtgatcttggatatggatgttaattcaatgaaatcatttgacaaccttaacaactggatggaggaa

SEQ ID NO: 24683 - DNA, 433 bp, Glycine max
  Clone ID: LIB3051-101-Q1-K1-E4
cgctcgcaaccaccatgccttcccgaagaagaactctcttgaaggtcatcattctcggggacagtggggtggggaagacatctttgatgaaccagtatccttcggtttctgtctacaaactccgtgttctttacttttttttttttaatttgcgtttcaatttgttttctattgtttagtactgcatgaaaactatgtattttcccctaacatacgcaatttagatatgtgaataagaagtttagtaatcagtacaaggcaaccattggagcggattttttaaccaaagaagtgcaattcgaagataggcttttcaccttacagatttgggatacagctggccaagaaagattccaaagccttggagttgctttctatcgtggtgctgattggtgtgttcttgtatatgatgttaattcgatgaaatcatttg

SEQ ID NO: 24684 - DNA, 339 bp, Glycine max
  Clone ID: LIB3051-113-Q1-K1-H8
cccacgcgtccgtagaaattagggttcatatctcatttcctctgatttcatctcagatttcgccttcgttcgtatcgaagaagaagaagatggggaaacagattgtgccggtgaaatcagtgatctacgcgctctcccctttccagcagaagataatgccgggtctctggaaggacttgcccacaaagattcaccacaaggtctccgagaattggatcagcgccactctcttgcttggtcccctcgtcggaacctacacgtatgttcagaactacctggaaaaggagaagctgtctcacaggtactgaactcatgcaagagctgattggataaccttct

SEQ ID NO: 24685 - DNA, 436 bp, Glycine max
  Clone ID: LIB3051-081-Q1-K1-A8
cccacgcgtccggagattctcaaatttgaatctaacatacccataccagacatcaaggaagacgaagtgctcatcaaggttgtggctgcggcgcttaatcctgcagattatatgagggctcttgggtttttcaaggacactgatgcacccttacctattgttccagggtttgatgctgctggtgtggtggtgagagtgggaagtaaagtgagcaaattcaaggttggagatgaagtttatggtgatatcattgagtatgcttggaataatccaaagaccattgggactttggcagaatatactgctactgaggagaaagtgttggctcacaaaccctccaatttaagctttattgaagcagctagccttcctgcagccatcatcactgcttatcaaggatttgataaaattgagttttctgctggcaaatctatac

SEQ ID NO: 24686 - DNA, 441 bp, Glycine max
  Clone ID: LIB3051-078-Q1-K1-H5
gaacaagacacacataattagcatagttattatggggagggttgagtactccccattgtgtgagacaagaaagtgcagaggaaggttcatctacaggtcctttgcaatctcattatttgtggccatatgctttatatggcattacagatttagccacataacaaagggtgaagatggaaactgggcatggcttggtatgcttgcttcagagctgtggtttggcttttactgggtccttactcaagcccttagatggaaccttgtgttcagacaacccttcaaaaacagactctctcaaagatatgagaaaaagttgccaagagtggacatatttgtgtgcacagcagatccagatattgagccagcaatgatggtgattaacacagtgctatctggtatggcttatgattatccaactgaaaaattgagtgtgtatctctc

SEQ ID NO: 24687 - DNA, 440 bp, Glycine max
  Clone ID: LIB3051-083-Q1-K1-H5
ctttaccatgacccttggtatgtggaagtgaatatggattctgctgctattgtctggccattatttaacagcctgcaggcattttggcctggccttcatgttttagctggagatatcaatcccgcaattcgcacccatgctgccttcttgagtgtctggagaagatatggttttactcctgagggctttaatcttgctagtctcagtgttcagcatgggcagaagagttacccgttgcggccagagctaatcgagagcacctatcggctatacatagctaccagagatcctagatatctcgatgctgggagggacatggttgctagtttacagtatggaactcgatgcccttgtggatattggcacatttctgatgtcgagaatcaccaaccagaagatcacatggagagcttcttcttagctgagacagtcaagtatct

SEQ ID NO: 24688 - DNA, 363 bp, Glycine max
  Clone ID: LIB3051-012-Q1-E1-B8
aggctgaaacaaagaagtgaaaataacagcaaaaagtagcagctgctgcagctcccccgaagcttatctcagcagcagatactcaaccctgtttgagtagccgagaataacaccaatgggagaggaggaaaagaaaccagaggaacaacccaaggcagaggagaaaaaaccagaggaagagaagaagaaagaagaagcagcagcagcggaaaaaccaagcgaagagaaaaaaccggaacaagagtcgaaagaggaagttgctgctccgccaccgccaccgccaccggccgagattgtgctcaaagtgttcatgcattgcgagggttgcgctcgcaaggttcgtcgctccctcaaaggattccc

SEQ ID NO: 24689 - DNA, 439 bp, Glycine max
  Clone ID: LIB3051-028-Q1-K1-C6
gtgaaaataacagcaaaaagtagcagctgctgcagctcccccgaagcttatctcagcagcagatactcaaccctgtttgagtagccgagaataacaccaatgggagaggaggaaaagaaaccagaggaacaacccaaggcagaggagaaaaaaccagaggaagagaagaagaaagaagaagcagcagcagcggaaaaaccaagcgaagagaaaaaaccggaacaagagtcgaaagaggaagttgctgctccgccaccgccaccgtcaccggccgagattgtgctcaaagtgttcatgcattgcgagggttgcgctcgcaaggttcgtcgctccctcaaaggattcccaggtgtcgacgatggtgtcaccgattgcaaatctcacaaggtggtcgttaagggagagaaagcggatccgttgaaggttttggagagaatac

SEQ ID NO: 24690 - DNA, 430 bp, Glycine max
  Clone ID: LIB3051-102-Q1-K1-G4
caggtatctggatccgaacgaggttgagagccatggcctctacaatcacgaattgtcagtggcagatatgacccacagacgtaggaaccattatcctgaaaatgttagtggagtggatgacacatcatctgagagcagctgattcttgcaagaaaggttttctcaaggtcacgatccgcatgatatggagccttctagacatcttacacctaatggagctcttgcacccctaaatcccaaaggtgcagatagagatggggcacaaaccatcaggatatttgaaagtgacgggccagatacatcatgctgctatcactgctgttagaaagcaatttggaaggcattatcatggaagatggtacactacttggcatacaattcgatgcactgtcttcagggcatttgaatgccgaactgcatatacagctaa

SEQ ID NO: 24691 - DNA, 429 bp, Glycine max
  Clone ID: LIB3051-091-Q1-K1-F2
cccacgcgtccgcttgttgtccatgggattgctggtgctggttcggtggctttagccagggccttggcttaccctcgggacaccatgaaagtcctcattcaagttggttccatcaccggtaaagaattggaccatgcccatgttttgaccagactactctctgtatccggcaatgcaggtttgttcaatggttttggctggttgttggttggaaggatttttggtctgggagcacgatttggggtttatgaaatcctgtctgccttttataaagatggtctggaaaataattatttgtttgcttctgaagctcttttggctggcgttgtaactggtgccattgaggcagtcataagctctccattcgaaacttcatcaagcttagtatgcaagttaactctgcttcatatgttcctagctgcaactttg

SEQ ID NO: 24692 - DNA, 424 bp, Glycine max
  Clone ID: LIB3051-044-Q1-K1-C8
cgacaacgacgagtacggcgagttcctccacctccccggccggaaattccacgaggtctccgagattcgcagggaaattcaggctgaaactgatagggaagcgggtgggaacaaaggtgtatcagacaagcagatccgacttaagattttttcaccaaatgttcttgatatcacactggtagatctcccaggcattacaaaggttcctgtgggtgaccagccttctgatattgaagctcgcatcagaacaatgatcatgtcatatatcaaaactcccacctgtctcattctagctgtcacaccagctaattcagatttggctaattcagatgctcttcagatggcaaggattgctgatcctgatggtaatagaacaaatcgtgtaatcacaaagttggatttaatggacagaagtactgatgcc

SEQ ID NO: 24693 - DNA, 379 bp, Glycine max
  unsure (1)..(379): unsure at all n locations
  Clone ID: LIB3051-049-Q1-K1-B3
tcggctatcggtattttcattcgagttgcagtttggcggttaaacgtcttcttctcttctggtctcggcatccatcagatccaaattttctcgcgatacgaaggagcaatgtcagatgctaaagttgaggatttgaagaaggaagaagaagttggtgatgattctcctaagaacgaagttgacagtgaaaaatctgcggatgatctgaaagattcggataacgataaaagcgatggaaaccccatgccctcatcccagcatgaggaagcagctgttaagaaaaagtatggagggatgttaccaaagaagcctncactaatatcgaaggatcatgaacgtgcttactttgactctgctgattgggctttggggaagcaag

SEQ ID NO: 24694 - DNA, 414 bp, Glycine max
  unsure (1)..(414): unsure at all n locations
  Clone ID: LIB3051-015-Q1-E1-F6
cggctcgacccaagcgtcagcccacgcgtccggcaccatttgttacacatccaagagaggtaagggagattcctatagaggttaaggatggtagtcaatccactcctcaagctggtcatgttccatccattgaagatgtcactggaaatgttgatgcccatggtccagatatccatgggactgtcataattgatgatgaagatgacgaaaatattccacctgcccagattgcacatcaagatgagcaaacacacaagatcttggctgacacttcactcaatagcagtgctagacctagtgctcctgaatctgagaatttgccagattatagcaatgacatagaagaagaaatgattcgtgcagccattgaggcttctaaacgggaagctgangaaaattatagaaatcacaaac

SEQ ID NO: 24695 - DNA, 455 bp, Glycine max
  Clone ID: LIB3051-084-Q1-K1-E5
gaacaaagcaatggttcctgttgcaaggttgttcgggccagccatatttgaagcctcagaactgaaggttttgttcttaggagtggacgaaaataaacacccaggaaatctcccaaggacttatacgctaacccatagtgatataaccgctaagctcaccttggcaatctctcaaaccataaataattctcagctgcaggggtggtacaacagatttcaaagggacgaagtggtggcacagtggaaaaaggtgaagggaaggatgtctctgcacgttcactgccacattagtggaggtcattttctcttggatatattagcaaggttaagatacttcatcttctgcaaggagctaccagtggtgttgaaggccgtcgttcacggcgatgaaaacctattcaacagctacccagaattgcaagatgccttggtttgggtctactttcacttaaaca

SEQ ID NO: 24696 - DNA, 445 bp, Glycine max
  Clone ID: LIB3051-100-Q1-K1-D11
cccacgcgtccgttcacagttttgcaattgtaatggcttctgcttctaatgccggcatcgaatgcacctcttcgtcttcttcttcgtttgagtatgacgtgtttgtgagcttccgcggtgaagacacacgcaacagcttcaccgcttttctttttgaagctctgaaaaaacaaggcatcgaggccttcaaagatgataaagatatcaggaaaggcgaatccatagcaccagagctaatacgagccattgaagggtctcatgttttccttgttgtcttttccaaggactatgcttcctcaacttggtgcctgcgtgaactagcacatatctggaattgctttcaaccatctaccagacatcttctgcctattttctatgatgttgatccatcacaagtgcgaaaactgagtggagactatgagaaagcctttgcccaacaccaaca

SEQ ID NO: 24697 - DNA, 468 bp, Glycine max
  Clone ID: LIB3051-112-Q1-K1-D9
aatccgtcttttgactcataagtaaccaaccgcttctttcaatcaactgaaagtcgttaggttttcttaaggttactgtctgtctctgttttatatgtggcatgggcatgagatggatctgtattccatcatgtccatggaagaatagttaactactttccttttttggtgatttctaaggttctaatttataatatgggagtggaggagaacacccctaactccatttctacctcacaatgccacgaagaacaaagcatcaacaaaatcaacacgcatgtgctcttgaatgtctacgatctcacccctgtcaataattacgtctactggtttggatttggcatctttcactctggcattgaagtacatggtaaggagtatggttttggagcccatgacttcccagctagtggagtttttgaagtggagccaatgaaatgccctggattcatatatagatgttccatc

SEQ ID NO: 24698 - DNA, 407 bp, Glycine max
  Clone ID: LIB3051-091-Q1-K1-A10
cgaacctcaacaacgctgaacgcagaaaggggaaaaaggggattagggtttaggaagcagcgacaacaatggatttcacagcggagaagaaggaatcagagagcaacaccgaaaatgctcatccaacaactttagattcttcttctcaattggcatcggcacttgattccagcaacaaagaaatcgaagaacgacaagctcgtgaactcaaagccggtcttcaccccctcaagcacaagtttgtcttctggtacacgcgccgaacacctggagttcgaaatcaaacatcatacgaggacaacataaagaaaattgttgaatttagtacggttgaaggattttgggtctgctactgccatcttgctcgtcccgcttctttacctagtccaacagatttgcaccttttc

SEQ ID NO: 24699 - DNA, 399 bp, Glycine max
  Clone ID: LIB3051-005-Q1-E1-F12
agttgacactgctatgaattctcagaggccatctgtggtatattcattgaaaaatgatcatggtggcagccaacttcaaaggctgcagtatcaagttacgaaaatgataaaaggattttctagccctccagaagttaaatatacaaattacaatccggaaatcttgacaactcagaagcgtcaatgggctgcaaactttcagttgcagtacacggaccataagtcttggaaggagccaacaaagctgtttgaaagcatggtggttgctggacttcatcctaattgtgatattcaggcactgcaaaggcaatgttttttaagaaagtctgaaagccctggtaaattgagaagtgcacttggttatcagaatcagtcccgtgtggaagtggaacccaatct

SEQ ID NO: 24700 - DNA, 437 bp, Glycine max
  Clone ID: LIB3051-031-Q1-K1-E1
cccacgcgtccggggagctcagaatagcttgtacgttggcacaaatggagcgtgaaggagggatcagtccccgagtatcacctttggcacaggttcgagatgctgggaatcttttgactagggcaggtttcacccttccaggggttgatgttgatgagtatgtagttaaatatgaaagtgctctggagcttatagaacatctccgtgcaatgggtgaaacaaatgctctttatcaaatgaacaatatcctaaagagggacacagcgttagcaactgcagctatttatgattcaatgttttctgcagaagacggcactgtacctgcaacattccaggttatatacatgacggggtggagagaacatccttctcagcagaaaggcaaaagaaggggatcagccactatatctttcaacgatattcagaagcaatttgga

SEQ ID NO: 24701 - DNA, 457 bp, Glycine max
  Clone ID: LIB3051-106-Q1-K1-E5
gcttcaagcctgtaaaaatgctcaccacaatgccaccgttgagacccactttcttgttgctgacgaagagtttcttcctatcaaagaaagctctgtggatttggttgttagttgcttgggactacactggactaatgatctgcctggagcaatgatacagtctagattggcattgaagcctgatggcttatttttagcagctattcttggtggagaaacattaaagtgacaatgtttatttttatttcttgaaatttctttggaacagaaatggatgggggcattctaattaatgatatttgtgctgctaccagggagctcagaatagcttgtacgttggcacaaatggagcgtgaaggagggatcagtccccgagtatcacctttggcacaggttcgagatgctgggaatcttttgactagggcaggtttcacccttccaggggttgatgttgatg

SEQ ID NO: 24702 - DNA, 419 bp, Glycine max
  unsure (1)..(419): unsure at all n locations
  Clone ID: LIB3051-016-Q1-E1-E3
agctcaaacattgcatccctcttgatttgtagtttgttttgtgctttagataaaagttctgccaaatcaagacgggttttaagatcatactgtgtgttttgcaacaatggctaagttctttgctgctatgatcttggcactctttgccatttccatacttcaaacagtggtaatggctgctaatgaacaaggaggccacttgtatgacaacaagagcaaatatggaagtggaagtgtcaagagttaccaatgcccatcacaatgctcgaggagatgtagccagacccaataccacaagccctgcatgtttttctgtcagaagtgctgcangacatgcctgtgtgtgcccccggggtattatggtaataaagctgtgtgcccttgctacaacaactggaagaacaaggaatgaagaccca

SEQ ID NO: 24703 - DNA, 389 bp, Glycine max
  Clone ID: LIB3051-045-Q1-K1-E12
gaaggatgaccccaacgcgatttccaacttcaggatttcggaaccattgagggagaaagtgaaggagaagggtatcgaatcgctgtttcccattcaggccatgaccttcgacaccgttctcgatggttctgatttggttggccgtgctcgcactggtcagggtaaaactctggcatttgtgttgcccatattagagtctttaataaatggtccagcaaaatctgcgagaaagactggctacgggaggactccgagtgttctcgtgcttctacctactagggaattggcttgccaggtgcatgctgattttgaagtgtatggtggggcgatgggattgagttcatgttgtttatacggtggagctccatatcaaggtcaagaacttaagc

SEQ ID NO: 24704 - DNA, 383 bp, Glycine max
  unsure (1)..(383): unsure at all n locations
  Clone ID: LIB3051-050-Q1-K1-D11
cagttttgcctatggagtcttgaggagatttttgcctgaagagaangttgaggccgtgaaaggtctttcaatcactgctgatggaaatggcgttgtttttgatgtagcagctaaagatttagacatatatcttaacggtcaggaaaatgcctcgaatgtaagtttagagatagtgaaaacattgccacagttgcaacagatggagcaacaccaaagaggtggcagatttggtgatggtggtggtcgtggttaccggtttggtggaagaggtggaggaggcaggaatggtaggttctccaatggtggcggaagaggtggacgtggcggcaacctggggtggaaagagatggtgaagctgagaaaggacttagggagttgagttt

SEQ ID NO: 24705 - DNA, 396 bp, Glycine max
  Clone ID: LIB3051-094-Q1-K1-C1
gtccgaagaaaaagaacagcctttgttggtaacggagcctaaagaagaaaagaaggatgaccccaacgcgatttccaacttcaggatttcggaaccattgagggagaaattgaaggagaagggtatcgaatcgctgtttcccattcaggccatgaccttcgacaccgttctcgatggttctgatttggttggccgtgctcgcactggtcagggtaaaactctggcatttgtgttgcccatattagagtctttaataaatggtccagcaaaatctgcgagaaagactggctacgggaggactccgagtgttctcgtgcttctacctactagggaattggcttgccaagtgcatgctgattttgaagtgtatggtggggcgatgggattgagttcatg

SEQ ID NO: 24706 - DNA, 351 bp, Glycine max
  Clone ID: LIB3051-042-Q1-K1-D6
cccacgcgtccgtatgacagggccaaggatcaagcgcgggaagccaaagacagaacagaggatttcgcacacgacgcataggagaagacgaaggacgctgcggggtcgatgagggacagggcggagagtgcggcggagaagacgaaagagtatgcttacgacacataagagagtgccaaggacgcggcgggaacggtggcggacaagagtagggagggggctgagaggacgaaggagaagacggaggaggtggcggcgtcggcggtggaggcgctgaagaacgtgggggagaaggcgaagcagggcgtgcaaggtgcgtgggagacggcgaaggacactacggcagcagaa

SEQ ID NO: 24707 - DNA, 375 bp, Glycine max
  Clone ID: LIB3051-051-Q1-K1-E5
atcgacgaacatcccaacttatgtcaatctgatgatgaatgcatgaagaaaggaagtggcaatttttgcgctcgttaccctaataattatatcgattatggatggtgttttgattctgattctgaagcactgaaaggcttcttggccatgcctagggcaaccaccaagtaatatggtgggtatgccaaagtgggcatgcttgatgcatcttctactacttaaaaataaaagcttatgatgcatctactgctttaaacaaaagagtgctccactacgcaactttagtttccaacttatagttggttacgttttatgtaaactcaacccatgtatgttttggagcattccagttaataaaaaatgtttctataaaaa

SEQ ID NO: 24708 - DNA, 385 bp, Glycine max
  Clone ID: LIB3051-111-Q1-K1-G11
tcatgatggtccatacaatgtgataaagaattgggactacactcgctttgtggacgcgatccataatgggcaaggcaaatgctggactgccaaggtacgtacagaggatgatctgactgaagcaattgcaaaagctactggaccacagaaagattcactatgttttatagaagtttttgtacacaaggatgacaccagcaaagaattgctggaatggggatctcgtgttgctgctgctaacagtcgtcctcctaatcctcaatagaaaatcatttcctaattattggcctgttttgtgtattttgttgaatagagttccactactggatatttacaagagaaaaacgacaaaaatgaaaaataagttgaaataaatgtttgcttt

SEQ ID NO: 24709 - DNA, 435 bp, Glycine max
  unsure (1)..(435): unsure at all n locations
  Clone ID: LIB3051-027-Q1-K1-G6
aaactaacaaacaaatcccagggagccactcaaccatggcttccaagctctgcgactcatgcaaatcagccactgctaccttgtactgccgccccgacgcggccttcctctgcggcgcctgtgactctaaggttcatgccgccaacaagctcgcatcgcgccacccgcgctcgtgctctgcgaggtgtgcgagcaggcgcccgcgcatgtgacctgtaaagccgacgccgccgcgctctgccttgcctgcgatcgcgatatccactccgccaaccccctcgccagccgccacgagcgcatccccgtcacgccgttcttcgagtccgtacattcagtcaaggcctnctcgccgatcaacttccaccaccgcttcttctccgacgccgacgctgatgctgacgtcagcaccgaggaggccgaggccgcgtcatggct

SEQ ID NO: 24710 - DNA, 420 bp, Glycine max
  Clone ID: LIB3051-002-Q1-E1-E10
aacttattgaaaatgatctcattttaattggtagcacagccattgaagacaagcttcaagagggagtaccagcttgcatagagactctgcaaagagctggtattaaaatttgggttcttacaggggacaagattgaaacagcgataaacatagcctatgcatgcaacttgataaacaatgagatgaagcaatttgttattagttcagaaactgatgaaattagagaagttgaagacaggggtgaccaagtataaattgcacggtttattaaagaagtggtgaaaagagagctgaagaaatgcctcgaggaagcacaaagctcctttcaatcgctacgttggacataattagcacctgtagttgatggaaaatgtctgatgtatgcgttggatccaagtttaagagtgatgctgctgaatc

SEQ ID NO: 24711 - DNA, 347 bp, Glycine max
  Clone ID: LIB3051-026-Q1-K1-E2
cccacgcgtccggcaaacctagtcacgttcctctctctctgagctcgatctatcgggctcttcgaattcggttcccgatttccgacccataaaagctagcaagttccttcacttcaatcttcagaaatgcctctcagactcgaaatcaagcgaaagcttgcccaaagatcagagagagtaaagtctgtggatctacatccaacagaaccatggattctagcaagtttgtactctggaactgtctgtatctggaactaccaatctcagaccatggccaagtcttttgaagttactgagttaccagttaggtcagccaagtttattgcacgcaaacagtgggttgttgc

SEQ ID NO: 24712 - DNA, 443 bp, Glycine max
  Clone ID: LIB3051-034-Q1-K1-E2
cccacgcgtccgcccacgcgtccgcccacgcgtccgcccacgcgtccgagcgttttgggtcacttgtcaagatgccactattgaaatctgataggaatccccttcctgagccagtgcagtctgttttggaggaaggaattgatctatataaacttcacactaagagacatggaagattagagtctaccaaaggatcctacgcaaaagaatggataaaatgggaaaaacagttacgggatattctttgtggaaatgctgagtattttaattctattcaggttccatttgagtttgctgtcaagcaagtgttggaacaattgagaagcattgctaagggagagtacacaccaccagatactgaaaggaggaaatttggtaccattgtttttgctgctctcagcatgccagttactgaaattcatggcgtcctcaataaattggcg

SEQ ID NO: 24713 - DNA, 396 bp, Glycine max
  Clone ID: LIB3051-091-Q1-K1-C6
cgaaccgcactctttatctctttctccgccgcaaactatccttctccggcggcgccaccgtacaaccctcgagttaagcaaaggagcaacagaaggaagtgcttggttgcaaatggcggccaccgcaagcaacaacgacatcgtcgtcaccgtcgacagccctttgatgagcctaatcaacaagcgcctccgcgccctccgcaagaagctgaaccgcatcctcgccatggaagaggccgtcacccagggcaagcctctgaacaaggatcatgaagaggttctccgctccaaaccatccgtccttgctctcatcgacgagctcgagaagctacggcagcctctcgccaccgaactatacgaagagcttactaaaacaacgggaccttctttaaaact

SEQ ID NO: 24714 - DNA, 435 bp, Glycine max
  Clone ID: LIB3051-096-Q1-K1-C6
ctctctctttctccgactcattgccgatcttccagcaatggccacacacgtgagtcacgggatattatcggcatgcattgggggctacttcttctgcctatctgtatattcttctccatataccattctcaccgatccgctgcaatcaacctcttaactgccactcccacacgcttagaatacgcgttctatgcgcttagagtttttcagatgcttgtaatcgaagagaataatactcctgtgaacgaggacacgattcagaaagttgtcgaaagtctagcctcggcttctcctatcaaggattagttctatgccttgaaagttaacgccattttaaaatgcaatgtcaatgggaacgtttttaaggatattggtctcagacttaaagccactgaacatgaagcgagtgctttgattgacatctactattcaatt

SEQ ID NO: 24715 - DNA, 312 bp, Glycine max
  Clone ID: LIB3051-044-Q1-K1-E2
tggatttgtaggttccactatttgagagtatggatgagagattgcttgatgccatatgtgagagactgaaaccgtgtttatttacagagaatacttacattgttcgggaaggagatccagttgatgagatgttgttcatgatacgtggtcgccttgagagtgttaccacagatggtgggaggagtggatttttcaaccgaggttttctaaaagaggctgacttctgtggggaggagcttttaacctgggccctggatcctaaatctggttctaatcttgcatcttgtactagaacagttaagggcataatgg

SEQ ID NO: 24716 - DNA, 311 bp, Glycine max
  Clone ID: LIB3051-108-Q1-K1-C10
ggcggcgctacttcccacattgctcggaagtgctggacaagttcatggaggatgacctgcctgacttgttttaccttgaaaagggtactcatgaagagcagagaatcaaaaggacgcgtttcatggagcttaaagatgacgtccacaaggctttcaacaaggacaaggccgagtttagccgctctgggatttcatcttcatcatcctcatcatccctcagagattctgttgtacattacaaggctaggaaagtgtaattttaaaaccatacatagtgtttttgattttgacatacatattatatatagtgc

SEQ ID NO: 24717 - DNA, 438 bp, Glycine max
  Clone ID: LIB3051-111-Q1-K1-C6
ctggaggtagaggtttctatctcaaaggagatggtgttcgtcttaatcaagctctaatagggtttgggcttgattttttggaaaaaagggagtatactttattgcatactcctttcttcatgagaaaagatataatgtcaaagtgtgctcaactagcccaatttgatgaagaactttataaggtaactggtgaaggagatgacaaatatctgattgcaacagctgagcagccactctgtgcatatcatttagatgattggatccaccctacccagctaccattaagatatgctggatattcatcatgctttcgtaaagaagctggatctcatggtcgagacactctaggaatattccgagtccaccaatttgagaaagtggagcagttttgcctcactagcccaaatgacaatgattcatgggacatgcatgatgaaa

SEQ ID NO: 24718 - DNA, 467 bp, Glycine max
  unsure (1)..(467): unsure at all n locations
  Clone ID: LIB3051-113-Q1-K1-C6
tgttgatgtagatttatgcaatgccagtgtttgacatgattgaaacggtgatggtcaagaaattgggtttcgaaccaagcagaatgcttcgttttgttgtacgtaatgtatatgtggcattcactatgttcattgctattaccttcccatttttcgatggtctcctaggattttttggagggtttgcttttgctccaacaacatactttctcccctgcatcatgtggcttgcaatccacaaaccaaagagatacagcttgtcttggttcattaactggatctgcattgtgcttggcctatgtttaatgattttatcacctattggaggattgaggacaatcataattaaagccaagacctacgaattttactcnttgactctttctactcttgactcagtcattggaaagttaactatatgggaaatgtgtgtgaattatcatatgtcgctccttaatttactattg

SEQ ID NO: 24719 - DNA, 471 bp, Glycine max
  Clone ID: LIB3051-074-Q1-K1-D10
cccacgcgtccgcccacgcgtccgatcctgcatggcttcctcttctctgtttcaggctctccggttctctctccaaacctctaaaccctacgcgcctcccaaacccgccgcccacttcgttgtccgcgcccaatcccccctcactcagaacaacaactcctcctgcaagcatcgccgccccgccgacgagaacatccgcgacgaggcccgccgcatcaatgcgccccacgaccaccacctcttctcggccaagtacgtccccttcaacgccgactcctcctcctcctcctccacggagtcctactcgctcgacgagatcgtctaccgctcccaatccggcggcctcctggacgtccagcacgacatggatgccctcaagcgtttcgacggcgagtactggcgcaacctcttcgactcgcgcgtgggcaaaaccacctggccttacggctccggcgtctggagcaaaaaaga

SEQ ID NO: 24720 - DNA, 425 bp, Glycine max
  unsure (1)..(425): unsure at all n locations
  Clone ID: LIB3051-075-Q1-K1-H3
gaggagagagaaagtagcagatcctccatggccttcaccaaggaacgtgaaaacttcgtctacgtcgccaagctcgccgaacaagccgaacgctatgaagaaatggtggaagcaatgaagaatgtggcgaagctaaacgtggaattgacggtagaggagcggaaccttctgtcggttgggtacaagaacgtggtgggtgctcgtagggcttcgtggaggattctttcctcgattgaacagaaagaagaagctaaagggaacgatgtgagcgtgaagaggataaaggagtataggctgaaggtggagtctgagttgtccaatatctgcagtgatatcatgactgttattgatgaataccttattccctctagctcatctggtgaacctagtgtctttttctacaaaatgaanggggactattaccg

SEQ ID NO: 24721 - DNA, 442 bp, Glycine max
  unsure (1)..(442): unsure at all n locations
  Clone ID: LIB3051-115-Q1-K1-C6
caaaccgtgtgtctggttactgtgcgccagaggtcactgatgcacgcaaaatatcccggaaagccgatgtctatagctttggtatcatgcttttggagctgcttacagggaaggctcctactcattcttcacttaatgatgaaggggtggaccttccaagatgggtccaatctgtgattcaagatgagtggaacactgaggtatttgacatggagcttctaaggtaccaaagtgttgaggaggaaatggtcaagcttttgcagcttgcccttgaatgtactgctcaatatcctgataagagaccttcaatggatgtggtggcaagcaagattgaggaaatttgtcatcctagtttagagaaagaggaagagaagaatcatgattntaaagatgctgataatggattttcccaacagtaccattctgttgactcgggtgtgtc

SEQ ID NO: 24722 - DNA, 339 bp, Glycine max
  Clone ID: LIB3051-060-Q1-K1-E10
gaacaaaacaaaaaagaagaagaaagaaatatggctggaggatcatacgaggaagccattgcggcgttgacgaagcttctcagcgagaaagccgacctgggtggtgtcgccgccgcaaagataaaacagctgacggcggagctggataccgccaccgcaaacgggtcgacgccgtttaacccggacgagaggatccgaaccgggttcgcccacttcaagaacgagaaataccagaagaacccggaattatatggcgaacttgccaaaggccagagtccaaagtttatggtttttgcttgctcagactctcgagtttgcccatcccacattctggatttc

SEQ ID NO: 24723 - DNA, 438 bp, Glycine max
  Clone ID: LIB3051-086-Q1-K1-F6
cccacgcgtccgcccacgcgtccgcaaaacatataagaagaagaaagaaatatggctggaggggcatacgaggaagccattgcagcgttgacgaagcttctcagcgagaaagccgacctgggtggtgtcgccgccgcaaagataaaacagctgacggcggatctggataccgtcaccgcaaacgggtcgacgccgtttaacccggacgagaggatccgaaccgggttcgcccacttcaagaacgagaaataccacaagaacccggaattatatggcgaacttgccaaaggccagagtccaaagattatggcttacgattgctcagactctcgagtttgcccatcccacattctggatttcaatcccagtgaagcctttgaggtccgaaatatcgtcaacatggttccaccatatgacatgaccaagtattcatgaacc

SEQ ID NO: 24724 - DNA, 400 bp, Glycine max
  Clone ID: LIB3051-095-Q1-K1-F9
catattctaagagacgagccagtggcatggctttatgagcttgggaagttgggtgggggagatgggaaatgtacatggtcgtgttgatggagctaaagctttattgattggatctcacatggtacatgcataggctaaaatcaaaagatctctcaatatgccacaatatgatcctactgggatcttgtataatgaagccgaatgctacaaactgaaatgatgcttgcgctgtgacatggcccaactttaccgatgtatacccttttgcaccgattgaccaaaactaaaggttatcagcatatctggtattaggaaatgttcaacaatttgagtgaactgttgctggacaaattctccttacatagccgactggtggttattcgtgcacattattttattt

SEQ ID NO: 24725 - DNA, 425 bp, Glycine max
  unsure (1)..(425): unsure at all n locations
  Clone ID: LIB3051-064-Q1-K1-E2
attggctctattgaagggtgtcagtggagctttcaggccaggtgttctcactgctctagtgggtgtcacaggtgcaggcaaaacaactctgatggatgtactcgctggtagaaaaactgggggatatattggggggaatatcacaatctctggttatccaaagaagcaagaaacatttgcacggatttctggatactgcgagcaaaatgatatccactctcctcatgttactgtatatgaatctttgctttactcagcatggcttcgactgtccccagaaatcaatgctgacaccaggaagatgttcatcgaggaagttatggaacttgtggaactgaaagcactaaggaacgcattagttggattgcctggtattaatggtctctcaacagagcaacgcanaaggttgactattgcagttgaac

SEQ ID NO: 24726 - DNA, 360 bp, Glycine max
  Clone ID: LIB3051-066-Q1-K1-G10
cacaaatctgtcatgaaaaaggagttccgtaggatggcaaaggctgtgcaaaatcaggtagcagataactactacaggcctgatctcaaaagggcagctctggcaagattgagcgctgtcaataggagcctcagagtagctaagtctggtgtgaagaagaggaacagacaggctgtgaaggtccccagcaggaagtgaatttagaagagttaaattgcattctaaatttcttccatcctttccccattttgtagtttgtgttccagaactcaattctagattttctagttttgtttggagaggcaatttattgtgttttcaatatacaacaaccggaactactatgttatagctttcaac

SEQ ID NO: 24727 - DNA, 428 bp, Glycine max
  unsure (1)..(428): unsure at all n locations
  Clone ID: LIB3051-104-Q1-K1-A8
cccacgcgtccgcccacgcgtcctgtagtacctcggatctcgcactgacctgcagtgtctgctataccaacctgatcatgctctcagcctcattcaccttgctctcataattcacttggtacgcctccagcattggaaatcttctcctcatttgctgaatccacgactcgtcttcttccaggaatatcgtccttcccccgtgattcagcgcattccacatcaggctgtcgtgccccaacccgaacaccaggaaattgcacggcgacttcttctccagaactcttgctgtcactgatatctctttcaccgtttgctgtggggttatgcttgatgttgagtagtggatcagtgcttccgacaccgatcccggtatcttcatcttgttgcaactcccatcactctntactgataatgcctactgctgcttc

SEQ ID NO: 24728 - DNA, 412 bp, Glycine max
  unsure (1)..(412): unsure at all n locations
  Clone ID: LIB3051-008-Q1-E1-D12
accaagcgtccgatcatggccgacaataattctactactgatcattatgatatgggcatggaaaatgctgaactggttatggctgaggccaaaaaggcttgaaaggcttctgagagaacaaggccttcaaggcaactcatacacgctttttgttggggacttgaangagtttggcaagatgcgaaatgaagccttatccaaacccatgaatctcttctctcatgacatagcgccgcgcgtgttatcctttatccaacacactgtcaacaagcatggcaaaaattcttttatctggtttgggccaataccaanggtgaccctcacagatcctgagcaaatcaaagatgtactcaacaagatttatgactttggaaagcctgatatgaatccgcatgttangttactagctcct

SEQ ID NO: 24729 - DNA, 300 bp, Glycine max
  Clone ID: LIB3051-012-Q1-E1-C4
aggagaaatggaagcagcatcatggccgacaataattcgactactgatcattatgatatgggcatggaagatgctgaactggttatggctgaggccaaagaagcttgaaaagcttctgaaaaaacaaaggcttcaaggcaactcatacacgctttttgttggggacttgaaagagtttggcaagatgcgaaatgaagccctatccaaagccatgaatctcttcgctcaagacataacgccgcgcgtgttaacctttaaccaacacactgtcaagaagcatgggaaaaagtcctttaaccg

SEQ ID NO: 24730 - DNA, 286 bp, Glycine max
  unsure (1)..(286): unsure at all n locations
  Clone ID: LIB3051-085-Q1-K1-E10
tactgctgccctcccatttgggacgattgcggttatagttctcatatggacacttgttacgtgtccttggcttgtattgggagggattgctgggaagaatagcaaggctgaatttcaagctcctgttcggacaactaaatatccaagggagattccacctctgccttggtatcgtggaacaattcctcagatggcgatggcaggatttttgcctttcagtgctatatacattgaactntactatatatttgccagtgtttggggccacagaatttacaccatctac

SEQ ID NO: 24731 - DNA, 388 bp, Glycine max
  Clone ID: LIB3051-035-Q1-K1-C4
agctaattcacttttgcaacctcaatttcctggaacccttgtattggaacttgattggttgcccttgcgaactgttaagaatgatccactggtactgtgcattgctggagcagatagtagttttcgtcttgttgaagttaatgcaaatgataaacgatttggttatgcaccccatatcagaaatacaaaggagagattccggtcaatgcctatatgttgtcccatacttcttcctttaccacatgccttggcattgcgcatgattttacaattgggtgttaaaccttcttggtttaacacttgcagtacaaccatagaaaagagacctcacttaattccaggaactccttcatctaaaggggatcttcgcacctacatgatcgacata

SEQ ID NO: 24732 - DNA, 286 bp, Glycine max
  Clone ID: LIB3051-037-Q1-K1-C4
cccacgcgtccggcgaagatgtagagaacaaagaatgagagagagatttgaatgtaaggggggaatcataaccaaaattggccccaggccaaaaagatgctctcatcgccggcgttgaaaagcacggccccggaaagtggtagaacattctcaaggatccccaattcgcccctttcctcacttaccgttccaacatcgacctcaaggataaatggcgcactttgagcgtcagtaacggtgctcatggctccaaagaaaaatctaaggttcccaagcttaaagccct

SEQ ID NO: 24733 - DNA, 294 bp, Glycine max
  Clone ID: LIB3051-003-Q1-E1-B2
catggtagcaattctcaagagacagggagaaaacgaatccgaagaaaccatcataggcttggcaaaaagtctcatgcaactctcgcgtgtccaacaacaaagcaataagcctcttctcaaaaccttttctccaacggagttcgagtgcaaaacttgtaaccgcaagttttcatcttttcaagctcttggtggccacagggctagccacaagaagcccaagttcgaagctgaagaactcaaagaagaagccaggaagactaaacccaggatgcacgagtgttcaatttgtggcat

SEQ ID NO: 24734 - DNA, 391 bp, Glycine max
  Clone ID: LIB3051-008-Q1-E1-A5
agatttagattttagggtttctctcttaatataatcttttgacacttccgtaacaaacaaaaaaattacataaattttcccttataattattattatttggcttttatctttggattaactaggcttgagctatcacaaataattgtttcggagaatggaaaagaaaaaggtggcagttcccctcgtgtgccacggtcattctcgccctgtggttgatctcttctacagtcccgttacgcctgatgggtttttcctcatcagtgccagcaaggattcgagtcctatgctcagaaatggagagactggagattggattggaacatttgaagggcacaaaggtgctgtgtggagttgctgcttggataccagtgccttacgtgccgcaactgc

SEQ ID NO: 24735 - DNA, 395 bp, Glycine max
  Clone ID: LIB3051-043-Q1-K1-G5
tctctctctctctcataaattcaatgctctcatcgttttccctcataaaccgctttctcgtgttgtaacacactcatcactcatcatattcattcacacttcccactttccaatatggaatgctgcataatcgccaggctcaagacccaacctttatggttcgcgctgctcttcgttgtcggattgttaacgattctcaaattggctttcgttgttttcagatgggtctacgtcaatttcctccgaccaccgaagaatctcaaaaagtacggatcttgggcagtggttactggacccactgacggcattggaaagagcttcgctttcgagctcgctcgcaagggcctgaacctcgtccttgtcggaaggaaccccgacaagctcaaagacgtgtc

SEQ ID NO: 24736 - DNA, 377 bp, Glycine max
  Clone ID: LIB3051-044-Q1-K1-A3
ctctctctctcataaattcaatgctctcatcgttttccctcataaaccgctttcgcgtgttgtaacacactcatcactcatcatattcattcacacttcccactttccaatatggaatgctgcataatcgccaggctcaagacccaacctttatggttcgcgctgctcttcgttgtcggattgttaacgattctcaaattggctttcgttgttttcagatgggtctacgtcaatttcctccgaccaccgaagaatctcaaaaagtacggatcttgggcagtggttactggacccactgacggcattggaaagagcttcgctttcgagctcgctcgcaagggcctgaaccttgtccttgtcggaaggaaccccgacaa

SEQ ID NO: 24737 - DNA, 436 bp, Glycine max
  Clone ID: LIB3051-031-Q1-K1-B2
gagagtataatgtaagtatttactttcctgtcttaagttccatggaactcagatagcggagatgccattcattggaactcgccatatatataggcgccaggggatgtgccgccggcttttttccgccattgaatcgaccctatgctctctgaaggttgaaaaactagttattcctgccattgctgaagtcacaaatacatggacgacagtttttggcttcacacatctggacaaatcactcaggcaagaaatgaagtcactgaatatgatggtcttccctggtatagatatgttacagaagctgttagtggaacaaggaaaccatgagggttctgagaaaatggaaaatgaagacgatgattttatcaagaccaaaatggaaagtaggtcagatgtgggttcttcaactccacaagatcctcatggtagtgatgat

SEQ ID NO: 24738 - DNA, 415 bp, Glycine max
  Clone ID: LIB3051-039-Q1-K1-B10
cattgccatccaaattctcagccgcggcttcttccctctctgggctggagttctaatcactgcttcagattgctttttctttctatttcttgagaactatggagtgaggaagttggaagctgcttttgcggttctcatcgctgttatgggtctttcttttgcctggatgttcggcgatgctcaacctaatagaaaagagcttttaatgggtatttcggttccaagactaagctcgaaaacaattcgtcaggctgtgggtgttgtgggttgtgtcattatgcctcacaatgtattcctgcattctgctttggtgcaatcaaggaaggttgatcctaacacgataggtcccgtgcacgaggctctcaactactattcacttgaatcgtcggcggcacttgcattctgattcatgatc

SEQ ID NO: 24739 - DNA, 302 bp, Glycine max
  Clone ID: LIB3051-074-Q1-K1-C4
atggaatatccacacaatgctgttcttcttctttgttcttctcatgacaagggttgccgtcccgatatgggtggaactagctttcgtcattctaactgtcttgatcagtacaagaaagcttatactaaagtaatttcacctaataagcaacctatgcaaggcactccaggtgtgctacaagattcaaacttgcctcttgagaagagtgaagccacagagcttgcatggtctctatgcaagggtcaggtgaaaggttggactgttgtggaacctgttcgggactatctgaatgcaaagaaaaa

SEQ ID NO: 24740 - DNA, 393 bp, Glycine max
  Clone ID: LIB3051-082-Q1-K1-E12
cccacgcgtacgctttagtcattctaactgtcttgatcagtacaagaaagcttatactggagtgatttcacctaataggcaacctatgcaaggcactccaggtgtgctacaagattcaaacttgcctcttgagaagagtgaagccacatagcttgcatgtgctctatgcaggggtcaggtgaaaggttggactgttgtggaacctgttcgggactatctgaatgcaaagaaaagatgctgcatgcatgatgactgcttgtatgttgagagctataaggagttgaataatcctgtgctgacagagcattcgtcggcacggccacggattgaggatcctgctgatgaacagaaatggacatggctctagtgggagcgtgaaagaaaagatgatat

SEQ ID NO: 24741 - DNA, 304 bp, Glycine max
  unsure (1)..(304): unsure at all n locations
  Clone ID: LIB3051-066-Q1-K1-B10
gaatgttaccaatgatgaagtatatcgagttaccgtaaaaccaattattcccacaatttttgagaaacccaaagctacttgttttgcttatggtcagacaggaagtggcaaaacatacacaatgcaaccgttgccgctcagagctgcagaagaccttgntagacaatngcatcgaccagtatatcgaaatcagagatttaaatngtggcttagttactttgagatatatggtggaaaaacttttgatcttcttagtgatagaaagaaactctgcatgagagaagatggcggcaacaaatgtgta

SEQ ID NO: 24742 - DNA, 468 bp, Glycine max
  Clone ID: LIB3051-070-Q1-K1-B2
cgagtttagagaaacaagtgccgttcttcaggttaaagagtcagagcttgttgatgctgggctagagatccatcgtttgaaatctgaaaaggcttctcttcagggtatcttggaggagaaagacttggagctttccagtgctaggaaaatgctgggggatgttaaccaggaaatctatgatcttaagatgcttatgcacagtaaagaaacccagctcattgaagcaaacagtatgctaagggacaaagatgagcatgtgaaggtaatccagaacaagttgaataatacaaaccagaaggcttttgaggctgaaactgtggtagaaagaattttagatctcacaaacagacttgttgcttccattaaggatgaagatatgaactcatcaaaaccactactagatgaaatgggtaaccaactacttgatcaactattggagaaaccttgttatgaattgaaatgccaaca

SEQ ID NO: 24743 - DNA, 370 bp, Glycine max
  Clone ID: LIB3051-094-Q1-K1-C9
cccacgcgtccgttttcaacactcattagatcccagtcatcaattgcgttaacgaactggtaaggcaaccatgaggggcattctttctgtaaggacagccttggttcaacatcgtagtgagaaattgggccttggtttcaggctatttagcactcaaggtgcttccactgctagtaccccacagccgccgccaccaccttcaccaccagagaaaacccattttggtggccttaaggatgaggacaggatatttactaacttatatgggctgcatgatccttttctcaaaggtgccatgaaacgaggggattggcatcgaacgaaagatttggtacttaacggtactgattggattgtgagttaaatgaat

SEQ ID NO: 24744 - DNA, 396 bp, Glycine max
  Clone ID: LIB3051-003-Q1-E1-D6
accacgcgtccgataactatgagaagatattgtctcacatgaagccaaacagtatacttgggctttcccatggttttcttcttgggcatttacaatcagtgggacttgactttccaaagaacattagtgtaattgctgtgtgcccaaagggaatgggtccatctgtaaggacgctctatgtccaaggcaaagagataaatggtgctggaattaatgcaagttttgcagtccaccaggatgtggatcgcagggctactgatgttgctttgggatggtctgttgcccttggttctccattcacttttgccactacattagagcaggaatacaggagtgatatgtttggggagagaggcattttacttggtgctgttcatggggttgtggagtccctgt

SEQ ID NO: 24745 - DNA, 381 bp, Glycine max
  Clone ID: LIB3051-037-Q1-K1-C11
cttttccacacttccatcgtccggcacttcatggccgcggcggagcccactataagcccatctaacacgcgcgtgggctggatcggcacgggcgtcatgggccagtccatgtgcgcccacctcatccgtgccggctacaccctcaccgtcttcaaccgcaccccctccaaggcccagcccctcctcgacctcggggcctacttcgccccctacccccacgccgtcgcagcccgctccgacgtcgtcttctccatcgtcggctacccctcggacgtccgctcagtcctcctacacccctcctgcggcgccctctacggcctccgacccggcggcgtgctcgtcgacatgaccacctccgaacccttgctcgccgtcgaaatc

SEQ ID NO: 24746 - DNA, 388 bp, Glycine max
  Clone ID: LIB3051-079-Q1-K1-F10
ctccttcaaacttttcgtcccttttgacactgctctctcactcgcatcacacacaaacgagcgggcccattctctctctctctctctctctccgacctagcgagaccgagcgatccgaccctaatctcgcgatgctccgccgcgcaacctcctccctcctcaccggcgcctcccgccgccgactctcctccgacgtgccggcgacccccgccgcggattccgccttcgcggacgcgtggaagaaagtgagccccaacatcgacccgccgaagacgccgctggcgtacatgaagccccgaccacccactccctcggctctcccttccaagctcacagtcaacttcgtcttgccctactcctctgaattggccgcaaaagaaggtgatat

SEQ ID NO: 24747 - DNA, 362 bp, Glycine max
  Clone ID: LIB3051-079-Q1-K1-F12
ctccttcaaactcttcctccctctcgactcttctctctgactcgcatcacacacacacagacacgttcattctctctctctctcgctctctccgacctatcgagacctagcgatccgaccctaatctcgcgatgctcctcctcgcaacctcctccctcctcaccggcgcctcccaccgccgcctctcctacgacgtgccggcgacccccgcctcggattccgccttcacggacgcatagaagaaagtgagccccaacatcgacccgacgaatactccgctggcgtacatgaaaccccgaccacccactccctacgctctcccttccaagctcacagtcaacttcgtcttgccctactcttct

SEQ ID NO: 24748 - DNA, 444 bp, Glycine max
  Clone ID: LIB3051-111-Q1-K1-E2
aaggggtggaatgaaaattggaaccgggctctggatgatgaacgattcacaggccagagaccaagaactttcttcttcttctggttgtggcgcttcttccattcacagtaactccaattccatagaaagatgggtaccggggattcggattcggaatcgaatggatggaaccgtgctcgtgggttggcgcttaagactctgctactaattggtggcgcacttctcgttaagcgcctccgcaagtccaccacgcgttgggaccacgctcatttcgtcttcaactcccttaacggcgaaaagtattccaaggagcaagcttccagagacccggataactatttcaacattagaatgcttacatgccccgcagcggagctagtggatggttccaaggtcttgtattttgaacaggctttttggaagactccacaaaaaccctttcgg

SEQ ID NO: 24749 - DNA, 416 bp, Glycine max
  Clone ID: LIB3051-016-Q1-E1-E10
agtctggatcttacttttagcattgatgcagatgaggaaaagttgattttgtatgagcggacagaggtgactgattatgagctaattcctggtggacggaatacgaaagttacggaggagaataagcaccaatatgttgatttggttgctgagcatcggttgaccactgctattcgacctcaaataaatgctttcttggaagggttcaatgaattaattcccagggagttaatatctatattcaatgacaaagagctggaattattgatcagtggacttcctgatattgatttggatgacttgagagcaaatacagaatattctggatatagtggtgcctcaccagttatccaatggttttgggaggctgttcaaggtttcagcatagaagacaaagctagattgctgcagtttgt

SEQ ID NO: 24750 - DNA, 369 bp, Glycine max
  Clone ID: LIB3051-079-Q1-K1-C4
gtagactacaaatcaactagaaaggagtcattttatgaccttcagcttgatgttaaaggttgtcgtgatgtttatgcttgctttgataagtatgtcgaagttgaaagtcttgagggggataacaaatatcatgctgaacagtatggtttgcaggatgctaagaaaggtgtcctatttattgattttcctcctgtccttcaactccagctaaaaagatttgaatatgattttatgcgggatactatggttaagattaatgaccgttatgagtttcccttacaacttgatcttgatcgtgaagatgggaaatatctatcacctgatgctgataggagtgtccgcaatctttacacacttcacagtgttttg

SEQ ID NO: 24751 - DNA, 393 bp, Glycine max
  Clone ID: LIB3051-032-Q1-K1-E10
ctgtaagtttgcaacttttttcctttcattcattattcttctcttgccttgagttgaggatgggcaatgtgaacgtgactcctgaagaagaagaagtttctgcaagtgcatgggcaaccgatgagaacgccatgcctgagtctgctgccacctgtcctacagctatccatttccccctcatattcgctcctcaagttccggtggttccgctacaaagacctgatgagatgcatgttccaagttgttcctggatggacacaacttcagggtatgaagatgtgtaccgtgaagtaggaattccaacagtgattacttggagttatgatggaaaggaagtagctgtggagggatcgtgggataatcggaaaacatgaatgcccctggagagatcat

SEQ ID NO: 24752 - DNA, 406 bp, Glycine max
  Clone ID: LIB3051-015-Q1-E1-D6
cggctcgacccaagcgtcaggaagtgactaagattccttgccaaagtaacgagtttgtgagtgaacttcttcgcggtgtgcggttccattttgatacgtttgtcggtgatcttaagtctggagatttagaaaaggcacaacttggtctggggcatagttacagcagagcaaaggtgaagtttaatgttaaccgtgttgacaacatggttattcaagctatcttccttcttgatacacttgacaaggatgttaattcgttctccatgagagtcagagagtggtattcatggcactttcctgagctggtgaaaattgtaaatgataattatctgtatgccaaagttgcaaaatttattgaggataaggcaaagttggctgaagacaagattccagccttaactgacat

SEQ ID NO: 24753 - DNA, 416 bp, Glycine max
  Clone ID: LIB3051-037-Q1-K1-E10
atttggggatggtctagaaaatgattatcaactaattaaggagttcattgataaagactgtaaatttttattggaaatttcttcagctgaaaattcaggtttgcatgtctttgacttcttagccaattcaatccttaaggaggttctctctgcaattcagaagggaaagccaggtgcattttctcccggaaggccaacagagttcttgaaaaattacaaatcaagcttagatttcttggcttttctagaaggctactgtccatccagatctgctgttgctaaatttcgatctgaagcaatttatacagaattcatgaagcaatggaacattggagtatatttctctttgaggtttcaggaaatagcagggtcactagattctgtgcttacaacatccagtcttgtccctgttcaaa

SEQ ID NO: 24754 - DNA, 420 bp, Glycine max
  Clone ID: LIB3051-050-Q1-K1-F6
cccacgcgtccggccaggtgcattttctcccggaaggccaacagagttcttgaaaaattacaaatcaagcttagatttcttggcttttctagaaggctactgtccatccagatctgctgttgctaaatttcgatctgaagcaatttatacagaattcatgaagcaatggaacattggagtatatttctctttgaggtttcaggaaatagcagggtcactagattctgtgcttacaacatccagtcttgtccctgttcaaaattcagatgctggcgaagcaaattatcaaggtttaacattaaagcaaagtgttactttgttggaaaagttgagatcatgctggagaagagatgttcttgtcccttcttgttctgacagattccttcggctatccttgcagcttctttctagatactcaag

SEQ ID NO: 24755 - DNA, 432 bp, Glycine max
  Clone ID: LIB3051-062-Q1-K1-F8
gtcacagattcagaagctttgagaaagagagtattttatggtggacttgagcacgagttacaaaatgaggtatggggtttgcttttgggatattatccatatgaatcaacatatgctgagagagaattcctgaagtcagttaagaagttagaatacgagaacataaagaaccagtggcagagtatatcctcagcacaggctaaaagattcacaaaattcagggaaaggaaagggcttattgagaaagatgtggtgagaactgatagatcactcgctttctatgaaggcgatgataatccaaatgtaaatgttctgcgagatatcctgttgacatattcattctacaactttgatcttggttattgccagggaatgagtgatcttctatctccaatattgtttgtgatggataatgaatcagaggcattttgg

SEQ ID NO: 24756 - DNA, 433 bp, Glycine max
  Clone ID: LIB3051-102-Q1-K1-C4
cccacgcgttcgccgtgaaacaacttcacaactttttggagaaaaccagagtaatggatggagtgccattgacaggaggacgcatatccagactaaccttgatcatcctaagtcttccaatgttgaggaaaatacctctgttgaaagtcctgttgtcttggattctcaggagttcgataatttatcgttagtatggggaaaaccaaggcaaccccctttgggttctgaagagtggaatgccttcttggattctgaaggacgagtcacagattcagaagctttgagaaagagagtattttatggtggacttgaccacgaattacaaaatgaggtatggggtttgcttttgggatattatccatatgaatcaacatatgctgagagagaattcctgaagtcagttaagaagttagaatacgagaacataaagaac

SEQ ID NO: 24757 - DNA, 432 bp, Glycine max
  unsure (1)..(432): unsure at all n locations
  Clone ID: LIB3051-039-Q1-K1-E6
cccacgcgtccgcccacgcgtccgggattggtatgcaaactatacatgattatgaggtggagctgggtagatatctgtatgaaaggcttctttcagtcccaaatattcgcatctatgggccagcgccttcagaaaaagtcgaacgagctgccctttgttcttttaatgttgagaatttgcaccctactgatcttgcaacacttctggatcaacagcatggagtggcaatcagatcaggtcaccactgtgcccagcctctccatcgctatttaggcgtcagctcaagtgcacgtgctagtctctatttttataacacaaaggaggatgtagacaactttatccatgccctcaatgacacagtcagctttttcagttcattgatgtaagtggaatgtatttntatgtatattatattttgtttatacacgaatg

SEQ ID NO: 24758 - DNA, 388 bp, Glycine max
  Clone ID: LIB3051-043-Q1-K1-E6
cccacgcgtccgcccacgcgtccgcgaggtgttgggagcagtaggtgaaaccgtggctgagattggacagaacatgatgaagccagcggagatagttcaggaacgcgctcacgttcgacaagcgggtggggtcttggatgccattggtgaaaccattgctgagattgctgaaacgactcgagtcatggtttctggagaggacgagagagtgctgaggcagagcgtggtgttggagactcgcgtaactggtcgtgccaagcatgaagaagggtcgcacggtgcttgagtctcttgagtgaacgctgtgttttttaaggtttatttctgttaatgtcatgtttagtctgtgtcaagtttcatgtttcgggtttggtgactttggtctatg

SEQ ID NO: 24759 - DNA, 339 bp, Glycine max
  Clone ID: LIB3051-077-Q1-K1-B2
cttttattacctgcgtgaacttaatgactcgttgacttatgcccttggagctggtcctctgtgggagggttcacaggattctgactatgtgcacactcttcttgctaaagccattgatgaatatgccagccttaagtctaaggcatcagagtcaagtgatgaatctatcacagtggacccactgttggaagcaattgtggagaggctgtcggataagtgaatcgtggatggaaaatcccaacaagctatggcaactgctaccgaatgcaggagcatagataaactagaggatgcaattacaaggagtgacactgttcaaggaactttatcatatcgcat

SEQ ID NO: 24760 - DNA, 408 bp, Glycine max
  Clone ID: LIB3051-085-Q1-K1-B4
gcgcggacgcgtgggccgcgggtgggatgcttgcgatgctgaactagccacatctctcgctgaaggttcacgcggtgttcaacctcaacaactgggtcgacaccttctggcccgagatcttcaccagactcccgaagatagagagtttgcatgaagatgaggagtttgatcatcatcgaatgctacttgctgcacttcttgtatcaaaggtcttgtattacttgggggaacttaatgattccgcatcgtatccccttggagctggtcctatggttgatgtctcagaggattctgactatgtgcacactcttcttgctgaaggcatagatgaatatgctagcctcaagtctaacgcagcagagttaagtgttgaatctatcagaatggacccaatgttggaagcaattg

SEQ ID NO: 24761 - DNA, 424 bp, Glycine max
  unsure (1)..(424): unsure at all n locations
  Clone ID: LIB3051-113-Q1-K1-C12
gtttcagtggtgctgatataacagagatttgccagcgcgcgtgcaagtatgccattagagagagcattgagaaggacattgagagagaaaggaggaaaagagataaccctgaagcaatggaagaggatgatgttgaagatgaaatagcagaaatcaaggcagctcattttgaggaatcaatgaaatatgctcgaaggagtgttagcgatgccgacattcgcaagtaccaagcatttgcccaaacattacagcagtcaagagggtttggaagtgagttcaagtttgcagattccaccttcagtggtggtgctgccaccgcatctgatccatntgcttctgctggtggagctgatgaagatgatctntacagttaggtcaacttgaatggtagtaaatgccgtgctatcttagttatgtacttctc

SEQ ID NO: 24762 - DNA, 393 bp, Glycine max
  Clone ID: LIB3051-116-Q1-K1-C12
attgatttatgctagtagaaagagtgagactgatgttgacaagcagttgccagatcacaaagactcttctagtagagttacgaatactttggttgctcttaaatcatctcagcttgtggcgtcaatctctcctagcatagaaattacccttgatgatctattgaatgcagacacggctgtgtcttgctttatgaggttgtgtggagaagctactgaagatctccaccttgatgctctgctggctattttggaagagtgggatggacttttcactgcaaggaaagatgaagaaaccactgttgaaacatctgatggaggaaatgactggaacaatgatgattgggacgagggatgggaaagccttgaggaagtagacaatcctgagaaagagaa

SEQ ID NO: 24763 - DNA, 409 bp, Glycine max
  unsure (1)..(409): unsure at all n locations
  Clone ID: LIB3051-061-Q1-K1-C6
gcggacgagcgcgacaagaagcggcggggttacccaaaccttgggcttcaagccgtaccgtgcacctgaaagtgtaaccgaccatgaaaacgcngtgtcntgcgtgaagttctcgaacgatggaaccctcctagcctcggcctccctggacaaaaccctaatcatatggtcctncgccaccctcaccctctgccaccgcctcgtgggccactccgagggcatctccgacctagcctggtcctccgactcccactacatctgctccgcctccgacgaccgcaccctccgcatctgggacgccaccgtcggcggcggctgcatcaagatcctccgcggccacgacgacgccgttttctgcgtcaacttcaacccccaatcgagctacatcgtgtccggttccttcgacgag

SEQ ID NO: 24764 - DNA, 367 bp, Glycine max
  Clone ID: LIB3051-085-Q1-K1-B2
agcaagatcggaagcggatccttcggcgaaatttacctcgacactcatattgataccttcgagatcgtcgacgtcaagattgaaaacggtataacgtagcatgcgcaattgctttatgaggccaagctctacaatattcttcaaggaggaagtggaatcccgagcataaaatggtgtggtgtaaacagtgaggataatgtgcttgctatggactagctgggacctagactagaggatccatatggctactgtggaagaaagttctgtctcagatgcgtgttgatgatggccgatcaaatgatgactagaatcgaatatgtgcattctagaggattcctacacatggatataagacctgacaactttc

SEQ ID NO: 24765 - DNA, 426 bp, Glycine max
  unsure (1)..(426): unsure at all n locations
  Clone ID: LIB3051-091-Q1-K1-C4
gccatggagcgcatcatctgcgccaagtacaagctaggtcgcaagatcggaagcggatccgtcngcgaaatctaccttgcgacgaatattgataccttcgagatcgtcgccgtcaagatcgagaacggtaaaacgaagcatccacaattgctttacgaggccaagctctacaatattcttcaaggaggaagtggcatcccgaacataaaatggtgcggcgtagacggggaggataatgtgcttgttatggacttgctgggacctagtcttgaggatctttttgtctactgtggaagaaagttctccctcaaatctgtgttaatgttggccgatcaaatgatgactagaatagaatatgtgcattctaaagggaatttcctacacagggatataaaacctgacaactntctcatgggacttggtcgg

SEQ ID NO: 24766 - DNA, 444 bp, Glycine max
  Clone ID: LIB3051-116-Q1-K1-C4
ctttcccgaatcttttccaatctcccttcgccgatccttcgcgcgttccgccaccaccgccggcgttctcagctccccgcttccggaaaattatgtatagtgttttcttggctgcttcatagtcctccctcccttgccaccggtgaatatttgattggcaatcctgtccttattagtcaagttttagaatacaaagaagcttcaatggccaagaaaccaggaccaagatccagtaaattgtcagtgtacctttacattcctaatataattggatacatccgggttcttttaaactgttttgccttctcccaatgtttatcaaacaaaatcttattctctattctgtattttttaagctttgtatgtgatgctgctgatggctggtgtgcccgcaaatttaatcaagtgtcaacctttggagctgtgcttgacatggtaacagac

SEQ ID NO: 24767 - DNA, 359 bp, Glycine max
  Clone ID: LIB3051-086-Q1-K1-B2
gcgcccacgcgtccgcccacgcgtccgacaaatccgaatcagtttccgtctctaaccgccgttaagtccgcggaggctcaaacctcgtgctggctaagaaacgagaaacacgtgctggatcgcctaggttcgtcgtctccgaggataattcgctgcttcggagacgactgcagtttcgagaacggcgttgagtactacaatctgttcctcgaatacgccgccggcgggagccttgccgatgaattgaagaatcacgatggccagatttccgagcatgaggctcgggaatacacgagggccatcgtggagggtctgagccacgtgcacaaaagcgggtttgttcactgcgacatatagct

SEQ ID NO: 24768 - DNA, 434 bp, Glycine max
  Clone ID: LIB3051-088-Q1-K1-B2
ctaaccctaaccctaaccagaggtaatggattcagtgcctcgaagaagcagaggaggaggcgttttggaaaacctcgacaaggtcctaatgcgtcgcaactgagtctacgtcaccttcgtcatcgcaggcgccttcctcggagaacgggctgtggattacggagctcacaagatcggggagcacaataacgttgggtccaaatggcacctagatggaaaggaaaagatgcaaaagctaaaaaggatgcacaagctgaagcgctcaaggaacccatgtcaaagattgtatctcaacttcagtcttctctagttcaatcaaatacttgtggatttctctctggtagtagtgtacacttagcagtgggagcagaacaacttcatttgctcgataaagcatgctttggctcacctgtgagaacagttgaaaaggacaa

SEQ ID NO: 24769 - DNA, 457 bp, Glycine max
  Clone ID: LIB3051-004-Q1-E1-C12
cccacgcgtccgcccacgcgtccgcccacgcgtccggttttggcgacactcattaatgatgttctagatctttctcgacttgaagatggtagcctcgaattagaaaagggaaaattcaaccttcatggtgttttgggagagatcgttgaactgataaaaccaatagcatctgtgaaaaagttacctatcaccttaattctgtctcctgatctgcctactcatgccattggtgatgaaaagcgacttacacaaactcttttgaatgttgtgggtaatgctgtcaaattcactaaggagggctatgtttctataagagtatcggttgcaaaaccagaatctttacaggattggcgacctccagagttttatccagcatctagtgatggccatttctacatacgagtccaggttaaggactctggatgtggcattccccacaagaaatccgcatctcttt

SEQ ID NO: 24770 - DNA, 188 bp, Glycine max
  Clone ID: LIB3051-066-Q1-K1-E6
ggagaatgaaccagcttcagaaacatctcagtgatgaagatcatccgtatcataaatgtagtgcagggaactgggacactttggaagttagaccaaaagcaaaaggattagatacaaggagcgagcttctcaaattctatgaagaaaactattctgctaatctaatgcatctagttatatacacaaat

SEQ ID NO: 24771 - DNA, 428 bp, Glycine max
  unsure (1)..(428): unsure at all n locations
  Clone ID: LIB3051-075-Q1-K1-E10
cctgaggaggttggtcttattttgcgtgcattgggttttgacaattctaccaggatatatctggcagctggtgaattgtttggtggggatcgatttatgatgccatttcgaagtttgttccctcgacttgaaaatcattcttctgatgaaaactctgaagagcttgtcgaaaacactaagggattggccggatctgctgtggattacatggtctgtcttctttctgacattttcatgccaacttatgatggcccaagcaactttgccaacaatctccttggacatcgcctgtattatggcttacggactactatcagacctgatagacaatctcttgcccctatcttcatcgatagtgataaatgggcgaacggctggtttttaggaagctattangaaagtcatgctcaaaacaaacttttgagaac

SEQ ID NO: 24772 - DNA, 456 bp, Glycine max
  Clone ID: LIB3051-077-Q1-K1-E10
cttctccaatgtccgattctctcaccgatcttgctccaaatacaaattcgttacatcctaacggagggttccgacgagcatggtggacggtccgacgagtccaggcaatggtagccatgagagtggcgagcatagccctcgctctaacgtgcgcgagtaggacaggtacctccccatcgctaacataagccccatcatgaagaaggcactacctacgaatggtaaaatcgccaaggacgccaaagagactgttcaggaatgcttatccgagtttttaagatcaacctttcagacacatgtattgagatggatggattacattcagcacaagcaagaatttgcaggtttatttgagaaaatattgttgcagaagcctggatttgagcccccggtaacacatcctgctggagttgtggaagctgatttaaaatcaaacaacactgagcaaagcgtaaa

SEQ ID NO: 24773 - DNA, 411 bp, Glycine max
  Clone ID: LIB3051-019-Q1-E1-C12
tcctggacgcgcaggcctgggagagcctcaagtttcccgtgatagcgaagcctctcgttgccgacggcagcgccaagtcgcacaagatggcgctcgtgttcacgcgcgacgcactgaacaagctcaagccgccgatcgtgctgcaggagttcgtgaaccacggtggcgtgatcttcaaggtgtacgtggtgggcgagcacgtgcgctgcgtgaagcgcaagtccctccccgacgtgtccgacgaggagaatgcgctcggcggcgtttccgaggacctgatgtcgttctcgcaggtctccagcctcgccaacgtgaacgactgcgacggctattaccgtttgatggatctcgacgacgacaccgaaatgccccccgatggccttcgtcgtcgacatcgctgggggcctcagg

SEQ ID NO: 24774 - DNA, 402 bp, Glycine max
  Clone ID: LIB3051-019-Q1-K1-C12
ccaccctcctggacccgcaggcctgggagagcctcaagtttcccgtgatagcgaagcctctcgttgccgacggcagcgccaagtcgcacaagatggcgctcgtgttcacgcgcgacgcactgaacaagctcaagccgccgatcgtgctgcaggagttcgtgaaccacggtggcgtgatcttcaaggtgtacgtggtgggcgagcacgtgcgctgcgtgaagcgcaagtccctccccgacgtgtccgacgaggagaaggcgctcggcggcgtttccgaggacctgatgtcgttctcgcaggtctgcaacctcgccaccgtgaacgactgcgacggctattaccgtttgatgcatctcgacgacgacaccgaaatgctccccgacgccttcgtcgtcgacatcg

SEQ ID NO: 24775 - DNA, 418 bp, Glycine max
  unsure (1)..(418): unsure at all n locations
  Clone ID: LIB3051-115-Q1-K1-B2
gtgcaatccatttaacagtgatctcacatatcggtcatgtgcagatggggaagtttcggtggacaacgctgctgatgtgtggaagaactatacttgtgaggtttcttcctgacgcatttgcaagacgcctggtcggatgaccccgaccatttatggccaaatggaggctgcaatgaatgtaagctatggcttatatcattatggtccattctcggctgatctacaagactgcactttcgtgcggaaaacattcacagacatcagcaatgatcactgacctggtctgcagagaaacagtcaatngatctatattggattgggtctggtatcagctgctcgaatgctgtctttgatcttttgggtcatctacgcatgagagctgcggtaccgtgtttatactaaacagctcattgagggc

SEQ ID NO: 24776 - DNA, 436 bp, Glycine max
  Clone ID: LIB3051-084-Q1-K1-E10
cccacgcgtccgattagggtttgcagagttgcactttccctttcttccaatggatgcgttttgttttcgagtccctttctctatcacgccaaatcccaccgaatcgtgcgacgcggtatattggaatctcacttgggctctaattgatgcattcacaccgttagcggttgggctccaattctccaagatgagcaattctcactctgaaaatcatgatgaagtaactgtggcgggatttgaagttccaaaatctcctgattctagttataacaatgtctaccctggaaatgaagatgacgcaagggatccacctatggtcccttcacatttacagcatactttgctaaattatcctgctaatagagacactgcatgaactgttccattgcctcagaatgtgattctaaatcatctgtacatcgagaatagagaatca

SEQ ID NO: 24777 - DNA, 405 bp, Glycine max
  Clone ID: LIB3051-029-Q1-K1-G10
caacgcgccactctctccctctcttttcctcctcttgctctctccaaacccgccatgtgctccgccgctccggtcaccgaactcagcgacgagtccgacttcgaatctctcctctctcccgacggccacatctccatctgcggcttcggctctctcctctccgagagaagcgcccgaagcactttccccgacttggccaacttccggaccgcacggttgaaccggttccgccgcgtcttcgcgcacgtcgctccggttttcttcgagcgcggcattgccaagccagaaaccatggagatttccagcttgagtgtggagccatgtgaaggagaaactcttggggtgacagtctttgagattagaaaatcggagattccaagatttatcaagaagggaggtgagttt

SEQ ID NO: 24778 - DNA, 361 bp, Glycine max
  Clone ID: LIB3051-002-Q1-E1-B6
accacgcgtccgatttagttccccaaataaacaataccaatgttgacaagagtgtagcagccattcatgcaacggtgttcagctgtcttcgaaggcgtgaggttggggaacaactatatgatcctgttagaaatactgtgactgttgtttatgaggaatatagaaatcaatgtgcagccaattctttgagctcgaaaggaatgtttcaactgatccaaagaaaaggttcttcaaggaatctgatggctcttgttaatgatgatggatctgtggcaaaggcttggcctgttaatttagttgactgtaatgggaagcctgtatggtgccatggacctgagaatggagttggacatccaatgta

SEQ ID NO: 24779 - DNA, 425 bp, Glycine max
  Clone ID: LIB3051-039-Q1-K1-D10
ctccgcccctggacaaaatcaaggtcctatttatgcaagctttgattcacattcctgttcgtttttccttcgcaccttttcttcttcttcgctccgtgccatgtcttcctctctcgctcttccttccactcccttcttcgccaatggaacaagaatcttcgctctcaagcactctctccctcgctctagggtttccatgagcgtctccgctggatctcaggcttccgttcaccaggctttgttcgccgattacaaggcctccacttcattcctcttcccgggccagggtgctcaagctgttggaatggggaaagaagctcaaaatgtgcctgctgctgcggttttgttcaacaaggcaaatgacattttggggtttgatcttcttgatatatgcatcaatgggccaaaagaaaagttagattcca

SEQ ID NO: 24780 - DNA, 182 bp, Glycine max
  Clone ID: LIB3051-050-Q1-K1-H4
atgggtagtgaaggaagccagaatccctcttcctgctttatgatataatacaaataaaatagcgattccggaaatcatgtctgtagctgctctttttatttatgtgataaatgtaaaacgctttggtttggcttggccgttgtgcattaggttgaaaaaataaatgttataattactcagaa

SEQ ID NO: 24781 - DNA, 443 bp, Glycine max
  Clone ID: LIB3051-067-Q1-K1-F1
gccatataatttttttttatttgaaataatgtccgggatcatccacaagattgaggagacccgccatgtgggagggcacaagaaagaggagcacaaaggagaacaccatggtgagcacaaaggtgaacacaaaggagaacaccatggtgagcacaaaggtgaacacaaaggagaacaacaccatggggagcacaaggagggacttgtggataagatcaaggacaagatccatggtgatggccatgacaagggtgagaaaaagaagaagaaggacaagaagaagaaggagcatggacatgaccatcatggtcatagcagcagcagtgacagtgattagatcttatatgttaagcaggtgtacggtacgatggtagtgaagagccagaatccctctttctgctttatgatataatacaaataaaatagcgattccggaaatcatg

SEQ ID NO: 24782 - DNA, 392 bp, Glycine max
  unsure (1)..(392): unsure at all n locations
  Clone ID: LIB3051-094-Q1-K1-A5
cccacgcgtccggagaacaacaccatggggagcacaaggagggacttgtggataagatcaaggacaagatccatggtgatggccatgacaagggtgagaaaaagaagaagaaggacaagaagaagaaggagcatggacatgaccatcatggtcatagcagcagcagtgacagtgattagatcttatatgttaagcaggtgtacggtacgatggtagtgaggagccagaatccctcttcctgctttatgatgtaatacaaataaaatagcgattccggaaatcatgtctgtagctgctctttttatttatgtgataaatgtaaaacgctttggtttggcttgggccgtgtgcattangttgaaaaaataaatgttataattactcagaatctc

SEQ ID NO: 24783 - DNA, 243 bp, Glycine max
  unsure (1)..(243): unsure at all n locations
  Clone ID: LIB3051-100-Q1-K1-C11
gaaataatgtgcgggatcatccacaagattgaagagagcctccgtgtnngaaggcacaagaaagaggagcacaaaggagaacaccatggtgagcacaaaggtgaacacaaaggagaacaccatggtgagcacaaaggtgaacacaaaggagaacaacaccatggggagcacaaagagggacttgtggantagatcaaggacangatccatggtgatggccatgacaagggtgagaaaaagaag

SEQ ID NO: 24784 - DNA, 462 bp, Glycine max
  Clone ID: LIB3051-108-Q1-K1-H5
cccacgcgtccgattgttttttatttgaaataatgtccgggatcatccacaagattgaggagaccctgcatgtgggagggcacaagaaagaggagcacaaaggagaacaccatggtgagcacaaaggtgaacacaaaggagaacaccatggtgagcacaaaggtgaacacaaaggagaacaacaccatggggagcacaaggagggacttgtggataagatcaaggacaagatccatggtgatggccatgacaagggtgagaaaaagaagaagaaggacaagaagaagaaggagcatggacatgaccatcatggtcatagcagcagcagtgacagtgattagatcttatatgttaagcaggtgtacggtacgatggtagtgaagagccagaatccatcttcctgctttatgatataatacacataaaatagcgattccggaaatcatgtctgtagctgctctt

SEQ ID NO: 24785 - DNA, 433 bp, Glycine max
  Clone ID: LIB3051-047-Q1-K1-C8
aaatgcaccgcctggatgccgttttaaattaaagtctgtccccttcagtaaaaacactatgtttggaattgaagatgttaaggagctgatctctatcttgtctgatggtgatggtcatgtggaatgttccatagttggtagctataaactggacacctcagattctgtttgcccttcaagagttcgtgcaatgttggcatcacgagcatgtcgatcatctattatggttggtgatgcacttggaagaaatgaaatgcagaagatacttgagcatatggctgagctgaaatccccatggaattgtccccatggcagaccaaccatgcgccatttagtcgacttaacaaaaattcacaagagctatgaacttacaatgcagatgtaattaataatggacttttttccctaatccccatcgttaacttagaagttc

SEQ ID NO: 24786 - DNA, 392 bp, Glycine max
  Clone ID: LIB3051-048-Q1-K1-C5
tttaaattaaagtctgtccccttcattggacactggatttggaattgaagatgttaacgagctgatctctatcttgtctgatggtgattgtcatgtagaatgttccatagttggtagctataaactggacacctcagattctgtttgcccttcaagaattcgtgcaatgttggcatcacgagcatgtcgatcatctattatggttggtgatgcacttggaagaaatgaaatgcagaagatacttgagcatatggctgaactgaaatccccatggaattgtccccatggcataccaaccatgcgccatttaatccacttaacaaaaattcacaagagctatgaacttacaatgcacatgtaattaataatggacttttttccctaatacccat

SEQ ID NO: 24787 - DNA, 347 bp, Glycine max
  Clone ID: LIB3051-051-Q1-K1-C8
ggagattggatcggatagctaaggatggtgcacttcacaaaaaattgattcaggcagaaatagtaactgtagaagatttcctacgtcttcttgttcgtgagccacaaaagttaagaagtatacttggtagtggaatgtccaatagaatgtgggagaatactgtggagcatgccaagacatgtgtcttgggtggcaagctctttgtatactacactgatgaaaccaatagtgctggcattgtgttcaacaatatatacgagctgagaggcctcatttctgatggccaatttttctctttggaatcacttgctccaaatcagaagatgtctggagattccttggtgaag

SEQ ID NO: 24788 - DNA, 406 bp, Glycine max
  Clone ID: LIB3051-032-Q1-K1-B6
cccacgcgtccgtgttaggttacctctgtgacatttgtgctgctagttcatataggggcggctgacaccgagaaggaaagcaggaaacaaacaaaaaggagcagatgggtagctcaggtttctcatggaaattggcggatcatccaaagcttccaaagggtaagactgtggctgctgtggtattggatggttgacgagaggccacacccaatgagtacaactgcatccacaaggctgaaacaccctgcatggattcacttaaaaagggtgctcctgaacggtggagattggtcagggctcatggtactgctgtaggacttccaacagaagatgacatgggcaatagtgaagttggtcacaatgcccttggggctggtcgcatatttgctcagggtgctaagcttgt

SEQ ID NO: 24789 - DNA, 410 bp, Glycine max
  Clone ID: LIB3051-005-Q1-E1-E11
ctttggctggctacaaaccgtctcagactcagttactctttcctgcaaagcttgttgatactgtgaacacagagcatattgagctggatttctctgatgtctttggtcctgttacgttagatttgaataacattgattccactaccagtgagcctatggaagaagtgaacgagctggtttatgatgacccaccagtgatttacactcgctcacattctctggttggcccttcaacttgtgttagtcaatcacttaagcttggcaaactcaccatacatgagactgaggattcattggaactagtggagcatgtcaatggagaggccattaaagacatcaaagaatcttcctttgttgaagaatcattgaaagatgaagaatggaatctcatgaagatcacagagttagca

SEQ ID NO: 24790 - DNA, 409 bp, Glycine max
  Clone ID: LIB3051-040-Q1-K1-D6
cccacgcgtccgctttgttgccataggtactgttgttttagcagagcacacgcaatataccgggaatttcagtaccattgccgttcagtgcctgcagaagctgccatcaaatagcagcaaatacacgtattcctgtgatggtcacaccttcaatttcctcctagacaatggatttgttttccttgttgttgctgatgaatcgattggcaggagtgttccttttgtatttcttgaacgggtgaaggatgactttatgaagcgctatggtgctagcattaagaatgacggtgcccatccacttgccgatgatgaggacgatgacgatttgtttgaggacagatttagcattgcatataatcttgacagagaatttggaccagcactcaaggagcatatgcagtattgcatg

SEQ ID NO: 24791 - DNA, 403 bp, Glycine max
  Clone ID: LIB3051-037-Q1-K1-B10
cacgatagcccttagagatattgctatacccaaggaagatacctcgtatagtcttgtcttcaagcttgtgcctcttcacgtctggaatatgaatgtagcatatagatccaaatacccttaggtgctttgcaaatggttttttcccgttccaagcttcaatttgagtcttgtcttttacagacttagttggacatctgttaagtatgtaaacaacagtgtagactgcttcagcccagaatgtgttaggtagtcccttctccttgagcatcgatctagccatttccataactgtgcgattctttctctcggacactccattttgttgaggagaatatgtgactgtaagttgtcgctcaatgccttcatcctcacaaaatctttcaaactcgcaagaggtgtactc

SEQ ID NO: 24792 - DNA, 433 bp, Glycine max
  Clone ID: LIB3051-047-Q1-K1-B6
ggattttcatttttcactacatgcaatcttctcaactcagcaggttcctttcttctacttcaggttcttgagatataggagcggttcaagctgtgtcccgtgaggcttatttcacagccattgacggtaccggggctgataatagtggaggtttgccaccagaaatttcaagcgccaagaaaaatcgtttgccaggtcttaaaggagagaccagtaacaaatctcttgaggccatggtgaagagcacgggcaaagagtccttacagtggggagtggctgcaggattgtattcaggtctcacatatgggctaaaggaagctcgtggagctcatgactggaaaaacagtgcagttgctggagcaatcactggggcgacccttgcacttacattggaagactccactcatgagcagattgtgcaatgtgccatcac

SEQ ID NO: 24793 - DNA, 453 bp, Glycine max
  unsure (1)..(453): unsure at all n locations
  Clone ID: LIB3051-054-Q1-K2-B10
cagaagcctggttctttgcggagtgaaagcagctttgcgctagtgacaggaaacacatgtatggattcagcagagaagaggctcaatgagcttggttacaagcaagaactgagaagagaaatgactgtgtttaagactctggcaatatcattgtccacaatgacccttttcactggaattacacctctctatggttctagtcttcaatatgcaggccctgcaactcttgtttgggggtggatagtggtttctttcttcacttggtttgttgggattgcaatggctgagatatgctcatccttcccgacgactggttctctgtacttttgggctgcccatttagctggtccaaaatggggaccatttntcttcatggtgctgtgctttggcttgagaccatagggcttatagctgggatagggactcaggcatatgcaggttcacaaacgttgc

SEQ ID NO: 24794 - DNA, 413 bp, Glycine max
  Clone ID: LIB3051-061-Q1-K1-G7
cttcatgagacagccccgcatctggtggattccatatgtgcatatcgtggtggctacggggcaaaggaaagaagaaaaatagagagttcattttttggtggtaaaatatgtggtgttgctgcaactaatgctcttgagttgggcattgatgttggagaaattgatgccactctgcatctaggatttcctggtaatattgcaagcttgtggcaacaagctggtagaggtgggaggagagatagaccatctcttgctgtctatgttgcatttggtgggcctcttgatcaatacttcatgaaaaatcccaagaaactctttgaaagaccaattgaatgttgccatgttgattcccaaaacaagcaggttcttgaacaacatttggtctgcgcagctcatgaacaccctttgagtgt

SEQ ID NO: 24795 - DNA, 393 bp, Glycine max
  Clone ID: LIB3051-037-Q1-K1-A3
agcgccaaccacctccatccgaattgggaatcgatttgaaggcaggaggtaagtccaggaaaagcaaacgtacagcccccaaatccaatgatattaacctcaagctcctcgtcaagctgtaccgttttcttgttcggaggactggtagtaacttcaatgccgtcatcctcaaacgccttttcatgagcaaggtcaacaagcccccgctatccctctctagattgattcgttacaccaagggaaaggaggataagatagctgtggtagtcggtgccgtgaccgatgacattagggtgtatgaagtccctgctctgaaggtaactgccctgaggttcactgaaactgccagagctagaattgagaaagctggtggcgaatgcctcacctttgatc

SEQ ID NO: 24796 - DNA, 439 bp, Glycine max
  Clone ID: LIB3051-096-Q1-K1-H6
cccacgcgtccgcttggttgcagcttcagcagcagcggcaagcaactccatccgcaatgggaatcgatttgaaggcaggaggtaagtccaagaagaccaaacgtacagcccccaaatccaatgatatttacctcaagctcctcgtcaagctgtaccgttttcttgttcggaggactggtagtaacttcaatgccgtcatcctcaaacgccttttcatgagcaaggtcaacaagcccccgctatccctctctagattgattcgttacaccaagggaaaggaggataagatagctgtggtagtcggggccgtgaccgatgacattagggtgtatgaagtccctgctctgaaggtaactgccctgaggttcactgaaactgccagagctagaattgagaaggctggtggcgaatgcctcacctttgatcaactggctcttaa

SEQ ID NO: 24797 - DNA, 430 bp, Glycine max
  Clone ID: LIB3051-115-Q1-K1-G9
ttggttgcagcttcagcagcagcggcaagcaactccatccgcaatgggaatcgatttgaaggcaggaggtaagtccaagaagaccaaacgtacagcccccaaatccaatgatatttacctcaagctcctcgtcaagctgtaccgttttcttgttcggaggactggtagtaacttcaatgccgtcatcctcaaacgccttttcatgagcaaggtcaacaagcccccgctatccctctctagattgattcgttacaccaagggaaaggaagataagatagctgtggtagtcggggccgtgaccgatgacattagggtgtatgaagtccctgctctgaaggtaactgccctgaggttcactgaaactgccagagctagaattgagaaggctggtggcgaatgcctcacctttgatcaactggctcttagagct

SEQ ID NO: 24798 - DNA, 414 bp, Glycine max
  Clone ID: LIB3051-049-Q1-K1-B11
gtgttctgtttgtgctgccggattcgtatgttgatcctgagaacaaggactatggtgctgaattatttgtgaatggagagatcgtccagagatcacctgaaagacagagaagggtggaaccacagccacaaaggcatcaggacagaccacgatacaatgatagaacaaggtatgtccggcgcagagaaaacatgcagtgaaggaccaatttgagatagggagagggatgtgatgtacatacactatggaagtactttgttacatgcactattttagtcttgcctttggagacattccatatatttccggtggggtaactcaaatgtttgttgtcaaacttctatggctgtatcagatggacacctcttcgttatcatttttactataaacataatgttggactcttttcacgtc

SEQ ID NO: 24799 - DNA, 435 bp, Glycine max
  Clone ID: LIB3051-016-Q1-E1-F2
acgcgtcaacttgtgacactcagttactctctctctctctggagcgtcgtcgtttcgttagggcacaaaaccccttttcggatcggtggagcaaggcctcgccggcgagattcccgaggctgttcaatcagcgatcgagcaccggcgaaaagcggcgaagatgaaggttttcgtgaagactctcaagggcacgcacttcgaaattgaagtgaacccttcggacacgctttctgaagtgaagaaaaatatagaaactgttcagggtgcagatgtctatcctgctgcacagcaaatgcttattcatcaaggaaaagttctaaaggatggtactactttggaggaaaataaagtacctgaaaatagttttattgtaattatgttatcaaagactaagagttcatctggtgaaggatctactacttcaactgctccttc

SEQ ID NO: 24800 - DNA, 418 bp, Glycine max
  Clone ID: LIB3051-026-Q1-K1-D5
cttttatttcgttcctctattcgctacgtcgtcgttagggtcgtcttcggatcggtggaacttgactgcgccggcgtgaattccgacgctgcgagtggcaccgaattgcgatagcggtgacgaatatgaaggttttcgttaagactctcaaaggcactcacttcgaaatcgaagtgacgccgcaagacacggtttctgaagtgaagaaaaatatagaaactgttcagggtgcagatgtctatcctgctgcacagcaaatgctaattcatcaagggaaagttcttagggatgcttctaccttggaggagaataaagtagttgaaaatactttcattgtaattatgctatcaaagagtaagagcccatccggtgaaggatctactactttaactgctccatcaaccaaggccccacagac

SEQ ID NO: 24801 - DNA, 410 bp, Glycine max
  Clone ID: LIB3051-060-Q1-K1-A5
caggctagcacaatcttgatatgggtggagggagctgggacagggatactgtcgtccgggctcttcgagcatgcctacaacaaccctgagagagctgtggaatatttgtatacaggtatccttgatcaagctgaaactacaattgtaaccaggacgcctgtaagtgctcaacctacaaatcctactgatgatgctgcacagacagcacaacctgctgaacttacctcagatggacctaacgctaatcctttagacctttgtccccagggtcttcgtaatgtgggttatggtgctgctggtgctggttcatcggactgtttacgcaacagtcaacaatggcaagcctcgcgagctatggtgcatgctaatccacatatattgcactcaatgctacaagagcttgacaagca

SEQ ID NO: 24802 - DNA, 443 bp, Glycine max
  Clone ID: LIB3051-063-Q1-K1-G3
ctttcttcgctacgtcgtcgttagggtcttcttcggatcggtggaacttgaccctgccggcgtgaattccgacgctactcgtggcgccgaattgctatagcggtgacgaatatgaaggttttcgttaagactctcaaaggcactcacttcgaaatcgaagtgacgccgcaagacacggtttctgaagtgaaaaaaaatatagaaactgttcagggtgcagatgtctatcctgctgcacagcaaatgctaattcatcaagggaaagttcttagggatgctactaccttggaggagaataaagtagccgaaaatactttcattgtaattatgctatcaaagagtaagagcacatctggtgaaggatctactacttcaactgcattatcaaccaaggctccacagacaagtacaggtcccgcttcaacccctccagtgtcagtagc

SEQ ID NO: 24803 - DNA, 313 bp, Glycine max
  Clone ID: LIB3051-072-Q1-K1-B10
ctcagttactctctctctctctggagcgtcttcgtttcgttagggcacaaaacccctttggggatcggtggagcaaggcctcgccggcgagattcccgaggctgttcaatcagcgatcgagcaccggcgaaaagcggcgaagatgaaggttttcgtgaagactctcaagggcacgcacttcgaaattgaagtgaacccttcggacacgctttctgaagtgaagaaaaatatagaaactgttcatggtgcagatgtctatcctgctgcacagcaaatgcttattcatcaaggaaaaagtctaaaggatggtact

SEQ ID NO: 24804 - DNA, 426 bp, Glycine max
  Clone ID: LIB3051-079-Q1-K1-B12
gtcgtttcggggcattcttgtgcactcagttactctctctctctctggagcgtcgtcggttcggtagggcacaaaacccctttgcggatcggtggagcaaggcctcgccggcgagattcccgaggctgttcaatcagcgatcgagcaccggcgaaaagcggcgaagatgaaggttttcgtgaagactctcaagggcacgcacttcgaaattgaagtgaacccttcggacacgctttctgaagtgaagaaaaatatagaaactgttcagggtgcagatgtctatcctgctgcacagcaaatgcttattcatcaaggaaaagttctaaaggatggtactactttggaagaaaataaagtagctgaaaatagttttattggaattatgttatcaaagactaagagttcatctggtgaaggatctactac

SEQ ID NO: 24805 - DNA, 462 bp, Glycine max
  Clone ID: LIB3051-090-Q1-K1-D7
cgtaggagccttacctctctctctctctctctctctctctccattccgtagtatccctctgtgcgacccttttacttagcattccctgtttccggtattcgctccctttttttttctgcattctgtctggttttacttagatctctgtcccgcaccagatctggtgcagggtgagagggttgggttcattaattttgtatcaatcttccttctgagcggtaggcgtggggataccagagtcttttcgggaagcaagagagggttctctccgttttcaatagatctctcactgtcttcttttgagggggaagccggggcctcggcctctgcggctgtcaaagcccccaccttcacagccctatcaacaaaaccctaaccctattgttctcttcttcattatctaattcaattttgatcgtcgccgtcactagagatgcctgtcctggcttgttgcgtggatgc

SEQ ID NO: 24806 - DNA, 413 bp, Glycine max
  unsure (1)..(413): unsure at all n locations
  Clone ID: LIB3051-102-Q1-K1-F10
cccacgcgtccgggacccttatctctctctctctctatctctcccgaattattgttcgtgcgggccttttacttagtgttccctgtttccggtattcgctcccttttttctgcattctggttttacttagatctctgtcccgcaccagatctggtgcagggtgagagggttgggttcattaattntgtatcaatcttccttctgagcggtaggcgtggggataccagagtcttttcgggaagcaggagagggttctctccgttttcaatagatctctcactgtcttcttttgagggggaagccggggcctcggcctcggcggctttcaaagcccccaccttcacagccctatcaacaaaaaaccctaaccctatttttttcttcattttctaattcttttttgatcgtcgccg

SEQ ID NO: 24807 - DNA, 436 bp, Glycine max
  Clone ID: LIB3051-105-Q1-K1-A12
aaaaaaataaaaatcccacttccttttgcttctttttttgttctttgttttttgtttggtgagaaactgcgagaagaaagtaaaaggttcaatttttacccttttttcttcccagaagcgatctctgaagccgacccattttggaattcggaaaacccagtgctgatcgctctctgggtgttcccaaaatgaagcttcggagatcttcgctgtgcgtctttctagggtttctggtgctgttcctttcgccgccgccatctatggcgaaattcgtggtggagaagaacagcttgacggtgacgtcgccggacgacatcaagggcacgcacgatagcgcgattgggaacttcgggataccccaatacggtggcagcatggccgggaacgtgttgtacccaaaggacaacaaatagggttgcaaggagttcgatgagta

SEQ ID NO: 24808 - DNA, 397 bp, Glycine max
  Clone ID: LIB3051-084-Q1-K1-H8
cgtttgcctgcaaaatatatcagattcatgatctgaatgatgtgtttgcgtcgttgccgatgtctgatgttgatccattcttgagtgtcagtgatgattatcatgtatatgctaagatccatgtggatgtgagagaatatggtactgctgctgataatcagttagcatgttcaatgttgtcagagttacagaacaaaatacgggaatgtcaatcgatcataagggatgctttggttcataatttagctaacgtcactgagctggatgcagatgaactggctatgctattgtcagagaaattcaagcctgatgaagagtttgtgttcggtccacagtcaatgcttgatcagaatcaaataatttttcattcccaggagtcactgtcatttgatgggga

SEQ ID NO: 24809 - DNA, 400 bp, Glycine max
  Clone ID: LIB3051-029-Q1-K1-G6
cgttcctttccgatgggtcgtatggtatttgtgattggtggagatttgacggcacgcgcattatcaaaatccttactgtgtttctttcgcggtcattgcctcttttctgttcgtggcttcaggattattttaattctgcagctccgaaatatagataaaccaatcatcaggctgtacaggagaatggcagaatctatatctagcttctggggtccagtcacgttcaccaaagacgtgttgtgaattaaattatgcttattgctcttacattgctgaattctttaatacaacatccagcattgcaacaatactttcggctctgattgtgcttataaatgcattaagacaacagattcgagaaaagattgagggttcttcatgtttcagatatgacacttgc

SEQ ID NO: 24810 - DNA, 466 bp, Glycine max
  Clone ID: LIB3051-112-Q1-K1-E6
gactgccactgctgcattgcatagtgaattctttacaacaaaaccatatgcttgggagccctctatccttccaaaatatcctcccagcaaggagatggatgcaaagctacgggatgaagaagctagaagattgagagcagctggtaaagctaatgctgatggtgtcaagaaatctcgtccacgtgagcgagttgggaggggagttccagttccagaggccaatgctgaactgcaagcaaatattgatagaccgcggctgatcacacatgcaaatgctaagagcaagagtgagaagtttcctcctccccaccaagatggagctctaggctatcctttgggttcttcacatcacatggatccagtttttgatccccctgatgttccatttagttctacaaacttatcacaacctatagcaaatatccaaacctggtctggcccgttggtagatccttctggtgtgggt

SEQ ID NO: 24811 - DNA, 406 bp, Glycine max
  Clone ID: LIB3051-114-Q1-K1-E10
cccacgcgtccgatttacctcttgagttaaaatgggatgatacatgtcttgataaaggtgtttcttgatctttatcattaacaaagtatatgtgaggttgtcttatgtttgattagtaagatacaagtgtctaaatattatgcttggctagaccctatctaagtttatacttgcactaattctgaaattcacatttattgatgaagaaacattttttgtttgattttcttttccagcctacaaatgagagagtacatcagattatttcaaggactgcaacatttgtcagcaaacattgaagccaatcagaaatcatcctgagggtgaaacaaggagacaatccaacttttggattcctaatgcctgatcatcatcttcatgcgtattttaagtttctcgttgatca

SEQ ID NO: 24812 - DNA, 170 bp, Glycine max
  Clone ID: LIB3051-115-Q1-K1-E10
gcgttcgcatgactaatcgggtggttaccctttggtaccgacctcttgagttgcttcttggtgcccgcagatattgggcggccattgacctttggagtgttggttgcattttatgagagttattggcagggaagcctattttgcctggtcgtacggaggtggaacaactg

SEQ ID NO: 24813 - DNA, 433 bp, Glycine max
  Clone ID: LIB3051-060-Q1-K1-C8
cccacgcgtcctcccacgcgtccgcggacgcgtgggtttttctgaaaacttaatttctgggtgattttctccctcacttttatttctctctttctggattattctctctgtgtagattgtggcgtgttctcgatgatgatgatgatgagccgcagcggcgccaaccgggtagcgaacaccgcaatgtttgtggcgaagggtttaagcggcgaagttggtggtttaagagcattatatggcggtggtgtgaggagtgagagcactttggctttgtcagagaaggaaaagattgagaagaaggttggtttgtcttctgctggtgggaacaaagaagaaaaagtgatcgtgagttattggggcattcaaccctccaagatcacataaaaagatggcacagaatggaagtggaattgctttaagccatgggagacat

SEQ ID NO: 24814 - DNA, 464 bp, Glycine max
  Clone ID: LIB3051-068-Q1-K1-C8
aattgatgcttgtgctgttaaaggtggcgtaaaatttggtgattatcaatgtaataatgcgatgggtatatggtctaagatgaagggaaagcagacaggatttaggggtcccccagcaattggtcaggctatcgttaacaatcttcctccatctgaaatgatagattcgtgctctgtagctggtcctggatttgtcaatgttgtattgtcaaagaagtggatagctgagagcttacagagaatgctaattgatggtatcaattcatgggcacctcgacttccagtcaagagggctttgattgatttttcctcacctaatatagcaaaggaaatgcatgttggccacctgagatctaccattatcggtgatacattagctcgtatgcttgaattttcacgtgtagagtgtgtaatccgtagaaatcatgttggtgactggggaacacagtttgggatgctgatta

SEQ ID NO: 24815 - DNA, 471 bp, Glycine max
  Clone ID: LIB3051-077-Q1-K1-C8
aaacaattcaagaagagttcgtaggaggactatagttgatgttgatctagaagatcaggctaggctcatcaaacgccgaagagaattgccaaatctgattattaattgtgataagtatataaatttggaaggcggtatcagttccatggatcaaagttttaaaaagccacctgaacctacaaaggagcttgtcttcaactgtccaatatgtatgggccctatggtacatgaaatgtcgacaagatgtggtcatattttttgcaaggattgcatcaaagctgctataagtgctcatggtaaatgccctacctgtagaaaaaaggttgttgcgaaagatcttataagggtgtatctcccatcgactagttagaggctctccgtggaagctgtaaagaggagaacaaggattggaagacacgtcattgtactttggacaatactgaatggctgtgttgtttctaatatgttccc

SEQ ID NO: 24816 - DNA, 402 bp, Glycine max
  Clone ID: LIB3051-079-Q1-K1-C12
cgataatgagcaaaaagagaaaggcatctcaaacaagaagaaaaagcttcaacggagggtgaaaattgctgaactgaaacaaatttgcttgaggccagatgttgttgaggtgtgggatgctactgcatcagacccaaagttgctggtgttcttgaagtcttatcggaatactgtacctgtacctaggcattggtgtcagaagagaaaatttttacagggtaaacgaggtatagagaaaccaccctttcagcttcctgatttcattgctgccactggaattgagaaaatcagacaggcttatattgagaaagaggatagtaagaagctgaaacaaaagcaaagggagcgcatgcaaccaaaaatggggaaaatggatatagattatcaggttcttcatgatgc

SEQ ID NO: 24817 - DNA, 471 bp, Glycine max
  Clone ID: LIB3051-080-Q1-K1-C8
gaaaaaggggttagggtttgttcttgtgatcgaagctaagcgaagcaaaatgggtggatcagggagggacgtgaagtcgaagggcgaggtcgacgaggtggtggcgagtggctctccggttatcctccacttctgggcgtcctggtgcgaagcttccaagcacatggaccaactcttctctcacctttccactgatttccccaacgcccgcttcttaagggtcgaggccgaagagcaacccgagatttctgaggcttactccgtctccgctgttcctttctttgccttctgcaaggatgggaagacttttgatacattggaaggagctgatccgtcaagcttagccaataaggttgctaaagtagcaggctcaattaaccctggagaagctgcatctactgccagtcttgggatggctgcaagggcttctggtcttgaaacggtgaaagaattagcaaaagacaatgattc

SEQ ID NO: 24818 - DNA, 454 bp, Glycine max
  unsure (1)..(454): unsure at all n locations
  Clone ID: LIB3051-082-Q1-K1-C8
attttgtcgtagagggatccctctggtgtaggattgtgtgtatcttcggcgatggaagcgtgtttcggatcaagacactagtatatgcactcactgtgatcgggctattcctgctgcaaatattgacttgcattatgctcattgctctcggaagcttgaaaaatgcaaagtttgtggtgatatggttcccagaaaaaatgcggaggatcactatctaagcacccatgcaccggtttcttgttcattatgcagtgagacaatggagcgtgatattttagatatccataaaggtgaaaattgccctcaaaggattgtcacttgtcagttctgtgagtttccattgccagcaattgatctggccgagcatcaggaagtatgcgggaatcgaacagagctntgtcacctttgtaacaaatatgttagactgcgtgaaagattcagccatgaagctcga

SEQ ID NO: 24819 - DNA, 422 bp, Glycine max
  Clone ID: LIB3051-082-Q1-K1-G6
attttgtcgtagagggatccctctggtgtaggattgtgtgtatcttcagcgatggaaggtgtttcggatcaagacagtagtatatgcactcactgtgatcgggctattcctgctgcaaatattgacttgcattatgctcattgctctcggaagcttgaaaaatgcaaagtttgtggtgatatggttcccagaaaaaatgcggaggatcactatctaagcacccatgcaccggtttcttgttcattatgcagtgagacaatggagcgtgatattttagatatccataaaggtgaaaattgccctcaaaggattgtcacttgtcagttctgagagtttccattgccagcaattgatctggccgagcatcaagaagtatgcgggaatcgaacagagctttggcacctttgttacatatatggtag

SEQ ID NO: 24820 - DNA, 477 bp, Glycine max
  unsure (1)..(477): unsure at all n locations
  Clone ID: LIB3051-083-Q1-K1-C8
tcgagagagagagagagagcattgcattggcgagaccaccgcggtggagcgagcgagcgagcaagcgacgacgaaaattgaattgctcgtgcgcgtgcgtgcgtgatcgtttgattgtttggatcttgtggtcgatcgaggacgatgtcggagatggcgagcccagatcccgagggactcgacggagtccggatgacgtggaacgtgtggccgcggacgaaggtggaatcaagcaagtgcgtgatccctctggcggcgactgtggctctgatccgtccccaccctgacatcccccgcctaccgtacgcccctctccgttgtaagacctgctcctccgtcctcaaccccttctgccgcgtcgacttcaccgtcaagatctggatctgccccttctgctaccagcgcaaccacttccnccctcactaccacgccatctccgaaaccaacttacccggcgaactctacccccaatacacc

SEQ ID NO: 24821 - DNA, 442 bp, Glycine max
  unsure (1)..(442): unsure at all n locations
  Clone ID: LIB3051-063-Q1-K1-B6
tcgcggacgcgtgggcaaggagcctctcctctggcgcaccatcgacatgcgcaattggggcgagattggattggatttccatttattggccatgtgccaccgcgcaattgactacagctccggccacttgctccatatcaatgtcgagtatttcggcaccgatgatctcctccaccacatcacccattctacaagtaatctacgaagcctacgtcttgcatgttgctatcagatttcagatgaaggactgtgtgaaattgcagaaaagcttcctcagctggaggagcttgatatatcaatcagcaacttaaccaaggaccctctagaagctattggccagtgttgcccacacttaaaaacactgaaattcaatatggaaagttacagacgttcgcacattgagtgtgatgaggaggctnttgctattgcagaaaccatgccc

SEQ ID NO: 24822 - DNA, 451 bp, Glycine max
  unsure (1)..(451): unsure at all n locations
  Clone ID: LIB3051-086-Q1-K1-C8
gaaccatttaagtcagaaagagtttggggtgtgcttgagcttgatgaaggagcttctctctggcgattgttctgaccctttgctggtttcccagcttgggtacatgcagttgcagattggggacttggagggtgcgaaagtttcgttcttgaaggtggaggagttggggaagagtaatgggtcgttgagcgaggttgagtttaggaaccttgtgaataggaacaaggcgttggtgtatttggttgggaaggattatgtgtcggcggtgagggagtacgaggagtgcattgagagggacagtgcggatgttgtggcggtgaacaacaaggctctgtgtttgatgtatctgagggacttgtcggattctattaaggtgttggagagtgcgcttgagagagttcccactgtggctctcaatgagactctngttgtcaatttgtgtagtatgtat

SEQ ID NO: 24823 - DNA, 410 bp, Glycine max
  Clone ID: LIB3051-040-Q1-K1-E4
attttccagaaaaaaaaaaaaaaaaagatagatagaaatggcgcatattcctcagacccccaccaatgacgcggcggcttctggtgcaaatccgtcgatgacgaccatctcgttgtacgtcggggatcttgaccacgacgtcaacgatccgcagctctatgatctcttcaaccaggttgcccaagtcgtttccgttcgaatttgcagggacgtggccacccaacaatcccttggttacggctacgtcaatttcagcaacgctcgagatgccgcaaaagcaatggatgtgctgaatttcactccgctaaatggcaaaaccattagaataatgtactctattcgggaccctagtgctcggaagagtggtgcagctaatgttttcataaagaatttggacaaggcaatcgatc

SEQ ID NO: 24824 - DNA, 448 bp, Glycine max
  Clone ID: LIB3051-026-Q1-K1-H6
cccacgcgtccggtttctcccgcaaaatgataggaaagaaattcttatgcgttgttgtagcggtggcctttgttatgataacaaaggtgccccaaaatgtgagtgctcaaaactgtggttgtgctgaagggttatgttgcagccaacatgggtattgtggtaacggtgaggagtactgcggcacagggtgcaagcagggtccttgttattcgagcacaccaagtactaacaatgttaatgtggctgacattgtcacaccacaattcttcagtggcataattgatcaggctgactctggctgtgctggcaagaacttttactcacgagatgcttttcttaatgctctcaattcctataatgactttggtagacttggttcccaggatgactccaagcgcgagattgcagctgcttttgcccatttcacacatgaaactggacatttttg

SEQ ID NO: 24825 - DNA, 419 bp, Glycine max
  Clone ID: LIB3051-070-Q1-K1-F4
cccgcaaaatgataggaaagaaattcttatgcgttgttgtagcggtggcctttgttatgataacagaggtgccccaaaatgtgagtgctcaaaactgtggttgtgctgaagggttatgttgcagccaacatgggtattgtggtaacggtgaggagtactgcggtacagggtgcaagcagggtccttgttattcgagcacaccaagtactaacaatgttaatgtggctgacattgtcacaccacaattcttcagtggcataattgatcaggctgactctggctgtgctggcaagaacttttactcacgagatgcttttcttaatgctctcaattcctataatgactctggtagacttggttcccaggatgactactagcgcgagattgcagctgctttttgccatttcacacatgaaact

SEQ ID NO: 24826 - DNA, 435 bp, Glycine max
  Clone ID: LIB3051-088-Q1-K1-C8
cccacgcgttcggaaattcttatgcgttgttgtagcggtggcctttgttatgatgacagaggtgccccaaaatgtgagtgctcaaaactgtggttgtgctgaagggttatgttgcagccaacatgggtattgtggtaacggtgaggagtactgcggtacagggtgcaagcagggtccttgttattcgagcacaccaagtactaacaatgttaatgtggctgacattgtcacaccacaattcttcagtggcataattgatcatgctgactctggctgtgctggcaagaacttttactcacgagatgcttttcttaatgctctcaattcctataatgactttggtagacttggttcccatgatgactcctagcgcgagattgcaactgcttttgcccatttcacacatgaaactggacatttttgccacattgaaga

SEQ ID NO: 24827 - DNA, 447 bp, Glycine max
  Clone ID: LIB3051-066-Q1-K1-B6
atgtgggtgttggagggtacggttatccagctttagtggcccttaaccttaagaaagctgtgtatgctcctctcaagagtgcttttgaacttgaccagattatagaatttgtgaaagaagctggacgtggaggcaaagggaatttgcccctgcaaggcactccaaccattggtaagacagaaccatgggatggaaaagatggagaaataattgaagaagatgaattttctcttgaagaactaatgggggaagatgcttcaagcaaggatgagctatgatcaatttattagggatttataccaaattaaaggttcaaccaccgatttttacgttacaggcaacttgtttctcatgattattgtgatcactattctggttttccatgtgtcaagttaaaaaaccagtctagtgatgagtgatcttctctgaggattttgatatatgtca

SEQ ID NO: 24828 - DNA, 403 bp, Glycine max
  Clone ID: LIB3051-067-Q1-K1-B6
caaggccaccgttttcgccaccgacacgattctgtccactctcatgtgtgcccctcgggctagttattcctgggacattggcgtccaacgtgtcggaaacaagcttttctttgataagcgcgatgggtcgcagctcgatttgctctctggtcatgaaacctcgcaagaaccattgcctgagtcgaaggatgatattaactctggccattcgttgagcgttgaggctgcttatatcaaccagaatttctctcagcaggtgctcattatggatgggaataagggtactcttgatgaggctaacccttttgctaatgaaggtgatgaggttgctgctgtcgcttataggtatacgaggtggaagctcgatgatgatatgtatcttgttgcgaggtgtgaggatcat

SEQ ID NO: 24829 - DNA, 423 bp, Glycine max
  unsure (1)..(423): unsure at all n locations
  Clone ID: LIB3051-093-Q1-K1-H6
gaacctcagagatcttcaacgcgaattgtagaacaaagccaatgatctcagcaagcttgaaaaggaaattgcgaagaatcaccaaatgagaaagaaatacacggtccagcttggcgagaacgagctcgtccttaaggaactggatttattgaaagacgacgcaaatgtttataagttgattgggccagtacttgttaagcaagatttggccgaggccaatgcaaatgtccgcaagagaatcgaatacatctcagctgaattgaagcgtctggatgccactgttcaagatttggaagagaagcaaaatagcaagaaagatacgatactaaaattgcaacaaaggattcaatcatttcaggctgggaaaggcaaggcgtaattttcccttacatatnggtccaggcattgggatttaaccgggct

SEQ ID NO: 24830 - DNA, 305 bp, Glycine max
  Clone ID: LIB3051-048-Q1-K1-E4
gcctgcagaaccacgtgcttcagttttggacaaggttaagttaggagagcctgtatacggggatgggtattatgctgaaaaatttggtgcattggatccggataagattgacaaaatcaagaaagatacactcttaaaatatgtacaaggcctttgttgggtttgttggtactactaccaagggtgtatagctcatggtaatggtactacctataccattatgctccttctgcttctgatcttaaagatctacatgatctggagataacattacttttgcgagaaccatgtaaaccatttgatca

SEQ ID NO: 24831 - DNA, 419 bp, Glycine max
  Clone ID: LIB3051-107-Q1-K1-C8
cccacgcgtccggctacacactttcttcaacggtaaatccctctctgcacttcgtctctgggagggattaatcattattttccgcgcaccaaacagccaaagtcaattttcttctctcttctaagacacaccaatgccagagaagaagaacaagaaagtttctttcaccgaagaagatgctgttacgctcatgcagaggtacgacgcaactacggtgttcactttacttcaggaagtggcgcattaccctcaccccaagattgattggtgcgagttggtgaagaaaagcgcgactgagatttctaacgccagagaatatcaaatgctatggcggcacttggcgtatcgccattctttgcctgaaattttcgaagatggggatgaacctttggatgatgatagtgacctaaagtgtgagc

SEQ ID NO: 24832 - DNA, 455 bp, Glycine max
  Clone ID: LIB3051-081-Q1-K1-B6
cccacgcgtccgcaagaaggctgaaaagctagccggaacaattcagcctggaaattattggtgtgattttcgggctggattttggggtgtcatgggagggccttgtcttggaataattcctccatttatagaagagttcaatcatcccctcccagacaaatgttctggtgggagtactggtgttttagtaaatggtagggaacttcaccaaaaagacttagatttgctatctgggagaggactccccacagatatagatagatcttatatcattgaaatttctgggagagtcctggatgaagacacaggtgaagagctggacagcctaggcaaacttgcaccaacggtggagaaagtaaagcatggatttggcatgaaagcacctagagcagctacataagctaaatgtataaaaaaagattctgcgacaggttggagaaggtgaattttgctcc

SEQ ID NO: 24833 - DNA, 387 bp, Glycine max
  Clone ID: LIB3051-113-Q1-K1-C8
cccacgcgtccgatccacagctattgtatgtagcaaagttctatagtattcttcaaggagaaagtggtattccaagtatgaagtggtgtggcactgatggagacaataatgttctagttattgatcttctgggacggagtcttgaagacttttttgtctactgcaggaggaagttttcattaaaaacagttttgatgttggccgatcagatgctgacaagaatagagtgcatgcattccaaagtatttacgcatagagacatataaccagatgacttccttatgggtcttgtgatgaaatcaaatcagcttatattattgatttcggactatcaaaaagatatatggaccctaacacagacgaacatattccttacagagagaataa

SEQ ID NO: 24834 - DNA, 383 bp, Glycine max
  Clone ID: LIB3051-060-Q1-K1-E12
agcagcacttgctttcctttcctttgctgaccaaacttcactatgctatctatcgtcggtatgcgttggccagaacaggaatcctcaccttgtgccctctgctccctttcatcaaaacctctccaaaactataccttcctgtcaccgagcgcactgtaagtgacaccaaaaactggcgcgatgcgcctgctttgatagtcattgctggagggttgacttcaatggcaacagccggttccattctggctgtgatcacataggtttcttcctcggcaaacatttgtgaccgtgcgcgtgacaacttgagttctcacaagatgggaaattgttattgatggggggttaaaatttgatggttggcccatggaggggtaccatggggg

SEQ ID NO: 24835 - DNA, 410 bp, Glycine max
  unsure (1)..(410): unsure at all n locations
  Clone ID: LIB3051-050-Q1-K1-B10
aggacattcaagcttacagatccatcgtcagagcactgccctcctggagagttcgtccgagaaatccctctttcaacccgaattcctgaagacgccaacatagaagcatactacgatgggccaggatctgtgcttgagatcctggtgccaaaacatcgcgtgggacctgaagagcatgaagtccgtgtttgcctccgccctcatctgggagggaatgatcttaagttaacttgagataataggcacttaaaaaaattgttaggcattccagtatggttcgtatgtcattgtttttctaaccttgtaccatacactgttatttgcaataagaattgtgtgtcttatgtttgtctctagcaattntagctcactgactgccctggttcttttggttccgtgcatctgtatgc

SEQ ID NO: 24836 - DNA, 400 bp, Glycine max
  Clone ID: LIB3051-094-Q1-K1-G7
caacccttttaaacaaatatcgtaccgaggttttggaatttctgaatgacatatttgacaccctgctcaaggcactttcagatccatctgatgaggttgttcttctagttcttgatgttcatgcatgcattgcaaaagatcctcagcactttcggcaacttgttgtcttcctagtgcacaatttccgggtagacaattcccttttggagaagcgtggtgctttgataattcgtcgactttgtgtgcttttgaatgctgagagagtctaccgtgaactttctacaatactagaagcggaatctgacttggattttgcatcaattatggttcaggctttgaatttgatcttacttacatcatcggaactatctgagattcgagatcttttgaagcaatcact

SEQ ID NO: 24837 - DNA, 371 bp, Glycine max
  unsure (1)..(371): unsure at all n locations
  Clone ID: LIB3051-071-Q1-K1-E4
gtctcacaggacacgttgcattgcgcaggatggggagagacggtgagattgacggcggagtgcggcggagaggatgcacgttcaggcggaacgacttcttcccggaggagtcgttcaagagttggggaaactacgctcgagcggtgctggagacgccgtggaggctgaaggatcgtgtggtgacgcgatcggaggaccagacggagttggtggagatgaaggctcgtagcaaccacgagatgaagaaaacgctgaactggtgggacctcatgtggttcggaatcggtgccgtcattggctccggcatattcgtcctcactggcctcgaggcaaggacggcggtcggacccgncgtcgtgctcttctacgtc

SEQ ID NO: 24838 - DNA, 397 bp, Glycine max
  Clone ID: LIB3051-103-Q1-K1-B6
cccacgcgtccgcggtggtctgccttgtcgttttctctgaaactcaagaaccgggttgttttatgaataaaatataggtattttttttgtgtgtgtggtggttttttggtttggtttgaaggagagagaaataaaaatgaagtttatgaagttgggttcgaagcctgatgctcttcaaagtgatgaaaaatctatcaggtatatatcatctgaattggttacagatattatcataactgttggtgaagttaagtttcacctgcacaagttccctctactgtccaagagtaatcgtttacaaaagttgctgtcaaaggctattgaagagaatgctgattaaattcaattggatgattttcctggtggtccaaaggtttttgaaatttgtgcaaagttt

SEQ ID NO: 24839 - DNA, 452 bp, Glycine max
  unsure (1)..(452): unsure at all n locations
  Clone ID: LIB3051-027-Q1-K1-D10
ctttcacttcccgcattctcctcttggttgcctccatgttcctcctcgcagccttcgttctcgccctctacttctcctccccaacgtcgtcgtcgccgtcgctgcctccgccacgcgccaagctcccccacccggtggtgatcctcatttcctccgacggcttccgattcgggtaccagttcaagacccccgctcccaacatccagcgtctgataaaaaacggcaccgaggccgagaccggactcatccctgtctttcccaccctcaccttccccaaccactactccatcgtcaccgggctctaccctccccaccacggcatcgtcaacaacgtcttcttcgaccccctcaccggcgagaagttcaccatgcaatcccaccaacccaagtggtggctcgcccagcccctctgggagaccgtccttcttcacaaccttttcgncggcacctac

SEQ ID NO: 24840 - DNA, 453 bp, Glycine max
  Clone ID: LIB3051-110-Q1-K1-B6
cttttatgaattccctattttgcaggcaagatttttctttcagcaactaatatctggagttagctattgtcattccatgcaaatatgtcatagagatctgaaattggaaaacactctactggacggaaatccagctcctagacttaaaatttgtgactttggtttctccaagtctgctttgctgcactctcaacctaaatcaactgttggaactcctgcatacattgctccagaagttttgtcgcgaaaggaatatgatggaaaggttgccgatgtttggtcgtgtggtgtgacactttatgtcatgttagttggagcatacccatttgaagatccagaagatcctaaaaatttcagaaagagtattggggtgaactcttacttgacttaaaagagatcttttatgattaatatctttgatccatagcagcaagtttaaactctgattctctc

SEQ ID NO: 24841 - DNA, 381 bp, Glycine max
  unsure (1)..(381): unsure at all n locations
  Clone ID: LIB3051-011-Q1-E1-D12
atacaattaatttcactgaatcttattgaagatgtttctcacaagaactgagtatgaccgacgagtcaacaccttttctcctgaaggccgtttatttcaggttgaatatgcaatcgaagccatcaagctgggatcaactgcgattggattgaagacgaaagatggtgttgtccttgcagttgaaaagcgcatcacttcaccactgctggagccaagtattgttgacaaaattatggaaattgatgagcacatacgatgtgcaatgagtggattgattgctgatgctcgaacacttgtatagcatgcacgggttgaaactcacaatcatangttctcctatggtgaaccaatgactgttgagtctacaacccaagctctttg

SEQ ID NO: 24842 - DNA, 404 bp, Glycine max
  unsure (1)..(404): unsure at all n locations
  Clone ID: LIB3051-029-Q1-K1-B3
cccacgcgtccgcccacgcgtncgttcacgtttccgcccacgcgtccgcgcttctgattgtctctctactcgttttgaagatgtttctcacaaggactgagtatgaccgaggagtcaacaccttttcccccgaaggacgtttgtttcaggttgagtatgcaatcgaagccatcaagctgggatcaactgcgattgggttgaagaccaaagagggtgttgtcctcgcagttgaaaagcgcatcacttcgccgctcctggagcctagtagtgttgagaaaattatggaaattgatgagcacataggttgtgcaatgagtgggttgattgcagatgctcgaacacttgttgagcatgcacgggtggaaactcagaatcataagttctcctatggtgagccgatgact

SEQ ID NO: 24843 - DNA, 446 bp, Glycine max
  Clone ID: LIB3051-047-Q1-K1-C4
gaacaagcaaaattaagcacaaaagcccaaccctctctctcgctgttggtctctcctatttggcattcgcagatcgattacgaagtaatttcactgaatcttattgaagatgtttctcacaaggactgagtatgaccgaggagtcaacaccttttctcctgaaggccgtttatttcaggttgaatatgcaatcgaagccatcaagctgggatcaactgcaattgggttgaagacgaaagagggtgttgtccttgcagttgaaaagcgcatcacttcgccgcttctggagccaagtagtgttgagaaaattatggaaattgatgagcatataagttgtgcaatgaatgggattgaatgctgatgctcgaacacttgttgagcatgcacgggtttgaaactcagaatcattaggtctcatatggtgaaccaatgactgttgagtccac

SEQ ID NO: 24844 - DNA, 433 bp, Glycine max
  unsure (1)..(433): unsure at all n locations
  Clone ID: LIB3051-053-Q1-K2-C11
cccacgcgtccgatccgatccccgatggcggcggcgtcgcggcggctccgggacctgcagtcctcggcggggaacaagatctgcgtggactgctcccagaagaaccctcagtgggcctccgtctcctacggcgtcttcatgtgccttgagtgctccggcaagcaccgcggcctcggcgtccacatctccttcgtccgatccgtcaccatggactcctggtcagacatccagatcaagaaaatggaagccggcggcaacgacaaactcaacgccttcctcgcccagtactccatccccaaagaaactgacatcgtcacgaaatataacaccaacgccgcttctgtgtaccgcaaccggatccaggccatcgctgagggacgtccctggcgcgatccgncggtggtgaaggaaaacctcttccgcccgaaagggg

SEQ ID NO: 24845 - DNA, 418 bp, Glycine max
  unsure (1)..(418): unsure at all n locations
  Clone ID: LIB3051-093-Q1-K1-A3
ggggaacaagatctgcgtggactgctcccagaagaaccctcagtgggcctccgtctcctacggcgtgttcatgtgccttgagtgctccggcaagcaccgcggcctcggcgtccacatctccttcgtccgatccgtcaccatggactcctggtcagacatccagatcaagaaaatggaagccggcggcaacgacaaactcaacgccttcctcgcccagtactccatccccaaagaaactgacatcgtcacgaaatataacaccaacgccgcttctgtgtaccgcaaccggatccaggccatcgctgagggacgtccctggcgcgatccgccggtggtgaaggaaaacctctccgncgganaggggaaaccgccgctgacacaaacgcggaggaacaacgattctggatgggatgatggg

SEQ ID NO: 24846 - DNA, 305 bp, Glycine max
  Clone ID: LIB3051-053-Q1-K2-B7
gtgaaaactgaactatgcaagctggaagatacgctttctgcgttgaggtcttggatgcggtctcagtctccaccgcttgatgcctcagttggtccttctgtagattatcaccagagcgaatatgtgtactcacgagacaagcgccgcgaattcggataccgcttcactggaagtgccggctaggcacttataacacagaatgaagcactgctgaggactgatggacgatgtctattgcatgctgatcaagaacttagtgctcagtggaagcttatgcgtattggtgaagatcctgctgtaaatat

SEQ ID NO: 24847 - DNA, 462 bp, Glycine max
  Clone ID: LIB3051-090-Q1-K1-F4
cggacgcgtgggcggacgcgtgggcttccacaaaggatggtcttgattatcgacatgaacatgcaaataggaccgagttccatgaccagtaccatgtcgataatcaagaccatccttccacaaaggaattcgagcaagaatatcaagagaatgcccatttgtcatggaattgggtcctattcgaatgttcatgaaggacctcacttaatcagtttcagaccacaggctcgaaatgtaccattgcaatcttccatgactgttacagatgaacctggttactatgaggatggagagtttgggataagattggagaatgtgcttattgtcaaagaggctggtacaaatttcaattttggtgatagaggttacttatcttttgaacacattacctgtgcaccatatcagaccaagttgattgacctgaaccttctatgtcctgaggagatagattggctgaactcg

SEQ ID NO: 24848 - DNA, 344 bp, Glycine max
  Clone ID: LIB3051-101-Q1-K1-D5
cccacgcgtccgaggagactgagaaaacagaactatacaaaatggaagatacactttctgcgttgaggtctttgatgctttctcagtctccaccgcttgatgccttagttgttccttctgaagattatcaccagagcgaatatgtgtccgcacgagacaagcgccgcgaattcgtttccggcttcactggaagtgccggcttggcacttataacaaagaatgaagcactgctgtggacggatggacgatattttttgcaggctgagcaagaacttagtgctcagtggaagcttatgcgtattggtgaagatcctgctgtagatatctggatggccgataatttg

SEQ ID NO: 24849 - DNA, 415 bp, Glycine max
  Clone ID: LIB3051-031-Q1-K1-H7
cggacgcgtgggcaagcagcctccaattcgtgccactctcttcaaaatggccgtggcggtctcaaatctccacacagaatcaggtctcaagtccctcgacgacttcctctctgggaaggtctacgtttctggggatcagttcacaaaggacgacatcaaagtgtatggtgctgttttggagaagccaggtgactcttttcccaatgctgccaagtggtacgaggttgtctcatctcagcttgctgcaagcttccccggcaatgctcaaggcgtgagattcagtggcaaagcttctgctccagcggaggctgctcctgcgaaaccggatgcttctgctgctgaagatgatgatgaccttgatctctttggcgatgagactgatgaagacaaaaaggcagcagaggaaagggaggct

SEQ ID NO: 24850 - DNA, 406 bp, Glycine max
  Clone ID: LIB3051-044-Q1-K1-E10
cccacgcgtccgcagctacgatgggtaagggaacggggagtttcggtaagaggaggaacaagacccacaccctctgtgtgaggtgtggccgccgcagcttccacctccagaagagtcgttgctctgcgtgcgcttaccccgctgcgcgcaccaggaaatataactggagcgtgaaggccattaggagaaagaccaccggaactggaaggatgaggtacttgcgtaacgtgcctcgcagattcaagagcggcttcagagagggtaccgaagctgcacccaggaagagaggagctgctgcctctgcctaagctttgaatgaatgacagcaatttttgctgggtcagtgaattataggagttaatgtttctgtgttggtgccaaactctttggaacacattttctttct

SEQ ID NO: 24851 - DNA, 360 bp, Glycine max
  Clone ID: LIB3051-045-Q1-K1-F9
ggaaattccttcttgttgtctgaaggccaaggcttcaatccccgagtcagaggcaaaagtccattccactgttgtggctgggtggttctcagcttctcaaacttgctctgggaaatctgggaaagctgtttatttcaacaacccaatgtggccaggagaagcccattcaatcaaagtagaaaagatcttatacaaggaaaagtcggagtaccaggaggtcttggtttttgagtcatcaacttatgggaaagtgcttgtacttgatggaatagttcaattgactgagaaggatgaatgtgcttaccaggagatgatagctcatcttcccctctgttcaattcagtcccccaaaactgtttt

SEQ ID NO: 24852 - DNA, 424 bp, Glycine max
  Clone ID: LIB3051-023-Q1-K1-C8
gctattatccccagacgccaccgtcgctacaccagaagaagaagaagagtgatggcggagtacgacctaactccgcggatggcgccgaatctcgacaggcaccttgtgttccctctcctggagttcctgcaggagcggcagctctacgacgacgaccacatcctgaaggcgaagatcgaccttctcaacaacaccaacatggttgactacgctatggacatccacaagagcctctaccacaccgaggacgtcccgaacgatatggtcgaccgccgcgccgaggtcgttgcccgccttaagtcgctcgaggaggccgccgcccccctcgtcgccttcctccagaacgaggctgctgtgcatgagctccgaacggacaaacagtacaatctccagatgcttaacgaccgatttcagattggtcctg

SEQ ID NO: 24853 - DNA, 426 bp, Glycine max
  Clone ID: LIB3051-026-Q1-K1-C9
cccacgcgtccgtccacaagagcctctaccacaccgaggacgtcccgaacgatatggtcgaccgccgcgccgaggtcgttgcccgccttaagtcgctcgaggaggccgccgcccccctcgtcgccttcctccagaacgaggctgctgtgcaggagctccgagcggacaagcagtacaatctccagatgctcaacgaccgatatcagattggtcctgcacagatagaagcgttgtaccaatatgccaaattccagtttgagtgtggaaactactctggtgctgctgactatctttatcagtacagagctttgtgcacaaatagtgaaaggagtttgagtgcattgtgggggaagctggcagctgaaattttgatgcaaaacttgggacatcgctcttgaagagctcaaccgcttgaaggaaatcatt

SEQ ID NO: 24854 - DNA, 437 bp, Glycine max
  unsure (1)..(437): unsure at all n locations
  Clone ID: LIB3051-049-Q1-K1-B10
cccacgcgtccgattatccccagacgccaccgtcgcagcaccagaagaagaagaagagtggtggctgagtgcgacctaactccgcggatggcgccgaatctcgacaggcaccttgtgttccctctcctggagttcctgcaggagcggcagctctacgacgactaccacatcctgaaggcgaagatcgaccttctcaacaacaccaacatggttgactacgctatggacatccacaagagcctctaccacaccgaggacgtcccgaacgatatggtcgaccgccgcgccgaggtcgttgcccgccttaagtcgctcgaagaggccggcgcccccctcgtcgccttcctacagaacgaggctgctgtgcaagaactccgagcggacaagcagtacaatctncagatgctcaacgaccgatatcagattggtcctgcaca

SEQ ID NO: 24855 - DNA, 403 bp, Glycine max
  unsure (1)..(403): unsure at all n locations
  Clone ID: LIB3051-109-Q1-K1-C4
nccacgcgtccgtactggacctgccattgtcagtggcattttataagcttgttctctggcaaggtcttgatttgcatgacattctgttcattgatgctgagcttgggaagactttacaagagttcaatgcccttgtttgtcggaaacattatatagaatctattggtggtagctatacagatacaattgttaacttgtattttcatggtgcaccaatcgaagatctttgcttagattttactctccctggttatcctgaatacaccttgaagccaggagatgaaattgttgatatcaacaatttggaggagtatatatccttggtgatcgatgcaactgtcaagactggaatcatgcggcaaataaaagcatttaaagcacggtttaaccaggtttttgatat

SEQ ID NO: 24856 - DNA, 368 bp, Glycine max
  Clone ID: LIB3051-078-Q1-K1-E12
cccactcgtccggtttatggaggcgaataggatgaaagctaattgaagattagcgccagtgttctattggatgtcccacgggactctttgattatgaatgacgagatatttggtcctttacttcccatcctcacggttgataaaatagaagaaagctttgacgtaatcaattcaggatcaaagcctctcgctgcatatatatttacaaataccaagaagcttaatgagcaatttgttatgactatttcacctggcggtttggttgttaatgacactactttacatcttgcagttcatactttaccatttgggggagtcggtgagagtggaatgggtgcataccatgggaaattcacatttgaagcttt

SEQ ID NO: 24857 - DNA, 405 bp, Glycine max
  Clone ID: LIB3051-005-Q1-E1-E6
agtaagctaaagtttgcccccttacacgttttttgtcttcttttttctcccatctttgtttcgagaagcatttgacgaagagaagagacagtgaatcgcggtttcaattcaacccacttcatctcaggtgtttgaagttgagataaaaatgagcggaacagagaaagcaggatcaggaaccaccaaaacccccgccgatttcctcaaatccattcgtgggaggccggttgtcgtcaagctcaattctggtgttgattacagaggtatacttgcttgtctagatggctatatgaatattgcaatggagcagacagaggagtacgtcaatggacaactgaagaacaagtatggtgacgctttcatccgagggaataatgttctatacatcagtacctcaaagaggac

SEQ ID NO: 24858 - DNA, 437 bp, Glycine max
  Clone ID: LIB3051-038-Q1-K1-G12
gggacacgtagcgaaagatcgtgaaatttaagcttacggggttattttttgacatagccacgtgcatgaggggcagttacgggattatagtaaacacgtgtgaagccatcgaagagagtgtgttggaagcgttcaacgaagggttgatggaaggaaccacgccgaaagtgttttgcattggacccgtgatttcttctgctccttgtagaaaggatgataacgggtgtctgagttggttaaactcgcaaccgagtcagagtgttgtgtttttgagttttggaagcatgggaagattctcgaggactcagttgagagagattgctattgggttggagaagagtgaacaaaggtttctgtgggtcgtgaggagcgagttcgaagagggtgagtcggcggagccaccgagtttggaggagttgttaccaggaaggtttttg

SEQ ID NO: 24859 - DNA, 467 bp, Glycine max
  Clone ID: LIB3051-093-Q1-K1-E4
agacattgtacaatgagttggaagtcgttgaaggaatgaagctcgacaggggatacatggctccatatttcataacaaaccagaagaaccagaaatgtgaacttgaggatcctctcattataatccatgaaaagaaaatctcaagcataaatgctatcgttaaagtattagagttagctttgaagagacaaagatctttattgattgtcgccgaggatgtggaaagtgatgcccttgcaactcttattctaaataaacttcgtgctggaatcaaggtatgtgccatcaaagctcctggttttggtgaaaaccgtaaatctggtctccaggatcttgctgttcttacaggaggtcaacttatcaccgaagagcttggtttgaatcttgaaaaagtagacctggacttatttgggctctggcagaagataacaatttctaaagatgacactgtcagtcttgatggagct

SEQ ID NO: 24860 - DNA, 436 bp, Glycine max
  Clone ID: LIB3051-102-Q1-K1-E4
cccacgcgtccggtcagtctcatggagattgaaactagatcccgagcacagacccctgcgtcatctgctgttgcagttaaagcacgtttaaaagatgttagtaatgctttaatgacatccaaagagctacttagaattataaaccgcatgtggggtcatgaagatcgtccttcatctagtatgtctcttatctcagctctgcatactgagctggagagggctcgcctacaggtcaatcaacttatccaggaacagcgctcagatcagaatgagataaattatttgatgaagtgttttgctgaagaaaaggctgcttggaaaaaaaaggaggaagaaattgttgaagctgcaattgaatctgttgctggtgaactcgatgtagagaggaaactcaagagacgattagaaagcttgaacaagaagcttgggagagaac

SEQ ID NO: 24861 - DNA, 364 bp, Glycine max
  Clone ID: LIB3051-060-Q1-K1-D10
ggaaacgcttgtgcaaaaggaaaaccagttgctcatgtctcttgctccaatttttctggaggtgagaagcatgcaagtaggccaaagcagtattcaaattcttctgaacaactatctgctccaataacttcagaattaaatgttcccaaatccttctccagtaacctaaaatccttcagcttgaatgatcttaaagaggccactaagaacttccggcaagaaaatttaattggagagggaaggattcgggcgcgtcttcaaaggatggatcgatgagaacacatatggtcccaccaaaccaggcactggaattgtagtgcccattaaaaacctaaagccagaaagcttccaaggccacaaggaa

SEQ ID NO: 24862 - DNA, 315 bp, Glycine max
  Clone ID: LIB3051-111-Q1-K1-E4
gcgtacctcaaaaggatatttcgtgacctgtttattcgtgaaggattccagtttgattatgtctgtgactggaccattttgaagtatcagcaatcacagctagccactcctccaacacgggccattggtcctagtgctggaaccagttctggaatgccccccgctgttactaatgctgataggcatacaggaggggaagaaggtagacctcctgctttggtttcagtggattcctcgaggcgcagaatgtcagggcccattttaaatactttatcaagtgccaatgccttgggtcaatcaagtggatcatctagg

SEQ ID NO: 24863 - DNA, 404 bp, Glycine max
  unsure (1)..(404): unsure at all n locations
  Clone ID: LIB3051-115-Q1-K1-E4
gtcctatcactttccacgtaagtctccaaaaacagaaccactcattccaatggaaattgacggcaacgttctcgcggcgaagtcgctggttcacttcggcgtgcagcacatgttcggcgtcgtggggattccggtgacctcgctggccaaccgcgccgtctcgctcggcgtgagattcatcgccttccacaacgagcagtccgccggctatgccgnctccgcctacggctacctcacggngcgccccggcgtcttcctcaccgtctccggccctggctgcgtccacggcctcgccggcctctccaacgccttcgtcaacacctggcccaccgtcatgatctccggctcctgcgaccaaaacgacgtctgccgcggcgattttcaagaactcaaccagatcgaag

SEQ ID NO: 24864 - DNA, 335 bp, Glycine max
  unsure (1)..(335): unsure at all n locations
  Clone ID: LIB3051-117-Q1-K1-E4
gttgaagatatcctgtcaagaaacaagccttcagctaatgtcccaacaataccacanacagttgtaatgcctccaaataacaagtcagcattattcatatggtaaatgctgtatcctgcctttgggccccagtatgagtaagctccaatgacaaaattgtatgctatgtaccctagaacatttataacatacacttggtcatgcaagagctccttcatatctttggagaagatggtgaactgattccacaatttggatgttgacttggatcctttgagcaaggcttgatcttcagcaagcgtgtcatcatctctatgggtgaactactgattttt

SEQ ID NO: 24865 - DNA, 415 bp, Glycine max
  Clone ID: LIB3051-069-Q1-K1-D2
cggacgcgtgggcggacgcgtgggtggctgctctttggcgctgtcgccgttcttagccctagtctgtctgtctctcgacgcctctctgcaagttagctgggacaagccaccaaggaaaacattttactgtgaagaacaatgaggaagcttaagtttcatgaaaagaagcttttgaagaaggttaattttttggaatggaagacggaagggggtcacagagagaacctcattatgcaacgctaccatgttactggacgggacgattacaaaaaatattcaggtttatgccatatggttcagaagttagtaaacatattgaaacagatggacccaaaggatccctttcgggttgatatgactgataagctattggagaaactctacaacatgggtgtgattccaaccaggcaaagca

SEQ ID NO: 24866 - DNA, 375 bp, Glycine max
  Clone ID: LIB3051-064-Q1-K1-F3
tggaaatgtttccaggtggtacaagcacattgatgctttgttgagaatctctggtgttactggcgagggatctggtgttattgttgagggatctctagttgcagagcctgttgcaactccccctgctgcagacacaaaggctgctgttgctgaggatgacgatgatgatgatgtggatttgttcggtgaagagacagaagaagagaagaaggcagcagaggaacgggcagctgcagtgaaggcatctacaaaaaaaaaagagtctgggaaatcatctgttctgttggatgtgaaaccatgggacgatgaaactgacatgaagaagctcgaagaagcagtgagatctgttcagatggaaaggttgctttggggtgc

SEQ ID NO: 24867 - DNA, 448 bp, Glycine max
  Clone ID: LIB3051-102-Q1-K1-D10
cttaaaaatgcacaatctgataccaattttatatgtaaatgcagccaaacaatggaggaggatattgaccaactggttacgctggcagagaagttatctgagcttatgagtgaaaatcttggtttggagaaaaactacattaaggaggcattttctggaacaaatggacctgctatgggaacaaaagtggccaagtaccctcaatgtccacaccctgaactggttagaggacttagagaacacacagatgctggtggcatcatcctattgctccaagatgaccaagtgcctggcctagaattcttcaaagatggcaagtgggtggagattccaccctccaagaacaatgccatttttgtgaacacaggtgaccaagtagaagtgttgagcaatggcttttataaaagtgttgtgcacagggtcatgcctgacaaaaacggaagtagac

SEQ ID NO: 24868 - DNA, 432 bp, Glycine max
  unsure (1)..(432): unsure at all n locations
  Clone ID: LIB3051-025-Q1-K1-H3
cccacgcgtncgnccacgcgtncggtcagggctgaaggaattgctgaagaaagggttaggtttaggcgacatggcgttcaacgccggcggcggagccataacctggttccccggccacatggccgccgctacacgtgccatccgccaccgcctcaaactcgctgacctcgtcatcgaagttcgcgacgctcgcattcccctctcctccgccaacgccgacctccagccacacctctccgctaaacgacgcgtcgtcgcactcaataaaaaagacctcgccaaccctaacatcatgcataaatggacgcattattttgagacgtgtaatcagaattgcgttgcgatcaacgcgcacagcnagagttccgtgaagaagcttctggacgtggtggagttcaagttgaaggaagtgatttgcaaggagccgacgct

SEQ ID NO: 24869 - DNA, 356 bp, Glycine max
  Clone ID: LIB3051-113-Q1-K1-D2
cggacgcgtggggccgctgagctacaggtttattctcacgtttctcggaatgtggaaagagatgcaagaatgttacaaatgccaatatcagcaaattgttgaagccaaaactttagatgccttatcgttaaacacaaagcctggcaatgctcatattgatgcaacaataaaactcaaatctgaggtacagaaatggaatttgagcttcttagattggattcacgcccagaggtcccatgtgaaagccttgaatggttggctggtaagatgtctattatacgaacccgtagaagtacccgatgattcaacttcctttctacctagcatgattagggcaccacctgtgtatgtgatct

SEQ ID NO: 24870 - DNA, 413 bp, Glycine max
  Clone ID: LIB3051-116-Q1-K1-D10
acgagcgtgaattacaaccacgtacatttccacgaccagaggagcatgaaggagaacagtggaaaggaaggcatcgtcatgaagacccggaagagagggcgagaatgagactgagggaagcagaaagaatagagagggaaagggaggaacagagggtgagggaggaggaagagaaactacggcgacgtgagaagaaggaacaacgggaagagaaagatgaagaaggtcaaggttcggaagactcacactcaaaaagacagaacaacccttttcacttcagctgtaacaagttccaaacgctcttcaagaaccaacatgtgtacattcgcgttcttcagagattcgaccaacgcttcctacaacttgagaacctttgagactaccgtgttgtatagctcatggctaaacccaac

SEQ ID NO: 24871 - DNA, 380 bp, Glycine max
  Clone ID: LIB3051-032-Q1-K1-D10
cccacgcgtccgggtcagatgtcttggatcctgcacttcgccggccaggaagatttgatcgtgtagttatggtagaagcacctgatagaattggaagagaagccatcctaaaagttcatgtttccaagaaggaacttcctttagccaaggatgttgacctcagtggcattgcttgtatgaccactggttttactggagcagatcttgcaaacctagtaaatgaggctgctttactggctgggagacaaaataaagttgtggtggagaaacttgatttcatccaagctgtagaaagatctatagctggcatagagaagaagactgccaagttgcgaggaaatgagaaggcttgtattgcacgacatgaggcctgtcatgct

SEQ ID NO: 24872 - DNA, 438 bp, Glycine max
  Clone ID: LIB3051-105-Q1-K1-E5
cttctctctctctcggttgtgagtgcagatttcttgcgcggtttatcatgggggatagtgagtattcgttttctgtcaccacatttagcccttctggaaagcttgttcagattgagcatgctttgacggctgtcgggtctggacaaacgtctttgggaattaaagctgcaaatggagttgtcattgctaccgagaagaaattgccatctatattggttgatgaagcatcagtccagaaaattcagttattaacaccaaatataggtgtcgtatatagtggcatgggtcctgattttcgagttttggttcggaaaagcaggaaacaagccgagcagtatcaccgtttatataaagaaccaattcctgtcactcaacttgtcagggaaagtgccgccgtaatgcaggaatttactcaatctggtgggtgtaggccctttg

SEQ ID NO: 24873 - DNA, 414 bp, Glycine max
  Clone ID: LIB3051-062-Q1-K1-E12
cccacgcgtccgttcaacttcagcagccgcgcctctaacttgtagcagcgatacctcgtctcttatcactaaaaaatgaccaagagaaccaagaaggccggtattgttggaaaatacggcacccgatatggtgctagtttaaggaagcaaatcaagaagatggaagttagtcagcacagtaaattcttttgtgagttctgtggaaagtacgctgttaagaggaaggccgtgggtatttggggctgcaaagattgtggaaaagtgaaggctggaggtgcttacacattgaatactgcgagtgctgtcactgtccggagcaccattcggaggctgagagagcagactgagagttgaaagcagtttacacttttcatttgtttccaaagcttattttaaaattatcatacaattttg

SEQ ID NO: 24874 - DNA, 408 bp, Glycine max
  Clone ID: LIB3051-031-Q1-K1-F5
cccacgcgtccgtttccgcttcatgtagtttctgcgttcccaactccttctcccgacggtaccctgactcgcccgagtccacactcaaacccgcgctcatggcaaataacccttccgacgctcccgccgatgacttccttgaacaaatcctcggcctcccgaacttcgcttccgccgactccggcctttccgctgccgatgtcggcctcgccggtgcggccactcaggctccgatgatgctgcaactcaactccgccgacgccaacgctcacctcgccggcgccgccttccacgcgcccgtgtatcaactagggctgagcttggaccaaggcaaaagtgggttcatgaagcccgaggaagcctccgctagcggaaagcgctttcgcgacgacgtccttgataatagag

SEQ ID NO: 24875 - DNA, 379 bp, Glycine max
  Clone ID: LIB3051-001-Q1-E1-B11
agggagtttcttattggatgtttgctaattatctcattcttctggctctgcttcttcttcttgtagttgaattaagagatggggttgtctttcaccaagctttttagccggctctttgccaagaaagagatgcgtattctcatggtaggtcttgatgctgctggtaagactaccatcttgtacaagctcaagctgggagaaattgtcacaaccattcccacaattggatttaatgtggagactgtggaatataagaatattagctttactgtatgggatgtgggtggccaagataagattcgtcctttatggagacactacttccaaaacactcaggggcttatccttgttgtggataacaatgatcgtgaccgtgttg

SEQ ID NO: 24876 - DNA, 410 bp, Glycine max
  Clone ID: LIB3051-030-Q1-K1-E12
ctccttcgcactcctctttctctccgtgttgccgttcagtgacagcgagtgaaagaatagaagagaagagaacataaccgaaagagaagaagaagaagaaagctagggtttttgcaattgcaacgatggcgcatcaaggagaaccggcgaagctgcgatggggagagctggaggaggacgactgagaggatttggacttcctcctgccgccgcggcaggtgatagggcccgacgagaacgggataaagaaggtgatcgagtacaagttcgacgaggacgggaacaaggtaaagatcaccaccaccacacgcacgcgcaaactcgccaacgcgcgtctcagcaaacgcgccatcgagcgccgctcctggcccaagttcggcgacgccgtacacgaagacgttggcgcccgt

SEQ ID NO: 24877 - DNA, 433 bp, Glycine max
  Clone ID: LIB3051-065-Q1-K1-F2
atgcagagtccctcacaatggcggaatcgtgccttctatccctgccttccctcttctacgccgaaaacaatacccgggtctctctcaattcccaccaagcccctcaacctccatcttccatgctccaactcttcgctctttcccctcaccaccaaaacaacgcgccactcttctctcctcacattcgtggctcagacatcggattgggccaaagaagaagaggaagaagaaacctcgtgggagaaccaaggcgacaccgcgtggggaactgaagaaggtggccacgaagaagggggtttcgctgaaaaagctgaggaagataagatcttcgttgggaacttgcctttcgacatcgacagcgagaatttggcgtcgctcttcgggcaagctggcaccgttgaggttgctgaggttatttataataaggccactg

SEQ ID NO: 24878 - DNA, 244 bp, Glycine max
  Clone ID: LIB3051-003-Q1-E1-H8
aaactttgaagggacacctttgtttcccagtgatcctgccaagaaagagttcggtgagcaattgatatcccatgttgatacattcagcaaagacctgttcgtttcattgaaaggggatgctgtacagcaagccagtcacgcttttgaatacgtggagaatgctcttggtaaatttgatgatgggccattcttgcttgggcaattcagtttggtggagattgcttatattccatttgttgaaaga

SEQ ID NO: 24879 - DNA, 424 bp, Glycine max
  unsure (1)..(424): unsure at all n locations
  Clone ID: LIB3051-005-Q1-E1-G5
acgtagcaaatcttaaaaatattcagtgaagatcaacctcaatggcatctcttggcgtgcgaccagttcttccccctccattaacttccatctccgacccacctcctcttttcgatggcaccaccaggttgtacatcagttattcttgcccctatgcacaacgtgtgtggatcgctaggaactacaaggggctacaagataagatcaatttggtccctattaaccttcaagacaggccagcttggtataaggagaaagtctaccctgaaaataaggtgccatccttggagcacaatggcaaggtgttgggagaaagtcttgatttgatcaaatatgtagatgcaaactttgaagggacacctttgtttcccagtgatcctgccaaganagagttcggtgagcaattgatatcccatgttgatac

SEQ ID NO: 24880 - DNA, 433 bp, Glycine max
  Clone ID: LIB3051-020-Q1-E1-A8
aatccatccaaaccttaaaaagattcagtgaagaacaacgttaatggcatctcttggtgtgcaagcagttcatcctcctccattaacatccacctccgacccacctcctctttttgatggcaccaccaggttgtacatcagttattcttgcccctatgcacaacgtgtatggatcgctcggaacttcaagggactaaaagacaagatcaatttggtccctataaaccttcaagacaggccagcttggtataaggagaaagtctaccctgaaaataaggtgccatccttggagcacaatggcaaggtgtttggagaaagtcctgatttgattcaataagttaaatgaaaacttttgaaaggacacctttgtttcccagagattctgccaagaaagagttcggagagcaattgatatcccatgttgatacattca

SEQ ID NO: 24881 - DNA, 264 bp, Glycine max
  Clone ID: LIB3051-028-Q1-K1-D6
gtccatccaaaccttaaaaagattcagtgtagaacaacgttaatggcatctcttggtgtgcaagcagttcatcctgctccattaacatccacctccgacccacctactctttttgatggcaccaccaggttgtacatcagttattcttgcccctatgcacaacgtgtatggatcgctcggaacttcaagggactaaaagacaagatcaatttggtccctataaaccttcaagacaggccagctttggataaggagaaagtctac

SEQ ID NO: 24882 - DNA, 407 bp, Glycine max
  unsure (1)..(407): unsure at all n locations
  Clone ID: LIB3051-040-Q1-K1-G12
attcagtgaagatcaacctcaatggcatctcttggcgtgcgaccagttcttccccctgcattaacttccatctccgacccacctcctcttttcgatggcaccaccaggttgtacatcagttattcttgcccctatgcacaacgtgtgtggatcgctaggaactacaaggggctacaagataagatcaatttggtccctattaaccttcaagacaggccagcttggtataaggagaaagtctaccctgaaaataaggtgccatccttggagcacaatggcaaggtgttgggagaaagtcttgatttgatcaaatatgtagatgcaaactttgaagggacacctttgtttcccagtgatcctgccaagaaaagagtcggtgagcaattgatatnccatgttgatacatt

SEQ ID NO: 24883 - DNA, 284 bp, Glycine max
  Clone ID: LIB3051-073-Q1-K1-E12
aaatcttaaaaatattcagtgaagatcaacttcaatggcatctcttggcgtgcgagcagttgttccccctccattaacgttccagtctccgacccacctcctcttttcgatggcaccaccaggttgtacatcagttattcttgcccctatgcacaacgtgtgtggatcgctaggaactacaaggggctacaagataagatcaatttggtccctattaaccttcaagacaggccagcttggtataaggagaaagtctaccctgaaaataaagtgccatccttgga

SEQ ID NO: 24884 - DNA, 366 bp, Glycine max
  Clone ID: LIB3051-095-Q1-K1-D8
cccacgcgtccgcttaaaaagattcagtgaagaacaacgttaatggcatctcttggtgtgcgggcagttcatgcggctgcattaacatccacctccgacccacctcctctttttgatggcaccaccaggttgtacatcagttattcttgcccctatgcacaacgtgtatggatcgctcggaacttcaagggactaaaagacaagatcaatttggtccctataaaccttcaagacaggccagcttggtataaggagaaagtctaccctgaaaataaggtgccatccttggagcacaatggcaaggtgttgggagaaagtcttgatttgatcaaatatgtaaatgaaaactttgaaaggacacctttg

SEQ ID NO: 24885 - DNA, 337 bp, Glycine max
  Clone ID: LIB3051-097-Q1-K1-C9
gaagaacaacgttaatggcaggtcttggtgtgcatgcagatcattctgctccattaacatccacctccgacccaccttctatttttgatggcaccaccaggttgtacatcagttattcttgcccctatgcacaacgtgtatggatcgctcggaacttcaagggactaaaagacaagatcaattaggtccctataaaccttcaagacaggccagcttggtataaggagaaagtctacccttaaaataatgtgccatccttggagcacaatggcaatgtgttggaagaaagatttgatttgatcaaatatgtagatgaaaactttgaatggacacctat

SEQ ID NO: 24886 - DNA, 441 bp, Glycine max
  Clone ID: LIB3051-105-Q1-K1-D11
gtccatccaaatcttaaaaatattcagtgaagatcaacctcaatggcatctcttggcgtgcgaccagttcttccgcctccattaacttccatctccgacccaacctcttttttccatggcaccaccaaggtgtacatcaattattcttgcccctatgcacaacgtgtgtggatccgctggaactacaaggagctacaagataagatcaatttggtccctattaaccttcaagacaggccagcttggtataaggagaaagtctaccctgaaaataaggtgccatccttggagcacaatggcaaggtgttgggagaaagtcttgatttgatcaaatatgtagatgcaaactttgaagggacacctttgtttcccagtgatcctgccaagaaagagttcggtgagcaattgatatcccatgttgatacattcagcaaagacctg

SEQ ID NO: 24887 - DNA, 422 bp, Glycine max
  unsure (1)..(422): unsure at all n locations
  Clone ID: LIB3051-034-Q1-K1-G7
aaaaccctacccttctcagttgcagagccatgtctcactccgacagcagcaagaagaagaagcagcagcagcgtagcaagcacgaaggaggaggaggagaggaagaatcgaaagacgaaggcgggttgatgatcaagccgcagagcttcactcccccaatcgacacctcccaatggcccatcctcctcaaaaactatgagcgtctcaatgtccgcaccggccactacacccccatccnctccggctactcccccttgaagcgcccnctcgccgagtacctcaaatacggcgtcctcaacctcgacaagcccgccaacccttcctcccacgaggtcgtcgcctggatcaagcgcctnctccgcgtcgaaaagaccggccactccggcaccctcgaccccaaggtcaccggcaacctcatcgtc

SEQ ID NO: 24888 - DNA, 465 bp, Glycine max
  Clone ID: LIB3051-075-Q1-K1-A7
ccgactcaagcccccatgttgaacggataattagttgcaattgcaaaagattgtgattgttgggattgcagagagaagggtggttagtgttagaatagattgagtgtggatggggaaagaggaggaggagatgaggggtgagattgaggaacgactgataaatgaagagtacaagatatggaagaagaacagtcctttcttgtatgatctggtcattatgcatgccctcgagtggccttctctcactgtggagtggcttcctgaccgccacgaaccacctggcaaagactattccctccagaaggtcatcttgggcacccacacttctgagaatgagcccaattacctcatgctggcccaagtccaactccctcttgatgatgctgagaatgatgcccgccactatgacgatgatcgccccgacattggtggctttggctgcgccaatggcaggttcagatcatt

SEQ ID NO: 24889 - DNA, 362 bp, Glycine max
  Clone ID: LIB3051-042-Q1-K1-B2
gactaagccttcgaatctctctgaaacttttctcttctctttgattcttctctatcagttaaacatgagaatgagccgttcacaggatccacacccttcccgatctttcttcccttttggaaatccttttcggatgatatcacctaaaggctctcgcatgtctccacaacttcttgcagtgttgcaagcttttgaggcaacattggcagagaggctgaaaaatcttatgcctaaaagcaaggatgaaatcctcaccttgtcttggatgactttagctatgaagtcactttgtgaaagtcacaatgacatacggtcccttatgactgcccttgaacttcctgtgagtgattgggaggacaaat

SEQ ID NO: 24890 - DNA, 437 bp, Glycine max
  unsure (1)..(437): unsure at all n locations
  Clone ID: LIB3051-106-Q1-K1-C12
cgaagccttcgaatctctctgaaacttttctcttctctttgattcttctctatcagttaggcgttagaatgagccgttcacaggatccacacccttcccgatctttcttcccttttggaaatccttttcggatgatatcacctaaaggctctcgcatgtctccacaacttcttgcagtgttgcaagcttttgaggcaacattgtcagagaggctgaaaaatcttatgcctaaaagcaaggatgaaatcctcaccttgtcttggatgactttagctatgaagtcactttgtgaaagtcacaatgacatacggacccttatgactgcccttgagcttcctgtgagtgattgngaggacaaatggattgatgtgtacttggacataagttcaaagttgctagacatttgcaatgcattcagctctgagctttcacgtctg

SEQ ID NO: 24891 - DNA, 401 bp, Glycine max
  unsure (1)..(401): unsure at all n locations
  Clone ID: LIB3051-037-Q1-K1-C3
tcgcaacaatggcttatgagccttaaccaggaatctgccttctaaccttaatcttcttatcgggcttgagcattattgcgcatgcaattggttcttaaaacgaaaccttcaaatttgaaaactcaggtgaactttgaccctacatcgttgagtaccgggcaaattaccgaatggttagcattttcaacttttcattcccaggtggtttcttccacaacaacccaaattgctttaattttacctttgctggtagggctccaaccttggtacaagctatttcgttgggtttgggaggccaatagggccaacccagttggagaaaatgccactttttcacttggcactgatgggaaccttgtgttggcagatgctgatggcagaattgcattgcanactaacac

SEQ ID NO: 24892 - DNA, 411 bp, Glycine max
  Clone ID: LIB3051-051-Q1-K1-D4
attttatttacaacaacaatggcttctgtgcctcaaccaaaaatctcccttctaaccgtatgcttcttctcttccttcaccatcattgcgcatgcaattgttcctcaaaacgaaaccttcaaatttgagaactcaagtgaacttggaccctacatcgttgagtacggtgcagattacagaatgataagcatcttcaactctccattccaagttggtttctacaacaccaccccaaatgccttcactctagctttgcgtgtagggctccaacgctcggagcagctatttcgttgggtttgggaggccaacagggccaacccagttggagaaaatgccactttttcacttggcactgatgggaaccttgtgttggcagatgctgatggcagaattgcatggcaaactaacact

SEQ ID NO: 24893 - DNA, 351 bp, Glycine max
  Clone ID: LIB3051-070-Q1-K1-G7
aacaatggcttctgtgcctcatccaaaaatctcccttctaaccttattcttggtctctggcttcaccatcattgcgcatgcaattgttcctcaaaacgaaaccttcaaatttgagaactcatgtgaacttggaccctacatcgttgagtacggtgcagattacagaatgataagcatcttcaactctccattccaagttggtttctacaacaccaccccaaatgccttgactctagctttgcgtgtatggctccaacgctcggagcagctatttcgttgggttttgggaggccaacagggccaacccagttggagaaaatgccactttttcacttggcactgattggaacc

SEQ ID NO: 24894 - DNA, 357 bp, Glycine max
  Clone ID: LIB3051-042-Q1-K1-A8
ctctcgcgtccgactcgctgcacgctgggtatgattccgacgaggaggtttatgctgctgccaaagctgtggatgctggtatgattgagtatgattctgatgataaccctattgttattgacaagaagaaaattgaacccattcctgctctcgatcactcttccattgattacgagcctttcaataaggatttttatgaggagacaccttcaatatcaggtatgagtgagcaggatgtaagtgaatacagaaagagtttggctattcgtgtatcgggttttgatgtttccaagccaataaagacatttgaggactgtgggttttcttcgcagattatgaatgctattaaaaaaacaa

SEQ ID NO: 24895 - DNA, 428 bp, Glycine max
  Clone ID: LIB3051-096-Q1-K1-E8
taagagagtggaaggagttgttgccatgtatcagcactttgtgcttgtacatggcataggtggaggaagttggtgctggtacaaaatccggtgccttatggagaattcaggctgcaaggtctgatgcatagacctacaaagtgctggaattgatcaatctgatgctgattccgagctatctttagatgattacaataaaccacttatggatttcatgtctgatttgactgagaacgaacaggttatattggtggtgcacagcgctggagggttgagcattactcatgcctgtcacaagtttgcaaacatgattcgtttaactgcttatgcggcagcaactatgctcaagttcagattcctgaccgatcaagatcttaaagatcgtgtgccagatttatccgagtatggggatgtgtatgaactgtgat

SEQ ID NO: 24896 - DNA, 441 bp, Glycine max
  Clone ID: LIB3051-045-Q1-K1-D6
acgtacatttggggcactgaagcaaaagggccatcgccatcaccttacggcgcggcccttggggctcttctccaagctggtttttgcatggccatgtatttaaacctcgtgcctcattttcctttgtccaaatttactgatcctacctaccatgaatggtgtttctggaaaaaattaagttaccagtatatgtctggctttactgcacgctggaagtattatttcatctggtcaatttcagaagcttctattatcatctctggcctggggttcagtggctggactgattcgtccccacctaagcctcgctgggaccgggccaaaaatgttgatataattggtgttgagtttgcaaagagtgcagttactattccagctgtgtggaatattcaagtcagcacctggcttcgtcattatgtttacgaaaggcttattcagact

SEQ ID NO: 24897 - DNA, 393 bp, Glycine max
  Clone ID: LIB3051-117-Q1-K1-E8
gagacagatgcgatatgaagtcagtcactggaaggaaaaggagattaatgggaccgagaggagattgcttggaggttgtccattaactccaaaggaaacgtccctattacttaaagcactgggttttccatcacacaccacgatttttctggtagctggaaaagcatattgaagaagaagtatgaaatatcttgaggatgatttccccaacattttctctcattcctctctgtcctcttgaaaaaaattgaatcctttcaagaatcatcagaacatgttggctggtttaaactatgttgttgcccttaaaaatgatgtatttctctacacttatgatggaaatatggcaaaggccgtacaatgtcataagcgctttgaagacttcaagaaaac

SEQ ID NO: 24898 - DNA, 429 bp, Glycine max
  unsure (1)..(429): unsure at all n locations
  Clone ID: LIB3051-065-Q1-K1-D6
tcttcatttcattaaactacattttttggtacaacatgaaacgttttgtgttttctctagcatgggtttttgctcttgtgctagcttcttcgttggctcatgctgcggttgtggaacacacttttaatgtggaggacattactgtgcagcgtttgtgtcgtcaacaattgatcactgccgttaatggaaccctaccaggaccaacaattaacgctcgagagggtgatactattgtcgtccacgtattcaacaagtcaccctataatcttactcttcattggcacggtattattcaatttttaactccttggtcagacggtcctgaatttgtaactcaatgcccaataccttccggtagcagatacacatacaaatttaacctaacgggacangaagggactcnttggtggcatgcacactcatcatttc

SEQ ID NO: 24899 - DNA, 424 bp, Glycine max
  Clone ID: LIB3051-008-Q1-E1-F2
accacgcgtccggcaatttttgtagtttctcttacttacctgtgtctatggagaagaagcaagaaaaagggaaagagattaccacctggtccaaaagggttgccaattttgggaaaccttcacaagttggggtcaaatcctcatcgtgatctgcatgaactagcccagaaatatggacctgtcatgtacttgcgcttaagatttgtgccagccataattgtttcttcaccccaagcagctgaactgttcctcaagacccatgatcttgtctttgctggtagaccacctcatgaagctgcaaagtatatggcttgggagcagaagaacttggcttttggtgaatatggttcttactggcgcaacgtgcgcaagatgtgcacattggaattgctaagccaaaccaaaattaactccttcagaacca

SEQ ID NO: 24900 - DNA, 352 bp, Glycine max
  Clone ID: LIB3051-075-Q1-K1-D10
atcttttacgtgcccatcaaacaaataagctctccactctatttcagtcaccaatcaccaatgagtccttctgtcactaacgtcaaaatcttctcttctctcgtcctagacggattcttcaacgctctcaccagacgcgggtacgcggtggcatcacaaagcgcaacaaaggaaggagtgggctttatgagcggcaagatggcaccaaagtcaggggaagacaacaaaggggtgtctacgtacaaggtttcgtgggtgccagatcctgtcactggttactacaaacccgagaacatcaacgagattgaccctgcagaattgcgcgcgatgcttctcggcaaaaaaatcgaca

SEQ ID NO: 24901 - DNA, 434 bp, Glycine max
  unsure (1)..(434): unsure at all n locations
  Clone ID: LIB3051-020-Q1-E1-F2
attgctgaaagttaaaattaagaaggctaccaaaaaatccgggaaaaacttgggaaggtccataaaattaggttgcattgaaaacacgggaaatcataagcgcattacaccattattgaggttttacacttccaaaagtgaggaggaacttaaaagcctagatgattatgttgaaaacatgggagaaaaccaaaaggctatcttttacctagcaactgacagcttgaagagtgcaaagactgctccatttttggagaaattggttcaaaaagatattgaggttctttatttggttgaacctattgatgaggttgccattcagaacctacagacctacaaagaaaagaaatttgttgatatcagcaaggaagatttggaattangtgatgaggatgaggtcaaagagagggaaaacaagcaagaatacaacctac

SEQ ID NO: 24902 - DNA, 391 bp, Glycine max
  Clone ID: LIB3051-058-Q1-K2-G4
gtaaccctggacggaggtgaaacgtggcaagtgtgcacactggactgtccggagaagccgaacaaatatggaaagtactggtgttggtgtttttggtctgtggaggttgaggttttggacctgctcggagccagggagattgcggtgcgtgcttgggacgaggccctcaacacccaacctgaaaagctcatttggaatgttatgggcatgatgaacaactgctggttcagagtgaaaaccaatgtgtgcaggccccacaagggtgagataggtatagtgtttgaacaccccacccaaccaggcaaccaatccggcggatggatggcaaaagaaaaacacctagagaaatcatctgagtccaacccaaccctcaagaagagtgtcttcttcc

SEQ ID NO: 24903 - DNA, 391 bp, Glycine max
  Clone ID: LIB3051-029-Q1-K1-F10
attttgtgggaatgtggagttatgctggctcactgaacaggtcgttttctctgaccgttataaagtttctcaatatagtcgttgtacttccccgctatcttgatcgtgatgctgaggctgttcgggaagacaatctgctgaagcttgaagttgctgagctgaaatccaagttcattgaaagggcccaggcactaatacatggagatctacacactggttctgtgatggttactcgtgaatcaactcaagttattgatccagaatttgcattttatggaccaatgggttttgatattggagcattcttgggaaacttgattttggctttctttgctcaatatgggcatgctgatcaagcaaatgatcgaagattctataggaatggattctt

SEQ ID NO: 24904 - DNA, 453 bp, Glycine max
  Clone ID: LIB3051-087-Q1-K1-D6
cccacgcgtccgcccacgcgtccggcaagatatcaaagggcaataaatgtgactgaactgcagcatgaccttgagttactgccgggtggtgatcttactgaaattggtgaaagaggggtaaacatcagcggtggccaaaagcagagagtatccatggctagagctgtctactccaattctgatgtgtacatctttgatgatcccctaagtgctctggatgcgcatgtggctagacaggtttttgataaatgcatcaagggagatttgagagggaagacccgagttcttgtcacaaatcagctgcattttctttcgcaggttaatagaatcattttggtccatgaaggtatggtgaaggaggagggaacttttgaggaactctctaaccatggaccgctgtttcaaaagcttatggaaaatgcgggaaagatggaagagtatgaagaagaagaa

SEQ ID NO: 24905 - DNA, 382 bp, Glycine max
  Clone ID: LIB3051-009-Q1-E1-A8
aaaaataagacattgtttggtttggttacttgctcgaatttcctcgaatcgcttaatttgtatttgattagttaaaccgcaacgcggaatctcttttctcgaactggctaactctcaggcaagtggttcggacgctgattccagcaacaagcggctggtgctcgcactgtatgacgccctaaactccggcgactccgacgccgtcgtcaagatcgtcgccgccgacctcgagtggtggttccatggtccgccctcacaccagtttttgatgcgcatgctcaccggcgactccgctgccgacaactccttccgcttccttccgcagtccatcgccgccttcggctccaccgtcatcgtcgagggctgcgacaccgcccgcaac

SEQ ID NO: 24906 - DNA, 393 bp, Glycine max
  Clone ID: LIB3051-023-Q1-K1-C11
tcctcgaatcgcttaatttgtatttgattagtgggaccgcaacgcggaatctcttttctcgaactggctaactctcaggcaagtggttcggacgctgattccagcaacaagcggctggtgctcgcactgtatgacgccctaaactccggcgactccgacgccgtcgtcaagatcgtcgccgccgacctcgagtggtggttccatggtccgccctcacaccagtttttgatgcgcatgctcaccggcgactccgctgccgacaactccttccgcttgcttccgcagtccatcgccgccttcggctccaccgtcatcgtcgagggctgcgacaccgtccgcaacattgcctgggtccacgcctgcacccttactggtgggataattactcagatc

SEQ ID NO: 24907 - DNA, 421 bp, Glycine max
  unsure (1)..(421): unsure at all n locations
  Clone ID: LIB3051-050-Q1-K1-G1
caaaaataagacattgtttggtttggttacttgctcgaatttcctcgaatcgcttaatttgtatttgattagttaaaccgcaacgcggaatctcttttctcgaactggctaactctcaggcaagtggttcggacgctgattccagcaacaagcggctggtgctcgcactgtatgacgccctaaactccggcgactccgacgccgtcgtcaagatcgtcgccgccgacctcgagtggtggttccatggtccgccctcacaccagtttttgatgcgcatgctcaccggcgactccgctgccgacaactccttccgcttccttccgcagtccatcgccgncttcggctccaccgtcatcgtcgagggcttgcgacaccgccgcaacattgcctgggtccacgcctgcaccgtcacggatgggat

SEQ ID NO: 24908 - DNA, 429 bp, Glycine max
  Clone ID: LIB3051-065-Q1-K1-G1
gtttggtttggttacttgctcgaatttcctcgaatcgcttaatttgtatttgattagttaaaccgcaacgcgggatctcttttctcgaactggctaactctcaggcaagtggttcggacgctgattccagcaacaagcggctggtgctcgcactgtatgacgccctaaactccggcgactccgacgccgtcgtcaagatcgtcgccgccgacctcgagtggtggttccatggtccgccctcacaccagtttttgatgcgcatgctcaccggcgactccgctgccgacaactccttccgcttccttccgcagtccatcgccgccttcggctccaccgtcatcgtcgagggctgcgaacaccgccgcaacattgcctgggtccacgcctgcaccgtcacggatgggataattactcagatcagagagtact

SEQ ID NO: 24909 - DNA, 254 bp, Glycine max
  unsure (1)..(254): unsure at all n locations
  Clone ID: LIB3051-107-Q1-K1-H1
ctcgaatttcctcgaatcgcttaatttgtatttgattagttaaaccgcaacgcggaatctgggttctcgaactggctaactctcaggcaagtggttcggacgctgattccagcaacaagcggctggtgctcgcactgtatgacgccctaaactccggcgactccgacgccgtcgtcaagatcgtcgccgccgacctcgagtggtggttccatggntccgcctcacaccagtttttgatgcgcatgctcaccggc

SEQ ID NO: 24910 - DNA, 433 bp, Glycine max
  unsure (1)..(433): unsure at all n locations
  Clone ID: LIB3051-113-Q1-K1-E10
aagacattgtttggtttggttacttgctcgaatttcctcgaatcgcttaatttgtattggattagttaaaccgcaacgcggaatctcttttctcgaactggctaactctcaggcaagtggttcggacgctgattccagcaacaagcggctggtgctcgcactgtatgacgccctaaactccggcgactccgacgccgtcgtcaagatcgtcgccgccgacctcgagtggtggttccatggtccgccctcacaccagtttttgatgcgcatgctcaccggcgactccgctgccgacaactccttccgcttccttccgcagtccatcgccgccttcggctccaccgtcatcgtcgagggctgcgacaccgnccgcaacattgcctgggtccacgcctgcaccgtcacggatgggataattactcagatcagagag

SEQ ID NO: 24911 - DNA, 460 bp, Glycine max
  unsure (1)..(460): unsure at all n locations
  Clone ID: LIB3051-090-Q1-K1-D4
attgaccatatcaaggcaggattgtctgtgttggcaaaatatagaaggcctatagttgtgcatgctgagattcaacaagattttgaaaatcatttggagcttaatgaggataaccttgatccacgtgcttacttgacctatctcaataccaggccaccttcatgggaggaggcagccattaaacaacttgtaagtgttacgaaggacacaagaaaaggtggccctttagaaggagcacatgttcacatcgtccacttgtctgattcaagtgcttccttagatctgattaaggaagcaaaaagtcatggtgacagcataagtgttgagacttgtcctcattacttagctttcacgtctgaagagataccaaatggggatactcgttntaagtgttccccacccattcgtgatgcataccacatagacaaattatgggaggctgtattagagggacacattg

SEQ ID NO: 24912 - DNA, 373 bp, Glycine max
  Clone ID: LIB3051-047-Q1-K1-G4
aatgggtgtatctgcaaattagacattagagtgtgaactccaaactctgaaaccctggactcgcatccaatccttaggtgggtaccgaattggagtccaaccaaatcctaaacacatggactcaactctgtcacgggtgcatctccacaatctgcctactctttcctccgtcgctcaccgtcctctcttgcagcctctcaccgccgtcgcttctttctaccgctcttctcctcctctaccacgcctacgtctatcgccgcttctcgctgctaacaccctcaccgctaatgacgtctcgccaagaagtggactatacactgtcagtgactttatgacaaagaaagaggatttacatgtggtgaaacccacaaca

SEQ ID NO: 24913 - DNA, 377 bp, Glycine max
  Clone ID: LIB3051-093-Q1-K1-D8
ggttacttcttcttcttcttcttcttcttcttcttctctctggaattttccgtgacttgggtgtgcatcgatggcggcgatcagtctccggaaggggaacacgcggctgccgtcggaggtgaaccgcgtgctgtacgttcggaaccttcccttcaacatcacgagcgatgagatgtacgacatcttcagcaagtactgcgccattcggcatatccgcatcggcaccaacaaggacactcgcggaacggccttcatcgtctacgaggacatctacgacgccaaaaccgccgacgaccacctttccggcttcaacgtctccaaccgctacctcatcgatctctactaccagcaagcgaagatgatcaagaagttcgatc

SEQ ID NO: 24914 - DNA, 431 bp, Glycine max
  Clone ID: LIB3051-035-Q1-K1-G5
gcaacataaaaaaaaaaaatagaaagaaaaatgatgctcggagaacaccatcgcgggaatccgacggtcctcgtgccaccgtggccagcccacgacgatccgacggctgagatgtactccgcgttcttaacaaacgacgtcaatgctggtgagtactctccgtaccatcttcaagaagcactaacggcgctgcagcgttttctgccgtcaaacgaaacggacgcagactcggactcctcggaggcggctcagcccgacgcggcggtggacgcgtacacgtgcgaccatttccgcatgtacgagttcaaggtccgtcgatgcgcacgtggcaggtcacacgactggacggagtgtccgtacgcgcatcccggcgagaaggcccgtcgacgtgacccgcggaggttccactactctggcgtggcgtgcccgga

SEQ ID NO: 24915 - DNA, 428 bp, Glycine max
  Clone ID: LIB3051-041-Q1-K1-C9
cccacgcgtccgaagttttggtcattcattcttcaaggactcttttaagcgagtttttgaggatggggagcaatctcttggtctttgtttcaatggaaccctagagataaattgctccaaggaaatcaaaattcagggaattattggaccttgcacctcgttggaaaagaaagggccttctgttgctgatactgttataggagagggaaacacaacagcatggaagatgtgtggccttgacaagagtacatgcttgactgtgatgtttgatctttcatcaagtgatcgttcaaatacccctggtgctgttaacccacaattgtacctacagttccttacaagttaccaggacccaagtggtcaatcagtgcttcgtgtcacaacagtaactagaagatgggtggatagttctgttagctctgaggaat

SEQ ID NO: 24916 - DNA, 370 bp, Glycine max
  Clone ID: LIB3051-006-Q1-K1-D7
cccacgcgtccgcccacgcgtccgcaaaaccctagctcgcgttctgctttcgtcttggacatcagcaggatggagtctcaggtgaagcacgcacttgttgtcaaagttatgggtcgtactggatccagaggacaagtaacccaggttagagtgaaatttttggatgatcagaaccgtcacatcatgaggaatgtgaaaggacctgtgcgagaaggagacattctcaccctactcgagtctgaaagggaagcaagaagattgcgctagatggtttcttttggcttgcctccaaattcgaacaaaacattgtgattttgttgattttaatggtagttggtggatgtcaaatgttttatcaccctatcttatt

SEQ ID NO: 24917 - DNA, 462 bp, Glycine max
  Clone ID: LIB3051-083-Q1-K1-F7
aagcaagcaaaaccctagcggcgcctgctttctttgttcgtgttttgcatcaggatggagtctcaggtgaagcacgcacttgttgtcaaagttatgggtcgtactggatccagaggacaagtgacccaggttagagtgaagtttttggatgatcagaaccgtcacatcatgaggaatgtgaaaggacctgtgagagaaggagacattctcaccctactcgagtctgaaagggaagcaagaagattgcgctagatggtctcttttttttggcttgcctccaaattcgaacaaaagcaatatttttcttgatatttatggtagttagtcggtgctaaaggggttatagcaccctatcttattgttttggatctattttcattcgaattattgcttgaattttgtatgtttaaacttcgagattgaggtatgctttggtttaatatatgatttgaattatggctt

SEQ ID NO: 24918 - DNA, 427 bp, Glycine max
  Clone ID: LIB3051-006-Q1-E1-G8
acaaattcttctgttcaacaggtgtgtgctttggaatcagcatttggctatttggtctttgccaatggatgctaagtctgctgtagaattaatggagtcttcctcagaggttcatttttctggatttcacatggatggttttgagcaaagaaaggctagcatagaacaaccaacaacctcagaaactgacatgtataaacaaccttttgtcataggtgttgctgggggtgcagcatctggcaagacaacagtttgtgatatgattattcagcagcttcatgatcaacgagttgtacttgttaatcaggattctttttacaataacttgacggaggaggaacttacaagagtacaagattacaactttgaccatcctgatgcttttgatactaagcaattactacatgttatggacaagttgaagcat

SEQ ID NO: 24919 - DNA, 414 bp, Glycine max
  Clone ID: LIB3051-006-Q1-K1-G8
caaattcttctgttcaacaggtgtgtgctttggaatcagcatttggctatttggtcgttgccaatggatgctaagtcggctgtagaattaatggagtcttcctcagaggttcatttttctggatttcacatggatggttttgagcaaagaaaggctagcatagaacaaccaacaacctcagaaactgacatgtataaacaaccttttgtcataggtgttgctgggggtgcagcatctggcaagacaacagtttgtgatatgattattcagcagcttcatgatcaacgagttgtacttgttaatcaggattctttttacaataacttgacggatgaggaacttacaagagtacaagattacaactttgaccatcctgatgcttttgatacctaaccattactacatgttatggac

SEQ ID NO: 24920 - DNA, 445 bp, Glycine max
  Clone ID: LIB3051-113-Q1-K1-H7
cccacgcgtccggcgacgccgtttgggtcctcttccacctcgccttcttctcccaatgccttccctccgcctgggcccactcggcgatcctcctcccgggtcaactcgcccgtgactcaccgcagagctgccccgcccctgaccccaacctctactacaagccagtcatcggaatcgtcagccatcccggcgacggcgcctccggccgcctcagcaacgccaccggcgcctcctacatcgccgcctcctatgtcaaattcgttgaggccgccggcgcccgtgtcgttcccctcatctataccgagcctccggagaagcttctcaagaagctcgaattggtaaatggggttctcttcactggtggatgggctaaaagtgggttatattttgaaactgtcgacaaaatatttaagaaaattttagaagagaatgatgctggagatca

SEQ ID NO: 24921 - DNA, 469 bp, Glycine max
  Clone ID: LIB3051-080-Q1-K1-C7
ccctaacaactctctccacctcaaccctctcttcacgcgcccttctctctccctgaggcgccgctcgcacactcgccgctccttcgtcgtcaaagcctcctccagcgagcttccgctagttggaaacaccgcaccggatttcgaagcagaggctgtgtttgaccaggagtttatcaacgtgaaactatctgattacattgggaagaaatatgttgtgctcttcttctacccgttggacttcacttttgtttgtcccacagaaatcactgctttcagtgaccggcatgcagagttcgaggcactaaatactgagatattgggtgtttcagttgacagtgtgttctcgcaccttgcatggatccaaacagatagaaagtcacgtggccttggtgacttgaattatcctttgatttctgatgtcaccaaatccatatcgaaatcttatggtgttctcattcctgaacaggga

SEQ ID NO: 24922 - DNA, 430 bp, Glycine max
  Clone ID: LIB3051-103-Q1-K1-G7
ctcaataaataacagaacttcatctgttttctttgtcctcaccaagccagagagagagatggaagaagcatcatgtgtatgcttagttgtcatactgatacttgctctaacattggcatggagggtgctgaactggttatggctaaggccaaagaggttagagaggctcctaagagagcaaggccttcaaggaaatccctacaggcttttggttggggatttaaaggagattatgaatatgcaaaaggaagtcacatccaaacccatgaatctctcccatgatatagtgcctcgtgtcttttcctttctccaacacactctcaacacacatggcaagaattcttttattcggtttgggcgaaaaccaagggtgatcatcacagagcctgagttaatcaaagatgtacttaataagatgcatgatttccca

SEQ ID NO: 24923 - DNA, 426 bp, Glycine max
  Clone ID: LIB3051-031-Q1-K1-H3
gggccatctggctggcttccactttctctttatggtaattcacactctgcagcttctgccaagaccaacacaacaggaagctatgcatcctctcttccatcaaacctttgtcgtcatttctcatttgctgaaatcaaggctgccacgaacaactttgacgaggctttgcttcttggtgtgggaggatttggtaaggtttacaaaggggaaattgatggtggaacaaccaaggtagcaattaaacgtgggaatccactatctgagcagggggtgcatgagttccaaactgagattgaaatgctctcaaaacttcgtcaccgccaccttgtttcactgattggctactgtgaagaaaacactgaaatgatccttgtgtatgactatatggcctatggaaccactcaggagcatctgtacaagactcag

SEQ ID NO: 24924 - DNA, 421 bp, Glycine max
  Clone ID: LIB3051-030-Q1-K1-C8
ttctgccgtcatactcacaccactcttcttccattttcattttctctgcgaatgcctagtcccatacacaaaccaaatgggtattaagggtttaacaaagcttttggcggacaatgccccgaagtccatgaaggagaacaaattcgagagctacttcggtcgcaagatcgccattgacgctagcatgagcatttaccagttccttattgttgtgggaagaagcggaactgaaatgctcactaatgaggctggtgaagttaccagtcatttgcaagggatgttttcgcggacaatcagacttctagaagctgggataaaaccagtatatgtttttgatgggaagccaccagatttgaagaaacaagagctggccaaacgttactccaagagagctgaggctactgaagatttgtcagaagcc

SEQ ID NO: 24925 - DNA, 390 bp, Glycine max
  Clone ID: LIB3051-110-Q1-K1-H11
tgccgtcatactcacaccactcttcttacattttcattttctctgcgaattcctattcccgtacgcaaaccaaatgggtattaagggtttaacaaagcttttggcggacaatgccccgaagtccatgaaggagaacaaattcgagagctacttcggtcgcaagatcgccattgacgctagcatgagcatttaccagttccttattgttgtgggaagaagcggaactgaaatgctcactaatgaggctggtgaagttaccagtcatttgcaagggatgttttcgcggacaatcagacttctagaagctgggataaaaccaatatgtttttgatgggaagccaccagatttgaagaaacaagagctggccaaacgttactccaagagagctg

SEQ ID NO: 24926 - DNA, 413 bp, Glycine max
  Clone ID: LIB3051-110-Q1-K1-H12
acgtgccgtcatactcacaccactcttcttacattttcattttctctgcgaattcctattcccatacagaaaccaaatgggtattaagggtttaacaaagcttttggcggacaatgccccgaagtccatgaaggagaacaaattcgagagctacttcggtcgcaagatcgccattgacgctagcatgagcatttaccagttccttattgttgtgggaagaagcggaactgaaatgctcactaatgaggctggtgaagttaccagtcatttgcaagggatgttttcgcggacaatcagacttctagaagctgggataaaaccaatatgtttttgatgggaagccaccagatttgaagaaacaagagctggccaaacgttactccaagagagctgaggctactgaagatttgtca

SEQ ID NO: 24927 - DNA, 432 bp, Glycine max
  unsure (1)..(432): unsure at all n locations
  Clone ID: LIB3051-059-Q1-K2-G7
cccacgcgtccgaaaacctcatccatggcttctcttctccgcttcaacggcgtctcccgctttcccttaccttcccaacccacacgtgaccccatcctccccaaaccgtcacgcctcgtaacggtgcgcgcggaggtgaaagagacctccgcacccgccgccgccacatcctccgacgaaaagatccgcgaaatcctccgcaaccgtgactacgacaagaaattcgggttcagcgtggagatcgagtccttgacgatcccaaaagggctctcaaaagaaaccattggtctgatctcgtccctgaaggaggagccccactggatgctcgaattccgcctgaaggccttggataaattcctctccatgaaggaacccacgtggtctgacaacacttaccctnccatcgacctccagaatatctgctactactcc

SEQ ID NO: 24928 - DNA, 426 bp, Glycine max
  Clone ID: LIB3051-045-Q1-K1-F2
cgaaggttgttgtttgatttactcacatcatcaagaagggagagccaacttttagtgggcttgtgtcaagattcttgctcggaaaagcattcccaataccagtttatctgtcactgctgccaattattggtggtggtgcactagctgcagtgactaagctcaatttcaacatgattggcttcacgggggctatgatatcaaatttggaatttgtctattgcaatatattctcaaagaaggggatgaagggaatgtctattagtggaatgaacaactattcttgtttttccataatgttactgtcaattctcacaacttttgccattgttgttgaggaccccaaggtttgggctgcaggctggcaaacaaatgtgtctcaaattggtcccaattttgtatggtgggtagctgctcagagcgtcttct

SEQ ID NO: 24929 - DNA, 325 bp, Glycine max
  Clone ID: LIB3051-050-Q1-K1-F2
ggcagttgatgaaacaaccgcactattgcagcaaaagtgggacaagattttctacacaggcaatggaaaagtgggaagaatagtgatgactgctgctgcaaaacaccttacaccagttgtgctggagcttggaggaaaatctcctgttgttgttgattccaatgtcgatttgcagatagcagctaggcgaataatttctggcaagtggggattgaataatggacaagcctgcatttctccagattatgttataacaaccaaagattgtgctcccaagttggtggatgccctaaagactgaattggagaaatgttattgaaagaac

SEQ ID NO: 24930 - DNA, 460 bp, Glycine max
  Clone ID: LIB3051-067-Q1-K1-F10
gttgacagaaagtttgctcaactgtcccattattggcgttagctatgctacccactggagcaggagagacccaattacgtgagagcaacagtcagaaggtccatcctcaaccaatagaagaggccatgaatcagaatccagaagcaatggaaaccctaatatctaaagtttttatgaatatctcttccttgaagtcagcttatattgagcttcaagctgctcatactccctacgaccctgataaaattcacactgctgataaacttgttattagtgagctgaaaaatctgtctgaactcaagcatttctacagggagaacaacccaaaaccagtgtgtgtttctccccaagactcacgtttagctgcagaaattcaagaacaacagagccttctgaaaacttatgaggtcatggtgaagaagttccaatctgaaatccagaataaagattcagagatcca

SEQ ID NO: 24931 - DNA, 472 bp, Glycine max
  Clone ID: LIB3051-072-Q1-K1-F10
gtggagtaatacttgtgtatggcacataatattaatgccaggccactttaaactactccttgtgtgtgtgccaatgaatcatgtgggtatcttgcatggcttgttttgaagcctatccataaaggagcagtgcctaacttcaactttgattcttgttctttatatatggttgttattctattgcactttacctttatctttttattgtttccttgtttttcttttttaattgtcttttacttttttttcttttttttttttttttttatttttattctattttttttttttattttttttttattttattctatttttttttttttttttttttctttctttttcttttctattttttttaatttctttttttttttttatttttttcttttttatttttttctttctttactttttttctttttttttatcttttttttattctttcttattttttctatttttttttttt

SEQ ID NO: 24932 - DNA, 409 bp, Glycine max
  Clone ID: LIB3051-029-Q1-K1-A1
cggacgcgtgggttctggtacatcattgtctttggctctcggtgagggttttagggcacacaccgcagggagacggtttctttcactctctgcaattcgcgatggctgacgaggactatgaagatattgacatggggtacgaagatgaaccgccagagcccgagattgaggaaggtgcagaggaagatgtggagaacaaaaacgatgaaataactggagagcctattgacaccgaggataaggaagaggaacaaccagtgaagcggcctcgaaagacatcgaaatatatgactaagtatgagcgtgctagaattttgggcacccgtgctcttcaaatcagtatgaatgcacctgtcatggtcgagttggagggggaaactgacccactccagattgctatgaaagagct

SEQ ID NO: 24933 - DNA, 408 bp, Glycine max
  unsure (1)..(408): unsure at all n locations
  Clone ID: LIB3051-037-Q1-K1-D4
ctctgtctctcttcctatcacatcataaattctatcatgattcatgcttatgttttttttattctctttcgaggtattgcatagagatttggggtgttcattatacttttttcaatagttttgcatagagatttggggtgttcattatacttttttcaatagttttatcacttgattgattatatatatccaccatgattcgtgcttaagtagttgattaacaatatgtcattttctgtgttgaaggtaaaccatgggaatctagtgaagttggagggattttgcatagacccagaagaagcaaattgctatctagtctatgaatatgtagagaatggatctctatactcatggctgcatgagggcaaaaaagaaaagttgagctggaaaataaggctangaatagcc

SEQ ID NO: 24934 - DNA, 461 bp, Glycine max
  unsure (1)..(461): unsure at all n locations
  Clone ID: LIB3051-095-Q1-K1-A6
cccacgcgtccgcttgtgacatcacaaaccgtaccctntttgtttatttcctttgtgggtggtgaattcgtgcaaatttctgcgacacccagatggattttgcgctgaatccgtgtcctttgcgatcttctacgttcgtgaatttcgtcgagagggttaaacagcttggtaccctcgccttttctgcagtcattgggaacatcttctccgcgatcttgaccttctgcttcgcattagttggcactttgttgggggctttgactggagctttgataggacaagaaactgagagtggcttcattcgaggggctgctgttggtgccatatcangagctgttttttccattgaaagggttgaatcctctcttgttctctggcaatctgatgaatctgggattggctgtgtcttatacttgattgatgttattgccagcttactgagtgggagacttgtgcgtgag

SEQ ID NO: 24935 - DNA, 363 bp, Glycine max
  Clone ID: LIB3051-043-Q1-K1-D12
cacaggtccaaatgggcagcatctttgcatggtccttgagtttcttggcgatagcttgcttcgcttgatcagatacaaccgctataaaggtcttccattgaataaagttagagagatttgcaaatgtgttttgactggtttggattacttacatactgatcgtggtatgatccacactgacctaaaacctgaaaacattcttctatgttcaaccattgatcctgccaaagaccctttaaggtctggactttccccaattcttgagcggcctgagggaaacacaaatggtggagttacaagtcttattgagaaaaggttgagaaggagagcaaggacagcagttgctaagatatctggaagaag

SEQ ID NO: 24936 - DNA, 430 bp, Glycine max
  unsure (1)..(430): unsure at all n locations
  Clone ID: LIB3051-050-Q1-K1-D4
atcaaacaagggctgncctgaaggcaaatcaagttctggatgaaccctgtttggtgcctactgtgtggtagaatgggctctccaagttggaaatcatgctgcagggaaagtggatggccaactcatgctgtaacctgtggagctggtactggagtgtttctgttgattaagagaacaacaatcctactacagagatctgcacgtcaggccccctggccctctccttacttagatgcttttggtgaggaggattttgaaatgcatcgaggcaagccactttatctgaatgaggaacgctatgcagctttgacttatatggtcgcttctcatggtctggaccggagttccagggtccttggtcagaccactattggttccttctttcctggtttagttcaaattctacatgtttattttgtgtgaagaatgt

SEQ ID NO: 24937 - DNA, 336 bp, Glycine max
  Clone ID: LIB3051-107-Q1-K1-F2
caggatctgagcttcagtgggtttttttttttttttacaatggcaacgaattcttctaatggagcaacaaagcaacctgccatgccatctcccttgcgtttttccaagttctttcagtccaatatgagaattctggttactggaggagctggatttattggctctcacctagttgacaaattgatggaaaatgaaaaaaatgaggtcattgttgctgacaactacttcactggatctaaagacaaccttaaaagatggattggccatccaagatttgagctaaattcgcatgatgtcacagagcaaattgtgattgaagttgatcaaatctatcat

SEQ ID NO: 24938 - DNA, 354 bp, Glycine max
  Clone ID: LIB3051-054-Q1-K2-D4
gtgaaaaatctggttatggaaaacttaggaagagatatcaacaaattgagaagaatgctaaaattattcatgtgccactttcaaaggcagttcaagctaaggtagagaggaaggcagcatatgaaatatcaaagaaagatgtcaccaagtggcagcatattattcagagaaatagagaggccccaactattttctttgatgaaaatgtaaatttagggttttcaactgtaggagcaatagcttctgaatttgaacccagaactgaatttgagaagaaaattgctgcactagtttatgatgaggaagttatggaagctcataaaaaggatggttctaagcttcttgaaaagaaca

SEQ ID NO: 24939 - DNA, 370 bp, Glycine max
  Clone ID: LIB3051-111-Q1-K1-F10
caggtagcagttgccctttcacatgctgctattttggaggagtctatgcgtgcccgggatcaagtcatggagcagaatgttgctttagatttagcccggcgagaggcagagatggcaattcatgctcgcaatgattttcttgctgtcatgaatcatgaaatgaggacaccaatgcatgcaattatagcattgtcatcacttctcttggagactgaactgacgccagagcaaagggttatgatagagacagtgttgaagagtagtaatgttttggcaacactcattaatgatgttctagatctttctcgacttgaagatggtagcctcgaattagaaatgggaaaattcaaccttcatggagttttgggag

SEQ ID NO: 24940 - DNA, 432 bp, Glycine max
  Clone ID: LIB3051-114-Q1-K1-F2
cccacgcgtccgcccacgcgtccgaaaaaagagtagatcggtttaagcttggtgaaggtgtgatgccagctagtttcaaagttcttcatgatcctattaggaaaacagatactcttattgcagattttggtgaaagtgcaattggaagagttgctccagttgattctggattctggtggataattttacttcgtgcctacacaaagtctacaggggatttatctttggctgaatcaccagattgtcaaaagggaatgaaacttatactgactctatgcttgtcagaggggtttgatacatttccaactttgctttgtgctgatggatgttgcatggttgatcgaagaatgggcatttatggctatccaatagagattcaagcacttttcttcatggcattgagatgtgctttgtcaatgctgaaacaggatg

SEQ ID NO: 24941 - DNA, 425 bp, Glycine max
  Clone ID: LIB3051-116-Q1-K1-F10
aatcaaagcaagccaattggtctctctcttacaccatgagtgcatcaaccaaagcttggattgtggcatcaagcataggggcagtggaggccttgaaagaccaattaggtgtatgcagatggaactatgctttaaggtcactacaacaacatgcaaagaacaacatcagatcttatagtcaagctaggaaattgtcctctgcatcctctgctgcggtttccaacaaggtcaagagaaccaaagaagagcatatggggaaagtcatcgaattcaattgctggggtcctagtactgcaaagttttaattagttaatatttatcttacgtgttgctacgatgagacggtgaatagagactgcttttttccatattcaatcccaatatcccccattaagcatcattatgtatctcaattccaatgtcta

SEQ ID NO: 24942 - DNA, 444 bp, Glycine max
  Clone ID: LIB3051-066-Q1-K1-D4
cccacgcgtccgctttctccaaacaaagatccccaagatgcctccttgcaagtactttgcagttccgtcgattctcttcttcctgctaagcttcttaatctttccaaccaaagcagctccaatttacagttcccatgcgtgcacagactcttctaaataccaaccaaacagcacattccaaaccaacctcgacctcctcctctcttacctttcttccaacgccacccaaggcgtccacttttacaaaacaacagttggcagtgaaacccccaacgccgtcaaggggccttttctttggccgccagacaaccttaacggcctgtgccaccaatgggttaacgccggaagccaagacctgacacgccggtgcccaattgagaaagaaggccttatctggtaccacctgtgcctgggacgctacttcaacccaaacttccttaacaa

SEQ ID NO: 24943 - DNA, 444 bp, Glycine max
  Clone ID: LIB3051-107-Q1-K1-D12
ctttgcaattccctcgattctcttcttcctcctaagcttcttaatctttccaaccaaagcagcgccaatttacagttcccatgcgtgcacagactcttctaaataccaaccaaacagcacattccaaaccaacctcgacctcctcctctcttacctttcttccaacgccacccaaggcgtccacttttacaaaacaacagttggcagtgaaacccccaacgccgtcaagggcctcttcctctgccgccgagacaccctcaccgccgtgtgccacgattgcgtcaacgccgcagccaaagacctgacacgccggtgcccagttgagaaagaggccataatctggtacgacgtgtgcatggtacgctactccaaccaaaactacctcaacaacatagtacccgcagtggacatgtctgactccaaaagcgtggctggcgctgatct

SEQ ID NO: 24944 - DNA, 414 bp, Glycine max
  Clone ID: LIB3051-094-Q1-K1-G1
gttatcgatcacaagaccggtaaggctcagatctgggacactgccggccaagaacgatgcagagcagatacgagtgcatattacaggggtgctgtgggggcaatgttggtttatgacatcactaaacgccaaacctttgatcacataccacgttggttagaagaactgcgcaaccatgctgacaagaacatagtcatcattcttacaggcaacaaatgtgatcttgagaaccagcgtgacgtacccactgaggatgcaaaagaatttgctgagaaagaagggttgtttttcttagagacctcagcactagaagcaactaatgttgaaacagccttcataactgtcttgacagaaatatacaacattgtcaacaagaagaacctaactgctgatgaaaatcacggaaatgggaac

SEQ ID NO: 24945 - DNA, 437 bp, Glycine max
  Clone ID: LIB3051-008-Q1-E1-F6
acaatgtttaaccaactggattctcatccccctcatataagttcttatatgaagcttccaactcctgagggcatggttcatcatgactcaccaccaaatcatcaatttccaggaaatatgcttcgtcctccttttcgtcaaccaaacagtggacttgcagggccagggtttgatcctccagttcatcattctatgttacaacaacaaatgcatatgcaaggaaaccttcccccacctcatttattacgtggattcccaaggggtgcacctatgccatctcatgctagcaatccaatgactggcttcatgcaggaaccaaacccaatgcaaggccaaggcttcccatttagtggtcaccagcatcctacttttggtggccctggaatgcaattacaagctcctgatgttggtggtggaagaaatcatccagaagcact

SEQ ID NO: 24946 - DNA, 454 bp, Glycine max
  unsure (1)..(454): unsure at all n locations
  Clone ID: LIB3051-074-Q1-K1-D12
cccacgcgtccgggtgggggcagtgttgggctgatgggcttaatatctcagagagtgtatgatggaggctgccatgtcctagggatcattccaaaagctctcatgcctctcgagatatctggtgaaacagtaggtgaagtgaggattgtttcagatatgcacgagcgtaaggctgcaatggcacaagaagctgatgcatttgttgctctccctggaggatatggaaccatggaagagctgttggagatgataacttgggcccaacttggaatccataaaaaaccggttggtctactgaatgttgacggttactataactgtntgctngcattatttgacaatggtgttaaagaaggtttcattaagccttgtgcacggaatatagttgtctctgctacgtcagccaaagaacttatgatgaaaatggagcactacactccttcgcacgaacatg

SEQ ID NO: 24947 - DNA, 432 bp, Glycine max
  Clone ID: LIB3051-026-Q1-K1-F10
agcaaatggagatagtgaggaggatggctagggactgttgtaagtatgggacagagaatcttggtagtagttacctccttgcaagggcttctcttcaatttggtaacacatatgatacaatggaaaatgagagagagactctgctcgggatcttaggcgatcaggtttgtatagatctctgagccactacgggcacagataacaggagctcctttggaggatgcacgccacctcactcgccgctatgacaaacttcatcaagaggtagaagcccaggctgctgaagttttgaggcgtcgatcaaagttgaagaattcttctgtttctgcagagagttccgcgaggcttcaaaatgcataaacaaggttgaaagaacttaaatttgccttggcagcacttggtagaaaaaccaacctctgctatgttgtctgt

SEQ ID NO: 24948 - DNA, 445 bp, Glycine max
  Clone ID: LIB3051-028-Q1-K1-F10
caaaatctggaattcaaacactctctttaccttgtgtttgtgagatacggcttcgaggttttcctgttcaaacatcatcagtccccgtgatatcctccacagaagttatacctgatactcagaacgttgcttttagcttttaccttgaggaatctgatttaaaagcgttgttagctcccggttgcttctacaacactcatgcttgtttggagattgcggtgttttcagggaggaagggatcccattgtggagttggcaacaaaaggcagcaaattgggatttttagaatgcaggttggccccgagtggggtgaaggaaagccagtgattctttttaatgggtggataggtattggcaagaacaaacaggataatggaaagccgggtgcggagttacatttaaaagtgaaactagatcctgaccctagatatgtgttccagtttga

SEQ ID NO: 24949 - DNA, 388 bp, Glycine max
  Clone ID: LIB3051-029-Q1-K1-F6
cccacgcgtccggttcggcataattgtatcgatcgatggcggcgttgataaggtcagcggcggtgatactggcgatcctgacgatctcggcgtgcatcgcgtgtacggcgtcgtacgggggattggtcgggggaaggtcgaagatccctgacgtgaaggcgaacaagaaggtgcaggatctagggcggttctcggtggaggagcataaccggatgctgaggcaggcgcagaatgaggaggagcaagtcacgttcgtggaagtggtggaggcgcaacaacaagtggtgtctgggatcaagtactacatgaagatatcggccacgcagggtggcgacggtggagattccagaatattcgaatccgttgtggtggtgaagccgtgggctcg

SEQ ID NO: 24950 - DNA, 355 bp, Glycine max
  unsure (1)..(355): unsure at all n locations
  Clone ID: LIB3051-098-Q1-K1-A7
cgttcgangttaacatgttcggtttaattttgcgatcgatggcggcgttgataaggtcaggggcggggatactggcgatcctgacgatctcggcgtgcatcgcgtgtacggcgtcgtacgggggattggtcgggggaaggtcgaagatccctgacgtgaaggcgaacaagaatgtgcatgatctagggcagttctcggtggaggagcataaccggatgctgatgcatgcgcataaggaggaggagcaagtaacgttagtggaagtggtaaatgcgcaacaacaagtggtgtttgggaacaattactacatgaagatatttgccacgcaggatggcgactgtggagattccagaat

SEQ ID NO: 24951 - DNA, 468 bp, Glycine max
  unsure (1)..(468): unsure at all n locations
  Clone ID: LIB3051-085-Q1-K1-D4
gcgcccacgcgtccggaacactgttattcagacctgtgttgttgcttgctatggccttgccttcagtggggggggtggttcatccttgattgccatggatcagagaacatatgaactcataggccctgattaccctggtaatagagctgaagatgttaaaaaccctggcttgggttggatgatgggtttcatgtttgttgtcagtttccttggactntttagtcttgtgccacttcgtaaggttatggtcttggattataagcttacatatcccagtgggacagctacagcaatgctaaataacagtttccatacaaaaactggagcagaacttgctgggaaccaagttctgcagctttgtgaagtatctaagcataagtttctgctggagttgctttaagtgggtcttaatggtattggggattcatgtgggtttgacaactttcctagctttggtttgacactttt

SEQ ID NO: 24952 - DNA, 239 bp, Glycine max
  Clone ID: LIB3051-030-Q1-K1-B4
aataacactgatactggaacaagagatggagcgagaaataacaatggtaataaaagcgagttgggtagggaagagagtccagactcagaatcacaaggttggggtcccaataagcttcagaaagtgaacccttccaatcctatggatcaatccactgcagaagccacaatgagaaaagctcgtgtctcagttcgtgcccgatcagaagctcccatgattagtgatgggttccaatggag

SEQ ID NO: 24953 - DNA, 407 bp, Glycine max
  Clone ID: LIB3051-032-Q1-K1-F10
cactctggcaaattattgaaccatacgacggatccatccactagtccggaagccgctgtgagaaaagctcgtgtctcagttcgtgcccgatcagaagcacccatgatcagtgatgggtgccaatggcgaaaatatggacaaaagatggctaagggaaacccttgtcctcgagcatactacagatgcaccatggcagttggttgcccagttcgcaaacaagttcaacgttgtgcggaggacagaacaattttgacaacaacgtacgaggggacccataaccatccactgccaccagctgcaatggctatggcatcgaccactgcagctgctgctagcatgttgttgtctgggtcaatgaccagtgctgacggaataatgaaccccaatttgctaactagagctattct

SEQ ID NO: 24954 - DNA, 319 bp, Glycine max
  Clone ID: LIB3051-068-Q1-K1-G8
ggctcgacgccacgcgttcgataattaataataattagtatctattcaagtatcaacaatataagcaataggttgctgtggctaaagctcgatattaatttcgtggtgttgtaatataggttcaacgttgtgctgatgatagaaccattttggttacaacatatgaaggcacgcataatcatccactgccacctgctgctatggccatggcattaaccactacagatgctgctagcatgttgctttctggatcaatgtccagtgcagatagtataatgaacccaaatatgctagctagagcaattcttccttgctctac

SEQ ID NO: 24955 - DNA, 410 bp, Glycine max
  Clone ID: LIB3051-033-Q1-K1-F10
cggacgcgtgggttaatttccactcatatgcacctttgtagtttgtactaacacaagcagcaagtgcttggtctatatccacaaacatggtagttggaggttcgaataccggtgttcatggatggcgagacatcaagagtctcaccgtccaagtcatcaccgggagatggttcgtggtgttcgcctcctttctaatcatggccgccgctggagccacctacatgttcggtctctattccagcgacatcaaaacaaccctcggttacgaccaaaccactctcaatctcctcagtttcttcaaggacttgggcaccaacgttggggtcatctcaggcctaatcaacgaggtcgctccaccttgggttgtcctcgccattggtgccatcctcaacttctttggctacttcatg

SEQ ID NO: 24956 - DNA, 477 bp, Glycine max
  unsure (1)..(477): unsure at all n locations
  Clone ID: LIB3051-095-Q1-K1-H3
cggacgcgtgggcggacgcgtgggttacagagtgaagattttatttttctttctttctgtggaggataaagaatgggtgctaagtccgaaaccgcttgcgttactggggcttctggttacatcggatcatggcttgtcatgagactcatcgagcgtggctataccgttcgagccaccgtactcgacccagctgatatgagggaggtgaagcatttgctggatctgccaggtgcagagagcaagctgtctctgtggaaggcagaacttacagaagagggaagctnttatgaagccattaaagggtgcacaggtgttctccacttggccacccccgttgactctaagtccaaagacccagagaatgaaatgataaagcctacaattcaaggagtactaaacatcatgaaagcatgcctgaacggcaaaactgttcgaaggctagtattcacgtcctcagcccgaactaccaacattact

SEQ ID NO: 24957 - DNA, 455 bp, Glycine max
  Clone ID: LIB3051-101-Q1-K1-D12
gcaagaattgggctcccttgtttgcttattatgcgtgcctttatggggattgggtgttgccatgcctgctatgaataatatgctttccaagtggattcctgtttcggagagaagcagatcacttgccctagtatatagtggcatgtacctaggttctgtggttggcttggcattctcaccattgctaatccaaaaatttggttggccatcagtgttttactcctttggatctcttggaagtatctggtttgccttgtggttgagaaaggcatatagctccccaaaagatgaccctgatcttggggtagaggagaaaaggctcatactggaaggcaatgtatcaaatgcacctgtttcttccattccttggaaattaattttatcaaaagcacctgtttgggctcttataatcttccacttctgtcacaattgggggacatttattctttaacctg

SEQ ID NO: 24958 - DNA, 347 bp, Glycine max
  Clone ID: LIB3051-028-Q1-K1-D3
cggacgcgtgggtttcgattgaacgtagtccgccgattgaggaggttatacagactggtgtggtttctcgctttgttgagtttctcatgagggaagactttccacagttgcaagttgaggcatcctgggctttgacaaatatagcttctgggacgtctgaaaacaccaaggttgtcattgatcacggtgctttcccaattgtcgtgatgctacttgcttctcctagtgatgatgtccgtgaacaggcagtgtgagcattatgcaatgtcgcgggtgattcacctagatgtcgtgatcgtgttctcagtcatggggctttgcttcctgtgtagcacaattaaatgaac

SEQ ID NO: 24959 - DNA, 383 bp, Glycine max
  Clone ID: LIB3051-031-Q1-K1-C5
cccacgcgtccgtccacgcgtccgcacacgcgtacggaagcatgctggaccatggcgggcatcacagctgggaacacaaagcagattcaggatgtaattgaggctagtataattgctcctttagtccatgtgcttcaaaatgctgagtttgatatcaagaaagaggctgcttgggcaatctcaaatgctacttcgggtggatctcatgaacaaatcaagttcctggtaaggcaagggtgtattaagccctggtgtgatcttcacatatgtcctgatcctaggattgcgacagtgtagctggaatggcttgagatcattttcgaagtactgaagctgagaaaaatgtgaaccatactcatggtgtgaatgtaaatgcatatact

SEQ ID NO: 24960 - DNA, 367 bp, Glycine max
  Clone ID: LIB3051-047-Q1-K1-E4
cggacgcgtgggtttcgattgaacgtagtccgccgattgaggaggttatacagactggtgtggtttctcgctttgttgagtttctcatgagggaagactttccacagttgcagtttgaggcagcctgggctttgacaaatatagcttctgggacgtctgaaaacaccaaggttgtcattgatcacggggctgtcccaattttcgtgacagctacttgcttctactagtgatgatgtccgtgaacaggcagtgtgggcattaggcaatgtcgcggaggattcacctagatgtcgtgatcttgatctcagtcatggtgctctgcttgctttgtatgcacaattaagtgaacatgccaagctttctatgc

SEQ ID NO: 24961 - DNA, 441 bp, Glycine max
  unsure (1)..(441): unsure at all n locations
  Clone ID: LIB3051-102-Q1-K1-D4
cccacgcgtccgctccaaacaaaaactactacttgcttagcacacaatattatgaaaaccgccgcanaggttgtttcatctcattgtcttgttgtagcagagtgctctcaatccagccccacacaactttctgctatggaacctcagattctgaatttggggtgcatgcattacagaaggagatgcaagatcagagcgccgtgctgtgatgaggtttttgactgtaggcattgccataatgaagctaagaattctgaggaggttgatgctgtggatcgtcatgatgttccacgccatgaaattaagaaggttatctgctccttatgtgatgtagagcaagatgttcagcagtactgtataaactgtggaatatgcatgggcaagtacttttgtactatatgcaaattctttgatgatgatatttcaaagaatcaataccac

SEQ ID NO: 24962 - DNA, 433 bp, Glycine max
  unsure (1)..(433): unsure at all n locations
  Clone ID: LIB3051-105-Q1-K1-D4
gcaacttgttccatttttcttccttcctcattcctcacttgcgtcccgaaaatggcttcgagtggcgttgcgggaactgccacacccgaattctaccagaacgtcgtcgtaatgcgtcacggcgatcgcatcgacaacttcgaacccatgtgggtgtccaccgctacccgaccctgggacccaccccttatccaacagggtcgggtccgagccttcgccacgggtcgcaagttccgcaacaacctccctttcactctccaccgcgtcttcgtctctcccttcctccgatgcatccaaaccgccgccgaagtcgtcgttgcactctctgccatcgccgncggcgacgaccccaacgtcatcgtcggcgatgacgtcccaatcgatccctccaaactcaaggtctctgttgaatatgggttatgtgaaatgatga

SEQ ID NO: 24963 - DNA, 413 bp, Glycine max
  Clone ID: LIB3051-107-Q1-K1-D4
cgggctttctcttcttttcctctggcttcatcatcatctctctatctgcaccccttttgagagacttcaacttgttacttaattactctactctcccctttctagcttctgtgttcttcttcttcggttctctcttcatggggtgctgcttaagtgccaggatcaaagctgagagcccttcacgcaatggtttgagttcaaaggatggtaacaaggaagaagatggcttaagcagcaaggcctcaactccctctgttcctccaactccgcggacggagggagagatcttgaagtcctcaaacatgaagagcttcaacttcagtgagctaaaaactgctacaagaaactttcgtccagatagtgtggtgggtgaaggcgggtttggttgtgtttttaaggggtggattgatgaa

SEQ ID NO: 24964 - DNA, 238 bp, Glycine max
  Clone ID: LIB3051-112-Q1-K1-D4
tcgcagcagttcaaagaccggggaagaacaatttgggaatgggattgggtgcggggttgcttggaggagccttgggtggacttctaattggggacatgatttctgatgccggttcttacgacgctggttttggagatttcggtggatttgatttttaaatctcttgttagttttctttgtttgggggtagttttttatgttcaaatgtgaacttaaattagaatatgttttttgcagt

SEQ ID NO: 24965 - DNA, 347 bp, Glycine max
  Clone ID: LIB3051-054-Q1-K2-A1
cggacgcgtgggtttgaacgttcctcttactgctaagtggcaccaaatgtctgcctttgtgtactttctggtgaccaatgcaatagcatgcacgtatgcagccatgtctctactacttgcccttgtgaacagaggtaaaagcaaaggcttgtggacattgatcgctgttctcgacacattcatggtggctttgctcttttccggcaacggcgccgctgcagcagtcggtatccttggctacaaaggaaactctcatgtgaattggaacaaggtgtgcaatggctttgggaaatattgtgatcaagaggctgcttcgattggtgtgtcactgattggatcattagcat

SEQ ID NO: 24966 - DNA, 420 bp, Glycine max
  Clone ID: LIB3051-114-Q1-K1-E4
cccacgcgtccggaaaattggaacctgcctctgttgttaaagtttgtatttttttttgagtgggtggattgagagaactgtgcaagctttggaacttcttcaaagtctggtacttcaatggctactgaagaggttaataaacttcaatcacttcctccttaccctgagatgatagtgaaagcacttgaagccctgaatgaggctgatggatcgagtaaatcagcgatatcaaagtacatagaaaccacctacggtgagttgccagatgaaactgttttggggagtcacctgaacaagatgaaagagagtggagagcttgcgttcaaacagaacaattacatgaaagctgatccaaatgccccaccaaagaagggacgtggaaggccaccaaagccaaaggttccattgccaccaggcact

SEQ ID NO: 24967 - DNA, 388 bp, Glycine max
  Clone ID: LIB3051-080-Q1-K1-G2
cccacgcgtccgtccacgcgtccgctctgcgctctctctctctgtctcctacgattcgtttggcccctttggttgccctaatttcaaccatgcctcgccgtagctccggtggaagatctgcccgtcctgctcctcgggcatctcctcgtcctgctccagttcaccatgctccttctccagcccctgctcagagtggtggtggatctatgcttggtggcattggttcaaccatagctcaaggtatggcttttggcaccggaagtgcattggcacacagggctgtggatgcagtcatgggtccacgtaccattcaacatgaaacagttgttacagaggctgctgctgctgcccctgcacccactgcaaatacttttggtggcgatgcatg

SEQ ID NO: 24968 - DNA, 409 bp, Glycine max
  Clone ID: LIB3051-043-Q1-K1-B6
gccctcactcttccctcttttctttctttcatccccaaatcaaaacctaaattcggaccttcaactttctcccccaaatcgaccaccaccactgtcaagcccattcatttatattttattcgtatatatacatacagagagtgagtgagagagagagagagaagaatggattcggatcaaggcaagcttttcatcggtgggatttcatgggatacgacagaggacaagctcaaggagcatttcggtaactacgacgacgttttgagcacttccgtcatgcgggagaagaacactgggaagccaaggggcttcggtttcgtcgtttttgcggatcctaacattctagatagggttatggaagacaaacatggcatagatggcagaacggtaacgcttctatcattttttt

SEQ ID NO: 24969 - DNA, 439 bp, Glycine max
  Clone ID: LIB3051-065-Q1-K1-F3
gtgggaaatggcgtacctgaacgctaggcgcaccttagcatctaccctgtcacgagctcttgcttcttcatccggtagcgcctctcgctttcgcttcgcattcgcattcgcgttgctccccgccaaacaaaccgcacccaaccctcactgggcgagtttcgcggttcggactcaatcttcgggttcgggttactcgcccctgaacgacccgtccccgaactggagcaaccgtcccccgaaggagaccattcttctcgatggctgcgactacgagcactggctcatcgtcatggagttccccgataaccctaaaccctctgaggaccacatggtcaacgcctatgtcaaaaccctagctcaagtccttggaagtgaggaggatgccaaaaacaagatatactctgtttccacttctacatacacaggtttcggcgctctc

SEQ ID NO: 24970 - DNA, 431 bp, Glycine max
  Clone ID: LIB3051-096-Q1-K1-A6
gaacgctcgctcgcactgtccagatcttaatcaagaggagtgagttttgtttttccaggcatgacgccgctgatcctgcatgctgggaaaaccaacaaaaattcttacaagacactcattgcagccgagtatgctggcgtccaagttgattttgcccctaattttgagatgggtgtctccaataaaactcctgaatttctcaagatcaatcctattggcaaggttcctgtgctggaaacccccgatggtccaatattcgagagcaatgccattgctcgctatgttacccggctgaaaggtgataacactttgtatggatcttccttgattgaatatgcccacattgaacagtggattgatttttcatcattggagattgatgctaatattatcaagtggtatgccccaagagttggacgaggaccatatct

SEQ ID NO: 24971 - DNA, 441 bp, Glycine max
  Clone ID: LIB3051-047-Q1-K1-B9
cccacgcgtccgcccacgcgtccgatactaccagaaaaagaagaacccttctaaaaacctgcggcagaaagaaccaacaatgtcgccgagcttcgtcttcgaccctcctagcgacgaagaaatcgaacactccgaacacgaagaagaagaagaagaagaatcagtaggagaaccagagtcaggatcagaatcagagtcagaaggagaaggaggagaagtagaagaagggcataaagaagcgcgggttccgaagaagaagaagaagaaaacacagtctccatgggacttcgccaaatacacggaatcagtggccgaggaacacgctcgcaggagcacaacctcggtcgacgagaaaatctcaaaagcactcaaacaacgttccacgcctctcgttgctgagctcgaccacagctccgagtccgaacctgatgaacaagaaga

SEQ ID NO: 24972 - DNA, 377 bp, Glycine max
  Clone ID: LIB3051-058-Q1-K2-G2
ggaccaaccatgtcgcctagtttcgtcttcgacccgcctagcgacgaagaaatcgggcactctgaacacgaagaagaagaagaatccgaagaagaaccagagtcaggatcaggaacaggatcagaatcagagtcagaaggagaaggagaagaagaagaagggcacgaagaagcgcgggttccgaagaagaagaagaagaaaacgcagtctccatgggactttgctaaatacacggaatcagtggcggaggaacacgctcgcaggagcacaacctcggtcgacgagaaaatctccaaagcactcaaacaacgttccacgccgctcgttgctgagcttgaccacagctccgagtccgaacctgatgaacaagaagatta

SEQ ID NO: 24973 - DNA, 438 bp, Glycine max
  Clone ID: LIB3051-088-Q1-K1-G10
gaaagaagaagaagaagcgttctttcggagagttcgaagatgtcgggcgttaccggcaacgacgaggaagacaagaagccaaccgaacagggagcacacatcaaccttaaggttaaggggcaggatgggaatgaagtttttttcaggatcaagagaagcactcaattgaagaagcttatgaatgcttactgtgaccgacagtcggtggatttcaactccattgcttttctgtttgatggacgccgcctccgagctgagcagactccagatgagttggaaatggaggacggggacgagattgatgccatgcttcaccagacaggaggttctgttgtctgaaggatgtgattactttgctcctcattataagtaggaattagttaacttagagctatgtatggcataagatacatattttattatctgctattatataca

SEQ ID NO: 24974 - DNA, 380 bp, Glycine max
  Clone ID: LIB3051-006-Q1-E1-B7
agagagggtgtgtttctgggttttggaaatttcagccaatatcgaaaaacaagaagccccatcaataataatcatcgaaggaatttgaaaggtcgaaacttgagcatctgggatcgcgaaattggggtttttggttaaaagggtattatcttcggaactgattgatggcaaacctgtacgtgaaggcggtgccaccggcggatctgaacaggaacacggagtggttcacgtaccctggcgtttggaccacatacatcctcatccttttcttttcttggatcctcgtactctccgtcgtcagttgttcccctggcatcgcttggactatcgttaatctcgcacactttgctgtaacaatatcacttttatcactggaagaa

SEQ ID NO: 24975 - DNA, 425 bp, Glycine max
  Clone ID: LIB3051-006-Q1-K1-B7
gagagggtgtgtttctgggttttggaaatttcagccaatatcgaaaaacaagaagcgccatcaataataatcatcgaaggaatttgaaaggtcgaaacttgagcatctgggatcgcgaaattggggtttttggttaaaagggtattatcttcggaactgattgatggcaaacctgtacgtgaaggcggtgccaccggcggatctgaacaggaacacggagtggttcacgtaccctggcgtttggaccacatacatcctcatccttttcttttcttggatcctcgtactctccgtcttcggttgttcccctggcatcgcttggaccatcgttaatctcgcacactttgctgtaacatatcacttttttcactggaagaaaggaactccatttgcggatgaccaatggatctacaatagattgactt

SEQ ID NO: 24976 - DNA, 433 bp, Glycine max
  Clone ID: LIB3051-114-Q1-K1-E5
gtttccactatcattatttgcccattaaaaatcaatttttagctctcattttcatgtttgggcaattcctccacacacaccatccaattcccgtctttgatattttaatcacagagagagaagagggtttgtttctgggttttggaaatttcagcccccatcaaagaagaagccccataatcttcgaatcgaaggcatttgattgaaaggtcgaaactttagcatctgggatcgcgcaattggggttttttttggttaaaagggtatcttcggaattcatggcaaaactgtacgtgaaggcggtgccaccggcggatctgaacaggaacacggagtggttcacgtaccctggcgtttggaccacttacatcctcatccttttcttttcttggatcctcgttctctccgtcttcggttgcttccccggcatcgc

SEQ ID NO: 24977 - DNA, 196 bp, Glycine max
  unsure (1)..(196): unsure at all n locations
  Clone ID: LIB3051-030-Q1-K1-A4
caaaatgccttaggtggtggtccaactatcccatccacaacaccgaatgatactggttnttcagaacaaaaagtacagccgttgtttcagcctctggttcatctgaaagaaatttatcaacatctgctttgatggaaagaatgccaagtaaatggccacgtcctgtatggcacgcaccatggaagaactacagggt

SEQ ID NO: 24978 - DNA, 434 bp, Glycine max
  Clone ID: LIB3051-039-Q1-K1-F6
gtaggtagcttatctagtggactctgtaggcatcgcgcaattctcttcaagagattggcggattacataggtttgccatgtcgaattgctcggggttgtaggtactgtgtttcagatcatagatcgtcttgccttgtcaagattaaagatgatagacagctctcaagggaatatgtagttgatctggttggggaaccaggaaatatccatgggccggattcctctattaatggagcatatgtgtcttcaataccttccccatttcaaatttctcatttgaaagaatcccaatcaccatatgtggatgttgcagcatgttctcaatctcttggtaacacttctttaggctgtgtacaggaagatcaacaagctgaagaaactgatctgcagaaaaataataatggctctatttatcctgcaatagatcaaactcg

SEQ ID NO: 24979 - DNA, 429 bp, Glycine max
  Clone ID: LIB3051-041-Q1-K1-F6
gccacgtcatatcccagatcttacataatctccacctgaatcacagaaatgcatgattccgatcacccaaataaaactttctaacaagggagtctgttttaaattctattagtaaccggtagatgaaaccaaaacattatgctcctttaaacgtttctgaaaatgagctaaacgggtttgcaactgcaggatgccagcagccttctgagaaagaatggcgtttagtcttgttatgtaatcatccagctgattccctggttgatctgcttcaaccaagaggttcatctcctctctaacaatgttcatggtctcctctacttgtgtccggtgagcatttacaaggtcctcttcttcctgtaggagggcatttaaatcatcctcagcatgtgtggtttgaggttcaacttttgggaggtccttccatttgat

SEQ ID NO: 24980 - DNA, 398 bp, Glycine max
  Clone ID: LIB3051-042-Q1-K1-F10
cccacgcgtccggtttacctatgcaattctaatacttttatgatgctggattcataatgtaaggccagttattccttcaaactgtccacctgcaatgcgagctttaatcgagcaatgttggtctttgcatccggacaagaggcccgagttctggcaggttgttaaggtattagaacaatttgagtcttcgcttgctcatgatggaactctgactctggtggaaaatccttgttgccctgatcataagaaagggcttctccattggattcaaaagcttgttcctgttgcatcataataatggccctgtgcctaaaccgaaatttacatgagtcttcaaagtgtcctggctttttgtagtattccggtttcattgtaattaatattgaatggttttaaat

SEQ ID NO: 24981 - DNA, 361 bp, Glycine max
  Clone ID: LIB3051-054-Q1-K2-F10
tgcagccagatctggaaaagggtgataaaattatcatgcctccctcagcccttgatcgccttgcgtctttgcacatagagtaccccatgttatttcaaattaaaaatccttctgctgaaagagttactcactgtggggtgctagaattcgtatctgatgaagggatcatatatatcccatactggatgatggaaaatatgctcctccaagagggagacattgtaaaagtgaaaaacaccaaccttgcaaaaggaacgtatgtgaagctgcagcctcacacaaaggattttttggatatctccaatccaaaagccatgttagtatttcttttctaatatctagttatacctttaacagtgtc

SEQ ID NO: 24982 - DNA, 436 bp, Glycine max
  Clone ID: LIB3051-060-Q1-K1-F6
gttcgtggcgatgaggctgcacacgagggaccaggccagggagggcgagaaggaggtcaagcagcccgaggagaaagccgttaccaagtgggacccatccgtcgaagggtacctgaaatttcttgtggacagtaagctcgtttatgacacgctggagaaaatcgttcaagaggctcctcatccttcttatgctgaattcagaaacactggattggaaaggtctgcaagtttggcagaagatttggagtggttcaaggagcaaggttataccattcctgaaccttcttctcctggtcttacctatgcacaatatcttaaggagttatctgtgaaggatccccaagcattcatttgccatttttacaatatctactttgctcattcagctggtggtcgaatgattgggaaaaaggttgctgaaaagttacttaacaac

SEQ ID NO: 24983 - DNA, 429 bp, Glycine max
  Clone ID: LIB3051-062-Q1-K1-F6
tagaccaattcatgacaatccagatgaaatgactgctgctttgtatctacagagtcagtatagttagccaggctttgatatttgtcacccgttcgcgcagctggtccttcatcgaacgccctggattgctgttagtgactgctttcgttattgctcagctgattgctacagtaatagcagtgtatgccaactggggctttgcaaggatccaaggaattggttggggttgggcaggagtgatttggctctacagtattgtcttctatttcccacttgacatcatgaagttcgccatccgctacattttgagtggcaaagcatggaacaatctcctagaaaacaagactgccttcaccaccaagaaagactatggtaaagaggagagggaagctcaatgggctcttgctcagaggaccctgcatggacttc

SEQ ID NO: 24984 - DNA, 386 bp, Glycine max
  unsure (1)..(386): unsure at all n locations
  Clone ID: LIB3051-066-Q1-K1-A6
caacgcctgggtactaaccctcgacggcgacgacggcgacgtccaacaccgcctcaacccaggcctaattgattccctcctctcaacgcttaaccgtctcgcatctcaagccactcccggctccgtcctcgtcaccaccgccaccggcaaattcttctccaacggcttcgacctttcctgggcgcgcgccgccgcttccgcctccgccgccaccgaccgcctccagttcatggtggactccctcaagcccgtcttggcggcgatcatgtcccttcccatgcccaacatcgtcggcatcaacggccacgcctncgncggcgggttccttctcgcggtcagccacgattacgtnctcatgcgcagcgaccgcggcgtgctctacatgc

SEQ ID NO: 24985 - DNA, 377 bp, Glycine max
  Clone ID: LIB3051-084-Q1-K1-F6
atgaacttgagacaaaggcttcaactactttagttaaatgcaaatttggatcagttgaggctgcagcaaaggtgcgtactttggaagagcaggggagttcggcagacaaaattaaaaacttcgaatataattgtttgggagaaattagaattcttggtgctttaaaacacccttgcatagtggaaatgtacggacaccaaatttcatgtcaatggtctgtctcagctgatggtaatcctgaacaccgtgtattaagatctgcaatttttatggagtatgtggaagggggctccttaaaaaattatctggagaagctgtcagaagctggtgaaaagcatgttcctgtggagttggctttgcatatcgccaaagatgtc

SEQ ID NO: 24986 - DNA, 413 bp, Glycine max
  Clone ID: LIB3051-103-Q1-K1-A2
gttttcattatcttcttctgatgcgaaagtgaagactgaagagaagataagacaatgctagcgctactccagaactgctccatgcccctcgcacgtgcggtgcggtctccacctcgcacgcacgtgcgaccttgtttcacggccgtggcctacgcatccatttcctcacgtgctaactcccagtctcaggttctcctcggcttgtccgagaaggagctgcaacaactcgcccttgacctcaatcaggaaacctataggggcaaacaacttcatcattttttataccagaggaagctcagagaaattcaggatttcactcaattgcctcagggatttaggaatactcttgaggaaactggatggaaggtgggccggtctcctattttaaaactgtaactgcagctgatggaact

SEQ ID NO: 24987 - DNA, 385 bp, Glycine max
  unsure (1)..(385): unsure at all n locations
  Clone ID: LIB3051-032-Q1-K1-A10
cccacgcgtccgcccacgcgtccgcccacgcgtccggctgagtggactgaaatcggtggagaacgcgcacgatgattcggtgtgggcggtcacatgggtacccgcaaccgccaaccggccaccgctcctcctaaccggttccctcgacgagaccgtcaggctctggcgctccgacgacctcgttttggagctcaccaacaccggccactgcctcggcgtcgcctccgtcgccgtccaccccctcggctccgtcgtcgcctcctcctccctcgacagcttcgtccgcgtgttcgatgtcgattccaacgccaccatcgtcaccctcgaggctcctncctctgaagtctggcaaatgcgcttcgatcccaagcgacaagtgttgaaa

SEQ ID NO: 24988 - DNA, 433 bp, Glycine max
  Clone ID: LIB3051-041-Q1-K1-C1
ctctgaaggaaaaggatgcgggaaatgcatcttataagaagaaggattttgataccgcgattcaacattacacaaaggctttggagttggatgatgaggatatttcgtatctcactaaccgcgctgctgtctacttggaaatgggaaagtatgaggaatgcataaaagattgtgacaaggctgttgaaagaggaagagaactaagatcagattttaagatgatagcaagagctttgacaaggaaaggaaatgccttggtgaaattggcgaagtgctcaaaggattatgagcctgccattgagacataccagagagcactcaccgagcaccgcaaccctgacactttaaagaaacttaatgaagccgaaaaggcaaagaaagaactagaacaacaggaatattttgatccatagttggctgatgaggagagaga

SEQ ID NO: 24989 - DNA, 448 bp, Glycine max
  Clone ID: LIB3051-114-Q1-K1-F6
cccacgcgtccgtctttagctgtgtatagacttaacaactacaaaggcagagtaagttaatctacatgtaatgacaagtgtcttggaagttgaaatgtgattccatttgggcaagtaggttctcctacatgaaagaaagaattgaaggtacctaaagtcactataatggttggaggaagcttcggtgcaggaaactatgcaatgtgtggtcgtgcctatagtcccaacttcttgttcctttggccaaatgctagaatatctgtaatgggtggtgctcaggctgctggtgtgctggcccaaatagagaaaggcaacaagaaaaggcaaggaattcagtggagcaaggaagaagaggataagttcaaagggaaagtggtggaggcatatgagagagaagcaagtccttattactcaacagcaaggctttgggacgatggaatcattgatc

SEQ ID NO: 24990 - DNA, 389 bp, Glycine max
  Clone ID: LIB3051-005-Q1-E1-F4
aggaaaaaggacgtcacttcctcgccacaccctgcttcgtgaatcttagtgcatcaagatctctgtctctctgtctctctgcaatcgaaaatgagcaagggaccgggtctcttcaccgatatcggcaaaaaatccaaagatcttttgactaaggactacagctccgatcagaaactcaccgtttcctcctacagcgtctccggagtgaccctcacttcaacatctgtgacgaaaggaggactctcaacaggggatgtggcagcactgtacaagtataagaacactgttattgatgttaaacttgacaccgcatcaactatctccacaaccctcacatttaatgacgttcttccatccaccaagactattgcttcatttaagctgcctga

SEQ ID NO: 24991 - DNA, 431 bp, Glycine max
  Clone ID: LIB3051-108-Q1-K1-F12
caaccatcatggagcgtgaggactgctttagttgcactgattgcgttcatgcctaccaacgcaaatggtgcattgggatctttagactacaagaaagaagagaggcatacactggccattaagtctcgtgaagcttctccaaaattcgggactcctgaacgtcaaaagctgattgatgagatacacgagtacatgctaagcaaagcaccacctgttcctcaacctagtgccacagaggcttctgaagagaaccccagaaatgaagaggccgagacacaggtcaattcaccaaatcccgagtccttacctgcaggagagggtattacagatcaagaagttgatggaattgtggaagaacaagaagtcatccttgcaaaccctgcaggagttgaagcttcaagggaggttcaaccaagtgtttcaaggaatga

SEQ ID NO: 24992 - DNA, 376 bp, Glycine max
  Clone ID: LIB3051-085-Q1-K1-C11
ctcaccgtggagacctcggtgcccttcaccttccacaactgcgatgcgcctccacgcgccgtggagacgtcctcggcggagctcttctcgttcttccgtgacatggcgctgatgcggcggatggagatcgcggcggactcgctctacaaggccaagctcatacgcggcttctgccacctctacgatggccaggaggccgtcgccgtcggcatggaggccgccatcacgcgcaaggattgtatcatcaccgcctaccgcgaccactgcaccttcctcgcccgcggtggaaccctaatcgaggtcttcgctgagctcatgggccgtcgcgacggctgctccaaggggaaaggaggatccatgcacttttaccgcaaag

SEQ ID NO: 24993 - DNA, 439 bp, Glycine max
  Clone ID: LIB3051-093-Q1-K1-E1
ggggtttaaccgtgtacctctcacttcttctacgaccatcatcttccttccttccttcagtcgttctaactcttagcagccatggcgagcaccaaagttcagagggttatgactcagcccattaacttgattttcaggtttcttcagagcaaagcacgcattcagatttggctatttgagcaaaaggatttgaggattgaaggccgaatcattggttttgatgaatacatgaatttggttcttgatgatgctgaagaagtgaacatcaagaagaagagcagaaaaacattagggaggatccttcttaaaggagataacataactttaatgatgaacacggggaaatgatgaacactccttgacagttgttaactatgttcctatcaaacaagaaggcataatgatcttttccttgggtttggattcatctaacaaactc

SEQ ID NO: 24994 - DNA, 370 bp, Glycine max
  unsure (1)..(370): unsure at all n locations
  Clone ID: LIB3051-057-Q1-K1-D11
gtgatgtataatatacgtaacaangttaaccttctgtggaatgcacttgtacttgggggggtgaaaaacgggcagaagtaccttggcatggttaacatgattggcattaattttgaggacaaccatgtagcaaccgggcttggaaatcatctcgctaggccaattctccgtgatgagtggcatgaaaacttgacctttgaagagggcgtcaagttactggaaaaatgcatgcgtgtgcttttataccgtgataggtctgctgtcaacaaaatccagatatctaaaattacagatgaaggtgccactgttttcccaccattcttattgaaaacgtactgggagttctctgccttcaataatccaactgttg

SEQ ID NO: 24995 - DNA, 334 bp, Glycine max
  Clone ID: LIB3051-079-Q1-K1-B8
tcgcttcttcttcttctcttcttcttcaagattgctacgacgatccaagtgatagacactcggtgcgattgaacttgtagctgaatccgagcgaactctgtacccatacgtgactggatcctctgtagtcgctatcaaatacaaagatgggattctaatggccgctgacatgggaggttcgtatggatctaccctgcagtataagagtgttgagcgtatcaagcctattggaaagcattctcttattggtgctagcggggagataagtgactatcaggaaattttgcgctaccttgacgaagctatcctttatgacaacatgtgggaggatggg

SEQ ID NO: 24996 - DNA, 421 bp, Glycine max
  Clone ID: LIB3051-007-Q1-E1-A11
acggatggcaccatatcatttacagttttatcatgtgacaaacaagcgggtttggttcaatgccgatgcgagaactctgccactcttggtgagaggaagaatgttaatttgcctggagtgatagtggatctcccaactttgacagacaaagacaaggaagatatcttggcctggggagttcccaataaaattgacatgattgctctttcttttgttcgaaaaggttctgacctggtggaagtcaggaaagttctgggaaaacatgccaagaacattatgctcatgtctaaggttgaaaaccaagaaggggttgcaaattttgatgaaatccttgcaaattcagatgcatttatggtggcacgtggtgaccttggaatggaaattccaatagagaagatatttcttgcacagaaagtgatga

SEQ ID NO: 24997 - DNA, 422 bp, Glycine max
  Clone ID: LIB3051-035-Q1-K1-E12
cgattctcaccttcggcccccacgccgtctactattctgccacgcccttatctgagtatgatacactcggcacctctatcaaagccgctgttgtttatcttgcaacggcattagtgaagcttatttgtctagctacttttctcaaggtatcagagagcgatagctttgatccgtatcaggagtttttgaaggcgttaataggttttatagatgttgctgggctttattttgccttgacccagttgactcacaggaacatctctcagaatcataaatttcaagcagttggacttggctgggcatttgctgactctgtgctgcatcggttggctccactttgggttggtgccagaggattagaatttacttgggattacattcttcagggccttgaggctaatgcaaatttggtgttgagcata

SEQ ID NO: 24998 - DNA, 436 bp, Glycine max
  Clone ID: LIB3051-038-Q1-K1-B6
gggaaagaacgaggcggacgactagaagcgagagctggtgttcaaggaggacgggcaggagtacgcgcaggtgctccggatgctgggtaacgggcggtgcgaggcgatgtgcatcgacgggacgaagaggctctgccacatccgcgggaagatgcacaagaaggtgtggatcgccgccggagacatcatcctggttggactcagggactaccaggacgacaaggctgacgtcatcctcaagtacatgcccgacgaggccaggctcctcaaggcctacggcgagctccccgacaccactcgcctcaacgagggcatcggcgccggcttggacgaggaggacgacgccaccgtcaacgactacatcgagttcgaggatgaggatattgataaaatctaatcaccctcgcaatcgcaattatcattcatatctgtctct

SEQ ID NO: 24999 - DNA, 397 bp, Glycine max
  Clone ID: LIB3051-070-Q1-K1-C7
atcatcgaataaaactagggtttccgatcgtcgtcgaggagaatgccgaagagcaaggggaagggaggaaagaaccggaagcgcgggaagaacgaggcggacgacgagaagcgggagcttgtgttcaaggaggacggtcaggagtacgcgcaggtgctccggatgctggggaacggccgctgcgaggcgatgtgcatcgacggcaccaagcgcctctgccacatccgcggcaagatgcacaagaaggtctggatcgccgccggcgacatcatcctcgtcggcctccgcgactaccaggacgacaaggccgacgtcatcctcaagtacatgcccgacgaggccaggctcctcaaggcctacggcgagcttcctgacagcaccaggcttaacgagggca

SEQ ID NO: 25000 - DNA, 438 bp, Glycine max
  Clone ID: LIB3051-081-Q1-K1-E7
acaaaatcaccaccttcaaagtcttctctctcgagaatcatcgaataaaactagggtttccggtcgtcgtcgaggagaatgccgaagaacaagggaaagggaggaaagaaccggaagcgcgggaagaacgaggcggacgacgagaagcgggagcttgtgttcaaggaggacggccaggagtacgcgcaggtgctccggatgctggggaacggccgctgcgaggcgatgtgcatcgacggcaccaagcgcctctgccacatccgcggcaagatgcacaagaaggtctggatcgccgtcggcgacatcatcctcgtcggccttcgcgactaccaggacgacaaggccgacgtcatcctcaagtacatgcccgacgaggccaggctcctcaaagcctacggcgagctttctgacagcaccaggcttaacgagggcatcggc

SEQ ID NO: 25001 - DNA, 429 bp, Glycine max
  Clone ID: LIB3051-082-Q1-K1-E6
cccacgcgtccgaggagaatgccgaagaacaagggaaagggaggaaagaaccggaagcgcgggaagaacgaggcggacgacgagaagcgggagcttgtgttcaaggaggacggccaggagtacgcgcaggtgctccggatgctggggaacggccgctgcgaggcgatgtgcatcgacggcaccaagcgcctctgccacatccgcggcaagatgcacaagaaggtctggatcgccgccggcgacatcatcctcgtcggcctccgcgactaccaggacgacaaggccgacgtcatcctcaagtacatgcccgacgaggccaggctcctcaaggcctacggcgagcttcctgacagcaccaggctcaacgagggcatcggcgctggccttgatgaggaggaggatggggccggaaatgattatatcgagttc

SEQ ID NO: 25002 - DNA, 286 bp, Glycine max
  Clone ID: LIB3051-111-Q1-K1-F9
cgaagaacaagggaaagggaggtaagaacaggaataggggaaagaacgaggcggacggcgagaagggagagctggtgttcaaggaggacgggcaggagtacgcgcaggtgctccggatgctgggtaacgggcggtgcgaggcgatgtgcatcgacgggacgaagaggctctgccacatccgcgggaagatgcacaagaaggtgtggatcgccgtcggagacatcatcctggttggactcagggactaccaagacgacaaggctgacgtgattctcaagtacatgcc

SEQ ID NO: 25003 - DNA, 354 bp, Glycine max
  Clone ID: LIB3051-046-Q1-K1-A5
cacatcccttcgtcaacacctctccgactcttctcgttctctccatggcttcagtcgctgcttcaaggtggcgaggagcaaacgcgttacgacaccgatcacttggagctcttcaggcacgagagttacttcgcttacttgtttggagtcatagagcctggattctatgcagctattgacgttgcaactgggaattctatcctatttgctcctaggttaccttctgagtatgctgtttggttgggggagattaagccactctcctactgtaaggaacactacatggttaccacgtgttgcttctcagatgaaattgaaagtgtattgcaacaacattaccaagggtccgggaaa

SEQ ID NO: 25004 - DNA, 390 bp, Glycine max
  Clone ID: LIB3051-053-Q1-K2-A1
gtcaaaaacagggagaagcttctcacatcccttcgtcaacacctctccgactcttctcgttctctccatggcttcgtcctccttcaaggtggcgaggagcaaacgcgttacgacaccgatcacttggagctcttcaggcaagagagttacttcgcttacttgtttggagtcatagagcctggattctatgcagctattgacgttgcaactgggaattctatcctatttgctcctaggttaccttctgagtatgctgtttggttgggggagattaagccactctcctactttaaggaacactacatggttaccacgtgttgcttctcagatgaaattgaaagtgtattgcaacaacattaccagtgttccgggaaacctttgctggttctc

SEQ ID NO: 25005 - DNA, 393 bp, Glycine max
  Clone ID: LIB3051-045-Q1-K1-F11
caggaaccaaaactaatttaataccgcattcacattattcctccgaagatgacagtggcgagtggagaagaagaaggcgccgttggaggagttcagatccaacacaggagcagaatggtgctcccagattttctccagagcgtgaatctcaagtacgtgaaattaggttaccactacttgatctccaacctcgtaaccttattccttgtccctcttatgctcgtcacgctcattcatgtttttcagaccaccgacatcgcccacctccgctacctctggctccacctccagtacaacctcctcaccatacttacctgctccgtcgtcctcgtcttcagtctcactctctacgccgtcactcgcccacgggccgtctaccttcttgacttcggc

SEQ ID NO: 25006 - DNA, 425 bp, Glycine max
  Clone ID: LIB3051-115-Q1-K1-C9
gaacaacgccaattctgaaacttcttctccttcttcttcttcttttgtttctcttgcgtgcttctacttcttctgaacatggaactgttgtctctgagactcaccccttcaccttcgagttcgacttcatcgcttcctgcagcacttgctcactgctccaagctatgtgaatttcatccgaggaagaagaagaaggcgtgcttcgacgcgcctaggcttgcggtgcggtgtgtgaaggcctcggcggagcgaaccggtgatacgatcgatgatggggaagctcgtagcgggttcaccacacctgccatggaagtcaccacattcaatcgaagcactttcagcgatgctgctgactttcccgtttgggaaaagattggtgctgtcgtcagactcagttatggtatcgggatttatggtgccatggc

SEQ ID NO: 25007 - DNA, 438 bp, Glycine max
  Clone ID: LIB3051-026-Q1-K1-F4
gttgtcttgaagagatgttggctagcccgctactggggtcttgctgtaaaacatggcatatgtgcagatatagcacaatccaagcatgagcattggtcttctctagctcctcttccttttgaacttgtcatctatgctggacaaaaggctaaagaggaatcctggaacaaaagtgctgatggtccagatagaagcaaacttgttcgtgatttgaatgatcttgctggggaaggaaatattgagagtatgctctcagttgagatgggtttgagggaacttgcttccttaaaggttgaggatgctgttgtgcttgcattagcccaacacagactgtcaaattcggttcgacaatccgttttagattccaaatcacgtggtgatgccaaatattcagaagcatttgaattaagtgaagaggaagcagaagatgttcttttc

SEQ ID NO: 25008 - DNA, 445 bp, Glycine max
  Clone ID: LIB3051-027-Q1-K1-F12
ctctctctctctctctcttgaagtgttggaatttgttttcaacttcccaagggggaaaaaagtcaaaaaacaagaaaaaaaaggggattgtgtttgtgactttttatcgagacaaaatcgagtctttatttataaagtgatatattttgcaattatatgtatgaatatgtaccaattgcaacagtttcatattcaacccatgatgatgaagatggataatacgatgaggaagagggagagaagcaaggccatggagaaagagaggcttcatgtgatggacttgagtggcatgtccttggagtttcttcccaaaccttcgcttgatttagccaccatttgcaagttggacctatctaataacaatctccaggaaattccggaatccttaacggcaagacttctaaacgtggaagtgttggacgtgcgttccaaccagctaaagtcc

SEQ ID NO: 25009 - DNA, 445 bp, Glycine max
  Clone ID: LIB3051-075-Q1-K1-H10
cagtttcatattcaacccatgatgatgaagatggataatacgatgaggaagagggagagaagcggggccatggagaaagagaggcttcatgtgatggacttgagtggcatgtccttggagtttcttcccaaaccttcgcttgatttagccaccatttgcaagttggacctatctaataacaatctccaggaaattccggaatccttaacggcaagacttctaaacgtggaagtgttggacgtgcgttccaaccagctaaagtcccttcctaattccattggctgcctttctaagctcaaggttttgaatgtctcaagcaacttcatcgaatccctccccaaaaccattgagaattgcagagccttagaagaactgaatgcaaacttcaacaagctgagcaagcttccagacacaatagggtttgagctcgtaaacctaaagaagc

SEQ ID NO: 25010 - DNA, 372 bp, Glycine max
  unsure (1)..(372): unsure at all n locations
  Clone ID: LIB3051-005-Q1-E1-H2
agcccacgcgtccgcccacgcgtccggagttaggaaaatggggaagaagaagaagagaagtagggtttccgaagacgaggaaatcgaatccgataccaaccccttcgataaaaacgaaaactctctctatcaggttcttggtgtggagaaaacagcatctcaacaggaaataaagaaggcatactacaagttggcattgaggctgcatcctgataagaaccctggtgatgaggaagctaaagcaaagtttcagcaattgcaaaacgttattgctattcttggggatgaagaaaaacgggccgtttatgatcagactggttgtgttgatgatgctgaacttgcangggatgttgttcagaatcttaaagaata

SEQ ID NO: 25011 - DNA, 345 bp, Glycine max
  Clone ID: LIB3051-036-Q1-K1-F12
ctcttaggttcttggtgtggagaaaacagcatctcaacaggaaataaagaaggcatactacaagttggcattgaggctgcatcctgataagaaccctggtgatgaggaagctaaagcaaagtttcagcaattgcaaaacgttattgctattcttggggatgaagaaaaacgggccgtttatgatcagactggttgtgttgatgatgctgaacttgcaggggatgttgttcagaatcttaaagaatatttcagagcaatgtacaagaaggtcactgaagctgatattgaggaatttgaagcaaactatagggggtctgacattgagaaaaatgatttgaatgatct

SEQ ID NO: 25012 - DNA, 378 bp, Glycine max
  Clone ID: LIB3051-044-Q1-K1-F4
ttcgcttttccattccaacctctttcacacttcagatctgtttcttcatcggttgttcaagtaaatggcctttgtcaccactgctgaagtgtgtgatgcgaacccacagttaattttgagtggggagcttcgtgcccttcagccagtttttcagatttatggccgtcgacaggttttctctggacctatagttaccttgaaggtgtttgaagacaatgttttggttcgtgagttccttgaagagaaaggcaatggaagagttctagttgttgatggaggcgcgagtttacgctgcgctatattgggtggcaaccctgtggtacaagctcaaaacaatggatgggcaggtattattgtgaatggatgtataagagatgt

SEQ ID NO: 25013 - DNA, 454 bp, Glycine max
  Clone ID: LIB3051-049-Q1-K1-F12
ctaacgttcattccgctcttcgctttctttcacatccaatcaacgaaaaatgctggctggtttcgacaaatcggtggcaaagagcccagagggtcttcagagccctcactcaaattccgtctcagccctaaaagacgtttttctcgcagagcacttctcttccgttcaccctggttccgtcaccgttaaccttggctcttccggtctcttggcctattctcttcacaaacagaaccccctcctcccaaggctgtttgcagtcgtggatgacattttctgtttgtttcaaggtcatcttgagaatgttgctaaccttaagcaacaatatggattgaacaaaacagcaactgaggtgatcattatcattgaagcatacaggactctaagagatcgtggtccctatcctgctgctcaggttgtgagagacttccaaggcaaatttgcatttattctg

SEQ ID NO: 25014 - DNA, 433 bp, Glycine max
  Clone ID: LIB3051-005-Q1-E1-G4
cccggctggccccacgcgtcaggattggagatccgtaacacgagcacggaagctgccaaatgatgagataacaagttgcaaattggccataagcaatcgatcaagattggaaccgcctcttccacacgagtactttggaaacgcagttgatgtggtgagcactgcagggttcacggcaggggaattgcttgagaaggatctaggatgggcagcatggaaggtgcacgtggctgttgcgaaccaaaacgacaaagcggtgagacaaaagctcaaagagtggttgaagcttcctgtggtgtaccaacttggtgtgcactttgatccttgtactgtgaccatgtcgagttccccgaggttcaacatgtatgggaatgaatttgggatggggaaagcggttgcagttctgagtggatatgccacacaaaatgatggg

SEQ ID NO: 25015 - DNA, 411 bp, Glycine max
  Clone ID: LIB3051-077-Q1-K1-F4
gcaaagctgaaagcaagggctaactctgagtccaaatccaaaaccagcgaaatctcttcgttggaatggttatcagcgcatgtttggagatccgtaacacgagcacggaagctgccaaatgatgagataacaagttgcaaattggccataagcaatcgatcaagattggaaccgtctcttccacacgagtactttggaaactcagttgatgtggtgagcactgcatggttcacggcaggggaattgcttgagaaggatctaggatgggcagcatggaacgtgcacgtggctgttgcgaaccataacgacaaagcggtgagacaaaagctcaaagagtggttgaagcttcctgtggtgtaccaacttggtgtgcactttgatcctcgtactgtgaccatgttgagttccccg

SEQ ID NO: 25016 - DNA, 413 bp, Glycine max
  unsure (1)..(413): unsure at all n locations
  Clone ID: LIB3051-081-Q1-K1-F4
atagattaaaggcctggttctttaaacattcccaatggcccgcccaaaaccttcggcttcgggaagcttgggaactaatgccgctattaatcctccctggatgtctgaaaagtggttcattgtgctgggaattgattattntgttttgtatttcatttaatttttataagttttgtatacaagtttttctcaccaattttttattttggcattttgtcacattgatccacgccaatgatgataaatccaaaggcttgtttctcaaaacattcgcagtggccgcctaagagctttcgccttcgccaggcttgagagcttgtgctgcttttatccttccttggatgtctgaggtcattatattatttctntgttgaccattttcgtctgtggttgattgatgctgtaagttagta

SEQ ID NO: 25017 - DNA, 339 bp, Glycine max
  unsure (1)..(339): unsure at all n locations
  Clone ID: LIB3051-110-Q1-K1-F4
ggcagatgtgcgtattcctctgcattggtggcaacagcactacctggatgaacaccgccgttctagtcacatgcatccgcaacttccgccgcaacagaggccccgtttccggcattctcaaaggctttgtcggtttgagcaccgccatattcaccgacctctgttccgctctcttcgccgacgaccctgcttcctttctcctcatgctcgccctcatccctttcgccgtttgcctctccggaatgtttttcctccgtgagattcctnccgccgncaccaacgaccaggaagagtctacttatttcgcggttttcaacgcggttgccgtggtccgtcgcg

SEQ ID NO: 25018 - DNA, 457 bp, Glycine max
  Clone ID: LIB3051-112-Q1-K1-C10
ctttttgaacagacgaaggaaaaacgcagtgattaagcgcagacatgtatcatccaacaggaggtggcgttcgtggcggtcgagatcaattcacttgggaggatgtgaaagttgataagcatagggagaactatcttggtcacagtatcaaggctccggttggaagatggcagaaagggaaagatcttttctggtataccagggataaaaagtcccaaaatgcagaaatggaggctgcaaaagaagagataaaaagaattaaggaagaagaggagcaggcaatgagggaagctcttggcttagctcccaagcgttctaaccatcctcaaggtaaccgtcttgataaacatgagttttcagaactggtaaagcgggggtctacagcagatgacttaagtgcaggtcatgctgaagcttgcagggttcaaggtcttggttttgcaagagaaccacgccc

SEQ ID NO: 25019 - DNA, 427 bp, Glycine max
  Clone ID: LIB3051-040-Q1-K1-C9
ggacatattgcttgctctacttgctgtgtgagactcagtaacaagtgtcctatgtgtttaatgcccattggttataaccgttgccgggctattgagaaggtcttggagtgtattaaaatgtcatgcccaaatgcaaactatggctgcaaagagacatttagttacagcaggaaaaacaaccatgagaaggaatgcatctatctaccatgttcatgccctcttactggttgtgattttgttgcctcatccaaggagttattcctccacttcagccatagacatgtaggcatgggaacacggttcgcatatgataaatttttcactgtattcttaagtattaaccagagaacaattgttcttcaagagaaaaatgatggtaatctgtttattgttcacaataaccattaacatcttggggacatagtcc

SEQ ID NO: 25020 - DNA, 409 bp, Glycine max
  unsure (1)..(409): unsure at all n locations
  Clone ID: LIB3051-116-Q1-K1-A5
gtaagggacaaggtgtatcctttacaaatctttttatcatatgggtggtggtgctgtgtgccgcactgccaatatcatcgctctatccattcctttatttcatggtaagggattttaatattgcgaaaacagaagctgatattagttcttatgctggttatgtgggttctgcattcatgcttggcagatgtttgacatctttgttgtggggaactatagctgatcgctttggtcgaaaacctgtttttgttataggaattattgcagttgtcattttcaacacactatttggccttagcacaagtttttggatggctgntatcatgaggtttcttatgggaagtttaaatggtttgcttggaacaacgaaggcgtatgccactgaaatatttcgagaagaacaccaagc

SEQ ID NO: 25021 - DNA, 347 bp, Glycine max
  Clone ID: LIB3051-091-Q1-K1-B4
catgtatggaatatggtgcttcatcacggtcctgttgttctccccagtggcgttttcggagactgtgcaacccacaggacaagaaagtgctgctccaaatcaagaaggacttcaacaacccttacctgctagcctcctggaaccctaacaccgattgctgcaactggtactgcgtccagtgccaccccgaaacgcaccgcatcaactccctcgtcatattatcctctgttccccaaaccaatttatccggcccaataccaccctccgtcggtgacctaccttttcttgagacccttcaattccacaagctccctaaactcaccggcccaattcagcccactatagcc

SEQ ID NO: 25022 - DNA, 339 bp, Glycine max
  Clone ID: LIB3051-003-Q1-E1-E6
accacgcgtccgatagaggaaggggaagcaaaagcacgtgagctcaatgtcatgttcattgaaactagtgctaaggctgggtttaatataaaggccctagttcgaaaaattgctgcagcactacctggaatgggaacactatcttctgcaaaacaagaagacatggttgatgtaaacttaaagtctacaaatgggactgctcagtctcaacctcagtcaagtggatgtgcttgttaagtatactttagcatgtgcggtccacctttttgtgtcatgctttttgttttatgcgggtttttctagagtcttctacagcattatatgaaaagatgaaagaat

SEQ ID NO: 25023 - DNA, 323 bp, Glycine max
  Clone ID: LIB3051-023-Q1-K1-E5
ggcttattcacattcctgaaatggcatctgcatcaactctatccaattacaagctcgagctacttgggtgaccaatccgtgagcaatatctacatcattactcgcttcatgtacgataaattcgataacacctatcatgctacaattggtattgattttctatcaaaaactatgtatctcgaagatcgaactgttcgactgcagttgtaggatacagctggccaggaaagatttagaaatcttattccaagctacattagggactcatatgtagctgttattgtatatgatgttgcaagccggcatactttactaaatactgc

SEQ ID NO: 25024 - DNA, 425 bp, Glycine max
  Clone ID: LIB3051-019-Q1-K1-H12
cccacgcgtccggtcttctcaactacgctactatgtatatatgtttttgcattttgctgggtctacattgtaagaattatggcatcagaggagacaacaatttggaaggcaatgataaaaactccagcctccatagtgttgataatttacacctttatatcaatgtggtttgtaggtggcctcactgccttccatttgtatttgataagtaccaatcagactacatatgaaaacttcagataccgatatgatcggcgagccaacccatataatgaaggagtgttgaataattgcaaagagatattctgcatcagcattcccctttcaaagaacaattttagggcaatggtgccaagagaaccagcattacctactcgatcagtgtgtggaagctttatgaaccataatttgagaaaagctgggga

SEQ ID NO: 25025 - DNA, 454 bp, Glycine max
  Clone ID: LIB3051-027-Q1-K1-B10
gtgactgcacccttttggaaatcaatcccattgcggagacagctgataaccaattggtggctgctgatgctaagttgaattttgacgataatgctgcatatcgccagaaagagatatttgctctccgtgatacaacacaagaggaccctcgagaggtgactgctgcaaaggcagacttaaattatattgggttagatggagaaataggctgcatggtgaatggagcagggttagcaatggccacaatggatataattaaattgcatgggggtactcctgccaattttttggatgtaggtggcaatgcctctgaaggccaggtggttgaggcatttaaaatattgactgctgatgacaaagtgaaggcaattttggttaacatttttgggggtataatgaagtgtgatgttatagcaagtggaatagtgaatgctgcaaaagaggttgcactgaa

SEQ ID NO: 25026 - DNA, 207 bp, Glycine max
  Clone ID: LIB3051-017-Q1-E1-F10
ccacgcgtcagggcaaagataagcgccaattcaccatgtactttttccttccagaaacaaaagatgggctgttagctttggctgagaagttggcttccgaatcctgggttcctggaacgcaagcttcctaaccaaaaagtggaagtaggggacttcaagatcccaagattcaaaatttcttttgggtttgaagtccccaaagttgct

SEQ ID NO: 25027 - DNA, 446 bp, Glycine max
  Clone ID: LIB3051-027-Q1-K1-H9
ccgtgaatcgataagcaaccaaaccgacgtggccctgagcatctcaaagctcctgttgtcgaaagaagctcgggacaagaacctcgtgtattcgccgctgtcgttgcacgttgttctgagcatcatcgccgctggctccaagggccccacactcgatcagcttctctccttcctccgatccaaatccaccgatcatctcaactccttcgcctctcagctcttcgccgtcgtgctctccgacgcctctcccgccggcgggcctcgcctctccttcgccgacggcgtgtgggttgagcaatccctctcgcttctcccttccttcaaacaacttgtcagtgctgattacaaggccactttggcttcagttgatttccagaccaaggctgttgaagtggccaatgaagttaattcatgggctgaaaaggagacaaatggacttgttaaag

SEQ ID NO: 25028 - DNA, 317 bp, Glycine max
  Clone ID: LIB3051-044-Q1-K1-A6
gggttttcccaaccctcttcccttgttcgaaactagcctaatcaaaaccgaaacagacgattacaaaaacaagaaaagaagaaaaataatcattcattgctcggtgagaagagagagaggaacggcccgatgaccgggaaggcgaagcccaagaagcacacggcgaaggaaatcgccgcgaaggtggacgccgtcaccactaaccgcggcggcgggaaggccggcctgaaggaccgatccgggttggagaagggcgggcacgcgaaatacgagtgccctcactgcaaagtgacggcgccggacgtgaaatcaatgca

SEQ ID NO: 25029 - DNA, 372 bp, Glycine max
  Clone ID: LIB3051-061-Q1-K1-F1
ctcagcaagttgtcaagacatattgttcaatgaagccagcatggatttgcttcaaatgtggtagaaaaatgtttggagtatggtgatgccactgaacgggagttgctaattgcagagatatttgggcatgatgaccaatgtgataatttattgacaatgatgaaagatcaatttgcgaattatgtggtccagaaggtcattgatatctgttctgaaaatcagcgagcaatgttgctttctcacgtaagaatccatgctcatgctttgaagaaatacacttatggaaaacacattgtggctcggttggaacatcaatttggagagaatcaaacacccagctcatgatagaataaagagacaaagccatgggtc

SEQ ID NO: 25030 - DNA, 395 bp, Glycine max
  Clone ID: LIB3051-001-Q1-E1-B4
agcccacacgtccggaagagccttccatatatagcctctcaaacacatgaacagtactatctctttggctccctttccaaattgtggccccaacttcaacatatcagccttcagccaccgctgatattgtattcgacaccgaatgcaatcctactccaaacggcggcacatactatgtgttgccacttataagatgaaagggcggcggaatagaatttgccaaaaccgaatcagaaacatgccctctcactgttgtgcaatctcactttgaggtctcaaacggtctaccactgaaaatttcatccccatttaaaatccttgacatcaccgaatgacttattttgagcctcagtttcacttaagtacccccctgtgcctcaactccttctcggtgg

SEQ ID NO: 25031 - DNA, 443 bp, Glycine max
  unsure (1)..(443): unsure at all n locations
  Clone ID: LIB3051-002-Q1-E1-B10
tatagaagagccttccatatatagcctcccaaaaaaatgaagagtactacctctttggctctctttctactttgtgccctaacttcatcatatcagccttcagccaccgctgatattgtattcgacaccgaaggcaatcctattcgaaacggcggcacatactatgtgttgccagttataagaggaaagggcggcggaatagaatttgccaaaaccgaaacagaaacatgccctctcactgttgtgcaatctccctttgaggtctcaaagggtctaccactgataatttcatccccatttaaaatccttgacatcaccgaaggacttattttgagcctcagtttcacttatgtacccccctgtgcctcaactccttctcggtggancgttattctcaagggtctgccanaagaactccatgtcanactcactggctacaaaaa

SEQ ID NO: 25032 - DNA, 364 bp, Glycine max
  Clone ID: LIB3051-003-Q1-E1-C8
gggtctaccactgataatttcatccccatttaaaatccttgacatcaccgaaggacttattttgagcctcagtttcacttatgtacccccctgtgcctcaactccttctcggtggaccgttattctcaagggtctgccagaacaactccatgtcaaactcactggctacaaaaacacaatagatggttggtttaggattcaaagagcttcctctgaatccaactactataagttggtgttttgtacatctaatgatgatagttcgtgtggggatattgtggctcccatcgatcgtgaaggaaacaggcctttgattgtgactcatgatcagaatcatccagtgttggttcagtttcagaaagtt

SEQ ID NO: 25033 - DNA, 376 bp, Glycine max
  Clone ID: LIB3051-003-Q1-E1-H5
cacacgcgtccgcccacgcgtccggaagagccttccatatatagcctcccaaaaaaatgaagagtactacctctttggctctctttctactttgtgcccgaacttcatcatatcagccttcacgcaccgctgatattgtattcgacaccggaggcaatcctagtcgaaacggcggcacatactatgtgttgccaatttataggaggaaagggcgcgggaatagaatttgccaaaaccgagagagaagcatgccctctcactgttgtgcaatctccctttgaggtctcaaagggtctaccactgataatttcatccccatttaaaatccttgacatcaccgaaggacttattttgagcgtcagtttcacttatgtac

SEQ ID NO: 25034 - DNA, 114 bp, Glycine max
  Clone ID: LIB3051-006-Q1-E1-G1
gcgtccgacagaacttccatatatagcctcccaaaaaaatgaagagtactacctctttggctctctttccactttgtgccctaacttcatcatatcagccttcaaccaacgctg

SEQ ID NO: 25035 - DNA, 433 bp, Glycine max
  Clone ID: LIB3051-006-Q1-K1-G1
gaagagccttccatatatagcctcccaaaataatgaagagtactacctctttggctcgctgtctactttgtgccctaacttcatcatatcagccttcagccaccgctgatattgtattcgacaccgaaggcaatcctattcgaaacggcggcacatactatgtgttgccagttataagaggaaagggcggcggaatagaatttgccaaaaccgaaacagaaacatgccctctcactgttgtgcaatctccctttgaggtctcaaagggtctaccactgataatttcatccccatttaaaatccttgacatcaccgaaggacttattttgagcctcagtttcacttatgtacccccctgtgcctcaactccttctcggtggaccgttattctcaagggtctgccagaagaactccatgtcaaactcactggcta

SEQ ID NO: 25036 - DNA, 438 bp, Glycine max
  unsure (1)..(438): unsure at all n locations
  Clone ID: LIB3051-011-Q1-E1-D2
acgcgtccacccaagcgtccggatagatatatagaagagccttccatatatagcctcccaaaaaaatgaagagtactacctctttggctctctttctactttgtgccctaacttcatcatatcagccttcagccaccgctgatattgtattcgacaccgaaggcaatcctattcgaaacggcggcacatactatgtgttgccagttataagaggaaagggcggcggaatanaaatttgccaaaaccgaaacagaaacatgccctctcactgttgtgcaatctccctttgaggtctcaaagggtctaccactgataatttcatccccatttaaaatccttgacatcaccgaaggacttattttgagcctcagtttcacttatgtacccccctgtgcctcaactccttctcggtggaccgttattctcaagggtctgcca

SEQ ID NO: 25037 - DNA, 417 bp, Glycine max
  Clone ID: LIB3051-011-Q1-E1-H9
cccacgcgtccggcctcccaaaaaaaatgaagagtactacctctttggctctctttctactttgtgccctaacttcatcatatcagccttcagccaccgctgatattgtattcgacaccgaaggcaatcctattcgaaacggcggcacatactatgtgttgccagttataagaggaaagggcggcggaatagaatttgccaaaaccgaaacagaaacatgccctctcactgttgtgcaatctccctttgaggtctcaaagggtctaccactgataatttcatccccatttaaaatccttgacatcaccgaaggacttattttgagcctcagtttcacttatgtacccccctgtgcctcaactccttctcggtggaccgttattctcaagggtctgccagaagaactccatgtcaaac

SEQ ID NO: 25038 - DNA, 255 bp, Glycine max
  Clone ID: LIB3051-019-Q1-K1-A7
tagatatatagaagagccttccatatatagcctcccaaaagaatgaagagtactagggctttggctctctttctactatgtaccctaacttcatcatatcagccttcagccaccgctgatattgtattcgacaccgaaggcaatcctattcgagacggcggcacatactatgtgttgccagttataagatgaaagggcggcggaatagaatttgccaaaaccgaaacagaaacatgccctctcactgttgtgcaa

SEQ ID NO: 25039 - DNA, 408 bp, Glycine max
  Clone ID: LIB3051-040-Q1-K1-F6
atcatatcagccttcagccaccgctgatattgtattcgacaccgaaggcaatcctattcgaaacggcggcacatactatgtgttgccagttataagaggaaagggcggcggaatagaatttgccaaaaccgaaacagaaacatgccctctcactgttgtgcaatctccctttgaggtctcaaagggtctaccactgataatttcatccccatttaaaatccttgacatcaccgaaggacttattttgagcctcagtttcacttatgtacccccctgtgcctcaactccttctcggtggaccgttattctcaagggtctgccagaagaactccatgtcaaactcactggctacaaaaacacaatagatggttggtttaggattcaaagagcttcctctgaatccaacta

SEQ ID NO: 25040 - DNA, 448 bp, Glycine max
  Clone ID: LIB3051-045-Q1-K1-C4
accagacagacatatacacgagccttccatatatagccttccaaaactatgaagagtagtacctggttggctctgtttctacttcgtgccctaacttcatcatatcagccatcatccaccgctgatattgtattcgacacctaaggcaatcctattcgaaacggcggcacatactatgtgttgccagttataagaggaacgggcggctgaatagaatttgccaaaaccgaaacagaaacatgccctctcactgttgtgccatctacctttgaggtctcaaagggtctaccactgataatttcatacacatttaaaatccttgacatcaccgaaggacttattcagagcctcaggatcacttatgtacccccctgtgccttaactccttctcggaggaccgttattctcaagggtcttccaagaacaacttccatgtcaactcactggc

SEQ ID NO: 25041 - DNA, 431 bp, Glycine max
  Clone ID: LIB3051-045-Q1-K1-F4
cccacgcgtccgatagaagagccttccatatatagcctcccaaaaaaatgaagagtactacctctgtggctctctttctactttgtgccctaacttcatcatatcagccttcagccaccgctgatattgtattcgacaccgaaggcaatcctattcgaaacggcggcacatactatgtgttgccagttataagaggaaagggcggcggaatagaatttgccaaaaccgaaacagaaacatgccctctcactgttgtgcaatctccctttgaggtctcaaagggtctaccactgataatttcatccccatttaaaatccttgacatcaccgaaggacttattttgagcctcagtttcacttatgtacccccctgtgcctcaactccttctcgggggaccgttattctcaagggtctgccagaagaactccat

SEQ ID NO: 25042 - DNA, 405 bp, Glycine max
  Clone ID: LIB3051-050-Q1-K1-E10
ttcactcgtacgatggtagagccgaacttttatagccttccaaaaaaatgaagaagtcgtcctttttggctctctctctactatggggcctaacttaacgtataagcttcagcgccggttatattggattctacacctaaggcgatcctattcgaaacctcggcacatactatgtgttgccagttataatatgaaagggcagcagaatctaatttgccaaaaccgaatcagatacatgcactataactgttgagcaatctaccttagaggtctcacagggtctaccactgataataccatccccatttaaaatccttgacatcaccgaatgacttatattgagcctcaggttcacttatgtacccacctgagcctcaactccttctcggtggaccgttattctca

SEQ ID NO: 25043 - DNA, 442 bp, Glycine max
  Clone ID: LIB3051-059-Q1-K2-D6
atagaagagccttccatatatagcctcccaaaaaaatgaagagtactacctctttggcgctctttctactttgtgccctaacttcatcatatcagccttcagccaccgctgatattgtattcgacaccgaaggcaatcctattcgaaacggcggcacatactatgtgttgccagttataagaggaaagggcggcggaatagaatttgccaaaaccgaaacagaaacatgccctctcactgttgtgcaatctccctttgaggtctcaaagggtctaccactgataatttcatccccatttaaaatccttgacatcaccgaaggacttattttgagcctcagtttcacttatgtacccgcctgtgcctcaactccttctcggtggaccgttattctcaagggtctgccagaagaactccatgtcaaactcactggctacaaaaa

SEQ ID NO: 25044 - DNA, 438 bp, Glycine max
  unsure (1)..(438): unsure at all n locations
  Clone ID: LIB3051-059-Q1-K2-H3
aagagccttccatatatagcctcccaaaaaaatgaagagtactacctctttggctctcggtctactttgtgccctaacttcatcatatcagccttcagccaccgctgatattgtattcgacaccgaaggcaatcctattcgaaacggcggcacatactatgtgttgccagttataagaggaaagggcggcggaatagaatttgccaaaaccgaaacagaaacatgccctctcactgttgtgcaatctccctttgaggtctcaaagggtctaccactgataatttcatccccatttaaaatccttgacatcaccgaaagacttattttgagcctcagtttcacttatgtacccncctgtgcctcaactccttctcggtggaaccgtattctcaagggtctgccagaagaactccatgtcaaactcactggctacaaaaa

SEQ ID NO: 25045 - DNA, 403 bp, Glycine max
  Clone ID: LIB3051-082-Q1-K1-H1
aattccaggcgggcgtacgctagaacagcctcccataaatagccccgcagcaaaatgaatagtactacctacttggctctctggtactttgtgccctaacgtcatcatatcagccttcagccaccgctgatattgtattcgacaccgaaagcaatcctattcgaaacggcggcacatactatgtgtcgccagttataagaggaaagggcagcggaatagaatttgccaaaaccgaaacagaaacatgccctctcactgtcgtgcaatctccctttgaggtctcaaacggtctaccactgataatttcatccccatttaaaatccttgacatcaccgaatgacttattttgagcctcagtttcacttatgtacccccctgagcctcaactccttctcggtggac

SEQ ID NO: 25046 - DNA, 464 bp, Glycine max
  Clone ID: LIB3051-083-Q1-K1-B7
tagatatatagaagagccttccatatatagcctcccaaaaaaatgaagagtactacctcttgggctctctttctactttgtgccctaacttcatcatatcagccttcagccaccgctgatattgtattcgacaccgaaggcaatcctattcgaaacggcggcacatactatgtgttgccagttataagaggaaagggcggcggaatagaatttgccaaaaccgaaacagaaacatgccctctcactgttgtgcaatctccctttgaggtctcaaagggtctaccactgataatttcatccccatttaaaatccttgacatcaccgaaggacttattttgagcctcagtttcacttatgtacccccctgtgcctcaactccttctcggtggaccgttattctcaagggtctgccagaagaactccatgtcaaactcactggctacaaaaacacaatagatggttg

SEQ ID NO: 25047 - DNA, 428 bp, Glycine max
  Clone ID: LIB3051-090-Q1-K1-E7
atagaagagccttccatatatagcctctcaaaaaaatgaaaagtactacctatttggctctctgtggactttgtgccctgtcttgatcatatcagccttcagccaccgctgatattggattcggcaccgagagcaatcctagtcgaaacggcgtcacatactacgagacgacaggcataagaagaaagggccgtggaatagaatgtggcgaaacctatacagaaacatgccctctcactgttgtgcaatctacctttgatgtcgcaaagggtgtaccactgatcatatcatgcccagttatgatgcttgacatgatcgaaagacttatatcgagcctcagttgcacttatgtacccatgtgtgccctaactacgtctcggtggaccgggaatctaaagggtatgccagattaacaccatgtgagacta

SEQ ID NO: 25048 - DNA, 371 bp, Glycine max
  Clone ID: LIB3051-092-Q1-K1-G3
cccacgcgtccgatagaagagccttccatatatagcctcccaaaaaaatgaagagtactggctctttggctctctttctactttgtgccctaacttcatcatatcagccttcagccaccgctgatattgtattcgacaccgaaggcaatcctattcgaaacggcggcacatactatgtgttgccagttataagaggaaagggcggcggaatagaatttgccaaaaccgaaacagaaacatgccctctcactgttgtgcaatctccctttgaagtctcaaagggtctaccactgataatttcatccccatttaaaatccttgacatcaccgaaagacttattttgagcctcagtttcacttatgtacccccc

SEQ ID NO: 25049 - DNA, 454 bp, Glycine max
  Clone ID: LIB3051-095-Q1-K1-B12
atatagaagagccttccatatatagcctcccaaaaaaatgaagagtactacctcttgggggctctttctacttggtgccctaacttcatcatatcagccttcagccaccgctgatattgtattcgacaccgaaggcaatcctattcgaaacggcggcacatactatgtgttgccagttataagaggaaagggcggcggaatagaatttgccaaaaccgaaacagaaacatgccctctcactgttgtgcaatctccctttgaggtctcaaagggtctaccactgataatttcatccccatttaaaatccttgacatcaccgaaggacttattttgagcctcagtttcacttatgtacccccctgtgcctcaactccttctcggtggaccgttattctcaagggtctgccagaagaactccatgtcaaactcactggctacaaaaacacaatagat

SEQ ID NO: 25050 - DNA, 379 bp, Glycine max
  Clone ID: LIB3051-100-Q1-K1-F1
tcgtccgatagatagagccttccatttatagcctcgcttataaaatgaagagtactacctctttggctcgctttggactttgtgcgcctagacttcatcatatcagccttcagccaccgctgatattgtattcgacaccgaaggcaatcctattcgaaacggcggcacatactatgtgttgccagttataagaggaaagggcggcggaatagaatttgccaaaaccgaaacagaaacatgccctctcactgttgtgcaatctccctttgaggtctcaaagggtctaccactgataatttcatccccatttaaaatccttgacatcaccgaaggacttattttgagcctcagtttcacttatgtacccccctgtgcctta

SEQ ID NO: 25051 - DNA, 368 bp, Glycine max
  unsure (1)..(368): unsure at all n locations
  Clone ID: LIB3051-106-Q1-K1-D3
gatagatatatagaagagccttccatatatagcctcccaaaaaaatgaagagtactacggctttggctctctttctactttgtgccctaacttcatcatatcagccttcagccaccgctgatattgtattcgacaccgaaggcaatcctattcgaaacggcggcacatactatgtgttgccagttataagaggaaagggcggcggaatagaatttgccaaaaccgaaacagaaacatgccctctcactgttgtgcaatctccctttgaggtctcaaagggtctaccactgataatttcatccccatttaaaatccttgacatcaccgaanggactattttgagcctcagtttcacttatgtacccccc

SEQ ID NO: 25052 - DNA, 421 bp, Glycine max
  Clone ID: LIB3051-107-Q1-K1-D2
cttccaacgttgcttattcacacaaacggaacaagatagatatatagaagagccttccatgggtagcctcccaaaaaaatgaagagtactacctctttggctctctttctactttgtgccctaacttcatcatatcagccttcagccaccgctgatattgtattcgacaccgaaggcaatcctattcgaaacggcggcacatactatgtgttgccagttataagaggaaagggcggcggaatagaatttgccaaaaccgaaacagaaacatgccctctcactgttgtgcaatctccctttgaagtctcaaagggtctaccactgataatttcatccccatttaaaatccttgacatcaccgaaggacttattttgagcctcagtttcacttatgtacccccctgtgcctcaactccttctc

SEQ ID NO: 25053 - DNA, 449 bp, Glycine max
  Clone ID: LIB3051-108-Q1-K1-E2
atagaagagccttccatatatagcctcccaaaaaaatgaagagtactacctctttggctgtctttctactttgtgccctaacttcatcatatcagccttcagccaccgctgatattgtattcgacaccgaaggcaatcctattcgaaacggcggcacatactatgtgttgccagttataagaggaaagggcggcggaatagaatttgccaaaaccgaaacagaaacatgccctctcactgttgtgcaatctccctttgaggtctcaaagggtctaccactgataatttcatccccatttaaaatccttgacatcaccgaaggacttattttgagcctcagtttcacttatgtacccccctgtgcctcaactccttctcggtggaccgttattctcaagggtctgccagaagaactccatgtcaaactcactggctacaaaaacacaata

SEQ ID NO: 25054 - DNA, 350 bp, Glycine max
  Clone ID: LIB3051-110-Q1-K1-C9
gaagagccttccatatatcgcctcccaaataaatgatgagtactacctcttcggctctatgtctgctttgcgccctaacttgatcatatcagacttcagccaccgctgatattgtattcgacaccggaggcaatcctattcgaaacggaggcacatactatgcgttgacagatataagatgaaagggccgcggtatagaatctgccaaaaccgagacagaaacatgccctatcactgttgcgcaatctacctttgaggtcgtaaagggtgtaccaccgagaattgcattcccattcaagatccttgacatcaccgaaggacttactctgagcctcagtttcacttatgta

SEQ ID NO: 25055 - DNA, 463 bp, Glycine max
  unsure (1)..(463): unsure at all n locations
  Clone ID: LIB3051-060-Q1-K1-C1
tcgaccgcacgcgtccgcccacgcgtgcgggataccgtcccgtgattttccaattcgacgaataagggtatcacgtctcttaatcaaaacgtgttacccgaatttttggtaaacctaaacaggaagccaatactctaaccactttggataagttaaatgagacacttgaaatgttggagaaaaaggagaaagtactcctaaaaaaggctgctgcagaagttgaaaaagccaaagaattcactagggcaaagaataaaagggcggcaatacaatgtttgaagaggaagaggctatatgaacagcatgtagagcagcttggaaatttccagctgcgtattcatgaccagatgataatgttggaaggtgccaaggcaaccacagaaactgttgatgcattgagaactggagcagctgctatgagggctatgcanaaagcaacgaatattgatgatgttgacaagac

SEQ ID NO: 25056 - DNA, 373 bp, Glycine max
  Clone ID: LIB3051-064-Q1-K1-C3
cacttgaaatgctggagaaaaaggagaaagtgctccttaaaaaggtggcagcggaagttgaaaaggccaaagaattcacaagggggaagaacaaaagggcggcaatacaatgtctgaagaggaagaggttatatgaacagcaaatagagcagcttggaaatttccagttgcgtattcatgaccagatgatattgttggaaggtgctaaagctaccactgaaacagtagatgcattaagaactggagcagctgctatgaaggctatgcaaaaagcaacgaatattgatgatgttgacaagaccatggatgagatcaatgaacagaccgagaacatgaaacagattcaggatgcattgtcagctccaattggtgc

SEQ ID NO: 25057 - DNA, 400 bp, Glycine max
  Clone ID: LIB3051-005-Q1-E1-F8
acgcttggtggtacatcccatgtctccgcaagtaatgtttcttatcgtgttacagtgcttttctttggtggtggtgatgatcatgaagcccttgcttatggagctcgtatggctgagcaccctggcatcagattgctggttattcgctttgtaggggaaccaatgaatggagagattgtaagagttgatgtgggtgactccactagcaccaaattaatctcacaggatgaggaattcctcgatgaaattaagacgaaaatagccaatgatgactccatcatctatgaagagaaagtagtaaaagatggtgcagaaacagttgctattatccgtgagttgaaaagctgcaatctgtttcttgtgggttcaaggccagccagtgaagttgccagtgctatga

SEQ ID NO: 25058 - DNA, 342 bp, Glycine max
  Clone ID: LIB3051-009-Q1-E1-F12
accagtgagatcttgcagtcatccaatttaaagagctttaccttgtcagaacttaagacggccactagaaatttccgtccagatagcgtgttaggagaaggtggttttggatcagtttttaaggggtggattgatgagaattcattgaccgctaccaaacctggcactggcattgttattgctgttaaaagacttaatcaagatggcatccagggtcacagggagtggttggctgaagtcaactatcttggacagctttctcatcctcatctagtgagattgattgggttttgccttgaagatgaacacggccttctcgtctacgaatttatgccacgtgga

SEQ ID NO: 25059 - DNA, 421 bp, Glycine max
  Clone ID: LIB3051-048-Q1-K1-G10
ctgcacaggatttatgtgatcgcaacatgggagtttgtttgagcgcccaaattaaagctgaaagcccatataacactgggttcaattcaaagtatgtgagtacggatggaaatgatttcggcagcacaaacgataaggtttcagcaaactcaattcctcaaactcctcggagtgagggtgagatcttgcggtcatccaatttgaagagctttcccttgtcagaacttaagacggccactagaaatttccgtccagatagcgtgttaggagaaggtggttttggatcagtttttaaggggtggatcgatgagaattcattgactgctaccaaacctggcactggcattgttattgctgttaaaagacttaatcaagatggcatccagggtcacagggagtggttggctgaagtcaactatct

SEQ ID NO: 25060 - DNA, 407 bp, Glycine max
  Clone ID: LIB3051-010-Q1-E1-F12
agtggtatcttatacactcctggcattaactcgatcatatgggatgcaagcgctggaatgggcaaaaaagagtgttttgttaattccatcaacagctgttacagatgtagagcgatcaagattcttaaaagcactttctgatgcagcatccggaggggatactaatggacttactgttcctgttgaagagctgtcagatgtttgccgacgtaacagggccgttcaggaaatagttcaggaagctttgagaccgcttgagttgaatatggtgaatgtatcatagaggattggtaaatgccattgatagagagggccattttgtttagggtcctgtctgttagttaggctagttggttgtgtattatctatctgttatattcatttttttttatccattatcattctcc

SEQ ID NO: 25061 - DNA, 406 bp, Glycine max
  Clone ID: LIB3051-016-Q1-E1-F12
agcccacgcgtccgggatggaagtgatgcaattctccttggagcagagaccctgcggggacaataccctgtagagaccatttctatagttggaaaaatatgtgctgaggcagagaaagttcataatcaagatttgtattttaagaaggctgtcaaatatgtgggagagccaatgagccatttggaatcaattgcttcctctgcggttcgagcagctatcaaggttaaagcctctgttattatttgcttcacttcatctggaagagctgcaagattgattgctaagtacagaccaattatgcctgtcatatccgttgtcattcctcaactgaagacaaatcaactccgatggacattcaccggtgcttttgaggctaggcaatctcttattgtgaggggtctttttc

SEQ ID NO: 25062 - DNA, 442 bp, Glycine max
  Clone ID: LIB3051-038-Q1-K1-F8
ctttttctcaaacaaacgactactttcctttcctgctgcgttcattccaaattgcaaacccaccataatatctagcttcttgtgaaggctgctagtttgatttagaagttgatattgataatttgctgcgatgggtggccaaaggagtggttatggtaagcgttcccactctcaatctgaccatgataatgggccaaataaaaggaggaatcatggtgatgacagagagcagtttgtgattgatttggaggatactgtgtatcgatacgtgtgcccgggtcgaaagattggcagtgttattggtaggggaggtgagattgttaagcagctgacggtggagactaaagctaagattaggattggtgagacggtgccgtggtgcgaagagcgtgtcgatactatttatagtcccagtgatgagactaatgcatgtgaaggtggt

SEQ ID NO: 25063 - DNA, 423 bp, Glycine max
  Clone ID: LIB3051-041-Q1-K1-F12
ccgcggatcaaactgtggtcatcacatgttctactcaggggttgttgccggagccagggaggcgttgttatctggtgtaccagctttatcgatgtcattaaattggaagaaggatgaaagtcaagaaaatgatttcaaggatgcagtgtcagtctgtttaccgttaataaatgcagctattagggatgttgaaaagggaacttttcccaaaagctgttttttaaatatagaaattcccacatctcctttgaatagcaagggtttcaaattgaccaaacaaagtatatggagatccactccaaactggctagctatttcctccagccgctatccaactggtcatttcttagccaatcaaggtggccttggtcttcagtttgcacagcttggccgagatgcttctgctgctggtgcagctcgtcg

SEQ ID NO: 25064 - DNA, 455 bp, Glycine max
  Clone ID: LIB3051-067-Q1-K1-D10
gttcccttctgccgaggaacctccacgtcgcagaggtactgaaacaagtagtgatctttctgggtgtgccaagaaaggaatagcagtgaaaccgcatagaggggacgcacttcttttcttcagtcttcacacaaatgctaccccagacactagcagtctccatgctggatgccctgtaatcgaaggtgagaaatggtccgcaacgaagtggattcatgtagactcgtttgataagactgtgggagctggaggtgattgttctgatcatcatgtaagctgtgagagatgggcttcacttggagaatgcactaaaaatcctgagtatatgattggatcttcagacgttcctggctattgtaggaaaagctgcaagtcgtgttaaaaattttactgaatgcttcccaagatactacatgttatctctgccacgggtttcaaatttcaactagttcttg

SEQ ID NO: 25065 - DNA, 412 bp, Glycine max
  Clone ID: LIB3051-053-Q1-K2-F8
ggacgtttgattgattgtttggagcgccgctatgctgtgctcaaccagtgcagctatgttgttcttgatgaggccgatcgtatgattgacatggggtttgagccccaggtgatgggtgtcctcgatgccatgccttccagcaatctcaaaccggagaatgaggatgaggagcttgacgagaagaagatttaccgcaccacctatatgttcagcgccaccatgccacctgctgtggagaggcttgctaggaaatatttgaggaaccctgttgtggtcaccattggcactgctggaaaggcaactgatttgatcagccagcatgtgatcatgatgaaggaggccgagaagttttccaagcttcataggttgcttgatgagcttaacgacaagactgcgattgtgtttgttaaca

SEQ ID NO: 25066 - DNA, 411 bp, Glycine max
  Clone ID: LIB3051-032-Q1-K1-H3
gttgttatgcgccgaaagtaatatgatggttgcattggaattgataaaacagcagcagggggaaatgggagatctagaggaacaaggcgagggtgctggctcctacttggaattggaagctactattccagagacccatgctgaaattccaatatcagatggcatctgattcaacaatcagagcgcgattttccaagccatctaggttgtgtaacgagactcgttggccatcgctcagagtttcacttctctgttcgcttccctgcgattggccctctccgaatccacatccacctctctgcatcacatgcagtgcttcaccgatgccttcggtcgccttcaggaatctgtgcttgatgcagctaccatagagaatcgctatataaattcctgtctcagatagaatgagga

SEQ ID NO: 25067 - DNA, 392 bp, Glycine max
  unsure (1)..(392): unsure at all n locations
  Clone ID: LIB3051-009-Q1-E1-A3
gtgatatcataatggattcccacaatctgttgtgtcacccttcaagagctcagtgttgggtgagggtgagaagcaaagttctgatgttttctcaggaaactctagtccttttgtcaaggacattgaagtgaatggcaaggaagtagtcatgtcaaatgtanaggagtttcttggagtgcttgatgtttacatacatcaagccacggacattcaaaacatttgcatataccacaagcaagatgtttatgccaaagattagtctgaccagtaatcctgagaccaccatgtccaccaaaaccatcaattgaagaagaaagaaccctgttttcaacgagaatcttcgtattgatgttaagactgttgatgcatctctcaagtgtgagatatggatg

SEQ ID NO: 25068 - DNA, 313 bp, Glycine max
  Clone ID: LIB3051-009-Q1-E1-A4
cgcgtccgagcaagcgtccggtgatatcataatggattccccacaatctgttgtgtcacccttcaggagctcagtgttgggtgagggtgagaagcacaagtctgatgttttctcaggaaactctagtcctttgtccaacgacattgatgtgaatggcaacgaagtaatcatgtcaagtgtagaggagtttcttggagtgcttgatgtttacatacatcaagccagggacattcagaacatttgcatataccacaagcaagatgtttatgctaagattagtctgaccagtaatcctgagaccaccatgtctacc

SEQ ID NO: 25069 - DNA, 455 bp, Glycine max
  Clone ID: LIB3051-108-Q1-K1-F8
cccacgcgtccgcatcgcctcctccaacaccaccgccacctcctggattcgcagaagcggcgccgcctaccacccctccacccgcatcgccgccgtctccctcggcgacgaggtcctctcctccctcccctccgccgtccccctcctcctccccgccctccgctccctccacgccgccctcgtctattccaatctccataacgacgtcttcgtttccacccctcactccgacttcgtcatcctcaaccccttccctacctcccaagccttcttcaaccaaaccctagaaaccttcattctccctcttctccatttcctctctcaaacaaattcccccttaatgctcaacctctacccttactacgtcttcatgcagaacagaaacctcgtccctctcgaaaacaccctcttcaaacccctccctttctccaaacaaatgctcgaccccaacactc

SEQ ID NO: 25070 - DNA, 419 bp, Glycine max
  unsure (1)..(419): unsure at all n locations
  Clone ID: LIB3051-047-Q1-K1-A3
acgcccacgcgtccgcccacgcgtccgaagaaacgaacggcgggttctggtggcggtggacgaaggcgaggaaagcatgtacgctctttcttggagcctcaagaacataattttccaaaattccagcgatacccttatccttctttacgtcaagccccctcatgccgtttattcccccttagattccacagccaggatagatcatcctgaaactccaggatatttgttttcgtcggacgtaagtgcggccatcgagaagtatggccaagaagtggcagattgcgtgttagagaaagcaaaaaaattgtgtaaagatctccaaaacgtcaaggtggaaacccgggtagaaattggagacccaagggacgtgatctgtgacatgtctcaaaagttgngtgctgacttgntaatcatgggta

SEQ ID NO: 25071 - DNA, 445 bp, Glycine max
  unsure (1)..(445): unsure at all n locations
  Clone ID: LIB3051-079-Q1-K1-A1
cgaaggcgaggaaagcatgtacgctctttcttggagcctcaagaacataattttccaaggttccagcgatacccttatccttctttacgtcaagccccctcatgccgtttattcccccttagattccacagccaggatagatcatcctgaaactccaggatatttgttttcgtcggacgtaagtgcggccatcgagaagtatggccaagaagtggcagattgcgtgttagagaaagcaaaaaaattgtgtaaagatctccaaaacgtcaaggtggaaacccgggtagaaattggagacccaagggacgtgatctgtgacatgtctcanaagttgggtgctgacttgttaatcatgggtagccacggctatggagttgtaaagagggctttccttggaagtgtgagcaattactgctcacagaacgtgaagtgcccaattttgata

SEQ ID NO: 25072 - DNA, 429 bp, Glycine max
  unsure (1)..(429): unsure at all n locations
  Clone ID: LIB3051-038-Q1-K1-H10
ctgaaacggactgataaaataagtagatgccttaatttgggatcatacaactatcttggttttgcggcagcagatgaatactgcacgcctcgagtagttgatacgttgaagaagtattctccaagcacttgcagtacacgtgtggatgggggaacaactgtgcttcaccttgaattggaggagtgtgttgcaaactttgttgggaagccagctgctatagtttttggtatgggctatgtgacaaactctgctattcttccagtcttgatggggaagggaagtttgattattagtgattcattgaaccacaactccattgttaatggtgcacgaggatcaagagcaacaattcgcgtttttcaacataacgagccatctcatctagaagaagtgttgagagaacaaattgctgagggacaacctangaca

SEQ ID NO: 25073 - DNA, 383 bp, Glycine max
  Clone ID: LIB3051-106-Q1-K1-A1
cccacgcgtccgggagggtaaaagtcaaggtcaaggttcagaaggaggttctgaatggagcaatactcgaacagtcttatcccgtcgagtatgttcaacaagaacatatgtgtgaatcctgttctagggtccaagctaatcctgaccagtgggttgctgctgtgcaactcaggcaacacgtttctcacaggcgtactttcttttatttggagcagctgattctgaagcatggtgctgctgccactgctatacgaatcaagcagatggaacaaggtatcgacttctttttctctaatcgaagtcatggagtcaaatttgtggagtttattgggaaagtttctccggtaaggagccgccatgataagcagcttggttctcatgat

SEQ ID NO: 25074 - DNA, 420 bp, Glycine max
  unsure (1)..(420): unsure at all n locations
  Clone ID: LIB3051-110-Q1-K1-F8
gcaatatctagagcttttggagaccactgcatgaaggactttggactaatctccgtgcctgatgtcacacacagaataattaccaccagggatcaatttgtcatcttggcaacagatggggtatgggatgttatatccaaccaggaagcagtgaagattgtttcagcaacgtcacataaagaaaaagctgctcataggcttgtgaaatgtgccatacatgaatggaaacggaaaaaaagtggcattgcgatggatgatatgtcagctatttgcctcttctttcactctcgcgcctctcatcaactccccccagccatcaaaattgttgattaagaatgtngagtggttaaacaggtcattacagctttctttgtaagttgtaacacagaaattcatttagactngtatataaacttatca

SEQ ID NO: 25075 - DNA, 437 bp, Glycine max
  Clone ID: LIB3051-035-Q1-K1-G2
cccacgcgtccgcccacgcgtccgcccacgcgtccgctttttgacaggattattgccaagggccactacagtgaaagggctgctgcttcaatatgtaggcaggttgttaaggttgttaacacctgccattttatgggtgtcattcatagggatctcaagccagagaatttcttgctatctagtaaggatgacaagggacttctcaaggccacggattttggcttgtcagtcttcattgaagaaggaaaggtgtatcgagatatagttggcagtgcttactatgttgctccagaagttctacgtcgtaactatgggaaggaagcagatatatggagtgcaggagttatattgtatatcttacttagtggtgtaccttcattttgggcagagacgggaaagggaatatttgatgtcatattgcaaggtcatattgattt

SEQ ID NO: 25076 - DNA, 430 bp, Glycine max
  Clone ID: LIB3051-065-Q1-K1-C3
cccacgcgtccggatttcagaaggaggtagaaagcgagcttttctctttgggaatgaccaagtttaacgtggaagaagagtctactagtgacttggaggaggaactgaagcgggtgactgcagaaaacaagaagttggccgaaatgctctcagtggtgtgtgagaactacaacactttgagaaaccatttgatggaatgcatgaggaaaaatggtgaaaaggaggtcagcccaacatcaaagaaaagaaagtctgaaagcagcaacaacaatagtaatttgatgggaactaacaatggaaactcagagagcagttctactgatgaagaatcttgcaagaaaccaagggaagaaatcatcaaagcaaaaatttcaagagtttatgtcaagactgaagcatctgatactagccttattgttaaagatggata

SEQ ID NO: 25077 - DNA, 428 bp, Glycine max
  Clone ID: LIB3051-078-Q1-K1-G9
gttgatttcagaaggaggtagaaagcgatcttttctctttgggaatgaccaagggtaaggtggaagaagagtctactagtgacttggaggaggaactgaagcgggtgactgcagaaaacaagaagttggccgaaatgctctcagtggtgtgtgagaactacaacactttgagaaaccatttgatggaatgcatgaggaaaaatggtgaaaaggaggtcagcccaacatcaaagaaaagaaagtctgaaagcagcaacaacaatagtaatttgatgggaactaacaatggaaactcagagagcagttctactgatgaagaatcttgcaagataccaagggaagaaatcatcaaagcaaaaatttcaagagtttatgtcaggacttgagcatctgatactagccttattgttaaagatggataccaatgg

SEQ ID NO: 25078 - DNA, 424 bp, Glycine max
  Clone ID: LIB3051-062-Q1-K1-E7
tcgcccacgcgtctcgacctgcttctggggttagagatgtgaatgcaagttctgttgctgttgaaaggttgcctgatgagatgaatggcatgaaaattagggatgaaagggaaatggaagcaactgtggtagatggaaatgggactgaaacaggacatataattgttactaccattggtggtaaaaatggccagccaaagcagacaataagctacatggctgagcgagttgttggaaatggatcatttggtgtagttttccaggcaaagtgcttggagacaggggaaactgtggctataaagaaggttcttcaagacaagaggtacaagaaccgggaattgcaaaccatgcgtcttctggatcaccccaatgttgtaactttgaagcattgcttcttttcaacaactgaaaaagacgagcttta

SEQ ID NO: 25079 - DNA, 395 bp, Glycine max
  Clone ID: LIB3051-047-Q1-K1-G10
actgaaacaaaacaagtgacttctgcatgtcgggtgtgcccttttggaagtaaagcaatgtgtagggtgcaacaatggagagctcttcatttggagcatccgttctctaaatatatgaaatggttcatcatctgaacatagttatcagaatactcctttgctcaaacttaacttatgatacaagtctgactgcatttccataggatcaataaaatgggctcatgctggaggaaaggctagtcgactatatattatggcagcctatgactgtgcaacttcaaacttgttgcaagtagtgacgctgaatgatcatacagaaactcgcacaattaatctgggacttcatatgtctgaatgctgtattgacatggagatcatatcaacttcaactgagc

SEQ ID NO: 25080 - DNA, 320 bp, Glycine max
  Clone ID: LIB3051-050-Q1-K1-G2
gtggaattttgcacctttttaggtcataatcctttcaaaattccgtgcttcggctggacatcgatttctctgcactgcccaaagaattggttgtgcagtccttgttttcagacaccgtctttaagttactgtcgacgtttgagttctataatgcccagtgattcttctgtaatctccaatggacacagcaatggcagtgtcaatccactacctaacctgcaaaggacttaccaagtggtagtggctgccactcaagattggggcatcggtaaggatgggaaattaccctggagattgcctactgatctcaagttttttaa

SEQ ID NO: 25081 - DNA, 346 bp, Glycine max
  Clone ID: LIB3051-053-Q1-K2-G10
aatcactcatagtggtcctaatgtgaatggtagtttgcttgggatgggaaggccagttctgaggccaatgtctgatatgtggataccccatggagacccccatatgtcagcattgcagccaatgttttcaggaagaccaaggggagcacccagactaatgggcatgatgggggcacatagaggtataagtattccttcaatgcatagactcccattggggcctaatgcaccagggagtagtcctaatgcaatgccacaaaaaccaagaagttttgatgatgatatgaaggatcttgaagcattgttgaataagaaatcatttatggagatgcaaaaatcgaaaact

SEQ ID NO: 25082 - DNA, 436 bp, Glycine max
  unsure (1)..(436): unsure at all n locations
  Clone ID: LIB3051-053-Q1-K2-G2
cccacgcgtccgcccacgcgtccgcgagatataattctaaactttgttattgcggggaaggacacgacggctgccacactttcttggttcatgtacatgctgtgtaagtatcctgaagttcaagaaaaagcagcagaagaagtgaaagaagcaacaaacacaaaaagaattagtagctataatgagtttgtgtacagtgtcacagatgaagctcttgaaaggatgaactatctccatgcagcaattactgaaactctcagactttatcctgcagttcccgtggatgcaaagatttgtttttctgatgatacactacctgatggatatagtgtaaataaaggagatatggtatcttaccaaccttatgcaatgggtcggatgaaatttatatggngtgatgatgcagaggattttagaccagaaagatggcttgatg

SEQ ID NO: 25083 - DNA, 417 bp, Glycine max
  Clone ID: LIB3051-104-Q1-K1-A3
gacccccgcgtgcgcccactcgtccgaccacgcgtccgtttttttaaaaaaaaaattccttgaaaaaatgaataagactaggttcttcgctctctgtgtgggttgtgccttcacctcatacctaccttcagccaccgctgatactatcttcgacataaatggtgattttgtccgaaacggtggcacatactacatcttgccagttataagaggagactgaggtggaatagaattcgccgcaacaggaaacgaaacatgccctctcactgtagtgcaatctccccttgaggtctctaagggtctaccactaatcatttcatcaccattcgaaatccttatcatccaagaaggccttattttgaacattgggttcacttttgtgcccccctgtgccctaattccttctgagtggactac

SEQ ID NO: 25084 - DNA, 433 bp, Glycine max
  Clone ID: LIB3051-113-Q1-K1-B10
aaaagcctttttttttaaaaaaaaaattcctttaaaaaatgaagaatactatcttcttcggtctgtttcttgtttgtgccttcacctcatacctaccttcagccaccgctgatactatcttcgacataaatggtgattttgtccgaaacggtggcacatactacatcttgccagttataagaggagactgaggtggaatataattcgccgcaacaggaaacgaaacatgccctctcactgtagtgcaatctccccttgaggtctctaaaggtctaccactaatcatttcatcaccattcgaaatccttagcatccaagaaggccttattttgaacattgggttcacttttgtgcccccctgtgccctaattccttctgagtggactactgttaagggtttaccagaaggactcgctgttaaacttactgggta

SEQ ID NO: 25085 - DNA, 391 bp, Glycine max
  Clone ID: LIB3051-114-Q1-K1-A11
tcgtccacgcgtctcgcccacgctgtccgccttcgcgtctcgaccacgccgtccgctggatgtgcggcgcctgtgtccctacattcctatctgagtgcgactactagttaaggtgtttaccagcaatgactcgcatgttaaacttactggctatgaaaataaagtgcctgattggtttaaaattgatagagtttcccttgaattcaatgactataagcttgtgttctgtgcaactgatgatagcacgtttgatgatattggcgctcatattgatggtgaatgaaacaggcgtctggaggagactgagaataatgatccagtattggttcactttaagaaacttgaagttgaatcatcagctactgcttgaggtggccttaaaaaatcatgt

SEQ ID NO: 25086 - DNA, 357 bp, Glycine max
  Clone ID: LIB3051-117-Q1-K1-H5
ctcatgcttccaatcctaagaacattttggactctgtcaaaaatgtattgtctgctttctagtggttttcctatccatacacaatgattggcataacattatgcgcattttcttcatctcttctcgcggtggaaaaattatcagatatatctttatcatttttaattggcgtgttacagggtgtgctgcctcaattgtttattgaaatttatctttgtggtgtgaatcaactgtatgaccttgaaatagacaagattaacaaaccacatctttcaatggcatctggacaattttcctttaaaaccggtgtcattatttctgcagcatttttagctctgagttttggatttacttgga

SEQ ID NO: 25087 - DNA, 388 bp, Glycine max
  unsure (1)..(388): unsure at all n locations
  Clone ID: LIB3051-112-Q1-K1-E8
gcaggagcgagtgattgcagaacacccagcgcgaatgagaatggaggaagcccttgcggggctggagcgagtccaaacccagctcctgcaacgcatatcgaaactggagcgttcgcatcttccatcaccctcttcccaaaacgacaccgtcgaagacactgccacggacaccgtggctcgcctctcctccattctgcgcagcaacggcgttcccgatttctccttcaagagagtcccttccgattactacgactggcccctcgaaacccgtcgcgacgccctctcncgtcgctaatccaccatctctgcaaaagcatcgttctcgttaacacgcaagcccccggcaacgtcgtcgatgcaacgaccgcaagaattcccaatactatgt

SEQ ID NO: 25088 - DNA, 445 bp, Glycine max
  Clone ID: LIB3051-008-Q1-E1-C1
aattaatttacaatggccgtcacgaaaagcctctcaatcttcctcttcatcgcaatgagctgcgtcgccgcagctcaggcagcgaacttcaacatcacaaataactgcacctacacggtgtgggccgctgccgtgcccggcggcggcgcaaggcttaaccctggcgaatcgtggaacatcagcgtgacgaacggcacaacaggaggacgcatctggggtcgaacaaactgcaccttcgacaacgcgggacgcgggaagtgcctcaccggcgactgcgagggtgttctggagtgcaacaaaacaggtacacccccgaacacggtcgttgatttcgcgttgaaccagtataacaacctcgacttctacgacatctccctcgtcgacggtttcaacgttcccctacagctgaccccgacctacaactgcagttccgttaaatgcgccg

SEQ ID NO: 25089 - DNA, 425 bp, Glycine max
  Clone ID: LIB3051-026-Q1-K1-E8
ccacaatggccgtcacgaaaagcctctccatcttcctcttcatcgccataagctgcgtggccgtagctcaggcagcgaacttcaacatcacaaacaattgcacctacacggtgtgggccgcacgatcgtgcccggcggcagctcaaggcttaaccctggcgaatcgtggaacatcagcgtgacgaacggcacgacttgaggacgcatctggggtcgaacaaactgcaccttctgcaacgcatgactcgggaagtgcctcaccggcgactgcgacggtgttcttgagtgcaacaaaacaggtacaccttcgaacacgttggtggaattcgcgttgaaccagtacaacaacctcgacttctacgacatctccctcgtcgacggtttcaacattcccttgcaggtgaacccgacctacaactgcagct

SEQ ID NO: 25090 - DNA, 380 bp, Glycine max
  Clone ID: LIB3051-030-Q1-K1-E8
cgaacggcacaacaggaggacgcatctggggtcgaacaaactgcaccttcgacaacgcgggacgcgggaagtgcctcaccggcgactgcgagggtgttctggagtgcaacaaaacaggtacacccccgaacacggtcgttgatttcgcgttgaaccagtataacaacctcgacttctacgacatctccctcgtcgacggtttcaacgttcccctacagctgaccccgacctacaactgcagttccgttaaatgcgccgccgacatcatcggagagtgccccactcagctccaggttcctggcggctgcaacaacccctgcacggttttcaatacgactcagtactgttgtagcaccggagctgctgggtgcggtcccaca

SEQ ID NO: 25091 - DNA, 381 bp, Glycine max
  Clone ID: LIB3051-061-Q1-K1-E3
gcgcgtcaacaaacgccacaatggccgtcacgaaaagcctctccatcttcctcttcatcggcataagctggggggccgtagctcaagcagcgaacttcaacatcacaaacaattgcacctacacggtgtgggcccgcccccgtgcccggcggcggcttaaggcttaaccctggcgaatcgtggaacatcagcgtgacgaacggcacgacaggaggacgcatctggggtcgaacaaactgcaccttccacaacgcaggacgcgggaagtgcctcaccggcgactgcgacggtgttcttgagtgcaacaaaacaagtacacctccgaacacgttggtggaattcgcgttgaaccaagacaacaacctcgacttctacgacatc

SEQ ID NO: 25092 - DNA, 265 bp, Glycine max
  Clone ID: LIB3051-070-Q1-K1-E7
cttcaacaaacgccacaatggccgtcacgaaaagcctctccatcttcctcttggtcgccataagctgcgtggccgtagctcaggcagcgaacttcaacatcacaaacaattgcacctacacggtgtgggccgccgccgtgcccggtttctgctcatggcttaaccctggcgaatcgtggaacatcatctttacgaacggtactacaggaggacgcttctgtggtcgaacaaactgcacctttgacaacgcatgactcgttaagtg

SEQ ID NO: 25093 - DNA, 237 bp, Glycine max
  Clone ID: LIB3051-087-Q1-K1-D2
aaacgccacaatggccgtgacgaaaagcctctgcatcttcctcttcatcgccataagctgcgtgggcgtagctcaggcagcgaacttcaacatcacaaacaattgcacctacacggtgtgggccgcctccgagcccggtggcggctcatggcgtaaccctggcgaatggtgtaacatccacatgaccaagagatctacaggatgacgcatctggggtcgaacaaactgctgcttcta

SEQ ID NO: 25094 - DNA, 242 bp, Glycine max
  unsure (1)..(242): unsure at all n locations
  Clone ID: LIB3051-088-Q1-K1-A4
aaacgccacaatggccgtcacgaaaagcctctccatcttcctcttcatcgccataagctgcgtggccgtagctcaagcagcgaacttcaacatcacaaacaattgcacctacacggtgtgggcccgccgncgtgcccggcggcggctcaaggcttaaccctggcgaatcgtggaacatcagcgtgacgaacggcacgacaggaggacgcatcttgggtcgaacaaactgcaccttttacaac

SEQ ID NO: 25095 - DNA, 369 bp, Glycine max
  Clone ID: LIB3051-093-Q1-K1-G2
cccacgcgtccgcccacgcgtccggcagaatcaggctgaggcacttgatctggaaaaaaccgtgcttgagacagtagaggaagctgcagaggactggaggattgatgatattaaagggctccttgggcgttgtaattttaaagctgatatgcttgaccgaaaagtttcactattgagtggcggtgagaaggcacggctggctttttgcaaattcatggtaaaaccatcaactctgcttgtgttggatgaaccaaccaatcacttggatataccttctaaagaaatgctcgaggaggcaatatatgaatacgaaggcactgttatcacagtatctcatgaccgatactttattaagcaaattgttaatag

SEQ ID NO: 25096 - DNA, 382 bp, Glycine max
  Clone ID: LIB3051-048-Q1-K1-E9
cccacgcgtccgttttttttttaaagggaaaatgaaattcacacaagaagccaaagaaagcagaaacagaggaagagagagaaacaccaaagatgggtctttgctttggttgcttcggcgtagacaaacgcatgagcaaggaagaagagagattggcctctgaagaagcgcgtgccaaagctgctgaagccgcacagaaaaggcaagagcaatttgagaattctgcagcaggacgagctgctcgtgcacagcaacaagcaatggcaaagcaatctgcaaataccaacaaaggcgaaccagttctaaagtggcaaaatgagttgaggttagacattctgtcagttggagttaacttttaattacgtgtaagtatcgatgacag

SEQ ID NO: 25097 - DNA, 393 bp, Glycine max
  Clone ID: LIB3051-094-Q1-K1-B5
gttacagggataacatacgacagagaaagcatcgaacaatggttgctaaaagcgaaagattgcacgtgtccaatcacaaagcaacgattgccacgaagcacagagttcttaaccccaaaccacacgcttcggaggctaatccaagcgtggtgctcagcaaacgaagccaatggcgtagaccaaattccaaccccaaaatcccctcttagcatcgtcaacgttgagaaactcgtgaaggatctcgaagtatcttcccgttttcaaagggcattggagaagttgcacgatcttgcaatagagaacgggaggaacagaaggtgcatggcttctgcgggtgtagcaaaagctatggtgcacgtgatcacaaagagttttatccaaggtaacaaaacg

SEQ ID NO: 25098 - DNA, 404 bp, Glycine max
  Clone ID: LIB3051-001-Q1-E1-D8
ctcaagagagggtctgcctgtctttgcaagtggtgttgggcttagcacatttgacaaagcatctgttcattagtatgtgcagtcacacattcaaattaatgaatatcgtgagcgtataatcttgccttctgcatcaaagaagcaggggcgacctattaccacttgtataaaggttttagacatgactggtctgaagttatcagccctgaatcagattaagttgctaactattatatcatccattgatgatctgaactaccctgagaagacaaatacttattacattgtaaatgctccatacatattttctgcttgttggaaggttgtgaagccacttttacaagagatgacactaagactgatacaggtgttaccaggttgtggacgatatgagctattgacta

SEQ ID NO: 25099 - DNA, 433 bp, Glycine max
  Clone ID: LIB3051-008-Q1-E1-C6
acggacgcgtgggcggacgcgtgggcggacgcgtgggcggacgcgtgggttgtcaccgaaactttaatgcggtttctaaaagcaagggactgggatccttgcaaggcacataaaatgttggttgactgtttaaattggagggtgcaaaatgagattgacaatatattatctaaaccaattgttcctgctgatttatacagagcggtgcgtgattcacaactcataggattatcaggttactcaagagagggtctgcctgtctttgcaattggtgttgggcttagcacatttgacaaagcatctgttcattattatgtgcagtcacacattcaaattaatgaatatcgtgagcgtataatcttgccttctgcatcaaagaagcaggggcgacctattaccacttgtataaaggttttagacatgactggtctga

SEQ ID NO: 25100 - DNA, 347 bp, Glycine max
  unsure (1)..(347): unsure at all n locations
  Clone ID: LIB3051-098-Q1-K1-D10
ccacgcgtccgcaactttggnagnngatgtgccttngcgattaacgtttcagaatgttcatcaagggtttgtcaccgaaactttaatgcggtttctaaaagcaagggactgggatccttgcaaggcacataaaatgttggttgactgtttaaattggaaggtgcaaaatgagattgacaatatattatctaaaccaattgttcctgctgatttatacagagcggtgcgtgattcacaactcataggattattaggttactcaagaaagggtctgcctgtctttgcaattggtgttgggcttagcacatttgacaaagcatctggtcattattatgtgcagtcacaca

SEQ ID NO: 25101 - DNA, 465 bp, Glycine max
  unsure (1)..(465): unsure at all n locations
  Clone ID: LIB3051-068-Q1-K1-F5
gttttgggaagttctcaaaggcttttcactggaaaacaggaagaaatttctgaagtttgtgacaggttgctctcgtgggccattgcttggtttccgatatcttgaacctatgttttgcatacaaagggcttccggtaatgccgctgaggaatcacttgaccgattaccaacatcggctacttgtatgaatctactaaagcttccgccttatacaagcaaggagcaattggaaaccaaattactgtatgccataaatgccgatgctggctttgatttaagttaaaaggaggcagcggagtttacgatatctttaggtttgaagccggtagaaaatgactcacagatgaccattaattggaaacgacanataatatggtggatagaattgaataaatttatcctgtgtgagagtttatgtatatatattcttaattttattcaatcttcattgtcaattggtatctc

SEQ ID NO: 25102 - DNA, 419 bp, Glycine max
  Clone ID: LIB3051-007-Q1-E1-C12
acgcgtccaccacgcgtccggcactttagataatgactgccataaagacaaacaatattctttcaatactcatcatcatttgagactaattaagcttgcgtgattcctagaattgagaagagaaaagaatattttgttgttgggcttatgatatctagttgggaccccagcagcttaagtacatgacagttctcaaagactcttctgattgatttgccttctcatgttttagtgttgtggagatcatagcagaagaagaaagcttgttagcctgagagaatgagccaacatggtttttgagatggtgttgagctgatcttaaggcatgattccacctgcatataccttggtctttcaaggcctccacaattccaacacttgctgccacactccatgctctaattcctgaactcatcttg

SEQ ID NO: 25103 - DNA, 385 bp, Glycine max
  Clone ID: LIB3051-012-Q1-E1-G6
agctttagtgttttctcttgtcacataaaagtcatctaagaagaattacaagatcatcatcacaataacaagatgagttcaggaattagagcatggagtgtggcagcaagtgttggaattgtggaggccttgaaagaccaaggcatatgcaggtggaatcatgccttaagatcagctcaacaccatctcaaaaaccatgttggctcattctctcaggctaacaagctttcttcttctgctatgatatccacaacactaaaacatgagaaggcaaatcaatcagaagagtctttgagaactgtcatgtacttaagctgctggggtcccaactagatatcataagcccaacaacaaaatattcttttctcttttcaattctaggaat

SEQ ID NO: 25104 - DNA, 418 bp, Glycine max
  Clone ID: LIB3051-019-Q1-E1-D9
acattatcagtatcattcattgtcactacgattgttctaaaagcaattattactcttgagaagaattaaaatatcatcatcacaataacaagatgagttcaggaattagagcatggagtgtggcagctagtgttggagttgtggaggccttgaaagaccaaggcatatgcaggtggaatcatgctttaagatcagctcaacaccatctcaaaaaccatgttggctcattctctcaggctaacaagctttcttctactgctatgatctccacaacactaaaacatgagaaggcaaagcaatcagaggagtccttcagaactgtcatgtacttaagctgctggggccccaactagatatcataagtccaataagaaaatattctttctcttttaatttctaaaaattatcaagcttagtc

SEQ ID NO: 25105 - DNA, 382 bp, Glycine max
  Clone ID: LIB3051-019-Q1-K1-D9
ctttatcagtatcattcattgtcactacgattgttctaaaagcaattattactcttgagaagaattaaaatatcatcatcacaataacaagatgagttcaggaattagagcatggagtgtggcagctagtgttggagttgtggaggccttgaaagaccaaggcatatgcaggtggaatcatgctttaagatcagctcaacaccatctcaaaaaccatgttggctcattctctcaggctaacaagctatcttctactgctatgatctccacaacactaaaacatgagaaggcaaagcaatcagaggagtccttcaaaactggcatgttcttaagctgctggggccccaactagatatcataagtccaataagaaaatatatct

SEQ ID NO: 25106 - DNA, 436 bp, Glycine max
  Clone ID: LIB3051-025-Q1-K1-C6
aaaagcaagaacaattactttagtgttttctcttgtcacataaaagtcatctaagaagaattacaagatcatcatcacaataacaagatgagttcaggaattagagcatggagtgtggcagcaagtgttggaattgtggaggccttgaaagaccaaggcatatgcaggtggaatcatgccttaagatcagctcaacaccatctcaaaaaccatgttggctcattctctcaggctaacaagctttcttcttctgctatgatatccacaacactaaaacatgagaaggcaaatcaatcagaagagtctttgagaactgtcatgtacttaagctgctggggtcccaactagatatcataagcccaacaacaaaatattcttttctcttttcaattctaggaatcaagcaagcttaattagtctcaaatgatgatgagta

SEQ ID NO: 25107 - DNA, 420 bp, Glycine max
  unsure (1)..(420): unsure at all n locations
  Clone ID: LIB3051-028-Q1-K1-H11
caagatgagttcaggaattagagcatggtgtgtggcagcaagtgttggaattgtggaggccttgaaagaccaaggcatatgcaggtggaatcatgccttaagatcagctcaacaccatctcaaaaaccatgttggctcattctctcaggctaacaagctttcttcttctgctatgatatccacaacactaaaacatgagaaggcaaatcaatcagaagagtctttgagaactgtcatgtacttaagctgctggggtcccaactagatatcataagcccaacaacaaaatattcttttctcttttcaattctaggaatcaagcaagcttaattagtctcaaatgatgatgagtattgaaagaatattgcttgactntatggcagtcattatgtaaattttgatattgatagtgatgagctg

SEQ ID NO: 25108 - DNA, 420 bp, Glycine max
  Clone ID: LIB3051-029-Q1-K1-F8
cttagtcactctatcagtatcattcattatcactacgattgttctaaaagcaatgattactcttgagaagaattaaaagatcatcatcacaataacaagatgagttcaggaattagagcatggagtgtggcagctagtgttggagttgtggaggccttgaaagaccaaggcatatgcaggtggaatcatgctttaagatcagctcaacaccatctcaaaaaccatgttggctcattctctcaggctaacaagctttcttcttctgctatgatctccacaacactaaaacatgagaaggcaaagcaatcagaggagtccttcagaactgtcatgtacttaagctgctggggccccaactagatatcataagtccaataagaaaatattctttctctttaatttctagaaatatcaagctta

SEQ ID NO: 25109 - DNA, 414 bp, Glycine max
  unsure (1)..(414): unsure at all n locations
  Clone ID: LIB3051-040-Q1-K1-G6
cccacgcgtccggttactttatcagtatcattcattgtcactacgattgttctaaaagcaattattactcttgagaagaattaaaatatcatcatcacaataacaagatgagttcaggaattagagcatggagtgtggcagctagtgttggagttgtggaggccttgaaagaccaaggcatatgcaggtggaatcatgctttaagatcagctcaacaccatctcaaaaaccatgttggctcattctctcaggctaacaagctttcttctactgctatgatctccacaacactaaaacatgagaaggcaaagcaatcagaggagtccttcagaactgtcatgtacttaagctgctggggccccaactagatatcataagtccaataagaaaatattctntctcttttaatttcta

SEQ ID NO: 25110 - DNA, 420 bp, Glycine max
  unsure (1)..(420): unsure at all n locations
  Clone ID: LIB3051-043-Q1-K1-A12
gttactttatcagtatcattcattgtcactacgattgttctaaaagcaattattactcttgagaagaattaaaatatcatcatcacaataacaagatgagttcaggaattagagcatggagtgtggcagctagtgttggagttgtggaggccttgaaagaccaaggcatatgcaggtggaatcatgctttaagatcagctcaacaccatctcaaaaaccatgttggctcattctctcaggctaacaagctttcttctactgctatgatctccacaacactaaaacatgagaaggcaaagcaatcagaggagtccttcagaactgtcatgtacttaagctgctggggcncccaactagatatcataagtccaataagaaaatattctttctcttttaatttctagaaattatcaagcttag

SEQ ID NO: 25111 - DNA, 361 bp, Glycine max
  Clone ID: LIB3051-046-Q1-K1-F11
cttagttactttatcagtatcattcatcacaacaacaagatgagttcaggaattagagcatggagtgtggcaactagtgttggagttgtggaggccttgaaagaccaaggcatatgcaggtggaatcatgcattaagatcagctcaacaccatctcaaaaaccatgttggctcattctctcaggctaacaagctttcttcttctgctatgatctccacaacactaaaacatgagaaggcaaagcaatcagaggagtctttcagaactgtcatgtacttaagctgctggggccccaactagatatcataagtctaataagaaaatattctttctcttttaatttctagaaattatcaagctt

SEQ ID NO: 25112 - DNA, 411 bp, Glycine max
  Clone ID: LIB3051-059-Q1-K2-D7
gttttctcttgtcacataaaagtcatctaagaagaattacaagatcatcatcacaataacaagatgagttcaggaattagagcatggagtgtggcagcaagtgttggaattgtggaggccttgaaagaccaaggcatatgcaggtggaatcatgccttaagatcagctcaacaccatctcaaaaaccatgttggctcattctctcaggctaacaagctttcttcttctgctatgatatccacaacactaaaacatgagaaggcaaatcaatcagaagagtctttgagaactgtcatgtacttaagctgctggggtcccaactagatatcataagcccaacaacaaaatattcttttctcttttcaattctaggaatcaagcaagcttaattagtctcaaatgatgatgagt

SEQ ID NO: 25113 - DNA, 429 bp, Glycine max
  Clone ID: LIB3051-095-Q1-K1-D5
cttagttactttatcagtatcattcattatcactacgattgttctaaaagcaattattacgtgctggagaagaattaagagatcatcatcacaataacaagatgagttcaggaattagagcatggagtgtggcagctagtgttggagttgtggaggccttgaaagaccaaggcatatgcaggtggaatcatgctttaagatcagctcaacaccatctcaaaaaccatgttggctcattctctcaggctaacaagctttcttcttctgctatgatctccacaacactaaaacatgagaaggcaaagcaatcagaggagtccttcagaactgtcatgtacttaagctgctggggccccaactagatatcataagtccaataagaaaatattctttctcttttaatttctagaaattatcaagcttagtcac

SEQ ID NO: 25114 - DNA, 441 bp, Glycine max
  Clone ID: LIB3051-104-Q1-K1-C2
ctttagtgttttctcttgtcacataaaagtcatctaagaagaattacaagatcatcatcaggatagcaagatgagttcaggaattagagcatggagtgtggcagcaagtgttggaattgtggaggccttgaaagaccaaggcatatgcaggtggaatcatgccttaagatcagctcaacaccatctcaaaaaccatgttggctcattctctcaggctaacaagctttcttcttctgctatgatatccacaacactaaaacatgagaaggcaaatcaatcagaagagtctttgagaactgtcatgtacttaagctgctggggtcccaactagatatcataagcccaacaacaaaatattcttttctcttttcaattctaggaatcaagcaagcttaattagtctcaaatgatgatgagtattgaaagaatattgcttgtctt

SEQ ID NO: 25115 - DNA, 390 bp, Glycine max
  Clone ID: LIB3051-015-Q1-E1-B5
agcagagttctcggcgcagtttgccttcgtttgagctctgttctgttctgtgcctccacaaaccaaaccaggcacaagtaatacggtttaaccaaacaaactaaattaaaccaagtgaaaggaagtagtcaagttaaagaaaatggcgaagtcattgagatcgaagagggagaagaggctgagggctattccgaaggagattgttgaacctttctatgacaagaaagaagctgctaagcttgctgcccaagaagctgcccttgccgcccctaagctggaggttccttcgaaaccaaatactgctatggaagcatccgcttccactgacaacaccaacatggatgtggaggtggctgatggaagccaaagcatggcttccttaaagcctgt

SEQ ID NO: 25116 - DNA, 432 bp, Glycine max
  Clone ID: LIB3051-019-Q1-E1-B8
agagaggttggaagacttgtgatgtggagtatcaatcttactttgctcttgatgatctctgggaatcgtttaaggagtggagtgcgtatggagcaggagtccctttggtacttgatcaaagacaatctgttgtgcaatattatgttccgtatttgtcggctattcaagtatatggtcaatcagataagaagtcaaatgctaagccaaggtacaccagtgaagatagtgacggtgattactgccgagattcaagcagcgatggaagcagtgacagtgaatttggaaaaaggactgaactttttacagcacaaagaaatagtcactatcatacaggtgatgcttcgtttcaaatgagcaggctatctgtacatgatcacaatacaatgcaagacggattttctagtgacgatagtgaaactgggaatcctaaag

SEQ ID NO: 25117 - DNA, 426 bp, Glycine max
  Clone ID: LIB3051-048-Q1-K1-G6
acgttttgcgcgttgtttatgtgcagggtttttacattgtctcttatggactcggaatgtaccttctgaatctcttgattggttttctctcccctttggttgatcctgagctcgatccctccgactcccctttgcttccaaccaaaggctccgatgagttcaaacccttcattcgccgccttccggagttcaagttctggtattctttcaccaaggctctctgcatagcgtttgtgatgacctttttttccctgtttgatgttcctgtcttttggcctatattactctgttactggtttgttctctttgtccttacaatgaggcgccaagttgctcacatgatcaaatacaaatatatccgcttcaacttggggaagcagaagtatagcggtaataaatcttctgcaaggagcagtagctctcgtg

SEQ ID NO: 25118 - DNA, 446 bp, Glycine max
  Clone ID: LIB3051-060-Q1-K1-D1
aaattacttgtttatgggagattatgttgttcgtggctattattctgtcgaaactgttgcgcttttggttgcccggaaagtgcgttatcgtcagcgtattactattctgaggggaaatcatgaaagtcgccagattactcaagtttatgggttttatgatgagtgcctgcggaagtatggtagtgctaatgtttggaagatctttaccgatttgtttgactactttccgttgacagcattggttagtatactattacataatttttggaaaggattgtgggatattttgttagattgtcatttttctcaggtccaaggtagtttgttcaattcaatgatcctgggcacccttattatgctggcttgcatttaagattacaccatggtggaattggctgctatcgctgtgctgtattgtggaatctgttggagcagatgaccctatt

SEQ ID NO: 25119 - DNA, 419 bp, Glycine max
  Clone ID: LIB3051-117-Q1-K1-G7
ctcaagagctttttgaaaagcccttcttttcgtcagttgcaaaggctcttcgtccaggtggagttgtgtgcactcaggcagaaagcatatggcttcatatggatataattgaggacattgtggctaattgtcgccagatttttaaaggctctgtcaactatgcttggactactgttcctacatacccaagtgggatgattggttttatgctttgctcaactgagggaccacctgttgatttcaagcatccagtgaatcccatagatgaaaatgagagtcagaagtcagtaagaccgctgaaattttacaactctgagattcataccgcagctttctgcttgccgtcgtttgcgaagaagaagattggttctaaagcaaattaagaagattttctaaacctttgaaagagctcatgtggc

SEQ ID NO: 25120 - DNA, 468 bp, Glycine max
  Clone ID: LIB3051-083-Q1-K1-E5
cccacgcgtccgcccacgcgtccgtcttagttgtgataatatgagagtgagcgcagagtttgagcgtgttctcaagtatttcgatgaagatggggatggtaagatttccccatctgagcttaggaaccggctatgcatgatgggtggtgagttattgttcaaagacgctgaaaagttgattgaggaattggattctgacggtgatgggtttttgagtttggaagattttgtgaagataatggaggcagcaggggaagatgagaagttgaaggatttggcggaagcttttgagatgtaccatgacactgaaatgtttgggtttattacacccaaaagcttgcaaaggatgctgaataggttgggagaatcaaaatccatggagcaatgcatagcaatgattggccattttgatttgaatggagatggcgtgcttagctttgatgaatttggagtgatgatgcagtgatg

SEQ ID NO: 25121 - DNA, 415 bp, Glycine max
  Clone ID: LIB3051-040-Q1-K1-C10
caaaattcaattttgagcactaaccagcaccacttccaatggcttcaaatcatgaagaagtgatacttttgggcaagtgggccagcccatttagcaacagagtagaccttgctctcaagctcaagggagttccctacaaatactccgaggaagatcttgctaacaagagtgctgatcttctcaggtacaaccccgtgcacaagaaggttccggttttggtccacaatgggaacccattacccgagtcacttatcattgttgaatacatcgatgagacatggaaaaataatcccctcttgcctcgagacccttatgagagagccctggctcgtttctggtctaagaccttagatgacaagatcttgcctgctatatggaatgcttgctggagtgatgagaatggacgtgagaaagc

SEQ ID NO: 25122 - DNA, 404 bp, Glycine max
  Clone ID: LIB3051-020-Q1-E1-B1
tttccgctttcacttcttctctctcaccctccaactatgagttactacaaccagcagcagccacccgtcggtgttcctcctccccaaggttacccaccgccggaatcttacggaaaggacgcgtaccctccgccagggtaccctccacagggaggataccctccgcaggcgtatccagcacaggggtaccctccaccctacgcgcctcctcagtacgctcagcctccgccgcaacaacaccagaattcatctggcccgggttgcttagaaggatgtttggctgctctctgctgctgttgcctgttggatgcctgcttctgagaaagaaaagagaggttgctttgcacaaattggatttgaaactgtgttttgactttgaacatgaccattatcgctcttagttt

SEQ ID NO: 25123 - DNA, 443 bp, Glycine max
  unsure (1)..(443): unsure at all n locations
  Clone ID: LIB3051-048-Q1-K1-F11
caacgatgagttactacaatcagcagcaaccacccgtcggtgttcctcctccccaaggtgtacccaccgccggattcttacggaaaggacgcgtaccctccgccagggtacccgccgcaaggaggataccctccgcaggcgtatccagcacaggggtaccctccaccctacgcgcctcctcagtacgctcagcctccgccgcaacaacaccagaattcatctggcccaggttgcttagaaggatgtttggctgctctctgctgctgctgtctgttggatgcgtgcttctgagaggagaagaggttgctttgcacaaattggatttgaaactgtgttttgactttgaatatcgtcgttagttnttattattctatgttgatttacatttcgtggatatgaaatattgcttcgaaagatatgttctgtttcatttacaggattct

SEQ ID NO: 25124 - DNA, 416 bp, Glycine max
  unsure (1)..(416): unsure at all n locations
  Clone ID: LIB3051-101-Q1-K1-B4
cttcaaggtggaaagaaaaacccacccactatcccaattccaataaataccttcctctggatattttcgcacaataccctctcacccttcaacgatgagttactacaatcagcagcaaccacccgtcggtgttcctcctccccaaggttacccaccgtcggattcttacggaaaggacgcgtacccttcgccagggtacccgccgcaaggaggatacccttcgcaggcgtatccagcacaggggtaccctccaccctacgcgcctcctcagtacgctcagcctccgccgcaacaacaccagaattcatctggcccaggttgcttagaaggatggtaagtctctctctctctctctctctctgcatatntctgagtgaaagtgttcgtggcaactcagatcgggattcactcgattg

SEQ ID NO: 25125 - DNA, 443 bp, Glycine max
  Clone ID: LIB3051-111-Q1-K1-A5
ggaaatagctttcctcggttataaccttcaaggtggaaagaaaaacccacccactgtccggattccaataaataccttcctctctatattttcgcacaataccctctcacccttcaacgatgagttactacaatcagcagcaaccacccgtcggtgttcctcctccccaaggttacccaccgccggattcttacggaaaggacgcgtaccctccgccagggtacccgccgcaaggaggataccctccgcaggcgtatccagcacaggggtaccctccaccctacgcgcctcctcagtacgctcagcctccgccgcaacaacaccagaattcatctggcccaggttgcttagaaggatgtttggctgctctctgctgctgctgtctgttggatgcgtgcttctgagaggagaagaggttgctttgcacaaattggattgaaact

SEQ ID NO: 25126 - DNA, 338 bp, Glycine max
  Clone ID: LIB3051-048-Q1-K1-D2
gcgccttgctgtgtgagagaaagagaaatggcaacaagcgaagaagtggttgcggctgcgcgggatggggccgagccggaggcagggttgaagcacaaactggagagaaaatggacgttttggtgcgacaaccaatccatacccaagcaaggcgctgcttggggaacctctcttcgcaaggtctacaccttcgacaccgttgaagagttctggtgtttgtatgatcaggtattcaagcccagcaagttgcaaatcaatgccgattatcacttgttcaagactgggattgaccctaaatgggaagatccagagtgcgcccatgggatgaaagtggtcta

SEQ ID NO: 25127 - DNA, 414 bp, Glycine max
  Clone ID: LIB3051-002-Q1-E1-F4
cggataacgaaagcaattttgatttgtgtcgaggaaaggacaggtcttagaacccttcttttcttcctcgtgtgcgtgaaaacgaagcaacgccacacgatggtgttctacttcaaagcgcgccctgaagccggcgatttcaccatcttcatgggcctcgacaagttcgagaacgaggaactcatcaaatacggttttcccgaagacatctggttccatgttgataaaatgtcttcagcccatgtctatgtcaggctgcacaaaggccagactctcgatgacctgagtgaggctttactggaagattgtgctcagcttgtcaaagcaaattcaatttcagggaattaagtgaacaatgttgaagttgtttacactccctggtctaaattaaagaaaactgcttcaatggatgtt

SEQ ID NO: 25128 - DNA, 360 bp, Glycine max
  Clone ID: LIB3051-103-Q1-K1-D2
ggagtgagtctcggggcatcaaagaagtcagatgggagacgtggcagataaattggcgtatgtacaagcgattaccggtttagaagatccggaactatgtacagaaatcctggctgaccacaattgtgacctgaaactcgatatgtctacttttacctctaccttaaactctaacaaccatccaccgactcctgctctggcttggaaactcattaccctactcgtttccgtaatctacgccagtataggcttaagtttcggcgctatcggcttgggcctatgggccgcggtatgcgtcctctcctattccctcggcctcgtgggcctgggctcgcccttgggctcattggtttccgtaac

SEQ ID NO: 25129 - DNA, 422 bp, Glycine max
  Clone ID: LIB3051-087-Q1-K1-E7
acaagctgaagaagggaaggtggctttgaggaatataagaagagatgcattaaaagcttatgataaacttgagaaggagaaaaagctctccgaagataatgtgaaggatttgtcaagtgatttgcagaagctgacagatgagtatatgaagaaagttgacaccatcttcaaacagaaagaaaaggagttgctcacagtttgatgctttgttgcaaaaagtaaatgctgagttctatctaaagaaggtcaaattttgtgcctactttgctccagggttggatgatgaatgcgcatgttcattggttatacagaagacaaacttttgaattaaatagatgtttttcaaattggaaaggtgagttcatgtctgtaaattggatttatttcacgtaattcttcattgaaattagaccctcaccgaa

SEQ ID NO: 25130 - DNA, 462 bp, Glycine max
  Clone ID: LIB3051-101-Q1-K1-H9
agaaaatgttcaaaaaattttcaggtgaagatgtatctgcacagaaccaagtgaaggcatctgtgtcaacgaaaaatacggcaaagtattgctgaagagtatccgggtcttgaacctgtgttggatgatatacttcccaagaagtcccctctaatagttgctaaatgtcagaaccatctcaatctggttcttgtgaacaacgtgccactgtttttcagtgtccgtgatggaccatacatgcccaccttgcgtcttctccatctatatccaaatataatgaaaaagttacaagttgaccgtggtgcaattagatttgtcttggcgggtgcaaacataatgtgtcctggtcttacatctcctgggggtgttttggatgaggaagtaggggcagaatgtcctgtggccatcatggctgaaggaaaacagcatgctcttgctattggctttacaaaaatgtcagca

SEQ ID NO: 25131 - DNA, 433 bp, Glycine max
  Clone ID: LIB3051-003-Q1-E1-G10
cttctctctctcacactttctctcagcgttgaaacttgaaattcttcttctccgaaacctctttgaaccgggtcaagaaataaacctcgctgggaaccgttgattgggtttgtacgaataatttgaaatgaagattcagtgcaacgtgtgcgaggccgcggaggccaaggttctgtgctgcgcggacgaggcagcactgtgctgggaatgcgacgagaaggttcacgcagcaaacaagctcgccagcaagcaccagagggtccctctctctctctccgcctctcacatgcccaagtgtgacatatgccaggaaatggttggttatttcttctgtttagaggatcgagctttgctatgtaggaattgtgatgtatctatacatacagcaaatgcctgtgtctctgatcatcaaaggtttttgcttactggtgtg

SEQ ID NO: 25132 - DNA, 389 bp, Glycine max
  Clone ID: LIB3051-004-Q1-E1-G10
cggacgcgtggggtcaattcttttgaattcctgcaccctctacttaggagtttggattatgaactgccaaagacttccctaccggtcgaccgtgctcttgttctcagcaggatttgctgggctgtttatacaatcctatatccatggctcaatcggtggtggcttccacagccattcatccttccctctgaagtacacaaggtgggagtgacccattatttctcttatcttaaagccaaagaggagattggctattttcccatggtgacctcgcgagaggggatggctttgaccatatcttactggcaagagaggaaacgaacaactctggatggaccaacaatctacgcgtggttgttttgtgtcattggaatgatctcactgttttg

SEQ ID NO: 25133 - DNA, 240 bp, Glycine max
  Clone ID: LIB3051-003-Q1-E1-C3
gttttagcaatggtgaaactggtgatgaaggacgtccaagaagagcatttgaacgccacagtgggactggacgatgaaatgaattcaaacgggaacggtctggacctggtaactggggtacacagaatgatgacattgctgacgtgactgaggaagtggtgaatgaaactgaaaacgttcttgctgatgacaagcctgtacgagacgaagatgcagcagaagggaacaaggacagtcctg

SEQ ID NO: 25134 - DNA, 351 bp, Glycine max
  Clone ID: LIB3051-054-Q1-K2-G4
atctgaacaataataattaaccatggaaccgtcgctgagttaacctttttcttctgcgcggtgctgttctcttttgttgtttgggttttttttttttctttctgagaagggcttgttgttgttgtgtttcgaaataatggcgactacgaatccctttgatttgttgggcgacgacgccgaggacccctcacagttgatcgcggcggagcaactgaaggccgcggcagccgcggccaccgcgccacccaagaaggaccaggccaagcccggagctcgcaacggcgcgccggcccagttgccgtcgaagccgctttcttccttttaagctgtaagggaagctaaaaatgaaac

SEQ ID NO: 25135 - DNA, 438 bp, Glycine max
  Clone ID: LIB3051-051-Q1-K1-B7
atgatgagctgcgtttcgatttcgagttcagtgacaagaggcgctattagcgtgggttcctcttcatctttgtgtttcggcacacccaagttgttcaattcagcaagggtagcggtgaatggtcggcgaagaaacaaaggtttgagttgcaacgccatgttcggtctgggggtgcccgaactggtcgttattgccggcgtggccgccctggtttttgggcccaagaaattgcctgaagtcggccgtagcatcggcaagactgtaaagagcttccaacaggctgcaaaggagtttgagtcggagcttaagaaggaacctgattccacccaaggggactcatccgagaaacctattggtacagtcactgagcagcagcaggaggacaatgaggtgtctacttctaaggagactgtatgatattttcgccatgaaataaac

SEQ ID NO: 25136 - DNA, 402 bp, Glycine max
  unsure (1)..(402): unsure at all n locations
  Clone ID: LIB3051-039-Q1-K1-G6
attttcataaccaaatttaatctcaaaagaatacaaaatgccgcgcccgtcttaagggctaaggcttctcagtcctctaaaaatttctagagtctctttcttcactttcttcctccacatggcagagacaccaaccctcagaatccacgaagtctgccccatctcgccgccacaagaaaccccatcaaccactattcccttcaccttcttcgacgtcctatggctacgcctncccccagtggagcgtctgttcttctattccttcccaaacccaacaacaacctcttcattcttcgacaccaccattctcccaaatctcaaacactccctctccctcactctccaccacttccctcctctcgccggcaccatcacatggccacttcacacaccccttcccct

SEQ ID NO: 25137 - DNA, 408 bp, Glycine max
  Clone ID: LIB3051-042-Q1-K1-G6
tccatcgtccgaagtagagacatatggccgtctaaaccttctcattaatgcgtctgggattctttcaatacctgaagtaatacatccagaaacaacattgaacaaagtggagaaatcatctttaatgcttgcatatgaggttaatgcagtgggtcctatcttagttatcaagcacatgtggcctcttctaaaagtaggaggcggccacgggactggaagaagtgctgcagtggtggctagtttgagtgcaagggttgcatctattggggacaatcgtcttgggggctggcactcatatcgatcttcaaaggctgctcttaatcaattatcaaagactgtctccctggaatttgcaagaaagaaggatccaattgtatgcattttactgcatcctggtacagttgacac

SEQ ID NO: 25138 - DNA, 452 bp, Glycine max
  unsure (1)..(452): unsure at all n locations
  Clone ID: LIB3051-107-Q1-K1-C10
aagacactgaggttaaggaaacaattgaaggtaaacaagaaaatgaaaaagtggaagctgagaaaccagaagtagatgctatggaagtagagagtggcattccgcagaaggaggggagtgataaaaaggagaaaaaagatgtggcgatggaggaggaggatgaagatgagggtaaggataatattgataagtcaaaagaagaagagaaggcagaagatagtaagggtgagaaaagatcaaaaaaacgtgggagagggaatatcaatggggagaaagtgaaggagaaaagaaaggaactgaagaaaacagagccaagaactcctactattgatcgccctgtgcgggaaaggaaatcagttgagaggttggtagcatcaattgagaaagatgcatcanaagaatntcacattgaaaagggtcgtggtacacctttgaaagatataccaaatgtg

SEQ ID NO: 25139 - DNA, 405 bp, Glycine max
  Clone ID: LIB3051-054-Q1-K2-G6
gcattattctcccctctcactctgttccttcctcatccacaattcaatggtattggtgagactggttcccatggcttcttcttcaatacgacccgctctctcaacaccttcctccttttctctcttcagcccttctcgccgtatctctttctcccatcttccctctccctctgtgtctcaatccaatagttttggcctcaaagcttccagagtgttgagacaatatggtaactccacgagaatcatggcatcaggggacttgtctcattcagttgcggctgcttcaccagaaaatgtgcttgagtgggtcaaacaggacaagagaagaatgcttcatgttgtatatcgtgttggggacctggacaggaccataaagttttatacagagtgcctaagaatgaaact

SEQ ID NO: 25140 - DNA, 430 bp, Glycine max
  Clone ID: LIB3051-059-Q1-K2-G10
gacatacttttcaaggtcaaaagtgaaagcttcaaagctcataagttgatacttgcagcccgatctcctgtgtttagagcccagttttttgggcttgttggggatcctaccttagaggaagtagtggtagaggatattgagccctttatcttcaaggcaatgcttctctttgtttactctgacaaacttcctggcatatatgaggttatggactcaatgcccttgtgctcatacaccgtcatggtgcagcatctcttggctgctgctgatctctataatcttgatcggctcaaactgctttgcgaatcaaaattgtgtgaagaaatcaatactgacaatgtggccacaacacttgcgctggcagagcaacatcactgtccacagcttaaggcaatctgtttaaaatatattgcaaatcctgcaaacttgg

SEQ ID NO: 25141 - DNA, 446 bp, Glycine max
  unsure (1)..(446): unsure at all n locations
  Clone ID: LIB3051-063-Q1-K1-G6
cccacgcgtccgcttttcaagtttagaagaggcctatgaggccctaagagtttttgagaggcttgggattgggaataagcctgatgtgagcacaaccacttgcaagaaagtagcagaaaaccttgagttgtcatcgcctgtgaaggatttgttctattcgttaaaggttaatggcatattaaaatgcaaggttgatggggatgttttcaaggatattgctttgagacttaaagccactgtcaatgatgcaagtactttggtggacatgtactattcaataggaagtctggttcttataaaggaccaggcttctgatgttgatgtgcttcttactgatgctgatgggactntncattcaatcaaggctctgagtcaaagtgatggaagatggcgttatagttctgataatccaaaatctagtacctatgctggttgattagcacttg

SEQ ID NO: 25142 - DNA, 429 bp, Glycine max
  unsure (1)..(429): unsure at all n locations
  Clone ID: LIB3051-025-Q1-K1-F4
ganaggcaaaggggatcgctgaaatcaattagtctggttgtagtgggaaaagaaaagaaaatgaaaatgggtggtgggtgcaagtgtttggtatcgttggtgttggctttggtgttgatgaggagtttggcggaggcgcaatcgggcaccagcaccacttgcgcccaggagctaattccatgtgtgaactttctgaatgggacaaccaccccaccaagctcttgctgtgaccctctcaaacaaaccgtggaaaaccaactggattgcctctgcaacatcttcttcagccccggcttgcttcaaagcttcaacgtctctgttgatcaggctctcgctctcagtcgccgctgcggcgtcaccaatggtatcaccagctgctcaaacgggtcagctccagcttcgggttcagggccaccaccagtcacacct

SEQ ID NO: 25143 - DNA, 430 bp, Glycine max
  Clone ID: LIB3051-040-Q1-K1-D7
gaaaggcaaaggggatcgctgaaatcaattagtctggttgtagtgggaaaagaaaagaaaatgaaaatgggtggtgggtgcaagtgtttggtatcgttggtgttggctttggtgttgatgaggagtttggcggaggcgcaatcgggcagcagcaccacctgcgcccaggagctaattccatgtgtgaactttctgaatgggacaaccaccccaccaagctcttgctgtgaccctctcaaacaaaccgtggaaaaccaactggattgcctctgcaacatcttcttcagccccggcttgcttcaaagcttcaacgtctctgttgatcaggctctcgctctcagtcgccgctgcggcgtcaccaatggtatcaccagctgcacaaacgggtcagctccagctccgggttcagggccaccaccagtcacacctg

SEQ ID NO: 25144 - DNA, 388 bp, Glycine max
  Clone ID: LIB3051-043-Q1-K1-C8
ggcaaaggggatcgctgaaatcaattagtctggttgtagtgggaaaagaaaagaaaatgaaaatgggtggtgggtgcaagtgtttggtatcgttggtgttggctttggtgttgatgaggagtttggcggaggcgcaatcgggcagcagcaccacctgcgcccaggagctaattccatgtgtgaactttctgaatgggacaaccaccccaccaagctcttgctgtgaccctctcaaacaaaccgtggaaaaccaactggattgcctctgcaacatcttcttcagccccggcttgcttcaaagcttcaacgtctctgttgatcaggctctcgctctcagtcgccgctgcggcgtcaccaatggtatcaccagctgcacaaacgggtcagc

SEQ ID NO: 25145 - DNA, 451 bp, Glycine max
  Clone ID: LIB3051-069-Q1-K1-G10
cttgcgatgtgtaatcattttcttttgttttaatgaaggtgtcttgatagagcggctggggtgtctgatgctgagagcaaaagtggtgattattctaaccagtggagactttgcaccgtgacacaagtagaggaattgaaaatcttgattcgaatgtttccagtttgggctactgggattgtttttgctgctgtttatgctcagatgtcaacattgtttgtggaacaaggaacgatgatgaacacaaattttggttccttcaggattcctccagcttccctctcgagttttgatgtgataagtgttattttctgggtccctgtctatgacaggattattgttcccattgcaaggaaatttacaggcaaggagaggggcttttcagagttgcaaagaatgggaattggcctttttatttcagtcctgtgcatgtcagcagctgctatagtgg

SEQ ID NO: 25146 - DNA, 369 bp, Glycine max
  Clone ID: LIB3051-013-Q1-E1-D2
accacgcgtccgcccacgcgtccgcataacttcaacaacttctttcttctcgatctcacgatggctcatttggccctgtctcagatggctgtaactgttcctgttggcaacgatttgtctctcagaagatctgcagttaaggcccctaacttgaacttttgggataaatcatgggcaccagtatttactttggacttgaagccaaacaacccaagtttaagaagtcgtcatgtggtatgcatgtccgtgcaacaagcaagtgtatccaaagttaatgtctcacctttagaattggaagatgctaaagaacctccattgaacttatacaagcctaaagaaccctatacagcaacaattgtttctgttgat

SEQ ID NO: 25147 - DNA, 396 bp, Glycine max
  Clone ID: LIB3051-041-Q1-K1-D5
gtgctggcataacttcaacaacttattctttgttctcgatctcacgatggctcatttggccctgtctcagatggctgtaactgttcctgttggcagcgatttgtctctcagaagatctgcggttaaggcacctaactttaacttttgggataaatcatgggcaccagtatttactttgtacttgaaggcaaacaactcaagtttaagaagtcgtcatgtggtattcatgtcagtgcaacaagcaagtgtacccaaagttaatgtatcacctttagagttggaagatgctaaagaacctccattgaacttacacaagcctaaagaaccctatacagcaacgattgtttctgttgataggctagtgggaccaaaggctcctggggaaacttgtcatat

SEQ ID NO: 25148 - DNA, 467 bp, Glycine max
  Clone ID: LIB3051-112-Q1-K1-D11
ggtttttctgattcttaccattgttactgtttgtgtgacaattgtggggacatacttttggttaaatgctgagaactaccactggcaatggacttctttcttttcagctgcctcaacagctgtttacgtgtatttgtactcagtatactactactatgtgaagacgaagatgtcaggcttcttccaaaccagcttctattttggatacactttgatgttttgtcttgggctgggaattctgtgtggagctgtgggttatcttggttcgaatttgtttgtgaggaggatctacagaaacatcaagtgtgactaaggcttttgtaggagtctgagaccagagcacttccatatgtttgttgctggagacaataaatttcttagaggaagcctctggtcatgtgtggggaccatacaatgtttgcaggtagtaagtatcacaaggttgaggatggatggggatgcatttt

SEQ ID NO: 25149 - DNA, 377 bp, Glycine max
  Clone ID: LIB3051-079-Q1-K1-G12
tatagctatcttctttaataagataagatctcatccttcactaccacaaaagatgaccggggtcactgccctatttgtcaccttattactctgctacatgctcgtacatgccatgtccatactccttgaaccagcttttcaccaagaatccttatccaaaccgcaccaacagagcgttgaggcggttgatgagagctgcgaaggcgttggagacgatgaatgcttgatgaggagaacacttgccgctcacgttgactatatttatactcaaaagcataataatccttgaaatatagtactcgcagctagtactatagcatgcacaaatgcacttatggaaagatatatgaacgagaatctatgtttgattgatctta

SEQ ID NO: 25150 - DNA, 403 bp, Glycine max
  Clone ID: LIB3051-001-Q1-E1-D9
cccacgcgtccggaaacattggatgacgccagaaaaggttaaaacgtcaatcagaacttttccttcttcagctgaaatagtacctgaaccgctgggtgtcgtgttagtcatctctgcatggaactatccaatcttgttgtcccttgatccagtagttggagctatagcagctggtaatgctgtggttctaaagccatcagaaattgctccggccacttcatcagtactagcaaagttgatagagaagtatatggataactcatttgtaagagttgttgagggggcagttgatgaaacaactgcactattgcagcaaaagtggaacaagattttctacacaggtaatggaagagtgggaaaaatagtgatgactgcggctgcaaaacaccttacaccagttgta

SEQ ID NO: 25151 - DNA, 450 bp, Glycine max
  Clone ID: LIB3051-063-Q1-K1-G2
ggacagtcaagtatgttggagaacccatgacccacttggaatctattgcatcctctgcggtacgggctgcaattaaggtgaaagcatctattataatttgtttcacttcatcaggaagggctgcaagattgatcgcaaagtataggccaacaatgccagtactatctgttgtgatcccccgactcaagacaaatcagctaaagtggagctttagtggagcttttgaggcaagacaatcacttatcgtgagaggtctctttcctatgcttgcagatccacgacatcctgctgagtcaacaagtgcaacaaatgagtctattcttaaggttgcccttgatcatggaaaatcattgggagttattaagtcacatgaccgggtagttgtttgccagaaacttggtgatgcatctgtggttaagattattgagcttgaagattaaactattaaag

SEQ ID NO: 25152 - DNA, 402 bp, Glycine max
  Clone ID: LIB3051-001-Q1-E1-D5
acatccccttattgttaaaccctttgtttgcacaagaaaagagttacttcatcatcatcatcaacatgagtcgcttcaacaatcagcaagaatcccctgtatcatatcctccagcactgtatgttagtgccccaccacctatgggttatccttccaaaggtgatcctacagctgtagggtacccccaacaaagagttccagaagaaaccacaagcaggggtgatggattttggaagggatgttgtgctgctttatgctgctgctgggtcctggattgttgcttctgattgaatcatagcacagatttgtgtttgtcaccatgttttctttttcacattgccagtttcctatttgtattctttgtagtttagaagaataaggatctttgtcctcttggacagc

SEQ ID NO: 25153 - DNA, 399 bp, Glycine max
  Clone ID: LIB3051-014-Q1-E1-G11
acggaaagaatgaacaacaacgaaatcggtggaacgcgtcagtttaaggatatacttgatgttttgttggacatacgcgaagatgacagttctgaaatcaaattaaccatagagaacattaatgccttcatcatggatatatttgttgccgggactgacacgtcagctgcaaccatggaatgggctatggcagagttaatcaacaatccatgtgtgttggagaaggcaaggcaagagatagatgcagtggttggaaatagtagaataatagaagaatcagacattgtcaaccttccttacctacaagccattgttagagaaacacttaggattcacccaggtggtccattgattgttagagagtcatcaaaaagtgttgtggtttgtgggtatgaaatt

SEQ ID NO: 25154 - DNA, 422 bp, Glycine max
  Clone ID: LIB3051-039-Q1-K1-F4
gtactcaagcaagctaaggcattattatggcttatcaagtgttgctaatttgtttggtctccaccatagtgtttgcatacatactatggagaaaacaaagcaagaaaaaccttccaccaagtccaaaggcccttcccataattggccacctccaccttgtgtccccaattccccaccaagatttttacaagctctcaacccgccacggacccatcatgcaacttttccttggctcagtcccttgtgtggtggcttccaccgcagaagccgccaaagagttccttaaaacccacgaaatcaacttctccaaccgccccggccaaaacgtcgccgttaagggcttagcctacgattcccaagacttccttttcgcgtttgcacccttcggaccctactggaagttcatgaagaaactctgcatg

SEQ ID NO: 25155 - DNA, 320 bp, Glycine max
  unsure (1)..(320): unsure at all n locations
  Clone ID: LIB3051-072-Q1-K1-A6
catcaacaaaaaaagcacctgataattgatagtattatatattatggcttatcaagtgttggtgatttgtgtggtctccagcatagtgtttgcatacatagtatggagaaaagaaaggaagaaaaagcttccaccgagtccaaagggccttcccatcattgggcacctncaccttgtgtccccaataccccaccaagatttttacaagctctcactccgccatggacccatcatgcaacttttcctcggctcagtcccttgtgtggtggcttccaccgcggaagccgccaaagagttcctcaaaacccacgaaatcaact

SEQ ID NO: 25156 - DNA, 415 bp, Glycine max
  Clone ID: LIB3051-085-Q1-K1-G9
cgctgagtcagaagacttctgagaacgacaaccaggctgaggagatgaagaagctcgtgtcggatatcggggagctcatggggaagttcaacgtttcggacttcatttggtacctgaagcctttcgattcgcaggggttcaacagaaaactcaaggagactcgggacaggtttgacgttgtggtggacggaatcataaagcagcgtctagaggaaagaaggaaaaacacagaaacgggcacagcagaacagtttaaggacatgcttgatgctttattggacatgcacgaagatgataatgctgaaatcaaattagaccaaaagaacattaaggccttcatcatggacatatttgttgctgggactgacacgtcagctgtaagcatagaatgggctatggcagagttaatcaacaa

SEQ ID NO: 25157 - DNA, 427 bp, Glycine max
  Clone ID: LIB3051-103-Q1-K1-F6
gacagaatcatcaagcagcgtgaagaggaaagaaggaacaacaaggaaatcgggggaacgcgtcagtttaaggatatacttgatgttttgttggacataggcgaagatgacagttctgaaatcaaattaaccaaagagaacattaaggccttcatcatggatatatttgttgccgggactgacacgtcagctgcaaccatggaatgggctatggcagagttaatcaacaatccatgtgtgttggagaaggcaaggcaagagatagatgcagtggttggaaatagtagaataatagaagaatcagacattgtcaaccttccttacctacaagccattgttagagaaacacttaggattcacccaggtggtccattgattgttagagagtcatcaaaaagtgttgtggtttgtgggtatgaaattccag

SEQ ID NO: 25158 - DNA, 447 bp, Glycine max
  unsure (1)..(447): unsure at all n locations
  Clone ID: LIB3051-025-Q1-K1-C11
ccgacacaaacacactccaagcgcacgttagcagtctccgccgtcttcgccaccgtgccatcgccgtcgatggagtctctcttcggctcgatcaacgttcgcgacctcctctcggcgcaggacctctcggaccctaactcccctctctcagcgccggatctccgtctcctgatccagcgcctggagtcgcagtccttccagatccgttctcaggtgcagtcctaccttgtctcgcaccacgaagacttcgcgcgcctcttctctctttgtaacgacaccgtttcgcagacgcgcgaggtctncgatgatgtttccgccatcctcggcctnctctccgaccacccgatcgatgccgaggtgcgcgagatcgtgtcggagacgaagtcgaagaaggaggagctgaagatgaagaaagagctgctgggattggtcggaacccgtgtggcc

SEQ ID NO: 25159 - DNA, 422 bp, Glycine max
  Clone ID: LIB3051-050-Q1-K1-D9
cccacgcgtccgcccacgcgtccgctcctcttgacctagtcaagtgtaatatgcagattgatcctgctaagtacaagagcatctcttctgggtttggagttttgcttaaggagcagggattcaggggctttttccgtggctgggtgcctaccttgcttggttacagtgcccagggtgcttgcaaatttggcttctatgagttctttaagaagtactattctgatattgctggcccagagtatgcaagcaagtacaagaccttgatctaccttgctggttcagcatctgctgaggttattgctgatattgctcttttcccaatttgaggctgtgaaggtccgtgtccaaactcagccaggttttgcaaggggtttgtctgatgggctcccaaaatttgtcagatccgaaggaaccttagggct

SEQ ID NO: 25160 - DNA, 415 bp, Glycine max
  unsure (1)..(415): unsure at all n locations
  Clone ID: LIB3051-059-Q1-K2-H2
gttttgcttaaggagcagggattcaggggcttttttcgtggctgggtgcctaccttgggtggtgatagtgctcagggtgcttgcaaatttggattttacgagttctttaagaagtactattctgatattgctggcccagagtatgcaagcaagtacaagaccttgatctaccttgctggttcagcatctgctgaggttattgctgatattgctctttgcccatttgaggctgtgaaggtccgtgtccaaactcagcctggttttgcaaggggtttgtctgatgggctcccaaaatttgtcagatctgaaggaaccttatggctgtacaaggngttagtgcctctctgtggacgacanattccatacacaatgatgaagtttgcttcttttgagaccattgttgagctgatctata

SEQ ID NO: 25161 - DNA, 407 bp, Glycine max
  Clone ID: LIB3051-065-Q1-K1-G5
agaccctatagcttctctctggctctcctttgacgcttatgacactgcgcctctactttcggtgcgagtcctaatggctctccccgactcttgctcgtgccacagctgcctgatcccctacttcatctactactcttactccaaaacgctccctatacaccacatgctcaactccgacttcggcgccgccctctcccagccgtcggaaaacctacacgccggatcgcgcggcctcatgattccctctgccaacgagccacgcaagatcgagatgtactccgctgacttctacgtcgactgcaccgacagtggaatcctgagctgaggcctcactcacatggccgacactcctgttgacctagtcaagtgtaatatgcagattgatcctgctaagtacaagagcatct

SEQ ID NO: 25162 - DNA, 301 bp, Glycine max
  Clone ID: LIB3051-080-Q1-K1-G4
gaaagccagtgaatagggaccataaataaatagaggactgctgaatgaagttgcttgagtggagactcaagcttggttggataatattcttttaaagttcagacattgtttccatttttcttatatttaagtattttgaatttttgggaggatggttttgctctcatccttccacttgctgaaaactttgtaggtaggaatgatataattttgcatgttaggttctctacatgccaattgtcaaacgggaacacatttgttttcttgtctgtgcataagcaccgacacatatgcaatgcct

SEQ ID NO: 25163 - DNA, 457 bp, Glycine max
  Clone ID: LIB3051-093-Q1-K1-C7
aaattccatacacaatgatgaagtttgcttcttttgagaccattgttgagctgatctataagcatgccatcccaacaccaaagaatgagtgcaccaaaagcctgcaacttggtgtcagttttgctggtggatatgttgctggtgtactttgtgcaattgtgtctcatcctgctgataatcttgtctcttttctgaacaatgcaaaaggagcaacagttggtgatgcggtgaagaagcttggtttgtggggtctctttacgcgtggtcttccccctccgaattgttatgattggaactcttactggagcccaatggggaatatatgatgcattcaaagtcttcgtcggattgccaaccactggtggtcctgctcctgcagctgctccagcttctggttctgagctagcaaaggcatagaatgtccaatgatgacaagcaacaatgttgtacgaaactt

SEQ ID NO: 25164 - DNA, 353 bp, Glycine max
  Clone ID: LIB3051-084-Q1-K1-G10
gaggaaattcttcctcttggtcccctgaatgattatgagagggagagtttggggaaggccaagaaagagttagcagcaagcattgagaagggcatttctttcatcagaaaatgagtagttgatgatagtacgtcccgaaaataaatggttagattgtgctgtgtccattgtgagatcatatagatttataattagttatgtgatatgtatgaatatcgagttctatctagaaacatgtaaatgtaataattggaataccgaattccatttattattccgtctcgagttatccccgtgaagtttgagtttgagtctaaaaatcaattcagatttttgtattatctatagacgaa

SEQ ID NO: 25165 - DNA, 433 bp, Glycine max
  Clone ID: LIB3051-084-Q1-K1-G6
ccatgacccttcaagctgattcagcaccagtaccaccaccgccaccggattgcgcagcgaccaacggcatctcccccaccgcagaggaagccccacaaccaccgtcaccaccaccgccgcatccaaccccacctccagaactgcgcgtcccaatatggtggccggaagacgggaacctcagcatggattgggtggacaacctgatgcggtgcttcgattggtcctctcggaacgtcccaccctcggagctcccttcggttctccccgtcggagtcttcgattcgctcatcctcgtcgcctccaagatgctccacaaggagcccaattgcgtcaccgtagaccccttccgccctagctccgatgatgataacactcccttcgctgcctcctctgttgtcgtcgtcggcgatgttcacggccaactgcatgatct

SEQ ID NO: 25166 - DNA, 445 bp, Glycine max
  Clone ID: LIB3051-093-Q1-K1-G10
gcagttatacaccctcgagaatggtgaaattccaggcaaaattataaaaccattttttgctctccgtccaaacggcagatccgatccgccctacaatcccctctcagtttttctctcgaggatccggtgaaacgacatggcgatggtggaccagcctctgtatccgattgccgttttgatcgacgagttgaagaacgaggacattcagctgcgcctgaactcgatccggaggctctccacgatcgcgcgcgcgctcggcgaggaccgcacgcggaaggagctgattccgttcctcagcgagaacaacgacgatgacgacgaagtgcttctcgcaatggccgaggaattaggcgtcttcattccctacgtcggaggcgtcgaccacgccaacgtgcttcttccttccttggagactctcttgcaccgtgaggaaacctgcgtcaga

SEQ ID NO: 25167 - DNA, 420 bp, Glycine max
  Clone ID: LIB3051-093-Q1-K1-G6
tcgggaatttcttagacaggcaaaggctgctcaacttttcatggcatcagagtcatttgttgtcgatgatatgcttgagtctgatctttccaaggcttttggcgggatggatagacttgacatgttttttccatttgatccatgtttgttgaagagaagtgaaagctacataaggccacattttgttcgctggtcaaaagtcagaactacatatgatgacgataacgacaatgatgaagtcagtgatagtggcagtgaattatcagatgatgattttattgacaggaacgccaaggatatgattgacgatgatatgatggtgagcgttgaaggcgctgattttaaccctgacttgaacaaaatgtctattactcccagaaaatcttgttaacattggtttgagacaccgttgaattaatg

SEQ ID NO: 25168 - DNA, 455 bp, Glycine max
  unsure (1)..(455): unsure at all n locations
  Clone ID: LIB3051-108-Q1-K1-G6
gtttgtggcatcatcacctgttatttcagcttgatggcttatatgccttggcatgcgagtgcgtttgtaaccatcaggaaaaacaaatgcagggagttgctttcgacgaacatgagaaacaaaaatatccatccctggcttccagtacatgtacatatttatttcttgtctgaattcatcaactgttccacgtatatcaaattgctgcccctcttgacctcttactccctctttcctttgcaagcccatgaaaaatgcagaatgtgcacatggcttggatgtgtctacatactcatgtgggtaaggatggcactgcagcatcccatttgtatctcgctctatcttcagggtaagcattctcaaccgagattctacccatcccctccatgctagtaaatcatccgtgtctgatgcaattatgtccacttgtaaatagttnttgtatgcctcaaaaa

SEQ ID NO: 25169 - DNA, 424 bp, Glycine max
  Clone ID: LIB3051-112-Q1-K1-G10
gcaatatttgaaggttgtgttattctgaaagagaagatagggagggcggtttggtttggggcaaatggattccttagaagacagcggctgttgggattttctcgattactctttcatcgatcaagcgccccctgatttcctttggtccaataacaataatagtgtgagcaccgaaattgacattccaggtgatgctgttgcttgtcaagagaacaccaagaagaggggacgcaccgattcatgcttcaaggcgggatcaaaagcttgccgtgaaaaattgcgaagggagagactcaatgaaaggttctgtgacttgagctctgttttggagccagggagacctgtgagaacagataaaccagctatacttgatgatgctatcagagtcttgagccaacttaaaaccgaagcccatgagctcaaa

SEQ ID NO: 25170 - DNA, 467 bp, Glycine max
  Clone ID: LIB3051-112-Q1-K1-G6
ctattcttgcactttctctcaaccgacttcctatttgcgggcaagaggagctcgggctgggattggcgagtttgttgagtatgacttagataatgaagatgaggattggctttttgagtttaatgaagagaggaacattttgacacctgaaatgtttgagagtcttcttttcaagttggaggtattggatcataaagctcgtgaaagagctggacttataacacctacacttggttcaccaattcctgtgcaactacggcttgatactgctattgaggccttacaagcacagggcttcaaatattcaattatccagtctgtatatgattattggaaagagaagcgagaacgatggcaaaagccggttttgcgacgtttgcagccgtcttcaccggttaacgacaccaacccgtataatgtctttcggccaagggagaatgcccacagacttcacacatgacggatgc

SEQ ID NO: 25171 - DNA, 352 bp, Glycine max
  unsure (1)..(352): unsure at all n locations
  Clone ID: LIB3051-117-Q1-K1-G10
cccacgcgttcgancacgcgtatcnggtttcgtgggcggacgcctttgccgtggttgagaaagccgagagcttcggctgcacatcggagccagactacgaccagaaccaccaccgtcacccgacgaaccaccacatgaaccctccctccgggcttaccccgctcgagttcgcctgcctcatacccttcgtcgccgagcaccactcctacctcgtcggctccgggcaatgcttctcactcctcgtccaacgcgttcaagcaccggccgacgccgtctggtccgtcgtccgccgctttgacaagccccaaacctacaagcactttatcaagagctgcgccgtcaaaagaccctt

SEQ ID NO: 25172 - DNA, 275 bp, Glycine max
  Clone ID: LIB3051-038-Q1-K1-G3
cgtgattcccggcaagtgaacaccgatccggtacactgtttgtcgaatgcttttttctcttccggaatggataccgttgaagcaactccatcagaggatgtgaagggatttatacgataaaatgcttgactctgtaaaagttaaacgatcaatgcctccaaatgcttggttatggtcaatgattgcaaattgcaaacagcagcacgatattagacttctgttcgacattttgcagaaccttcgcagatttaggttgtcgaatcttcgaattcatg

SEQ ID NO: 25173 - DNA, 440 bp, Glycine max
  Clone ID: LIB3051-038-Q1-K1-G4
gccacctggaacccacaactgagtcgtgtttcggttctttcacactgaaccatgcaagttttctgtaacgctcgccgagcctcttggcttctcctctttcctcatctccgaacctcggaagctcctcactccaccgggctctctctcttctcagggctcgcgcaacgtgattcccggcaagtgaacaccgatccggtacactgtttgtcgaaggcttttttctcttccggaatggataccgatgaagcaactccatcacaggatgtgaaggaattatacgataaaatgcttgactcttgaaaagttaaacgatcaatgcctccaaatgcttggttatggtcaatgattgcaaattgcatacagcagcacgattttagacttctgttcgacattttgcagaaccttcgcagatttaagttgtcgaatcttcgaattcatga

SEQ ID NO: 25174 - DNA, 452 bp, Glycine max
  Clone ID: LIB3051-093-Q1-K1-H12
ctacccaacaacgttaattgaccaaaacccatctttgttgttcttcaaaatttccatatgttgaaccattttatttgtggcagtttccatcaccaagaagaagatgtaccatgttcaagccccaagaagtactccaggagaaaagaaagtaggaatattaacaaaaacccatactccaatcgaggcttagacaagttttctgcacttttggctgatcttgacgagagaaggcaaaaggtttactcacagatgagtcctcaggacatatcttttgttcggtttgcgtattccagcaatgatgatttcgttcccatagtggtcaaagtgaaaaaaaataataaggatcagaagaagcacaagagtgaagaactcaaagcaagacacataacatctttctcggagcaattggagaaatcttctgaagaaacaccttgaaagaaaggaactaaaac

SEQ ID NO: 25175 - DNA, 437 bp, Glycine max
  unsure (1)..(437): unsure at all n locations
  Clone ID: LIB3051-025-Q1-K1-B7
cccacgcgtccgcccacgcgtccggtacttacaagaaaaatgggactgctgctgcaattcaatatggtaccggagcaatttctggtttctttagctacgacagtgtcagagttggtgatatatttgtaaagaaccaggaatttattgaagcaactagggagcctggtgttacatttttggcagccaagtttgatggtatactgggacttggatttcaagagatatcagttggaaatgctgttccagtgtggtacaacatggttgaccaaggtcttattaaggaaccagtattttcattttggttcaaccgcataccggaggaagaggaagggggtgagattgtttttggtggtggtggatcctgctcactataagggaaagcacacttatgtgcctgtgaccagaaaaggatattgncagtttgatatgggagatgt

SEQ ID NO: 25176 - DNA, 394 bp, Glycine max
  Clone ID: LIB3051-069-Q1-K1-G4
ggacaaacaatattggatttgcttttgtctgaaacacagccgaagaagatctgttcccgagttggattgtgtgcttttgatgggactcgtggtgttgatgtggggatcaagagtgttgtggatgagaatgaaagaaaatcatcgggtggtcatcatggtgctgcttgtcctgcgtgtgagatggctgttgtttggatgcagaaccagctgatccgaaatcagacacaagatcagatactaagttacatcaaccagctttgcgataaaatgcctagcccgatgggagaatcagctgttgacttggggaatatctcttcattacctgtagtgtcctttactattggtggaagaacttttgagcttagcccaaaggagtacatacttaaggtgggtg

SEQ ID NO: 25177 - DNA, 424 bp, Glycine max
  Clone ID: LIB3051-031-Q1-K1-C3
ctgttccgttctgatcagaaagggaataacggtaacggagatatggggcttctgtctggcagagtaactagagagagcctgaaaccaggggatcacatctactcttggaggactgcttacatatacgctcatcacggcatttatgtcggcgatgacaaagtcattcacttcactagacatgggcaagaagtaggaaccggtactgcactagatcttctcctcatcagttcaggaccagccaagcctcgagaaagttgcccaacttgtacagcaccccaagaggaacacggggttatctcctcatgcatgaactgcttcctagctggtggcgttctgtatcggttcgagtatgccgttaccccagcccttttccttgcgaaagcccgcggtggaacgtgtactcttgctgtctctgatgacgatg

SEQ ID NO: 25178 - DNA, 441 bp, Glycine max
  Clone ID: LIB3051-098-Q1-K1-B5
acccacgcgtccgcccacgcgtccggttcatgaaactcttcttcgtcactgtggttgaaaatcgaatgctttcgctctctctctctctaggcaataaagtgaaacgcatcagagaaattcaattcaatggatgcaaatcgcgagcaaattgtggacgttgggtcggtggtggaagccgtttctgctgacgacggtgacgctcctctctacagcctcgaaagtctctgcatgcgttgcggtgaaaacgggacttcaagatttttattgactttaattcctaactttagaaagattttgttgtcagcttttgaatgtccacactgtggtgagaggaacaatgaattacagtttgctggtgaaattcaaccacgtggttggagttactccttggagatcccattatgcgaacaaaaaatgcttaatcgacaagtggtaaaagct

SEQ ID NO: 25179 - DNA, 387 bp, Glycine max
  Clone ID: LIB3051-001-Q1-E1-E5
aggccctttttttttttttttcccttcatctttcccatcatcttctttccccttgactttctctgcatcaattttgtcatactttttcttctttgtccttcttctcttcatcatccttcccatcatcttctttcttcttgatcttctctgcatcagttttgccatcattgtctttcttctcctttttcttcttttccttcttctcttcatcatctcgggacaagtcccagcaccaccatctgcttctacaattccatcgccactgtctcctttggcaccttctataccactaccgtcccgttctcttcctgcgcctccaatgtctcttacgccaccagttccatctacagattccgctcgcagtcctccaccacctattgggtttgg

SEQ ID NO: 25180 - DNA, 462 bp, Glycine max
  Clone ID: LIB3051-112-Q1-K1-A10
gtcttagacacatatatggctcgacttgtattgttcttctcagcattttctcttttcctgctaaattctactatcacggcacaagtcccagcaccaccatctccttctacaattccatccccaatgtctcctttggcaccttctacaccaccaccgtcccgttctcttcctgctcctccaacgtctcttacgccaccacttccatctacagattccgctcccactcctccaccacctattggatttggaggaggtggtggaagtggaattggaaaaggtggtggtggctcaggcgttggaataggctcaggaagtggtagtggtggcgttcaaggtggtggtggacaaggacgtggtgttgggataggaagtggcgttggcagtggtaccggctatggtggcggtggaactggcattggcagtggtgacagtagtagaggaggtggatgacgctttctggtg

SEQ ID NO: 25181 - DNA, 432 bp, Glycine max
  Clone ID: LIB3051-096-Q1-K1-C3
cttgcaattccattaactcaccgtggcattgcaaatagtgtgagattcctcacagggcatgcaaggaaaggaggatccgatcctctctttgtatcggaaaatgctgctgatccggattctaccttggtggtttacatgggcttggcgaccttcccttcacttgcacagaagctaatgcatcatggtctgtcccctcagaccccaactgcagccattgagcgaggaaccacacttcatcagcgcacggtgtttgctgaactaaaggaccttcacgagaaaattacatctgctcagctggtgtcaccaacgctgattattataggaaaagttgttgaactatcaccattttggccaattcctacaaaagaagaatcatgtttaatgcaggcatgatggatgttgtcaagagatattattgtgaagcttggtggc

SEQ ID NO: 25182 - DNA, 433 bp, Glycine max
  unsure (1)..(433): unsure at all n locations
  Clone ID: LIB3051-113-Q1-K1-C9
cccacgcgtccgagagcttggaattccattaactcaccgtggcattgcaaatagtgtgagattcctcacagggcattcaaggaaaggaggatccgatcctctctttgtatcggaaaatgctgctgatccggattctaccttggtggtttacatgggcttggcgaccttcccttcacttgcacagaagctaatgcatcatggtctgtcccctcagaccccagctgcagccattgagcgaggaaccacacttcatcagcgcacggtgtttgctgaactaaaggaccttcacgagaaaattacatctgctcagctggtgtcaccaacgctgattattataggaaaagttgttgaactatcaccattttggccaattcctacaaaagaagaatcatgtttaatgcangcatgatggatgttgtcaagaaatattatt

SEQ ID NO: 25183 - DNA, 329 bp, Glycine max
  Clone ID: LIB3051-004-Q1-E1-E5
cagaaggcctgcttctaatatggatccatatgtagtcacctccatgatcgcagagactaccatcctctggaaaccatgaaaaacagtcatatagtctctagatttggaccactaaaaattgtgttcaatagtcatttgatctaaaaatttatatttgcaaggtgatgtttagttaggaatttctaagtggtctttttgagcctccatgtgccatgtctatggttgagaataatttcgtcattaataacaagaatttcccataaaagaaaaaagtaaaaaaaagcaacagaaaaaaaaaaagtaaaacaaaaaatgaaagcgtcgggagc

SEQ ID NO: 25184 - DNA, 284 bp, Glycine max
  Clone ID: LIB3051-004-Q1-E1-E6
aggaaggcctgcttctaatatggatccatatgtagtcacctccatgatcgcagagactaccatcctctggaaaccatgaaaaacagtcatatagtctctagatttggaccactaaaaattgtgttcaatactcatttgatctaaaaatttatatttgcaaggtgatgtttagttaggaatttctaagtggtctttttgagcctccatgtgccatgtctatggttgagaataatttcgtcattaataacaagaatttcccagacaagacacaagtcaagaaaggc

SEQ ID NO: 25185 - DNA, 396 bp, Glycine max
  Clone ID: LIB3051-036-Q1-K1-G5
aagaaagctacctagagcttgcacctattggtatcttctacaatatcctctcatagtgctcttcttcttcttcattttcattatcaagatgtctttgctttcggatctcatcaacctcaatctctcagaatccacagaaaagatcgttgctgagtacatatgggttggtggatctggtatggacctcagaagcaaagccaggactcttcctgggccagtgagtgaccctgcaaagcttccaaagtggaactacgatggctctagcacagaccaagctccaagggatgacagtggaatcatcctatacccacaagctattttcaaggacccctttaagagaagcaacaatattcttgggatttgtgatgtttacacccccgctggtgagccactttc

SEQ ID NO: 25186 - DNA, 392 bp, Glycine max
  Clone ID: LIB3051-051-Q1-K1-E2
aagaaagctacctagagcttgcacctattggtatcttctacaatatcctctcatagtgctcttcttcttcttcattttcattatcaagatgtctttgctttcggatctcatcaacctcaatctctcagaatccacagaaaagatcgttgctgagtacatatgggttggtggatctggtatggacctcagaagcaaagccaggactcttcctgggccagtgagtgaccctgcaaagcttccaaagtggaactacgatggctctagcacagaccaagctccaggggatgacagtgaagtcatcctatacccacaagctattttcaaggacccctttaggagaggcaacaatattcttgtgatttgtgatgtttacacccccgctggtgagccac

SEQ ID NO: 25187 - DNA, 399 bp, Glycine max
  Clone ID: LIB3051-001-Q1-E1-A10
agcaagaagctaagattaacacaccaacccactagaaacatgaaaacccctaacaaagcctcattactcttattccctctcttgtccctttccttatttatcaaccattcccatgcagcaggaatcgctgtgtactggggccaaaacggtggagaaggcaccttagcagaagcttgcaacacaggaaactaccaatatgtgaacatagccttcttgtccacttttggaaatggccaaaccccacaactcaaccttgctggtcattgtgaccctaacaacaatggttgcacagggttgagcagtgatatcaatacttgccaagaccttggcatcaaagtgttgctctctcttggaggtggtgctggaagctactccctcagctcatctgatgatgccaca

SEQ ID NO: 25188 - DNA, 412 bp, Glycine max
  Clone ID: LIB3051-004-Q1-E1-C9
ctagaaactaccaatatgtgaacatagccttcttgtccacttttggcaacggccaaactccacaactcaaccttgcaggtcattgtgaccccaacaacaatggctgcactgggttgagcagtgacatcaaaacttgccaagaccttggcatcaaagtgttgctctcccttggtggtggtgctggaagctactccctcagttcagctgatgatgccactcaacttgcaaactacctctggcagaatttccttggaggtcaaaccggatcacggccattaggtaatgttatattggatggcattgactttgacattgaatctggtgggagtgaccattatgatgacctagccagggcatttaatagcttcagctcacacaggaacgtgtacttgtctgcagcccacagtgcata

SEQ ID NO: 25189 - DNA, 370 bp, Glycine max
  unsure (1)..(370): unsure at all n locations
  Clone ID: LIB3051-015-Q1-E1-C10
gacgacgcgtcaaatacacaannacccaacatgaaaacccttaacaanagcctcacttattttattccctctcttgttcccttccctattcaagcattcccatgctgcaagaatcgctatctaatggggccaaaacggtggaaaaagcaccttaacagaagcttgcaacactagaaactaacaatatgtgaacattaccttcttgtccacttttggcaactggcaaactccaaaactcaaactttcaagttaatgtgaacccaaaaacaatggctgcactgggtttagcaatgacattaaaactttccaagaacttggcatcaaagtgttgctctccccttgttgttgttctggaaactactccctcaat

SEQ ID NO: 25190 - DNA, 413 bp, Glycine max
  Clone ID: LIB3051-031-Q1-K1-B10
caaaacccaacatgaaaacccttaacaaagcctcacttattttattccctctcttgttgctggccctattcaagcattcccatgctgcaggaatcgctatctactggggccaaaacggtggagaaggcaccttagcagaagcttgcaacactagaaactaccaatatgtgaacatagccttcttgtccacttttggcaacggccaaactccacaactcaaccttgcaggtcattgtgaccccaacaacaatggctgcactgggttgagcagtgacatcaaaacttgccaagaccttggcatcaaagtgttgctctcccttggtggtggtgctggaagctactccctcagttcagctgatgatgccactcaacttgcaaactacctctggcagaatttccttggaggtcaaacc

SEQ ID NO: 25191 - DNA, 415 bp, Glycine max
  unsure (1)..(415): unsure at all n locations
  Clone ID: LIB3051-047-Q1-K1-E8
ctactccctcagttcagctgatgatgccactcaacttgcaaactacctctggcagaatttccttggaggtcaaaccggatcagggccattaggtaatgttatattggatggcattgactttgacattgaatctggtgggagtgaccattatgatgacctagccagggcattaaatagcttcagctcacaaaggaaggtgtacttgtctgcagccccacagtgcataatccctgatgctcacttggatagagccatccaaactgggctttttgactatgtgtgggttcaattctacaacaacccttcatgccaatactccagtggaaacaccaacaatttgatcaattcatggaaccaatggatcacagtgccagcttctcaaatcttcatggngcttcctgcatctgangcagct

SEQ ID NO: 25192 - DNA, 355 bp, Glycine max
  Clone ID: LIB3051-054-Q1-K2-B2
gagaatacaccaaaacccaacatgaaaacccttaacaaagcctcacttattttattccgtctcttgttcctttccctattcaagcattcccatgctgcatgaatcgctatctactggggccaaaactgtggagaaggcaccttatcagaagcttgcaacactagaaactaccaatatgtgaacatagccttcttgtccacttttggcaacggccaaactccacaactcaaccttgcaggtcattgtgaccccaacaacaatggctgcactgggttgagcagtgacatcaaaacttgccaagaccttggcatcaaagtgttgctctcccttggtggtggtgctggaagctactccc

SEQ ID NO: 25193 - DNA, 423 bp, Glycine max
  Clone ID: LIB3051-059-Q1-K2-F9
cccacgcgtccggagaatacaccaaaacccaacatgaaaacccttaacaaagcctcacttattttattccctctcttgttcctttccctattcaagcattcccatgctgcaggaatcgctatctactggggccaaaacggtggagaaggcaccttagcagaagcttgcaacactagaaactaccaatatgtgaacatagccttcttgtccacttttggcaacggccaaactccacaactcaaccttgcaggtcattgtgaccccaacaacaatggctgcactgggttgagcagtgacatcaaaacttgccaagaccttggcatcaaagtgttgctctcccttggtggtggtgctggaagctactccctcagttcagctgatgatgccactcaacttgcaaactacctctggcagaatttcctt

SEQ ID NO: 25194 - DNA, 409 bp, Glycine max
  unsure (1)..(409): unsure at all n locations
  Clone ID: LIB3051-061-Q1-K1-E1
cggtcgacgccacgcgtncgaatacaccaaaacccaacatgaaaacccttaacaaagcctcacttattttattccctcgcttgttcctttccctattcaagcattcccatgctgcaggaatcgctatctactggggccaaaacggtggagaaggcaccttagcagaagcttgcaacactagaaactaccaatatgtgaacatagccttcttgtccacttttggcaacggccaaactccacaactcaaccttgcaggtcattgtgaccccaacaacaatggctgcactgggttgagcagtgacatcaaaacttgccaagaccttggcatcaaagtgttgctctcccttggtggtggtgctggaagctactccctcagttcagctgatgatgccactcaacttgcaaacta

SEQ ID NO: 25195 - DNA, 214 bp, Glycine max
  Clone ID: LIB3051-077-Q1-K1-F5
gctaagattaacacaccaacccactagaaacatgaaaacccctaacaaagcctcattactctgattccctctcttgtccctgtccttatttatcaaccattcccatgcagcaggaatcgctgtgtactggggccaacacggtggagaaggcaccttatcagaatcttgcatctcaggacactaccaatatgtgaacatagcctacttgtccact

SEQ ID NO: 25196 - DNA, 436 bp, Glycine max
  unsure (1)..(436): unsure at all n locations
  Clone ID: LIB3051-078-Q1-K1-A7
gccacgcgtacgggaatcgctatctactggggccaaaacggtggagaaggcaccttaggggaagcttgcaacactagaaactaccaatatgtgaacatagccttcttgtccacttttggcaacggccaaactccacaactcaaccttgcaggtcattgtgaccgcaacaacaatggctgcactgggttgagcagtgacatcaaaacttgccaagaccttggcatcaaagtgttgctctgccttggtggtggtgctggaagctactccctcagttcagctgatgatgccactcaacttgcaaactacctctggcagaatctacttggaggtcaaaccggatcacggccattaggtaatggtatattggatggcattgactntgacattgaatctggtgggagtgaccattatgatgacctaaccagggcattaaata

SEQ ID NO: 25197 - DNA, 348 bp, Glycine max
  Clone ID: LIB3051-084-Q1-K1-B1
tcgaatacaccaaaacccaacatgaaaacccttaacaaagcctcacttattttattccctctgttgttgctttccctattcaagcattcccatgctgcaggaatcgctatctactggggccaaaacggtggagaaggcaccttagcagaagcttgcaacactagaaactaccaatatgtgaacatagccttcttgtccacttttggcaacggccaaactccacaactcaaccttgcaggtcattgtgaccccaacaacaatggctgcactgggttgagcagtgacatcaaaacttgccaagaccttggcatcaaagtgttgctctcccttggtggtggtgctggaagc

SEQ ID NO: 25198 - DNA, 427 bp, Glycine max
  Clone ID: LIB3051-091-Q1-K1-F7
aaaaataaagttgaaaatcagggtgctggtaatattccaagatacttgaatcttgaaccggcacttgcaatggattggcttgagataccatgggatgatttgcgaatcaaagagcgtgttggtgccggatcatttgggactgtgtatcgtgctgaatggcatggatcagatgttgctgtcaaagttttaacagttcaggatttccaagatgatcaattgaaagagtttctaagagaggttgcaataatgaaacgagagaatacaccaaaacccaacatgaaaacccttaacaaagcctcacttattatattccctctcttgttcctttccctattcaagcattcccatgctgcaggaatcgctatcttaactggggccaaaacggtggagaaggcaccttagcagaagcttgcaacactagaaacta

SEQ ID NO: 25199 - DNA, 430 bp, Glycine max
  Clone ID: LIB3051-115-Q1-K1-E3
caagaagctaagattaacacaccaacccactagaaacatgaaaacccctaacaaagccgcattactcttattccctctcttgtccctttccttatttatcaaccattcccatgcagcaggaatcgctgtgtactggggccaaaacggtggagaaggcaccttagcagaagcttgcaacacaggaaactaccaatatgtgaacatagccttcttgtccacttttggaaatggccaaaccccacaactcaaccttgctggtcattgtgaccctaacaacaatggttgcacagggttgagcagtgatatcaatacttgccaagaccttggcatcaaagtgttgctctctcttggaggtggtgctggaagctactccctcagctcagctgatgatgccacacaacttgcaaactacctctgggagaatttcctg

SEQ ID NO: 25200 - DNA, 408 bp, Glycine max
  unsure (1)..(408): unsure at all n locations
  Clone ID: LIB3051-025-Q1-K1-A3
gggattcagggttattcccctaaaagttaaggttttggctggatcctgctaaggatccaggttttgtcgcaaggccttggccaagtaacatgatacgattttttaggacccaggatgaatcatggagccatgaggttgccatatcagtgaaaccattgaaagtgcaaaactggattctttctgaaatgcctgggcttattactgattntctgatttctcttgatgatcggtttctgtattttgtaaactggcttcatggngatataaggcagtataacatcgaggacgttaaaaatcctaaactgactggacaagtatgggttggtggacttatccagaaaggaagccctgagtagctataactgatgatggtgaaacatggcaagctgaagtccagagattcaggga

SEQ ID NO: 25201 - DNA, 419 bp, Glycine max
  unsure (1)..(419): unsure at all n locations
  Clone ID: LIB3051-037-Q1-K1-E11
cggacgcgtgggcggacgcgtgggtgtggatccaaactctccaacttattccaaagtcatccataggcttcctgttccttatttaggtgacgaattgcatcacacaggctggaattcatgcagctcttgccatggagacccctcagcagaccgacgatttctcatcgtacctgcactcgtatcaggtcgagtatatgtggttgatgtgaaaacaaatccaagggctccatctttgcacaaagttgtcgagcctgccgatatcatacagaagactggattagcttatccacacacatctcactgccttgcttctggtgatataatgatctcgtgtcttggagataaagatggaaatgctgcangaaatggatttcttcttcttgattctgagtttaatgtgaagggaagtgggagaaacc

SEQ ID NO: 25202 - DNA, 304 bp, Glycine max
  Clone ID: LIB3051-110-Q1-K1-B9
ttcagggcttatacccttagagataaggtttttgcatgatcctgctaaagatacaggttgtgtcggcagtgcattgacaagtaacatgatacgattttttaagacccaagatgaatcatggagccatgaggttgccatatcagtgaaaccattgaaagtgcaaaactggattcttcctgaaatgcctgggcttataactgattttctgatttctcttgatgatcggtttctgtattttgtaaactggcttcatggggatttaaggcagtttaacatcgaggacgttaaaaatcctaaactgact

SEQ ID NO: 25203 - DNA, 398 bp, Glycine max
  Clone ID: LIB3051-039-Q1-K1-B3
gcaaaacatctcagtttttgaattccaccttctccgaccaatggctgccaaacctcttactaccgaggcgattgcgcttacggaaaagaagatggacatgacactagatgacataatcaaaatgtctaaaaacccgaagaataagaagcaaagaagggttccgaacaaaagtcaaaaattttcaaacaattttactcaggataagtctgcaaaggtccagcgttatatggaatcgagatcttctcttagacagggggctcttgcaaaaagaaggtctaatttccagggaaaccaatttcctgctgcagttgaagttgcgcgaaaagctgttactgctcctctgcacaatagagtccctaatcgtaataaggtggctaactggaataaaacaagatttc

SEQ ID NO: 25204 - DNA, 363 bp, Glycine max
  Clone ID: LIB3051-093-Q1-K1-F8
gctgttgaattcttcaatcatgtgaatctgctatatggtacccttacagagctcgggtctcgtgagaattgggggacaatgtctgcaagacccaagtatgaatatagatgggctgattgtgtacaaattgagaaacctattgaggaagctgctccaaaatatgtttaatatataatggactggattgaagcacagttttatgatgaatccatattcccacagaagcttggttcaccattttctcccaactttaaagaagcttttgaagacaatattcaagcgtgtgatccgtgtatatgctcacatataccattctcacttttataaaattgtgagccttaaagaagaagtccacttaatcac

SEQ ID NO: 25205 - DNA, 313 bp, Glycine max
  Clone ID: LIB3051-106-Q1-K1-C4
gcagttgaaaagtctggaatagccaaagatgttacagaactgattggcaaaaccccaatagtatgtctgaataaaatcgcagacggttctgttgcccgggttgctgccaaactggaattgatggagccatgctctagtgtaaaagacaggattgcctatagtatgattgctgatgcagagaagaagggacttatcacacctggacagagtatcctcattgagccaacaagtggtaatactggtattggattagcattcctggcagcagccaagggctacaagcttataattacaatgcctgcttcaatgagtc

SEQ ID NO: 25206 - DNA, 402 bp, Glycine max
  Clone ID: LIB3051-112-Q1-K1-G3
ctcgattttgtgatcctcctacttggttcctagaaagctttgtagtgagcatatataatggctgttgaaaggtccggaattgccaaagatgttacggaattgattggtaaaaccccattagtatatctaaataaacttgcggatggttgtgttgcccgggttgctgctaaactggagttgatggagccatgctctagtgtgaatgacaggattgggtatagtatgattgctgatgcataagagaaaggacttatcacacctggaaagagtgtcctcattgagccaacaagtggtaatactggcattggattagccctcatgggagcaacccggggttacaagctcataaatacaatgcctgcttctatgagtcttgagagaaaaatcattctattatccttt

SEQ ID NO: 25207 - DNA, 334 bp, Glycine max
  Clone ID: LIB3051-092-Q1-K1-F7
acgcccacgcgtacggatttcttactgtattgttcaggtggacagaggtgttacattgagtggggctctacgtaaagcatgacaaatggcttgagaagaacggaataaagaattccaactttgctgtggttacatggtccaactgggattgtcgggtgatgcttgaatctgagtgccgattcaagaacatacggaagcctccttacttcaaccgctggatcaacttaaggattcctttccgtgaggtatttggtgctgtgaaatgcaatctaaaggaagctgtagacataatcgccttggactacgattgtccaacacattgtggtcttgatga

SEQ ID NO: 25208 - DNA, 443 bp, Glycine max
  Clone ID: LIB3051-104-Q1-K1-E4
gcgggacgtagaggaatttgcctgcacaagatacaaggccgcgtatcccatttttggaaaggtgcgtgtgaatggacctgatacagcacctgtctacaaattccttaaagcaaataaatcaggatttctgggttctaggataaagtggaatttcaccaagtttttggttgacaaggaagggaatgtcctccggcgttatggttcaaccacctcaccgttttccattgaaaatgacatcaagagagcattgggggaggcttgaaaaactctacaatcacttcaaattggtgctcttgttgaagatgattgaaacataaggaatgtatatttgtagatgtttcttctagtgattatttcttaaaaatttcatgtctaggtttttttgtgtttgttgtattagaaatctgttttggaatcgttatttaaaacttaattaatgggca

SEQ ID NO: 25209 - DNA, 430 bp, Glycine max
  Clone ID: LIB3051-016-Q1-E1-A3
acggacgcgtccgcccatgagtccggtcgtggtctttagcatttctcaccgactgcgaagggagagcgaataaaaaaaggcaaatcaaattcgagagaaggagagaatttagagagggaaaggatgaagatcacggcgttgttggtgcttaaatgcacgggcgagggatccgatccggtgattctggcaaacgcttccgatgtcagccacttcggctacttccagcgttccagcgttaaggaattcatcgttttcgttggtcgtacagtcgccagtcgcactcctcagggccaacgccaatccgtacaacacgaagagtacaaggtgcacacatacaacaggaatggtctttgcgcgttgggatttatggatgatcattacgcgattcggagtgcgttttctcttctcaatcaggtaatagatgaatatc

SEQ ID NO: 25210 - DNA, 357 bp, Glycine max
  unsure (1)..(357): unsure at all n locations
  Clone ID: LIB3051-097-Q1-K1-B8
acgcgtccgcccttgcgtccgcccattcgnccgcggacttgtgggtccgagagagcatcaaaagacatggacactttcttgcttcacaacttggactgaagccagggcagaaggttttggatgttggatgtggaattgggggaccattaagagaaatttctcgattcaggtaaacaagattgatttcatataggtttcctcttcctttgtctttcactgtttaactttactagctaataaaaatcaaggggtatctgtgcagcataacttcaattaccgggttgaataacaatgaggtccagattacaagatgaaaggaacctaatcgcattgcttgagtggacaagacttgcaatt

SEQ ID NO: 25211 - DNA, 438 bp, Glycine max
  unsure (1)..(438): unsure at all n locations
  Clone ID: LIB3051-036-Q1-K1-B6
cccacgcgtccgcccacgcgtccggagaaaagcgtgaatcatgtcggacgaagagcatcacttcgattctcaggcggatgcgggagcgtccaagacgtatcctcagcaggctggtaccattcgcaagaatggctacatcgtcatcaaatccaggccttgcaaggttgtagaggtctctacgtcaaagacaggcaagcatggacatgcanagtgtcactctggtgcaattgatattggtaatgggaaaaaagctcgaagatattgttccatcatnccacaactgtgatgttccacatgtgaaatcgcactgactatcagcttattgatatctctgaagacggctttgtgagtctgttgactgataatggaaataccaaggatgatctgaagcttcctactgatgaggcattgcttgctcagattaaagatggattttct

SEQ ID NO: 25212 - DNA, 391 bp, Glycine max
  Clone ID: LIB3051-040-Q1-K1-C8
ggcaaagagagagagagaaaagcgtgaatcatgtcggacgaagagcatcacttcgattctcaggcggatgcgggagcgtccaagacgtatcctcagcaggctggtaccattcgcaagaatggctacatcgtcatcaaatccaggccttgcaaggttgtagaggtctctacgtcaaagacaggcaagcatggacatgcaaagtgtcactttgttgcaattgatatttttaatgggaaaaagcttgaagatattgttccatcatcccacaactgtgatgttccacatgtgaatcgcactgactatcagcttattgatatctctgaagacggctttgtgagtctgttgactgataatggaaataccaaggatgatctgaagcttcctactgatg

SEQ ID NO: 25213 - DNA, 339 bp, Glycine max
  unsure (1)..(339): unsure at all n locations
  Clone ID: LIB3051-061-Q1-K1-H12
cttcttcttcttttgtttctttgtttttctgcgtangcaaagagagagagagaaaagcgtgaatcatgtcggacgaagagcatcacttcgattctcaggcggatgcgggagcgtccaagacgtatcctcagcaggctggtaccattcgcaagaatggctacatcgtcatcaaatccaggccttgcaaggttgtagaggtctctacgtcaaagacaggcaagcatggacatgcaaagtgtcactttgttgcaattgatatttttaatgggaaaaagcttgaagatattgttccatcatcccacaactgtgatgttccacatgtgaatcgcactgactatc

SEQ ID NO: 25214 - DNA, 389 bp, Glycine max
  Clone ID: LIB3051-005-Q1-E1-H4
cgcatcagagataattcactggctgacaatgtcaccgttgatcccgttgtgcgaggatttattagagattgggatgcaattgaggatttgttgcaccatgttttgtataccggcctcggatgggaaattggcaatgaaggacaaatactatttacagatccactttgtaccccaaaggcgaacaaagaacagttggtgcaactaatgtttgaaacattcaatatatcaggattttatgcctcagaacaagcagtgttatcactctatgctgtgggacgtatctcaggctgcactgttgatattggacatggaaaaatagatattgcaccggtaattgaaggtgctgttcaccacatcgcctcgagaagatttgagtttggaggtactga

SEQ ID NO: 25215 - DNA, 448 bp, Glycine max
  unsure (1)..(448): unsure at all n locations
  Clone ID: LIB3051-047-Q1-K1-D5
gtatacctctaaagttgacatgtgggcaatgggtgctataatggctgagcttttctctcttcgtcctcttttcccaggtgccagtgaagcggatgagatttacaaaatatgtggtgtgataggcaatccaacctttgaatcatgggcggatggactcaaacttgcaagggatattaactaccagtttccacagcttgccggtgtgcatctttctgctttaattccgtctgctagtgatgatgcaatcagccttattacatcactttgctcctgggatccctgcaagaggccaacggcttcagaggcacttcaacatcctttcttccagagttgcttttacattcctccatcccttcgcaacagagcagtagcgagaactcctccacccgctggaacaagaggagcactggatcagcanggagtcaagagatattccggtgctttacct

SEQ ID NO: 25216 - DNA, 383 bp, Glycine max
  Clone ID: LIB3051-012-Q1-E1-A6
aggtagttatccagtttctaaatcccaaagttcaagcatccattgctgctaatacttgggttgtcagtggttcaccgcaaacaaagaagttgcaggatatactccctagcattatccaccaattaggaccagataacttggaaaacctgaagaagctagccgagcaattccagaagcaggctcctgaaggggccgctggttcaaccacagctcaagaggagaatgatgacgacgtcccaaagcttgttccaggccaggattttgagacagctgctgaggagaccaacgctgcttcttagattgtgccatcgctaaatatctcctgtgttttaattttttcgtcttcctgattttccattttaagtatttcaggtgtttggttc

SEQ ID NO: 25217 - DNA, 436 bp, Glycine max
  Clone ID: LIB3051-037-Q1-K1-H5
ggtggccccaaatcggtttatcaaaagatcaaaattctcctccttacaagaagcctcatgacctgaagaaggcgtggaaagtcggtgttctgactgcagttattaagcacatgtctcctgatattgcaaagattcgcaagcttgtgaggcagtccaaatgtcttcaagataagatgacagcaaaggaaagtgcaacctggcttgcaatcatcaatcaagaggaggccttagcaagagagctataccctgattatatccccccattagcctcagctggaggtagtggatctttggtgatcaatgatagcaatgagtatgatgttgaagggggtgaggatgagcctaactttgacgtggaagactgcaaacatgagaatcttcacacatccaatcttgggatggaaagagtgagggtaactctgccagttcaacagcc

SEQ ID NO: 25218 - DNA, 430 bp, Glycine max
  Clone ID: LIB3051-088-Q1-K1-H8
gactggagcatctgataatcttcgtgaatggtggaaggacaaagtccggtttgatcgaaatggtcctgctgccataaccaagtatcaagctgataacgctattccggggaagaatgatggatgcaatccgatcggtccaacaccacacaccttgcaagagctgcaagacacaaccttgggttctctcttgtcagcactcatgcagcactgtgatcctcctcagaggcgttatccattggagaagggcgttcctacaccatggtggcctaatggtaatgaagagtggtggccccaaataggtttgcctaaagatcaaggtcctccaccttacaagaaacctcatgacctgaagaaggcatggaaagttggtgttctgactgcagttatcaagcacatgtctcctgatatcgcacaaattcgcaagctcgtg

SEQ ID NO: 25219 - DNA, 403 bp, Glycine max
  Clone ID: LIB3051-116-Q1-K1-C7
ggggatttggatatgttttctgctccccttggagaaggggatattaccgcccggcaaactgagccagaggtgatagttgaggatgattatagtgatgaagaaatcgatgtagatgagctcgagaggaggatgtggagggacaaaatgcgtctcaagcgattgaaggagcaaagtaaacctaaggaaggatttgatgcagtcaagcagaggcagtcccaagaacaggcaagaagaaaaaagatgtcaagggctcaagatggaatcttgaagtacatgctgaagatgatggaggtttgtaaggcccaaggttttgtctatgggataattcctgagaagggaaagcctgtgactggggcatctgataatcttcgtgaatggtggaaagataaaagttcgtttgatc

SEQ ID NO: 25220 - DNA, 381 bp, Glycine max
  Clone ID: LIB3051-086-Q1-K1-F9
cccacgcgtccgctttgatataaacttgagttgtttggatggcattcaaggtcctgtttatgggggtactggatgtgtctttaatagaacagctttgtatggctacgagccttctattaaacccaagcataaaaagcctgggttgctttcttgactctgtggtggtaaccgaaagaagagatcaaaatctagcaagaaaggctcagacaagaaaaaatctagcaagaatgttgacccaactgtgcccatctttagtcttgaggatatagaagagggggtggaaagtgctggatttgatgatgagaaatcactacttatgtcacaaatgagccttgagaaaaggtttggtcagtctgctgtctttgatgactttacactcat

SEQ ID NO: 25221 - DNA, 415 bp, Glycine max
  unsure (1)..(415): unsure at all n locations
  Clone ID: LIB3051-088-Q1-K1-C3
cccaaaccaatcagtgggtgccgcggggaagtggttttcccatgatgtcacgttttatgcatgcgccttctcccgttctgtcttcttcgcatcctcatttgggagttggccacaagagagagcgtgaagatgacactggcgctggtgcgagtggaggtgttgctattgcagcagcttcttcacaaacgcaaacacaagagattgaaagtgctggcggcgacaggaggaggagatacaggggagtgaggcagaggccgtgggggaaatgggcggcagagattcgcgatcctcacaaagcggcgagagtgtggcttgggacattcgacactgccgaggctgcggccagagcctacgatgaagccgcattgaggttcagaggtaacagagcanaacttaatttccccgaaaacgttgt

SEQ ID NO: 25222 - DNA, 428 bp, Glycine max
  Clone ID: LIB3051-009-Q1-E1-C4
aaaagaatcactcccttatccatttccacaccacaccatggcctcaaccaacgctctctcttcagcctccattctacgctctcccaaccgccagtctctgacccgaagagcgaaccataatggaagagtaaattaccggaaaccgaataaccgtttctccgtgaaagcctccgccaaagagattgcctttgaccagcattcccgctctgctatgcaggccggcattgacaagctcgccgacgctgttgggctcactcttgggcccagagggaggaatgttgtgttggatgagtttggaagtcctaaagtggtcaacgatggtgtcaccattgctcgcgcaatcgagcttcccgatcctatggagaatgctggtgcagctcttatcagagaggttgctagcaagactaacgactctgcgggtgatggga

SEQ ID NO: 25223 - DNA, 235 bp, Glycine max
  unsure (1)..(235): unsure at all n locations
  Clone ID: LIB3051-023-Q1-K1-B12
gaaaccgattaacggtttttccgtgaaaggcctccgccaaagagattgcctttgaccagcattcccgctctgctatgcaggccggcattgacaagctcgccgacgctgttgggctcactcttgggcccagagggaggaatgttgtgttggatgagnttggaagtcctaaagtggtcaacgatggtgtcaccattgctcgcgcaatcgagctttccgatcctatggagaatgctgg

SEQ ID NO: 25224 - DNA, 382 bp, Glycine max
  Clone ID: LIB3051-034-Q1-K1-D7
ccgtttctccgtcaaagcctccgccaaagagattgcctttgaccagcattcccgctctgctatgcaggccggcattgacaagctcgccgacgccgtcgggctcactcttgggcccagggggaggaatgttgtgttggatgagtttggaagtcctaaagtggttaacgatggtgtcaccattgctcgcgccatcgagcttccagatcctatggaaaatgccggtgcagctcttattagagaggttgctagtaagactaacgactctgccggtgatgggactaccacggcttcagctcctgctcgcgagataattaagctggggcttcttagtgcgacttctggggctaatcctgtgtctcttaagagaggggatgatataact

SEQ ID NO: 25225 - DNA, 412 bp, Glycine max
  Clone ID: LIB3051-037-Q1-K1-C7
aagaatcactcccttatccatttccacaccacaccatggcctcaaccaacgctctctctgcagcctccattctacgctctcccaaccgccagtctctgacccgaagagcgaaccataatggaagagtaaattaccggaaaccgaataaccgtttctccgtgaaagccttcgccaaagagattgcctttgaccagcattcccgctctgctatgcaggccggcattgacaagctcgccgacgctgttgggctcactcttgggcccagagggaggaatgttgtgttggatgagtttggaagtcctaaagtggtcaacgatggtgtcaccattgctcgcgcaatcgagcttcccgatcctatggagaatgctggtgcagctcttatcaaagaagttgctagcaagactaacgactc

SEQ ID NO: 25226 - DNA, 431 bp, Glycine max
  Clone ID: LIB3051-065-Q1-K1-C9
ctcgcctcaatttgttacaaaccctgagaagttgattgttgaatttgagaatgcgagagtgttgattacagatcagaagatttcagcaataaaagacattataccactgttggagaaaaccactcagttgagagctcctttgcttatcattgccgaggatgtcactggtgaggctttggccacccttgtcgtgaataagctgcgtggtatccttaacgttgctgccattaaagctcctggctttggtgagcggcgaaaggccctgcttcaagacattgctatattgactggtgctgagttccaagctagtgatctgggtctgcttgttgaaaacacctcagtggagcagcttggtttggctaggaaaattaccatctccaaggattctaccactgtcattgctgatgctgcgacaaaggatgagttgcaag

SEQ ID NO: 25227 - DNA, 427 bp, Glycine max
  Clone ID: LIB3051-037-Q1-K1-D9
cgcattcctccttgcctctttgttctctctttttctctctccttctttctttgtttctgtgtgttcgagattgaagaagatgatgcaggctggacccggcggcatggcccaacaagcgaaccaacaatacgcacagcaacagcaacaaccctacatgatgatgccgccgcagcctcagccccctcagatgtgggccacatcggcccagcctccgtcccagtcggtggctcctccgcaacccaccagcgccgatgaggtccgtaccctctggatcggtgatttgcagtactggatggacgaaaattatctctacacctgtttggcacacaccggcgaggtggcttcagttaaagtcattcggaacaaacaaactagtcaatcggagggatatggggttattggagtttactagtcgtgctggtgctga

SEQ ID NO: 25228 - DNA, 456 bp, Glycine max
  Clone ID: LIB3051-069-Q1-K1-D9
gttagggtttgagtctcaaccactctttctttaaagcacagtctcacatacctcattggctcggcttcgttctctctctgtctctctctctcttttctctgcgtgtgtgcgtggattggtgaatatgagattgaagaagatgatgcatgctggacccggcggcatggcccaacacgcgaaccagcactacgcacagcaacagcaacaacaacaacaacaagcctacatgatgatgccgtcgcagcctcagccccctcagatgtgggccccatcggcccagcctccgtcccaatcggtagctcctccgcaacccaccagcgccgatgaggtccgtaccctctggatcggcgatttgcagtactggatggacgaaaattatctctatacctgtttcgcacacaccgacgagctggcttcagtcaaagtcattaggaacaaacaaactagtcaatcgga

SEQ ID NO: 25229 - DNA, 421 bp, Glycine max
  Clone ID: LIB3051-048-Q1-K1-A2
gtaaaactttatatgtaccagattttcagggggctggcttatatacacactgtgcccaaagtttgccacagagacttgaagcctcaaaatatattggtggatcctcttacacaccaagtgaagctatgtgattttggaagtgcaaaagttctagtaaaaggtgaagctaatatatcatacatatgttcacgattctatcgtgctccagaacttatatttggtgccacagagtatacaagttcaattgatatttggtcagctggctgtgtccttgctgagcttcttttgggccagccattattccctggcgaaaatgcagtagaccagttcgtacatataataaaggtgcttggaacaccaattcaaaaggaattcccctgaatgaatccaatttccatggccttaaggtttcaacagttaa

SEQ ID NO: 25230 - DNA, 463 bp, Glycine max
  Clone ID: LIB3051-068-Q1-K1-C5
tcggaagcccaaacagggaagagcaaagtggtggagtttgggaacatgcaaacgagggcagtggctatcttggtccacacaatcatcttctttggtctcattaccatctttcttgttgctattggctaaatgcttggaaactggcgagccagtggccattaagaaggttttactggacaaaagatataagaatcgtgagctacagttaatgcacttgatggatcatccaaatgtgatctctctgaagcatcgtttcttttccactacaagtgcagatgaactttttcttaatttgattttcagggggctggcttatatccacactgttcctggaggttgccacaaagatttgaagcctcaaaatatactggttgaccctcttacacaccaggttaagatatgtgattttggaagtgcaaaagtgctggtcaaaggtgaagctaatatatcacatatatgttca

SEQ ID NO: 25231 - DNA, 445 bp, Glycine max
  Clone ID: LIB3051-084-Q1-K1-C10
ctccttcatattttctctctcaccattctcttcttcttctccctttcttagaggctcgctcttttctctctgccctccgccatgactgaggataaggagatgtcttcctctgtcaccaatggcgatgattccctcactggtcacatcatatctacaactattggaggcaaaaatggggaacccaaacagactattagttacatggcagaacgggttgtaggaactggatcatttggaattgttttccaggcaaaatgcttggaaactggggaagcagtggctattaaaaaggttttacaggacagaagatacaagaatcgcgaactacagttaatgcgtgttttggatcatccaaatgtgatctctttgaagcattgtttcttttcaactacaagtacagatgagctttttcttaatttggtgatggaatatgttccagagtcta

SEQ ID NO: 25232 - DNA, 414 bp, Glycine max
  Clone ID: LIB3051-097-Q1-K1-A11
ttttaagcttggaagcacatgcactgtttttgtggttctgctacaccgctaaacacagagaaaggcacagcacgatgacgatgaagataatggtagcgattaagcgagtggtggactacgccgtgaaaatcagggtgaagggcgacaagacaggggtggtgacccataacgtgaaaatgtcgatgaaccccttctgcgagatcgcgctggaagaggccctccgcatcagggagtctggcttggcctccgaggttgtcgccgtcaccatgggaccctctcaatctgtagacactctccgaaccggtcttgccatgggagccgacagaggcatccatgtcgagtcaacttgctttctctaccctgtctctgatgccaagaatttgagaaaactcgtcgagattgagaaacccggtc

SEQ ID NO: 25233 - DNA, 388 bp, Glycine max
  Clone ID: LIB3051-085-Q1-K1-G8
cccacgcgtccggaaacaaagggacagcacatgataaagcattacaagaaatgtgccacttgtgatgacattgttcgcattgacaatgaagaaaaaaataaggaagtgcaacaggagtaagtatttccatcagaatgttaatggcagcaaacatcttggtctgtggaaactggcagaagcatggcagcaacaataaatagaaatgtcattggaggatcaacgacttttgtctagttacctccctttactgagagagtttattcctaatgcggctgcaaaggttgaaactgatttgattgctcagttggttggtcattccaaagaagaaaattatgtgtacgacctctacaccgtgaaagatgagatggatataaacattgatgattct

SEQ ID NO: 25234 - DNA, 315 bp, Glycine max
  Clone ID: LIB3051-093-Q1-K1-G4
gtcatacgttattccccagacgtttcgatgtttgcatcaggggatgtcaatcgagaagctgtagtgtgggaccgtgcctcccgagaggtgaagctgaagaacatgttgtaccatactgctaggataaactgcctagcgtggtcccctgatagccataggattgctacaggatcactcgacacatgtgtcatcatatatgaagttgatcagcctgcatctagtagaattaccataaagggtgctcatttaggtggggtttatgggttagcatttactgatgaatatagtttggttagcttaagtgaagatgctttt

SEQ ID NO: 25235 - DNA, 447 bp, Glycine max
  Clone ID: LIB3051-011-Q1-E1-E5
gacccaaacgtcagcgaggctgctaggattagggagaaatacccagaccgtatcccggtgattgtggagaaggcagaaagaagtgatatcccaagtattgacaagaagaagtaccttgtccctgctgatctgacagttggacagttcgtctatgttatccgcaaaaggattaaattaagcgcagaaaaggcaatctttatctttgtggacaacgtccttccaccgacaggagcaattatgtctgccatatatgatgagaagaaggatgaggatgggtttctttatgttacttacagtggagagaacacctttggggatctgacttcccactagcattattttaaagattggcactataatctgattgcattctcattggctagtctcataaatttgtatcaatactcgatatcaaagtacattgctctcaatataatgtacagtttg

SEQ ID NO: 25236 - DNA, 437 bp, Glycine max
  Clone ID: LIB3051-096-Q1-K1-G4
ggaaatcctggaaaagctggtgctggggctattctacgagctaatgatggaagtttgatgtgtagattgcgtgaaggtgtgggtatagcaacaaacaatgctgctgaatatcgtgcaatgatattgggaatgaaatatgctcttaaaaagggatttactggtattcgtatccaaggtgattccaaacttgtttgcatgcagattgatggttcctggaaggtcaagaatgaaaacttgtctacattgtataatgtggcaaaagaactcaaggataaattttcctcattccagatcagtcatgttctaaggaacttcaactctgacgctgatgctcaagcaaatttggccataaatcttgcagatggccaagttcaagaagagtgtgtgtaattcactcatggcagctgatgattatgttttgggtttgttgcaaaaca

SEQ ID NO: 25237 - DNA, 397 bp, Glycine max
  Clone ID: LIB3051-001-Q1-E1-G1
agcccatctgatcatataacacaacacactgcaggcttgttgtgttgtgctgtgttcattctgaaactttgatctatgtgagacaagttgtggctaccctgcaaagccagaaaaaatggtgccagagaacttgaagaaacaacttgctttggctgtgagaagcatccattggagctatgcaatcttctggactgattcaactacccaacccggggtgttgagctggggggaagggtattacaatggagacattaagactaggaaaacaagtcaaggagtagaactcaattctgaccaaatagggttgcagaggagtgaacagctgagagaactattcaaatccctcaaaactgtagaagtcacccctcaaaccaaaaggccttcagcagcagcactg

SEQ ID NO: 25238 - DNA, 439 bp, Glycine max
  Clone ID: LIB3051-103-Q1-K1-G4
gctggcagcttgctcttataatccttgctttggtgcctcttctaggactaaatggagatctgcaattcaagttcttaaaaggattcagtgcagatacaaagaaattgtatgaggaagcaagccaagtggcaaatgatgctgtggggagtataagaacagttgcttctttctgtgctgaagagaaggtgatggaattataccaggaaaaatgtgaaggaccaattaagacaggcaaaaggcaagggataataagtggaattagttttggagtatcattctttgtgctgtattcagtttatgcaaccagtttttatgctggagctcgactggtcgaggatagaaaagcaacattcacagatgttttccgggtcttttttgctctcagcatggccgccataggaatctctcaatctggctctttggtccctgattcaactaa

SEQ ID NO: 25239 - DNA, 455 bp, Glycine max
  unsure (1)..(455): unsure at all n locations
  Clone ID: LIB3051-097-Q1-K1-A7
acccacgcgtccgnnttgttttgtttacctttttgtctccattccttctttatttatttgttgttacttgttgctgttgtccctctccctgggagaaaaaagaagaagaagaagaaagagtttgaagtgaaatgtgagatatgggaagtggagtttcaacactctgttggtgctctgggaccaacaacgagcccgacgttattttcagcgccaccgacccactggacgaaaccctaggccactccttctgctacgtcagatcctccgcacgcttcctctctcccactcactccgatcgcttcctcagtccttctacttcccttcgtttctcttcgacccatacccgacccgaatttcacgaaaccgggttcaaagccatttccggagccttcgtcagcgccaacagcttccttncgacaacagtcattcacttggacgaagaggtgaacggagtt

SEQ ID NO: 25240 - DNA, 428 bp, Glycine max
  Clone ID: LIB3051-005-Q1-E1-B1
acgcgtcagaaaccttggaggtacactgggaaggaggagaatatggagagagaagatatcaagatgttagtgaaaaagtggtgggatatatatgaggatgagactttggactacaacaatccactcaatgtggataagttcactgcggcacttatggaggttggtgaagtcaagttcgtccgtgccccatctgctgcttaagagtgtctttggaaatcaagtgtgatccaagtacatgtacaaagtcatacatcattacattaacttttatgtatttctaaaagtcatacatcattacattaagttttatgtatttctaaagtcttaagacttaagaggaccttttttatgtgtcccgcttttctttttttctttttccaattctgtcattgtaaagcagtgaataccgtatccttaattttataaat

SEQ ID NO: 25241 - DNA, 404 bp, Glycine max
  Clone ID: LIB3051-001-Q1-E1-G11
ctcatggtcaattgggggacgcttttaaaagttatgtccgtactcgggattattgcactacatcaaagcacattgttcatatgtgtatgagtgcaattctggtcagcattgaaatgggtcaatttcctcatgttacaagctatgttagcaaggcagaacagtcaccagatgcccttgaagcagtaacagttgcaaagctacgatgtgctgcaggattggctaatctagaagccaaaaagtacaagcttgctgcccgaaagtttctagaaacaggacctgaactgggaagtcactataatgacgtaattgcacctcaagatgttgcaacatatggaggactttgtgcacttgcaacatttgatcgggcagagttaaaggcaagctctccattatattgttgtgat

SEQ ID NO: 25242 - DNA, 405 bp, Glycine max
  Clone ID: LIB3051-011-Q1-E1-B1
cacgcgtcagaaaaagttgatgtagcatgccataaaagcaagagctcttgttccttgtcatccagaaagaaatactgtagatctgggttaacaatggctcctggaagcaatgttttcaaagaagttcttgaatctcacctgatgtcctcagattatgaaatgggaaaagctaaatctgaaggcaagagttacaatacatctacaaaatccaacaatgggtttaattgaaagaatggaaataattccaacaatgggcttttagaaataatttgaatgccccttttgcagaaatttgagttacccccaaattcacagttgccaaaatggcaatacattaggttcccaattgtaaagttgaagtccataatatctgcccgtcctgccatcatgatcttgggaaatata

SEQ ID NO: 25243 - DNA, 439 bp, Glycine max
  Clone ID: LIB3051-004-Q1-E1-G8
ctcaattggtcagattttgccacagattacaaggatgccaaattttttgtcatcaaatcttacagtgaagataatgttcacaagagcattaaatatggtgtctgggctagtacaccaaatggaaacagaaagttagatgctgcatatctccaagcaatggagaagcaagatgcctgtcctatatttctttttttttcggtaaaatgctattgctcagttctgtggggtagctgaaatggttggacctgtcaattttgacaagagtgtggacttttggcagcaagacaagtggagtgggcagtttcccgtgaagtggcacataattaaagatgttccaaacagtcagtttcgtcacattgttcttgaaaataatgataacaagcctgtgaccaacagtcgagatactcaagaggtgaagttgacacaaggggttgaaatg

SEQ ID NO: 25244 - DNA, 380 bp, Glycine max
  Clone ID: LIB3051-013-Q1-E1-F4
agagaagaagaatagagagtgatggagtgcgtattcggattggtgggtaatggattcgcgatcgtggtggctgattcatcggcggtgcacagcatcctcgtccacaagtccaacgaggacaagatcatgcttctcgattcccacaaactcatcgccgctagcggcgagcccggagacagggttcaattcactgagtacattcagaaaaacgtcgccttgtatcagttccgtaacggcatccctctcaccaccgccgccgccgccaatttcacacgtggcgaacttgccactgctctccgcaagaacccatactctgtgaacatccttcttgctggctatgacaaagagacaggccctgaactgtactaaattgactacat

SEQ ID NO: 25245 - DNA, 434 bp, Glycine max
  unsure (1)..(434): unsure at all n locations
  Clone ID: LIB3051-065-Q1-K1-F9
cataacccttacctttggtatagagaagattaatagagagtgatggagtgcgtattcggagtggtgggtaatggattcgcgatcgtggtggctgattcatcggcggtgcacagcatcctcgtccacaagtccaacgaggacaagatcatgcttctcgattcccacaaactcatcgccgctagcggcgagcccggagacagggttcaattcactgagtacattcagaaaaacgtcgccttgtatcagttccgtaacggcatccctctcaccaccgncgtcgccgccaatttcacacgtggcgaacttgccactgctctccgcaagaacccatactctgtgaacatccttcttgctggctatgacaaagagacaggccctgaactgtactatattgactacattgcaacgcttcacaagcttgaaaagggggcttt

SEQ ID NO: 25246 - DNA, 435 bp, Glycine max
  Clone ID: LIB3051-016-Q1-E1-B1
gacgacgcgtcaggggttcaaaagccatcatggtttctgatgacctgttgcttacctcctctggcgcttgatggccgttttatacggaaatgcaagcaagggtgtttgcagtttgtgattttgaagcccattttagttgttgttacacttatactttatgcaaaggggaaatataaggatggaaatttcagtccaaagcaatcatacttgtatcttacaatcatctatacgttctcatacacaatggctctctatgctcttgttttgttttatgtggcatgcaaggatctgcttcaaccattcaatccagtcccaaagtttattataataaaatctgttgtattcctaacttattggcaaggtgtcttagttttccttgcggcaaagtcagaatttgttaaagatgcagatgaaactgctctacttcaagatttt

SEQ ID NO: 25247 - DNA, 411 bp, Glycine max
  Clone ID: LIB3051-016-Q1-E1-G12
aggggcatgatatgattatcttggctggtgctgagtatgggagtggaagctctcgtgattgggctgcaaaggggccaatgctactgggcgtgaaagctgtcatagcaaaaagttttgaaaggattcaccgaagtaatttggtgggaatgggtatcattcctttgtgttttaagcccggggaggatgctgattctcttggattaactggtcaagaacgttacaccattgatctaccaagcaatgtgaatgaaatacgacccggtcaagatgtcacagtggtgacagacaccgggaaatcatttgtatctacattgagatttgatactgaggttgaactagcttacttcaaccatggaggtatcttacaatatgtcatcagaaacttgatcaatgctaaacattgaatcagat

SEQ ID NO: 25248 - DNA, 440 bp, Glycine max
  Clone ID: LIB3051-027-Q1-K1-G8
cccacgcgtccgcccacgcgtccgaaatacttcccttacccccccctctctctctctcggaaaacaaacgaacaaacaaatatgcaagtggcggcagaactccaacgcgcccatcaccaccaccaaaggcacaaacaagacactcccatgtgccgccaaatccagctcactatctccgatcacaccaccgccggagacgacgacggcgaggatctcttcattccgcccctcaacttcgccatggttgataatggcattttccgctccggcttccccgaacccgccaacttctccttcctccaaaccctcggcctccgttccatcatatatctgtgtcctgagccgtatccggaggccaatatggagttcctcaagtcaaatgggatcaagctttttcagtttgggattgagggtcataaggagccttttgtgaacatccc

SEQ ID NO: 25249 - DNA, 397 bp, Glycine max
  Clone ID: LIB3051-097-Q1-K1-B9
tgatttgacttccggttcacgcaatctttcctctacgctggataaggtccttctttgggagaagaaactctttaatgaagttaaggcggaggaaaagatgcgggtcatgcacgataggaagtgtcacaggttgaagcgtttggatgataggggttctgattttcataaagtcgattcgactcgaactttgattaggaatctgtccacaaaaattagaatggcaattcaggtggttgataagatttctatgactataaataagataagggatgaagaactgtggccacagctgaaggaattaatccaggggttgaccagaatgtggaaatccatgcttgaatgtcatcatgaacagggtgaagcaattaaagaagccagaatactgggttccattgga

SEQ ID NO: 25250 - DNA, 438 bp, Glycine max
  Clone ID: LIB3051-114-Q1-K1-E6
gcccaacagtgtcgtttacgtgaattttggtagcatcgcggttatgacaagtgaggaatggattgagtttgcatggggtcttgctaatagcaacaaaacctttttatgggtcataagaccagatcttgtggcgggcgaaaacgctcttttaccttcagagtttgtgaaacaaactgaaaaaagaggactattgtctagttggtgctcccaggaacaagtgctgactcaccctgcaattgggggatttttgacacacagtggttggaattcaacgttggaaagtgtatgtggaggtgttccaatgatatgttggcctttctttgcagagcaacaaaccaattgttggttttgttgtaaggagtgggggattgggttggagattgaagatgttgagagggacaaaatagagagccttgtgagggagttgatggatggtga

SEQ ID NO: 25251 - DNA, 393 bp, Glycine max
  Clone ID: LIB3051-001-Q1-E1-E7
agctctctctctctctcacccttcccagtgatcaattcaacgatgttagagcagttgctgatattcacgcgcggagggctcatcctctggacctgcaaccacctcagcaacgccctgaggggatctccgatcgacacgttgatccgatcctgcctcctggaggagcgatccggtgcggcctccttcaactacgacgcacctggagccgcatactctctcaaatggaccttccacaacgacctaggcctcgtctttgtcgccgtctatcaacgcgtcctccacctcttgtacgtcgacgatttgctcgccgccgtcaagcgcgagttctcgcgcctctaccacccccaaaaaaccgcctaccgagattttgacgagatctttcagcagctccag

SEQ ID NO: 25252 - DNA, 365 bp, Glycine max
  Clone ID: LIB3051-053-Q1-K2-A2
caaacacgttcgtctcgtttcgttcccatggcggtctccgtttccgcgtcctccgcgattgcttgtttgaactccgaacgctccacgcgcttggcaccctcactcgtctccgcatcttcttccgccaagcaatcctcgctgcaattcacgtcgcccacgcgccttcttcggattagtactccacgcgctcccgctccttcgcgacctcgattccttcctctggttcaagcgaagaaacaaacctataactcgtttgaagatttgcttgccaattctgaaaagcctgtgttggttgacttctatgcaacctggtgtggtccttgtcaattcatggttcccatactcaatgaagttagcactcggct

SEQ ID NO: 25253 - DNA, 441 bp, Glycine max
  Clone ID: LIB3051-042-Q1-K1-G12
gtgagatacggtattggagcataaacaatggcagttgtgctagagtgggcaagggtggcaccacacagatgagatttcagcctcgtctcgggaggtaccttgctgcagcggcagagaatattgtgtctatatttgatgtggagacacaagcgtgtcgatattcactaaagggacacacaaaaccagtggattgtgtttgttgggatccttctggggagttgctggcatctgtgagtgaggactctgtcagggtttggactcttggatcagggagtgaaggggaatgtgttcatgaacttagctgtaatggcaataagtttcatgcatctgttttccacccaacgtacccttcattgctggtcattggctgttaccagtcattggagctgtggaatatgagcgagaacaagacaatgactctgtctgctcatgatggtctca

SEQ ID NO: 25254 - DNA, 424 bp, Glycine max
  Clone ID: LIB3051-031-Q1-K1-E5
cccacgcgtccgcttcggtgatcatcgtaactacctctacatttgtttgtttatcatgtctttgctcgtatcaatgtctaacaccagcaacaatgtcgctggggtcgacaacacgttcagaagaaaatttgatcgagaagagtatctagaacgagcacgggagcgcgagagacaggaggaggagggtcgagcgaaacctaaagccaaaggtcctcccgtgcagaggaagcccttgaaacatagagattatgaagtggaccttgaatcccgcttgggcaagactcaggttgttacgccggttgcaccactaagtcagcaggctggatactactgctcagtttgtgagtgtgtggtgaaggactctgcaaactacttggatcatattaatggaaagaaacatcaaagagccttgggcatgtccatg

SEQ ID NO: 25255 - DNA, 259 bp, Glycine max
  Clone ID: LIB3051-039-Q1-K1-A4
ttggaactgcaaacccaccaaaccgtgttgatcagagcacctatcctgattactactttagaatcagcaactgtgaccacatgaccgagctcaaagagaaatttcagcgcatgtgtgacaagtctatgatcaagacgagatatatgtacctaaactaagagatcttgaaagagaatccagacatgtgtgcttacatggcaccttctttggatgctaggcaagacatggtggtggttgaggttccaaagctagggaaaga

SEQ ID NO: 25256 - DNA, 427 bp, Glycine max
  Clone ID: LIB3051-041-Q1-K1-C2
ataatccagacatgtatgcttacatggctccttatttggatgctaggcaagacatggtggtggtagaggtaccaaagctagggaaagaggctgcagtggaggccataaaggagtgtagccagccaaagtcaaagattacccacttgatcttctgcaccactatcggtgaggacatgcctggtgctgattaccgactcaccaaacaattggaccttagcacttatgtgaagaggtacatgatgtaccaacaaggttgctttgcatgtggcacgggtcttcattaggccaaggatttggctgagaactacaagggtgcacgtatgcttgacgtctgctctgacattactgcggtcacatttcgtgcgccaagtgacactcaccttgatagtcttgtggaccatgcattgcatggagatggagctgctgc

SEQ ID NO: 25257 - DNA, 404 bp, Glycine max
  Clone ID: LIB3051-050-Q1-K1-E11
gcaccactagcggtgtggacatgcctggtgctgattaccaactcaccaaacaattgggcctgcgcccttatgtgaagaggtacatgatgtaccaacaaggttgctttgcaggtggcacggttcttcgtttggccaaggatttggctgagaacaacaagggtgcacgtgtgcttgttgtctgctctgagatcactgcagtcacattccgtgggccaagtgacactcaccttgatagtcttgtgggccaagcattgtttggagatggagctgctgcagtcattgttggttctgacccaattccacaagttgagaagcctttgtatgagcttgtttggactgcacaaacaattgctccagacagtgaaggtgctattgatggacaccttcgtgaagttggactcaca

SEQ ID NO: 25258 - DNA, 425 bp, Glycine max
  unsure (1)..(425): unsure at all n locations
  Clone ID: LIB3051-066-Q1-K1-A5
cccacgcgtccgggatgttcccgggattgtctcaaagaacattgataaggcactttttgaggctttcaacccattgaacatctctgattacaactccatcttttggattgcacaccctggtgggcctgcgattttagaccaagttgagcaaaagttgggtctcaaacctgagaagatgaaggccactagagatgtgcttagtgaatatgggaacatgtcaagtgcttgtgttcttttcatcttggatgagatgaagaagaaatctgctgaaaatggacattaaaccacaagtgaaagacttgaatggggtgtggtggtcggttttggacctggacttaccattgaaactggtgntttgcataatgtggccatctgagatgcctcatatattatttcattattgtgtaccacttttcaaacttgct

SEQ ID NO: 25259 - DNA, 400 bp, Glycine max
  Clone ID: LIB3051-086-Q1-K1-F3
cccacgcgtccgtctactactgctagctgtgacttgttttgagttcaatcaaatcgcattggtgtctgaaaggaggaaagatggttagcgtagctgagatcaggcaggcacaaagggcagaaggcccagcaaccatccttgccattggaactgcaaacccaccaaaccgtgttgatcagagcacctatcctgattactacttcagaatcaccaacagtgaccacatgaccgagctcaaagagaaatttcagcgcatgtgtgacaagtctatgatcaagacgagatatatgtacctaaacgaagagatcttgaaagagaatccaaacatgtgtgcttacatggcaccttctttggatgctaggcaagacatggtggtggtagaagtaccaaagctagggaa

SEQ ID NO: 25260 - DNA, 421 bp, Glycine max
  unsure (1)..(421): unsure at all n locations
  Clone ID: LIB3051-111-Q1-K1-D10
cacctatcctgattactacttcagaatcaccaacagtgaccacatgaccgagctcaaagagaagtttcagcgcatgtgtgacaagtctatgatcaagatctcttcgtttaggtacatatatctcgtcttgatcttgaaagagaatccaaacatgtgtgcttacatggcaccttctttggatgctaggcaagacatggtggtggtagaggtaccaaagctagggaaagaggctgcagtaaaggccataaaggagtggggccagccaaagtcaaagattacccacttgatcttctgcaccactagcggtgtggacatgcctggtgctgattaccaactcaccaaacaattgggccttcgcccttatgtgaaaaagtacatgatgtaccaacaaggttgctttgcangtggcacgggtcttcgt

SEQ ID NO: 25261 - DNA, 363 bp, Glycine max
  Clone ID: LIB3051-013-Q1-E1-A11
cttctacaaaattttctgttcgatctcaaccaaggttgttccttccaccgccatgagtttcatcttcggaaagcgaaaaacacccgcagagcttctgcgggaaaataagaggatgctggacaaatcaatcagagaaattgagcgcgagcggcaaggcttgcaaacgcaagagaagaaattgattgcggagataaagaaaagtgccaaacagggccagatgggaactgttagagttatggcaaaagatcttgttagaacaaggcatcacgttgagaaattttataagctaaaatctcagctccaaggtgtatcactcagaattcagactttgaaatcaacacaagcaatgggtgaagctatgaa

SEQ ID NO: 25262 - DNA, 365 bp, Glycine max
  Clone ID: LIB3051-013-Q1-E1-H12
tcgtcttctacaaaattttctgttcgatctcaaccaaggttgttccttccaccgccatgagtttcatcttcggaaagcgaaaaacacccgcagagcttctgcgggaaaataagaggatgctggacaaatcaatcagagaaattgagcgcgagcggcaaggcttgcaaacgcaagagaagaaattgattgcggagataaagaaaagtgccaaacagggccagatgggagctgttagagttatggcaaaagatcttgttagaacaaggcatcaggttgagaaattttataagctaaaatctcagctccaaggtgtatcactcagaattcagactttgaaatcaacacaagcaatgggtgaggctatg

SEQ ID NO: 25263 - DNA, 428 bp, Glycine max
  Clone ID: LIB3051-066-Q1-K1-F8
ggaggctaatctattaggcgctgttctctcgtcttctacaaaattttctgttcgatctcaagcaaggttgttccttccaccgccatgagtttcatcttcggaaagcgaaaaacacccgcagagcttctgcgggaaaataagaggatgctggacaaatcaatcagagaaattgagcgcgagcggcaaggcttgcaaacgcaagagaagaaattgattgcggagattaagaaaagtgccaaacagggccagatgggagctgttagagttatggcaaaagatcttgttagaacaaggcatcaggttgagaaattttataagctaaaatctcagctccaaggtgtatcactcagaattcagactttgaaatcaacacaagcaatgggtgaggctatgaaaggcgtgacaaaggccatggggcaaatgaatag

SEQ ID NO: 25264 - DNA, 458 bp, Glycine max
  Clone ID: LIB3051-066-Q1-K1-F11
caaaattttctgttcgatctcaaccaaggttgttccttccaccgccatgagtttcatcttcggagagcgaaaaacacccgcagagcttctgcgggaaaataagaggatgctggacaaatcaatcagagaaattgagcgcgagcggcaaggcttgcaaacgcaagagaagaaattgattgcggagataaagaaaagtgccaaacagggccagatgggagctgttagagttatggcaaaagatcttgttagaacaaggcatcaggttgagaaattttataagctaaaatctcagctccaaggtgtatcactcagaattcagactttgaaatcaacacaagcaatgggtgaagctatgaaaagcgtgacaaaagccatggggcaaatgaataggcagatgaacttgccatcattgcagaaaatcatgcaagaatttgagagacagaatgagaagatggaat

SEQ ID NO: 25265 - DNA, 445 bp, Glycine max
  Clone ID: LIB3051-071-Q1-K1-C5
ttggcatcccagttgagtttcatggggtgccagtttttgctccagatgtgacaagggagatgcttgatatcaggccaggagaggccttggctgtgaacttccccttgcaactccatcacacagctgatgagagtgttcatgtgagcaacccaagggatggacttttgagattggtaaggtcactttctcccaaggtgaccacattggtggagcaggaatcaaacacaaacacaacccctttcttcaacaggttcattgaaaccttggattactacttggcaatctttgagtccattgatgtcaccctcccaagagacagcaaggagaggattaatgtggagcaacattgtctggccagggatattgtcaatatcattgcttgtgaaggcaaggaaagggttgagagacatgaactgttcggcaagtggaagtcaaggttaaagat

SEQ ID NO: 25266 - DNA, 377 bp, Glycine max
  Clone ID: LIB3051-001-Q1-E1-E6
agaaagaagcaagcatgtgtggcggagcaatcatcgcagatttcatacctcggcagcgtccccgcaccctcacagcctccgaactctggcccaagcgcagcgaacctcaacctcaacctcctcctcctccagttaagaggcagaggaaaaacctctacagagggatcaggcagcggccctggggcaaatgggccgcggagattcgcgatccacgtaaaggagttcgtgtctggcttggcaccttcaacaccgccgaagaagccgccagagcctacgacaaagaagcccgaaaaatccgcggcaagaaagccaaagtcaatttccccaacgaggacgaccctctgccgcaatacggatcttgcaagagcctcaacttg

SEQ ID NO: 25267 - DNA, 443 bp, Glycine max
  Clone ID: LIB3051-084-Q1-K1-B12
gaagcacgcatgtgtggcggagcaatcatcgcagatttcatacctcggcagcgggccggcaccctcacagcctccgaactctggcccaagcgcagcgaacctcaacctcaacctcctcctcctccagttaagaggcagaggaaaaacctctacagagggatcaggcagcggccctggggcaaatgggccgcggagattcgcgatccacgtaaaggagttcgtgtctggcttggcaccttcaacaccgccgaagaagccgccagagcctacgacaaagaagcccgaaaaatccgcggcaagaaagccaaagtcaatttccccaacgaggacgaccctctgccgcaatacggatcttgcaagagcctcaacttggagttcggttacgatctcaaccaaacagggcttttcccttcttctaacgctgatgagaattgcgggtccca

SEQ ID NO: 25268 - DNA, 416 bp, Glycine max
  Clone ID: LIB3051-053-Q1-K2-G8
cccacgcgtccgaattacctttagataggcattttgatatcaacaatgtgaagaggattgtgttagaagcagatggttatcagccgtatcttatttcccctgaaaagggattgagatctctaatcaaaggggttctagagcttgcgaaagagccatcacgtctttgtgttgatgaggtacatcgtgtcctgatagatattgtttcgtctgctgccaatgctacacctggtttgggaagatacccacctttcaagagagaggttgtggctattgcaacttccgcactagaagggtttaagaatgaatcgaagaaaatggttgttgcactcgttgatatggagcgtgcttttgtcccacctcaacacttcattcgcttggtacaaagaaggatggaaagggcaacgtcagaggaggag

SEQ ID NO: 25269 - DNA, 388 bp, Glycine max
  Clone ID: LIB3051-054-Q1-K2-G12
cggacgcgtgggcggacgcgtgggcggacactgtggttgaaattgttttccatttgtttgatgcaaatcgggatggaaacctaagttttgacgagtttgtcagagtgctacacaagcgcgaaagggacattgcacaacccgtggagacaggaatacggggttggttgtcttgcggttggaactgtacgcataacttctcatcttcatgattgttttcctgatatagaagatttaatgccacaaacatttcaagaacagacataacagaatggattggaacccttgatgggaagagaaaaacgaaagaaaaacaaaggaagagatgggtagtgatggttggtctgggactggagaagtttcccgtaaaatacatttgtgggtcaaacac

SEQ ID NO: 25270 - DNA, 423 bp, Glycine max
  Clone ID: LIB3051-054-Q1-K2-G8
gaagaacaataatccagacacgaagatatatgacagggatgagcttcttgcacggatgcagtcagaggcagaaaagatagtagagatgaggagaaattctagctctgacacagggccgtctaacattcaatcttctggtgaaaatgttggtggtagttcctcatcaaataatgtaattgtgggatttgttgggtatcctaatgttggcaaaagttcaactattaatgctctggttggtaaaaaaaggacaggtgtcacctctactccagggaagacaaagcatttccaaacattaattatttctgaccaactgaccctttgtgactgtcctggattagttttcccatctttcttaagctcaaggtataagatgattgcttgtggagtgttgcctatcgataggatgactgaacataaggaggc

SEQ ID NO: 25271 - DNA, 351 bp, Glycine max
  unsure (1)..(351): unsure at all n locations
  Clone ID: LIB3051-039-Q1-K1-F10
ntcttcagcaaggcttgacatcacatagttgttatctgcgtcactatactctgggtacatgctcatagcatgctacgcctgctttgtcgcaaccggaaccataggattctatgcgtgctcttggttcacacggctgatctactcgtgagtcaagattgattagttatagcaaccactggtttggatcaatctactacacttctgaaaggatgaagaccggtttgtgtaacgattttgaaactcaagaactgtcatgttctgaatcagatgttacctaattctatacaattgtgaatcgcgacgacactgttaatgttatgtttcactatcttccactggcctgagttatcg

SEQ ID NO: 25272 - DNA, 414 bp, Glycine max
  Clone ID: LIB3051-059-Q1-K2-F1
tgaatcgtgaaaatgttcagaaaccagtacgacacggacgtgaccacatggagccctgcggggaggctgttccaggtggagtacgctatggaggcggtgaagcagggctcggcggcgatagggctccgatcgaagacccacgtggtcctcgcatgcgtcaacaaggccaactccgaactctcctcgcaccagaagaagatcttcaaggtcgacaatcacatcggcgtcgccatcgctggcctcaccgccgatggccgcgtcctctcccgctacatgagatccgaatgcatcaactataattacacctacgagtcgccgctccccgtcggcagactagtcgttcagctcgccgataaggctcaggtttgcacacagcggtcttggaaacgtccttatggggttggactcctggta

SEQ ID NO: 25273 - DNA, 440 bp, Glycine max
  Clone ID: LIB3051-082-Q1-K1-F5
tgccagcttagtctctgctctgctttatgagaaaaggtttggtccatacttttgtgagcctgtaattgctggattaggggatgaagacaaaccattcatctgcacaatggattgtcttggggcaaaggagcttgcaaaagattttgttgtttctgggactgcatctgagtctctgtatggtgcttgtgaggcgatgtttaagcctgacatggaaccagaggaattgtttgagaccatctcccaagcactgctatcatctgtagatcgtgattgtttgagtggctggggaggacatgtctatgttgtcacgccaaccgaagtgaatgaaaggattttgaagggaaagatggattaacttgtaagccacctgagttttctgttaagtttggaattgaatggcatgacatttacaatccctttgttaaagggacctttgttat

SEQ ID NO: 25274 - DNA, 399 bp, Glycine max
  Clone ID: LIB3051-015-Q1-E1-C2
acgcgtcagcccaagcgtccggcagtgttgattccattcttccagcaactcactggaatcaatgtcatcatgttttacgcgccggtcctgttcagctccatcgggtttaacgatgatgctgctctaatgtcagctgtgatcaccggcgttgttaatgttgtcgcaacttgtgtctcaatttatggtgttgacaagtggggtaggagagcccttttccttgaaggtggagtccaaatgctcatttgccacgctgtagttgcagctgcaattggagcaaagtttggaactgatgggaacccacgtgatttgccaaagtggtatgcaattgttgtggttctcttcatttgcatttatgtatcagcatttgcctggtcatggggtcccctaagttggttggtg

SEQ ID NO: 25275 - DNA, 407 bp, Glycine max
  Clone ID: LIB3051-043-Q1-K1-C12
gtccttccagacactcccaattccatgattgaaaggggtgatcgcgagaaggccaaggctcagcttcagagaattcgcggcatcgacaatgttgatgaagagttcaatgaccttgtggcagcaagtgaatcctctagccaagtggagcacccttggaggaacttgttgcaaagaaagtacagaccccacctcaccatggcagtgttgattccattcttccagcaactcactggaatcaatgtcatcatgttttacgcgccggtcctgttcagctccatcgggtttaaggatgatgctgctctaatgtcagctgtgatcaccggcgttgttaatgttgtcgcaacttgtgtctcaatttatggtgttgacaagtggggtaggagagcccttttctttgaaggtggagt

SEQ ID NO: 25276 - DNA, 426 bp, Glycine max
  Clone ID: LIB3051-060-Q1-K1-E6
ctctctctcgtaattttctctcttattgaggctagaaaaagagagcaaaaaaactaaaggatgcctgcagtcggaggtataaacaccggagggggcaaggagtaccctggaagcctaactctatttgtgacggtaacatgtatagttgcagacatgggtggtttaatcttcggttacgatatcggaatttcatgtggagtgacgtccatggatccgtttctgctcaagtttttaccgtcagtgttccggaagaaaaactcctacaaaacggtgaaccagtactgccaatacgacagccagacactgacgatgttcacgtcgtccatgtacctctacgcttagctgtcatcgttggttgccgtcaccgtcacgcgtaaattctgacggaaactctccatgctttacggatgcttgcttatactcgtc

SEQ ID NO: 25277 - DNA, 392 bp, Glycine max
  Clone ID: LIB3051-037-Q1-K1-H10
gtttatttcacttgtatattcatcacagatacaggcattagctgccttgtggcggcttttcaggggtcggaaatggaatcctctgaggcagcggttagatagctttgactatactgtgaagcaacacattgttggatcacttttatttacaccacttctacttcttttaccaactacttctgttttctatatattctttagtatcatggacacaaccattaaccttgtctgtctactgattgaagtcactatttcggtaattcatgttaccccttataccaagatatttctttggttggtaagaccaagaagattcccttctggaatatggcttgaaattattggttgtcagagtaataagactgcttcttcaagtgctgatattactgatg

SEQ ID NO: 25278 - DNA, 435 bp, Glycine max
  Clone ID: LIB3051-087-Q1-K1-F1
cccacgcgtccgcccacgcgtccgcaattatcgtgtcttcttggctctctgtttaggatcgacatggatttcttttttccattggcaatacttgtgatgatattaggcacaccatactctagtgcttctggaaagagtgaaagtaatgtgaaaacagctgtttttctgtctcctaagtttgaacttggaccgggatcggttgcaaataaatatgattatgatattgattttccaagaggtcatatagcacttaagagtttcaatgcagaggtagttgatgaagcagggaaccctgtgcctcttcatgaaacttatcttcaccactgggttgttggaagatactatcaacctaaatatgtgacgacacacacaaactatgatggacataagatacttcacaactttgaccatatatttgtgaggaacaacggcata

SEQ ID NO: 25279 - DNA, 419 bp, Glycine max
  unsure (1)..(419): unsure at all n locations
  Clone ID: LIB3051-001-Q1-E1-A11
agcccacgcgtccgcctaaacctaaacataaactgaatttcccaaatccccttcccaattttcaccaaaacctaatactcccaaaccaatcttcgatcatggccgccgaatcacaacctcaactaatcgaagagagaagagaggagcaagaacttaagtacctggaatttgtgcaattcgcgaccatccaggccctgatgcgctgcgccatcctctactcctacgccaaggagcgcgcgggtcctctgaagcccggcgtcaacaccgtcgaggaggccgtgaagaccgtcgtggctccggtctacgacaggttccacctcgtcnccggcgaggtcctcanatacgccgatcgcaaggtcgccgaattggaccgccacgttccctcaaacgtgaagaaagtctcctcccaagcccgctcc

SEQ ID NO: 25280 - DNA, 428 bp, Glycine max
  Clone ID: LIB3051-037-Q1-K1-E9
aggccctgatgcgctgcgccatcctctactcctacgccaaggagcgcgcgggtcctctgaagcccggcgtcaacaccgtcgaggaggccgtgaagaccgtcgtggctccggtctacgacaggttccacctcgtccccggcgaggtcctcaaatacgccgatcgcaaggtcgccgaattggaccgccacgttccctccaacgtgaagaaggtctcctcccaggcccgctccgtcgtctccgaagtccgccgtgatggtgtctccgcctacgccaaaatcgtttactcgaagtatgagcccacggcggagcagtgtgccgtctccgcatggaggaagctcaaccagcttccgctcttccctcaggttgccaatgtcgtgttgcccaaagctgcctactgcactgagaagtacattgaggcggttgtttcc

SEQ ID NO: 25281 - DNA, 445 bp, Glycine max
  Clone ID: LIB3051-038-Q1-K1-H6
cacttgacccctaaattcgtgcccattcccacaactgcacattcttctttctatatattccaaatcccttttccgatttccaccaaaatctaaaccgaaattcccaattacccttcccaattttcaccaaaacctaatactcccacaccaatcttcgatcatggacgccgattcacaacctcaacaactcgaagagagaacagaggagcaagaactgaagtacctggaattcgtgcaattcgcgaccatacaggctctgatgcgctgcgccatcctctactcatacgccaaggagcgcgcgggtcctctgaagcccggtgtcgacaccgtggaagaagccgtgaagaccgtcgtggctccggtctacgataggttccaccttgtccccggcgaggtcctcaaatacgcggatccggagggtggcgagttagacagccacgttccc

SEQ ID NO: 25282 - DNA, 342 bp, Glycine max
  Clone ID: LIB3051-044-Q1-K1-B9
caccaatcttcgatcatggacgccgattcacaacctcaacaactcgaagagagaacagaggagcaagaactgaagtacctggaattcgtgcaattcgcgaccatacaggctctgatgcgctgcgccatcctctactcatacgccaaggagcgcgcgggtcctctgaagcccggtgtcgacaccgtggaggaggccgtgaagaccgtcgtggctccggtctacgttaggttccaccttgtccccggcgaggtcctcaaatacgcggatcggaaggttgccgagttagacagccacgttcccttcaacgtgaagaaagtctccttccaggcctgctccgtcgtc

SEQ ID NO: 25283 - DNA, 391 bp, Glycine max
  Clone ID: LIB3051-044-Q1-K1-C10
gaaattcccaattacccttcccaattttcaccaaaacctaatactcccacaccaatcttcgatcatggacgccgattcacaacctcaacaactcgaagagagaacagaggagcaagaactgaagtacctggaattcgtgcaattcgcgaccatacaggctctgatgcgctgcgccatcctctactcatacgccaaggagcgcgcgggtcctctgaagcccggtgtcgacaccgtggaggaggccgtgaagaccgtcgtggctccggtctacgataggttccaccttgtccccggcgaggtcctcaaatacgcggatcggaaggttgccgagttagacagccacgttccctccaacgtgaagaaggtctcctcccaggcctgctccgtcgtc

SEQ ID NO: 25284 - DNA, 415 bp, Glycine max
  Clone ID: LIB3051-050-Q1-K1-A12
atcacatgcctcttttctataaattcccaatccctttcccagtttccaccaaaacctaaaggtaaacctaaacctaaacctaaacataaactgaatttcccaaatccccttcccaattttcaccaaaacctaatactcccaaaccaatcttcgatcatggccgccgaatcacaacctcaactaatcgaagagagaagagaggagcaagaacttaagtacctggaatttgtgcaattcgcgaccatccaggccctgatgcgctgcgccatcctctactcctacgccaaggagcgcgcgggtcctctgaagcccggcgtcaacaccgtcgaggaagccgtgaaagaccgtcgtggctccggtctacgacaggtcccacctcgtccccggcgaggtcctcaaatacgccgatcgcaag

SEQ ID NO: 25285 - DNA, 334 bp, Glycine max
  Clone ID: LIB3051-067-Q1-K1-A2
cacttgacccctaaattcgtgcccattcccacaactgcacattcttctttctatatattccagagagtggcttttccgatttccaccaaaatctaaaccgaaattcccaattacccttcccaattttcaccaaaacctaatactcccacaccaatcttcgatcatggacgccgattcacaacctcaacaactcgaagagagaacagaggagcaagaactgaagtacctggaattcgtgcaattcgcgaccatacaggctctgatgcgctgcgccatcctctactcatacgccaaggagcgcgcgggtcctctgaaaccccgtgtcgacaccgtg

SEQ ID NO: 25286 - DNA, 418 bp, Glycine max
  unsure (1)..(418): unsure at all n locations
  Clone ID: LIB3051-068-Q1-K1-E4
accaattaccctttgcaattttcaccaaaagctactacttctacaccaatcttggatcatggacgccgggtcacaacctcaacatcttgaagagagaacagaggcgcacgaactgatgtacctgcaattcgtgcaattcgcgaccatacaggctctgatgcgctgcgccatcctctactcatacgccaaggagcgcgcgggtcctctgaagcccggtgtcgacaccgtggaggatgccgtgaagaccgtcgtggctccggtctacgataggttccaccttgtccccggcgaggtactcaaatacgcggatcggaaggatgccgagttagacagccacgttccctccaacgtgaagaaggtctcctcccaggcctgctccgtcgtctctgaagtccgccgcgatggcgtctccgnctac

SEQ ID NO: 25287 - DNA, 372 bp, Glycine max
  Clone ID: LIB3051-071-Q1-K1-C2
cacttgacccctaaattcgtgcccattcccacaactgcacattcttctttctatatattccggatgccttttccgatttccaccaaaatctaaaccgaaattcccaattacccttcccaattttcaccaaaacctaatactcccacaccaatcttcgatcatggacgccgattcacaacctcaacaactcgaagagagaacagaggagcaagaactgaagtacctggaattcgtgcaattcgcgaccatacaggctctgatgcgctgcgccatcctctactcatacgccaaggagcgcgcgggtcctctgaagcccggtgtcgacaccgtggaggaggccgtgaagaccgtcgtggctccggtctacgatag

SEQ ID NO: 25288 - DNA, 374 bp, Glycine max
  Clone ID: LIB3051-084-Q1-K1-H4
tcgcacttgacccctaaattcgtgcccattctcacaactgcacattcttctttctatatatggcaaatgccttttccgatttccaccaaaatctaaaccgaaattcccaattaccctttccaattttcaccaaaacctaatactcccacaccaatcttcgatcatggacgccgattcacaacctcaacaactcgaagagagaacagaagagcaagaactgaagtacctggaattcgtgcaattcgcgaccatacaggctctgatgcgctgcgccatcctctactcatacgccaaggagcgcgcgggtcctctgaagcccggtgtcgacaccgtggaagaggccgtgaagaccgtcgtggctccggtctacgata

SEQ ID NO: 25289 - DNA, 441 bp, Glycine max
  Clone ID: LIB3051-036-Q1-K1-B8
gtggctggcagatgaatcagaacattcctcttgttcctcccaacttttcttgcgttttcagttccaattccaattacaattccaatgtccttcaaaacgccttcaataagaatgttgttcagccttcagcctcatatcctcaatgcttggctattgagtttgatcaacagagggagattgatcaccatatcagatcacataacgaagaattgaggattttgttgcaagagcaaaggaaacagcatgtggcagagttattgaagaacgtggaatcgaatgctcttcatttgttgagacagaaagatgaagagatagcgcaagcgacaaagaagagcaccgatttgaaagaatttatgacaaggttggaggtggagaaccaatcatggcgtaaggtagccgaggaaaacgaggctatggtattgtcccttcacaacaccttag

SEQ ID NO: 25290 - DNA, 456 bp, Glycine max
  Clone ID: LIB3051-082-Q1-K1-A12
cttgacttgcagctttactcctggttcttgttctttaactgcatataagctcactccatctggttacgaatgggggcgtgtaaataaggatacgggaagcaatccacatggttaccttcccacccattatgagaaggttcagatgctccttagtgatcgcttccttggtttctacatggttcctgataatggtccatggaattacaacttcatgggggtgagacacgcatcagggatgaaatatggagtgaagctcgggactcctagggaatattaccacgaggaccatagaccaacccatttcttagagttcagcaatatggaggaagtggagacagctgctgagggagatcgagaggatacattctcttgagagataaaaatatttttgtttgagatatataagtggcaagtcctttaattttttaaacttgtcataatatgttgtatcatcta

SEQ ID NO: 25291 - DNA, 420 bp, Glycine max
  Clone ID: LIB3051-095-Q1-K1-E8
gaatcccggtcgacgacgcgtccgcccacgcgtccgctctccgcagcagccacacttcttcgccgtttcagctgaagagccgtgggcaggtaagcagggggtgagcataataatgttatccccaatgggcacttccggaaacactggcaaaactatgtgaagacttggtttaatcaaccagcccgaaagaccagaagacggttggctcggcagaagaaggctgtcaagattttccccaggcctactgctggatctctcaggcctattgttcatggccagactctgaaatacaacatgaaagtcagagccgggagaggattttcactggaagaattgaaggctgcatgaattcccaagaaacttgctccaactattgggatttctgttgatcaccgcaaaaagaatcgttctttggagagt

SEQ ID NO: 25292 - DNA, 450 bp, Glycine max
  Clone ID: LIB3051-077-Q1-K1-E12
gggaaatatcaggaggtgcgagtaccggagccaaacgcgggtgtgtgtgtgtgtgagggagagagagatgcagttccattcagaaactccaaactaaacatccctggcgacaaccttaggaatctcgatcgctgaaaaaacctatgcagccccgaacacactctctgcattccaacttgtttaagtcatgcctttcgattcacccttctctcaataaatttttaatcagattcttggccaccgtcacactcataataaagttttgtttttccaaataaagggaatggcgactcctgttgagcctgcaaatgggatcagaactgaagggaagcattattattccatgtggcaaaccctgtttgagatcgactcaaaatacgttcccatcaagccgattggtcgcggagcatatggaattgtgtgctcttctgtgaatagagagataaatga

SEQ ID NO: 25293 - DNA, 251 bp, Glycine max
  unsure (1)..(251): unsure at all n locations
  Clone ID: LIB3051-015-Q1-E1-D10
gcgtcaactcttaactttctcttgttaactaattaaaatgactctcaaaaaaggcctgttccttgttaacgctctaagctgcacctctggcgcaaatgccgcaacgtttgacatcacaaaccgatgctcataccctgtttgggccgcagctgtgcctggcggtggcatgaggctgaactcgggccagtcatgggctttagacgtgcctgcaggaacgacaggggcccgcgtttgggcccgaancggctgca

SEQ ID NO: 25294 - DNA, 386 bp, Glycine max
  unsure (1)..(386): unsure at all n locations
  Clone ID: LIB3051-061-Q1-K1-A1
gcgtncgatctttctcttgttaactaattaaaatgactctcacaaaggccttgttctttgtgaccgctctatgctgcacctctgccgcatatgctgcaaggtttgacatcacaaaccgatgctcataccctgtttgggccgcggctgtgcctggcggtggcaggaagctgaactcgggccagtcatgggctttagacgtgcctgcaggaacgaaaggggcccgcgtttgggcccgaaccggctgcaacttcgacggctcgggccgcggtggatgccagaccggtgactgcggnggtgtcctcgactgcaaagcttacggcacgccttccaacaccctagcggaatacgcgctgaaccaattcagcaatttggacttcttcgacatc

SEQ ID NO: 25295 - DNA, 381 bp, Glycine max
  Clone ID: LIB3051-014-Q1-E1-A12
cgacccacgagtacggtgctgctggtgcttcatcccttgtgtttgtttactctcttgactatgcccgataccgtcttgccaatgatgctaacgctgcaatgaagggaggagatagacagttcaatggccttgtcgatgtctatctgaagactttggcatctgatggtgttgctgggctctaccgtggtttcaacatctcatgtgttggaatcagtgtgtatcgtggtctgtactttggcatgtatgattccgtgaaatcagttgtcctcaccggatcattgcaggatatctttgttgctaccgttgcgctctgatggcttatcaccaatggtgcatgtcttgcatcaaacgcaattgacactgttacaataagaatgagta

SEQ ID NO: 25296 - DNA, 433 bp, Glycine max
  Clone ID: LIB3051-071-Q1-K1-B2
gtctctcccatcctttcgcattctcaatacccttttgatttgtgaaaggaaagcaaacatgggggagcaggtccaacaccctacaatcatggacaaggttgctggtcagctccatctccgttctggtctttcatctggtattagaagttatgatggagcctaccgccacccagctatgtaccaaagaccctcttttgggaattactcgaatgctgcattgcagtttcctgtgatgcccacatgcaaagctaccatggatttgtctgctactgcaacatctgcctcacccgtctttgttgctgctccagcagagaaaggccattttcttttagactttctcatgggaggtgtttcagcagctgtctccaaaactgctgctgcttccattgaacgtgttaagcttttgatccagaaccaggatgagatgatccaa

SEQ ID NO: 25297 - DNA, 439 bp, Glycine max
  Clone ID: LIB3051-116-Q1-K1-B2
gtctctcctatcctttcgcattctcaataccctatggatttgtgaaaggaaagcaaacgtggttgatcaggtccaacaccctacaatcatggacaaggttgctggttagctccatctacgttctggtctttcatctggtattagaagttatgatggagcctaccgtcacccagctatgtaccaaagaccctcttttgggaattactcgaatgctgcattgcagtttcctgtgatgcccacatgcaaagctaccatggatttgtctgctactgcaacatctgtctgacccgtctttgttgctgctccagcagagaaaggccattttcttttagactttctcatgggaggtgtctcaccagctagctgcaaaactgctgctgctcccattgaacgtgttaagcttttgatccataaccaggatgagatgatcaagactggt

SEQ ID NO: 25298 - DNA, 413 bp, Glycine max
  Clone ID: LIB3051-004-Q1-E1-F9
cccacgcgtccgccggtttcccagatctgctccttcctcaccccacagaagtcagttgaagagcatgggtcgtggagttagcagtggtggtggtcaaagttccttgggttatctttttggcagtggagaggcccctgccgcaaaaccggcaacaaacaatgccccagcccaacctgaagtgcaggctgtaaataatgcgcctccttcaaaagcatctcctcctactaaaacaatagaccctaacaaggctgctggtataaacagtcattctactgatggccagaacaccggcaacttcatcacggaccgaccctcaaccaaggtccatgctgcccctggtggtggttcttctctgagttatctctttggtggacctggagaggggaaatgataccttgcttgcaaagcttttg

SEQ ID NO: 25299 - DNA, 443 bp, Glycine max
  unsure (1)..(443): unsure at all n locations
  Clone ID: LIB3051-036-Q1-K1-D12
ccgggttggaccaagccttccggtaccagcatttaaaactggcctttgcttttggttactcatttttaacctaacttggaatccttctcaggctcagatcagaaccttagccttggcaacgttccaaaggatcaaggtcgccaaccccatcgtccatatggacggagatgaaatgactagggttatctggaagtcaatcaaggacaagctcattttgcccttcttggagttcgacctcaagtattatgacttacgcctttcttaccgtgatgagaccgatgagtaagttacaattgaaagtgccgaagcaactctcaagtataatgtggcaattaagtgcgcaactattactccagatgaagctcgtgtgaaggagtttggtctgaagtcaatgtggaagagtccaaatgggacaattaggaacattntgaatggaactgtct

SEQ ID NO: 25300 - DNA, 391 bp, Glycine max
  unsure (1)..(391): unsure at all n locations
  Clone ID: LIB3051-051-Q1-K1-G4
tacttatactagttttctacgattattcatagtgaggcaatagtagcagccattcacgctggtctttgcttctcgttactcatttctcacctaactttctattcttctcagtctcagatcagaaccttatccatggcagcgttccagaagatcaaggtcgccaaccccatcgtcgagatggacggagatgaaatgactagggttatctggaagtcaatcaaggacaagctcattttgcccttcttggagttggacatcaagtattatgacttangccttccttaccgtgatgagaccgatgataaagttacaattgaaagtgcggaagcaactctcaagtataatgtggcaattaagtgcgcaactattactccagatgaagctcgtgtga

SEQ ID NO: 25301 - DNA, 444 bp, Glycine max
  Clone ID: LIB3051-115-Q1-K1-D8
cccactcgtccgcccacgcgtccgccttgctccactcctcatattatctttttgtgaggaaacacataatcatggaggggtctcacatggggttgttgctcttcttttgttcttccatgctttttgctgccttcgctgctgcctcctccagaaacttgcccataataccctttgatgaaggctacgcgcccttgtttggggacagcaacttggtcatccatagggatggcaaatcggttcatctttcactcgatgagagaacaggttcaggatttgtgtcgcatgatctttaccttcacggatatttcagcgcttctattaagttgccttctgactacactgcacgagtcgtggttgccttctatatgtcaaatggtgacatgttccacaataaccatgatgaaatcgactttgagtttttggggaacattagaggcaaagact

SEQ ID NO: 25302 - DNA, 293 bp, Glycine max
  Clone ID: LIB3051-011-Q1-E1-B5
gacgtacgcgtcaggtgaggccagaggagcaggtatcaaaaccaggggagtttagtcaccaagagaatgagtcaaagggcagcatatatagtgagaattatcttgagagggatgaggtcaaaatggtgatggctaaacttggattttttttcagctcagaaagtgaggaacttcaggagaagtatggttccaaggagctttctgaactgtttgaggagcaggagccaagtttggaggaggtgaagcaggcttttgatgtttctgatgagaaccgcgatggctttattgattct

SEQ ID NO: 25303 - DNA, 437 bp, Glycine max
  unsure (1)..(437): unsure at all n locations
  Clone ID: LIB3051-063-Q1-K1-G8
cccacgcgtccggttccttggtacggaaaccatatcacttggacgagtcggtgatgattgttggtgcacggacccagctggagatccaaacggtacctattggctgcaagggtgtcacatggtgcactgtgcttacaacagcttgtggatgggaaatttcatacacccagattgggacatgttccaatctgatcatgcttgtgccgaattccacgctgcttctagagccatttctggtggaccaatttatgtaagcgactctgttggaaaacacaacttcaagttgcttaagaagcttgttctacctgatggctccattttgcggtgtcaacattatgcacttnccacccgagactgcttatttgtagatcctttacatgatgggaaaacaatgctcaaaatttggaacctcaataaatgttccggggttttgggtc

SEQ ID NO: 25304 - DNA, 391 bp, Glycine max
  unsure (1)..(391): unsure at all n locations
  Clone ID: LIB3051-015-Q1-E1-B11
accgacgcgtcaacccacgcatccgcggacgcgtgggaaaanaatgtttgcntgatgccattgcccgtatggaaagggcagctgaacaaaggaaaagcaattgcagcagctgttgaaggagttgcaatacactggggaacatcagactccaatacatcagtcattgagactctgcgggagcaaatattcaagccatcattgtccacaatcattcccgagaattcaaaacttgtaacagtatcaccaacagattcagttctgacagcaacaaagatgatggttgaatttcgtgcaagttgtgcagttgtgacactttaatgacaaacctcgtggcatctttacttcacatgatattttgttccgggtaagtgcccacatctttctccagaat

SEQ ID NO: 25305 - DNA, 270 bp, Glycine max
  Clone ID: LIB3051-030-Q1-K1-B11
cggaattccgggtcggaccaagccttccggtgcctataaaaaagggagtagatatggggttggacccttgcaatggttctgtactcaggtatgcgcgcacgaaaggcgacagaggaaaactcaaacaagttttgtgcaatttactgagcaatgctgttaaatttaccgaggaggggcacatagctgatcgagcatgggctcagaagccaagcttgcagagctcaatgattgctactcaccaatactggtccagtagacttttgacgcgct

SEQ ID NO: 25306 - DNA, 387 bp, Glycine max
  Clone ID: LIB3051-075-Q1-K1-G8
gtgacacttcttctgtgtcagagtttgagaagtgaaccccatcaacatagtcccagagtaatgagtgaagaatggaaacttgggtcttgatctcaaactctcagttcctgtgtctgatcaatctaattatgccaagttcttgactgaaagtggtacttttaaggatggggatctgcttgtcaacagggatggagttcgaattgtctctcagaatgatgtcgaagctacacctccaatcaagcctacagacaaccagttagctttagcagacatagatgtaatcaaagttgttggaaagggaaatggaagggtagtccaattggtacaacacatatggactaatcagtcttgtgcgttgaaggtaattcagatgaatattgatgagtc

SEQ ID NO: 25307 - DNA, 336 bp, Glycine max
  unsure (1)..(336): unsure at all n locations
  Clone ID: LIB3051-097-Q1-K1-G10
ctgngtcagagtttgtgaagggaatcgcataattatgaagaaaggaaacttgtgacttggtctcaaactctcagttcctgtgtctgatcaatctaattttgccaggttcctgactgaaagtgggacttttaaggatggggatctgcttgtcaacagggatggagttcgaaatgtctctcataatgatgtcgaagctccacctccaatcaagcctacagacaaccagttaactttggcagacatagatgtaatcaaaagttttggaaagggaaatggaggggtatatcaattggtgcatcacaaatggacttctcattttttagcgtttgaaagtaa

SEQ ID NO: 25308 - DNA, 469 bp, Glycine max
  unsure (1)..(469): unsure at all n locations
  Clone ID: LIB3051-080-Q1-K1-G8
ggtgaacctgtgaacaagttaatgacctcatggacaaagcagaagggatatcctgttgtatgtgttaaagtcaatgatcagaaattggaatttaatcagtcgcaattcttgtcaagcggtgctcaaggagaaggccattggattgttccaataacattatgctttggctcttatgatgtccacaagagtttcctcttgcaatcaaaatctgaaacacatgatgtcaaagatttccttggttccacacacaaaggtttaaattgttggattaaacttaatgtggatcaggctggtttctacagggtgaagtatgatgagctgcttgctgctagacttagatatgcagtagagaaacaactcttatctgcatcagaccgatttggcattttggatgattcattngcactttgtatggctcgccaggaaatcattgaccttcttgattaactttgatgggatcttacaggga

SEQ ID NO: 25309 - DNA, 368 bp, Glycine max
  Clone ID: LIB3051-007-Q1-E1-B7
ccgggccgacccacgagtccaaaagatggagtgaaatttaccaacacgaagctcaagaaactaggggaccaatagcaacaaattcttgaggagtataaaagttgtcaaaaaaagttagttgatagagtagttcaaactgcggcaactttctctgaggtgtttgaatctttagctgaaataatttctgaattggatgtattactgagctttgctgatttggcttctagttgtcctactccctacacaaggcctgacatcacttcatcggacgaaggagatattactttagaaggatgcagacagccttgtgtagaggcacaagactgggtgaagtttatgcgaggtgattgtaagcgtgtcagaggaaa

SEQ ID NO: 25310 - DNA, 417 bp, Glycine max
  Clone ID: LIB3051-117-Q1-K1-G12
ctccccttccaaacacaaacacaaacacaaacacaaacacatcgcaactcaagaaatgaaactagcttggtcaccagagagagcatccaaagcatacatcgacacagtccaatcttgccaggttttccgcgaatccggagtggcggagtttatttcggccatggcggcggggtggaactcgcagctcatagtggagacgtggtcgcagggaggacttattgccaccagcgtgggattagccctggcgaggtctcacacgtgcggaagacacgtgtgcgtagttcccgacgagcgggcgaggtcggagtacgcggagagaatgggcgaggcgggcgtgacggcggagatcgtggtgggggaaccggaggaggtgatggaaggtttggtcggcgtggacttcttggtggttgattctcg

SEQ ID NO: 25311 - DNA, 344 bp, Glycine max
  unsure (1)..(344): unsure at all n locations
  Clone ID: LIB3051-117-Q1-K1-G8
cccacgcgtccgcccacgcgtccgcccacgcgtccgcccacgcgtccgatggcgacgagggatcgcactctgcttttcagaaagcacagagatgcgttgaagagtgttcgggttccctccatctcctcgccggcattcaccggttccggcgccggcggtggccccgtcatcgaattggccaccacctcgtttctcaatcccaatcgctcttacgcaccggtaagtaccgaggatcccggcaattccagtaggggtccaaatgcaattacagtggggctacctncggcgtgggtggatttatcagangaaatatcagcaaatgtgcaacgtgcacgcacaaaaat

SEQ ID NO: 25312 - DNA, 413 bp, Glycine max
  Clone ID: LIB3051-085-Q1-K1-A2
gcgcaaccatctttggatcaaccctccaatttgtttacaatatggaacagaccctctcctttgaatgttgagcatgaatttgttcaaaacacggcaagagtgaaatctgttgatatgcatccaactgagccatggattctactgggtttgtattcaggaactatttctatttggaactatcagacaaagactgaagagaagtctttaaaaatcagcgaatctccagtgagatcagcaaagttcattgctcgggaaaactggattgttgcagctacggatgacaaaaacattcacgtctacaattatgacaaaatggaaaagatagtagaatttgcggaacataaagattatatcaggagtttagctgttcatcctgtcctgccatatgtaatatcagctttagatgatcaggt

SEQ ID NO: 25313 - DNA, 394 bp, Glycine max
  unsure (1)..(394): unsure at all n locations
  Clone ID: LIB3051-025-Q1-K1-H10
gcgcgacaacctcggctcagtgtctctctgcactgcaaactccctataacccttcccttcctcgcacttcattcttttatttcatttatttatactcttcatgaaaaattaagggaattttcagagagagagagagggagagagtagttatggaaggagaagaaggaggaattgcaacaaagaagagagggaaagagggtgaaactgagacgacgcgctacaaaggaatcagaatgagaaagtggggcaagtgggtcgctgagattcgagaacccaacaagcgttcaaggatttggctcggttcttactccacgcccgtcgcggcggcgcgtgcttacgacaccgncgttttccacctccggggcccctctgcgcgcctcaacttccccgagct

SEQ ID NO: 25314 - DNA, 445 bp, Glycine max
  Clone ID: LIB3051-034-Q1-K1-G3
ttctttctctgtcgtcgctctttcttcaacttcaagcttaattcctcatgtctttcagaggcctcagccggccaaatgccacatcaggcatgggtgttgctgatcacagcaaaaacaccttcatggaattgaagcagaagaaggttcatcgttatgtgatctttaaggtcgatgagaagaaaagggaggttgtggttgagaagactggtggcccggctgagagctatgacgattttgctgcatctttgccggagaatgattgcagatatgctgtctttgactatgatttcgtcacttctgagaactgtcaaaagagcaaaatcttcttcattgcatggtccccttcaacatctcggatccgtgccaagatgctctatgccactactaaagacaggtttagacgtgagctagatggtgtccattatgaaatccaggctactgaccc

SEQ ID NO: 25315 - DNA, 373 bp, Glycine max
  Clone ID: LIB3051-036-Q1-K1-C7
ctctgtcgtcgctctttcttcaacttcaagcttaattcctcatgtctttcagaggcctgagccggccaaatgccacatcaggcatgggtgttgctgatcacagcataaacaccttcatggaattgaagcagaagaaggttcatcgttatgtgatctttaaggtcgatgagaagaaaagggaggttgtggttgagaagactggtggcccggctgagagctatgacgattttgctgcatctttgccggagaatgattgcagatatgctgtctttgactatgatttcgtcacttctgagaactgtcaaaagagcaaaatcttcttcattgcatggtccccttcaacatctcggatccgtgccaagatgctctatgc

SEQ ID NO: 25316 - DNA, 385 bp, Glycine max
  Clone ID: LIB3051-074-Q1-K1-D2
atttccacgcgcctctcttcctcttcacgccgtcaccattatcgatctgatctgtacgcggaggagagtgaagggaacgatgatttcagggcggagtttctatgccctttctgcgccgaggattacgacgtcgtttccctctgttgccacattgacgaccaccaccctatccaagccaaatacggggtgtgtcccatttgtgggaagaaggttggagtggatcttggtggacattttactactcaacatgggaacttcttgagggtgcagcgcataaggagggtcaagtaaggaggctctgcttcaacaatttctatatcgagaacagggttacaagaaggagccttgcattcccttctttgaggttcttcatacttagctttct

SEQ ID NO: 25317 - DNA, 407 bp, Glycine max
  Clone ID: LIB3051-013-Q1-E1-A8
cgtttttctgacactgcattctcttcccctttcaaagatttaaccttatttgctcgcagatatgcgcggttactgattcgtcgatggtatctgtcgaaaaaattcacatcgaaagggaacgaacacggaaacgccctcgtctcgcgtgggacgtagctcctccctccgcgtctgaggtaagcttccttcaattccctaattcatattaaattacggtttcttcttttcatagctttttcatcgtttattgtacgcacaacgggctctgccggtgcccggtgatgaaggtttcgaaagaaagcatgtttcgcctccgaaaatggacgacgatcgagagggccattatgtcttcaatcttggcgaaaatctcactcctagatataaaatcctcagcaagatgggtgaag

SEQ ID NO: 25318 - DNA, 418 bp, Glycine max
  unsure (1)..(418): unsure at all n locations
  Clone ID: LIB3051-039-Q1-K1-H2
aaaattttctgaatcacatcagattcaattgaattatacccctcaatgcaatggtggtctgcaaatgtcgcaaggctactaagttatattgcttcgtgcacaaagttcctgtctgtggggaatgtatctgcttcccggagcaccaaatctgcgtggtccggacttattcggaatgggttatagatggggagtatgattggcccccaaaatgctgccaatgccagtctgttttggaagagggggatggatctcaaacaactcgactgggttgcttgcatgttatccacacaaattgcttggtctcgcatatcaagagttttcctccacatactgcccctgcaggatatgcgtgtccttcatgttctacttcaatatggcctcctaaaagtgtgaaagattcangatcacgtcttcattc

SEQ ID NO: 25319 - DNA, 382 bp, Glycine max
  Clone ID: LIB3051-043-Q1-K1-H10
ggaaaagcaatcacaaccatccctgaaaatttcacacctcatagagcagtgaagaggatatatgaacaacgggcccaaatgattgaaactggggaagatattgactggggatttgcagaggcgcttgcttatgctaccttgcttattgaaggtaaccatgttcgattaagtggtcaggatgttgaaagaggaacttttagtcaccgccatgctgtagttcacgatcagacaacaggagagaaatattgtcccctggacaatgttataatgaaccaagatgaagagatgtttaccgttagcaatagttcactttctgagtttggtgttcttggatttgaattgggttactcaatggaaaatcccaattcattgataatttggg

SEQ ID NO: 25320 - DNA, 434 bp, Glycine max
  unsure (1)..(434): unsure at all n locations
  Clone ID: LIB3051-047-Q1-K1-B10
aaaccaaaccctaatatcaacttcatctgtttcatttgattttgattcgaacccagacagagacatagcctctttctttcgtttggagaaacaaacccctcgtttcaatcattgatcctttcctgttagatacgaattactcttccaatttcatcatggccaaaacctccttcaagcttcagcatcctttggaaagaaggcaggctgaagcttctcgcattagagagaaatatcctgatagaatacctgtgattgtggagaaagctgaaagaagtgacattcctgatattgataagaaaaaataccttgtccctgctgatttgactgttggccagtttgtatatgttgtccgcaaaaggattaagctcagtgcagagaaggctatntttgttttcatcaataacactctgcctncaactgctgcattgatgtct

SEQ ID NO: 25321 - DNA, 446 bp, Glycine max
  Clone ID: LIB3051-106-Q1-K1-F8
aaaccctaatatcaacttcatctgtttcatttgattttgattcgaacccagacggagagatagcctctttctttcgttaggagaaacaaacccctcgtttcaatcattgatcctttcctgttagatacgaattactcttccaatttcatcatggccaaaacctccttcaagcttcagcatcctttggaaagaaggcaggctgaagcttctcgcattagagagaaatatcctgatagaatacctgtgattgtggagaaagctgatagaagtgacattcctgatattgataagaaaaaatacccttgtccctgctgatttgactgttggccagtttgtatatgttgtccgcataaggattaagctcagtgcagagaatgctatttttgttatcatcaataacactctgcctacaactgctgcattgatgtctgctatttatgaagaaa

SEQ ID NO: 25322 - DNA, 435 bp, Glycine max
  Clone ID: LIB3051-113-Q1-K1-F11
cctaattccccaatcaatcatctttacgtgtttgttcgagaccatggccaaaagcccctgcaagcttgaacatcccttggaaagaaggcaggctgagtctgctcgcattagagacaagtatcctgatagaatacctgtgattgttgagaaagctgaaagaagtgacatcccagacatcgataagaagaagtaccttgtcccagcagatttgactgttggccaatttgtttatgttgtccgtaaaaggattaaggtcagtgcagagaaggctatttttgtttttgtcaataacactctacctccaactgccgctttgatgtcttctatttatgaggaaaataaagacgatgatggttttctttacatgacttacagtggagagaacactttcggttctcgctagggtcaaatttaataatatatgagatcctctgt

SEQ ID NO: 25323 - DNA, 387 bp, Glycine max
  Clone ID: LIB3051-045-Q1-K1-H2
gagaagaggagggtggaggagttaggtgggttcattgatgatggatatctcaatggtgatctttgagtaactcgagcccttggggattgggacttgaaatttccacttggtgctgcatcccctcttattgctgagccagatgttcggctggttacattgactgagggtgatgagttcttgatcattgggtgtgatgggatttgggatgtaatgtctagccaagttgcagttagtcttgttcgccgaggattaagaaagcatgatgacccacagcaatgtgcccgagagctagtcaaggaagcattgcgcctaaatacatcagataatctcactggcattgttgtatgcttgtcgcccattggaagcataggcgaatcatgttcaccc

SEQ ID NO: 25324 - DNA, 458 bp, Glycine max
  unsure (1)..(458): unsure at all n locations
  Clone ID: LIB3051-110-Q1-K1-A6
gtttgataaaatattgtacacataaatctagctccaattcctaatcacctggttaatttcttcacatagagctatcaagatccaacgttaacatgaagaatgttttagtaaggtcagctgcgcgagctctgcttggcggcggtgggcggagctactaccgccagctctcaacggcggcgatcgtggaacagagacaccagcacggtggcggcgcgtttggaagcttccacttgcggaggatgtccactcttccagaggtaaaggatcagcactcagaggagaaaaagaacgaggtcaacgacaccagtaacgccgtcgttacgagttactgnggaatcacaaggcccaaggttcgtagggaggacgggacagagtggccgtggaactgcttcatgccatgggatagttaccactctgatgtgtcaatagacgtgaccaagcatcatacaccaaagtca

SEQ ID NO: 25325 - DNA, 425 bp, Glycine max
  Clone ID: LIB3051-050-Q1-K1-H10
tagagattttccaaatcagcctccgattgtgtatgactataccgacccaaacataacgagcactacagaattagccttcaaaatcggacccaaatcaacgaaagtgaagacgttgaagttcaattcaactggtcagattggacttcaaaacacgggcattggctctgcagagaaccaccccattcacattcaccggttcaatttccatggtttggctcaagggttccggaattacaaacgccctagaagccagccccaggtcaaatcttgtcaaccctcagatacggtacacaaatttctgtccccgtcggaggatggtccgttgttagattccaagcaaataatccaggtgtttggcttgtgcattgccatttggaaactcatttgccgtgtgggctagccatggctttcgaggttgagaatgg

SEQ ID NO: 25326 - DNA, 430 bp, Glycine max
  Clone ID: LIB3051-070-Q1-K1-E4
ctcacgcgttcgatcctgtgccatcgaaggctgaataagtgacctgcgtcgcaggcactgttcatggccatgtctcgggttgataacagaaattcctcagccaccaagcgtgctaggactgatggtagtcgtagggaagatgattggacatgccccagctgtggcaatgtcaatttctctttcaggacaacttgtaacatgcgtaattgcactcaaccaaggccggctgatcataattcggtatgatattatatgtaatgtcattttttttttaaaatgtgattttcatttcgttaatgatttatggttaacatttatttgatgatttctttttatcaatttctctctttttgcttgtgattcttattgggctttcttttattttcctattttacggtcactcgagttccatgaagttttttacccaatt

SEQ ID NO: 25327 - DNA, 394 bp, Glycine max
  unsure (1)..(394): unsure at all n locations
  Clone ID: LIB3051-001-Q1-E1-G5
ccaatactgagcggggcagcattgagaccagaggtggctttgtctcaaacatgccaggagatgttgcaagagtgaatgggcagctagcagtttctcgagctttcggagacaaaaacctcaaaacgcacttgcgatctgatcctgacattcagtatactgacattaccccagatgttgagcttttgatacttgctagtgatggtctatggaaggtaatggcaaaccaagaagctgttgatgttgcaagaaggataaaggatccacanaaggcagcgaaacaactagccactgaggcattgaacagagacagtaaggatgatatttcctgcattgtagttcgtttcaagggttgaaaaagggaacatacatactctctaaattcagggtatatata

SEQ ID NO: 25328 - DNA, 330 bp, Glycine max
  Clone ID: LIB3051-051-Q1-K1-D2
cccacgcgtccgcgggtgtgtagtagaattgcagtgaaattggagagaaaaaaaaaaatacgctcaaacatggagggctatgagatcctcaaagatattggttctggaaattttgctgtggccaagcttgttagagacaactgcaccaatgagctttttgctgtcaagtttattgagagaggccagaagattgacgagcatgtccagagggaaatcatgaaccacagatcattgaaacaccccaatattattagattcaaagaggttctgttgacaccaactcatttagccatagtaatggagtatgcttctggaggagaactctttgag

SEQ ID NO: 25329 - DNA, 409 bp, Glycine max
  Clone ID: LIB3051-029-Q1-K1-F3
atcccccaaagcttcaatctttgtattcaattcaccctttctctctctccatgggcacttgtgttgatgccccaacccctctttctcggaagcctaacgggtcccaatccgatgatcgttccttcaattacatgaaattctgccgacccactttctctgatcgcgttccctgcatacccatttgcaagaatcgtgacactgccttcacacgcgtggaggagtttgacacatgtgtggaggataatgatgatattgaagttgaggttgtggagggtgttgatctttggttgaagattcaagaggaggcaaggttagatgttgatcaagaaccaatcttatgcagctactatttcagttccattttgtctcacacatctttggagagtgccttggtcaaccacctctccac

SEQ ID NO: 25330 - DNA, 385 bp, Glycine max
  Clone ID: LIB3051-063-Q1-K1-G10
cagagtttgctcacccctactcttcttccagtctctatctcaatctccatgaaatttaactatggctactgaagaggttttggttgatgaaatcacttaccctaccaagatcactactaccaagcccctatctttgcttggccatggaatcaccgacatggagattcacttcatccatgtgaaattctattcaatcggggtttatttggagccagaagtagtacgccacttggaccagttcaaaggaaaatctgcataggagctggaagataatgaagagttcttcaatgctctcatttctgccccggtggagaagtttattagacttgtggtgatcaaagagatcaaaggtgcacagtatggggttcagattgagactgcagtg

SEQ ID NO: 25331 - DNA, 436 bp, Glycine max
  Clone ID: LIB3051-064-Q1-K1-H11
cccacgcgtccgagcatttagtgacaatgctctggcttaccttgccagcttctgcagaaaactgaaagtggtaaatctttgtggatgtgttagagctgcatccgatactgcattacaggctattggacaatactgcaatcagctacaatctttgaaccttggatggtgtgataatgttggcgatgttggagtgactactttagcatatgggtgtcctgatcttaggatagttgacttgtgtggctgtgtccgtataacagatgacagtgtgattgctttggcgactagatgcccccatctgaggtccctaggactgtactactgcaagaacatcacagatagagcaatgtattccttggcacacagcatggtgaacaacaggatgtggggaactgtgaaaggaggaggaaatgatgaagatggcttaaggactttg

SEQ ID NO: 25332 - DNA, 407 bp, Glycine max
  unsure (1)..(407): unsure at all n locations
  Clone ID: LIB3051-067-Q1-K1-E5
ctaattttaagcattcccttctcttttccattgcagctagcaaagaagcgaagaccccttttgctggttattaacagagtcataaaaaaccaaagttttctattctctgtagctcacatggtgggctaagaatatctgactttggggtggaaagtatggttggcaaggagagtttgagaactgaggtcttgaacttgagctttgagaagcttatgatggttgaatgtggtggaaatagtgggaaaggagtgaacattaaagctggtgtgatcacggagtggaaggatattccagttgagcttttgatgcaaattntgtcacttgtggatgatcaaacggttatcatagcttctgaagtgtgtcgtgggtggagagagggcaattgctttggccttactcggtatcac

SEQ ID NO: 25333 - DNA, 403 bp, Glycine max
  Clone ID: LIB3051-034-Q1-K1-D8
acacaccactttatatacgcacacgagagtcggaagcactactctcttcgccggttgctcgctctctctcgctctttcagctttgactttggtggaaactaaagactagtcaaaatggtgaagttcacagctgaagagctgcgtcgcattatggactataagcataatatccgtaatatgtctgtcattgcccatgttgatcacggaaaatcaaccctgactgattctcttgtggctgctgctggtattattgctcaagaagttgcaggtgatgtccgtatgactgatacccgtgcagatgaagctgagcgtggtattacaatcaagtctacgggtatctcactctactatgaaatgactgatgaagctctcaagagttttaagggagagcgcaatgggaatg

SEQ ID NO: 25334 - DNA, 424 bp, Glycine max
  Clone ID: LIB3051-048-Q1-K1-H5
ggagaatttgtatgagggtccccttgatgatcaatatgcttcggctatcagaaactgtgatcctgagggtcctctgatgctctatgtctcaaagatgattccagcatctgacaagggcagattttttgcttttggtcgtgtattctctggcagagtttcaactggtttgaaggtgaggattatgggaccaaattatgtccctggggagaagaaggatttgtatgttaaaagtgttcaaagaactgtcatttggatgggaaaaagacaggaaactgtggaagatgtcccctgtggtaacactgttgctatggttggtttggatcagttcataacaaagaatgctactttgactaatgaaaaggaagttgatgcccatcccattcgagctatgaagttttctgtctcacctgttgttcgtgttgct

SEQ ID NO: 25335 - DNA, 354 bp, Glycine max
  Clone ID: LIB3051-091-Q1-K1-B3
ccggtctctgaattcgacgcacgcgtgacgctatctctctcgctctttcagctatcacttttgggtttaactaaagactactcaaaatggtgaactgcacaatttaaaagctgcgtggcattatcgactataatcataatatccccaatatgtctgtcattgctcatgttgatcactcaaaatcaaccctgactgattctcttgtcgctgcttcttgtattattgctcaagaagttgcatgtgatatccgtatgactgataccccttcacatgaagctcaacgtattattacaatcaactctactactatctgactctactatgaaatgactgattaagctctcaaaattttta

SEQ ID NO: 25336 - DNA, 388 bp, Glycine max
  Clone ID: LIB3051-001-Q1-E1-A2
aggttctagatcgcgatctagaactagcggacgcgtgggcggacgcgtggggcgcgttaagccaaccgcagaagctatcggcgtacgatgttctgatggagtacgggttcccggtgggtcttcttcccaagggagccatagggtattcgctcaacagagacagcggcgagttcgcagtgtattttcaaggagcgtgcagcttcgacatagagtcctacacgctcaagtacaaatccaccatcacgggtgttatctccaagggcaggctctataatctcaaaggtgtcaccgtcaaaatcttgctcctttggctcaacatcgtcgaggtctctcgtcaggggaacgatatttacttctctgtcggaatcgcttccgctgattttggcgt

SEQ ID NO: 25337 - DNA, 410 bp, Glycine max
  Clone ID: LIB3051-005-Q1-E1-C6
acgctgacttccaaaaagaagacaaaatcctctgcgagagagaaagagagaggcggtgatgtcttcaattagattcctatggatcctgatggtgtctttgacggcatcatgcgcgttaagccaaccgcagaagctatcggcgtacgatgttctgatggagtacgggttcccggtgggtcttcttcccaagggagccatagggtattcgctcaacagagacagcggcgagttcgcagtgtatttccaaggagcgtgcagcttcgacatagagtcctacacgctcaagtacaaatccaccatcacgggtgttatctccaagggcaggctctataatctcaaaggtgtcaccgtcaaaatcttgctcctttggctcaacatcgtcgaggtctctcgtcaggggaacgatattt

SEQ ID NO: 25338 - DNA, 383 bp, Glycine max
  Clone ID: LIB3051-023-Q1-K1-C9
agcctatatttcctggaaaagatgagccagaggaattaaataaaatatatgagctgtgtggagcaccaaatgaagtcaattggcctggggtttccaagataccttattataataaatttatgccaacaaggccgatgaaaagacgtttgagggaagttttcaggcattttgatcatcatgctctggaattgttggagaagatgttgacacttgatccggctcagagaattactgcgaaagatgcacttgatgctgagtatttctggacagatccattaccgtgcgatcccaagagtttacccaagtacgaatcatcacatgagtttcagactaagaaaaagcgccaacaacaacggcaaaatgaagaaatggctaagcgtcag

SEQ ID NO: 25339 - DNA, 355 bp, Glycine max
  Clone ID: LIB3051-025-Q1-K1-C1
ctttgacattcaaaacatttgaaagcggctagcttacactgttttaggggagagcccattttaaaaattttcaagaaattaaactttgctggtggggctgtgacattttttggtgaaaatgtgtctactgggctgaaagttgaggatcagattgctgtcgggaaacgcgtggtattagtaggtagcacaggggttgtgaagtctcaaactgattctgcttatggtgccaatgttgaagtgcggcttaaagaggcagattttccaattggccaagaccagtcttcaactgagcctttctcttgtgaagtggagaggagacctggctttgggggctaatcttcagtcccaattttct

SEQ ID NO: 25340 - DNA, 278 bp, Glycine max
  Clone ID: LIB3051-062-Q1-K1-C1
tttttgctccgatcaacatgaagttgatcaataaaccatcgaaactacgttcctttttgagccttttgtgctccattttgctgctctgggaattagctttcgtggctgcggaggacccttatagattcttcgactggaccattacctatggtgacatttatcccctaggagttaaacaacagggtattcttatcaatggccaattcccaggccctgaaatctattctgttaccaatgacaatttgatcattaacgtgcacaataacttgaccgagccg

SEQ ID NO: 25341 - DNA, 397 bp, Glycine max
  Clone ID: LIB3051-054-Q1-K2-H2
agagtacaagatttaaacacgcgaacaccgtgtttgaaaatcgaacataagagaagagggcgcaatcgttagggtttccaagatggaaggcatggttgatcacctggctttcgagcggaacaattcgcagttcgatgtcgacgagatgaagatcgtttgggccggttctcgtcacgcttttgaagtatctgacaaaatggctcgcctcgttgccagcgatccggcattcagaaaggatgatagagttgtgcttgataggaaggctttatttaagaacactttgaggaaagcagcttatgcatggaaaaagattattgagctccgtctcaatgaagaggaagctgctatgctcagatcctttgtggaccaacctgcttttacggatctacattgggga

SEQ ID NO: 25342 - DNA, 371 bp, Glycine max
  Clone ID: LIB3051-058-Q1-K2-H2
cccacgcgtccgagaagctgtaaagaaacgatgaatgcttcagactcagagaaagaggacgcagaaattgaagcaacagaaactgcacccgatgaagagaatgcgaaattgaagaagaaagagaagaaaaagaagaagaaagcttcgtcgaaggatgcagagaagaagcgcggcgtgtgctatatgagtcgaatcccccctcacatggaccacgtcaagcttcgccacattctctctcagttcggcgatattcaacgaatttttctcgctcctcaagattcttctgtccaagtgtctgccaagaggtcacgtggatcccgagaccaagcatattcagaaggatgggttgaattcggtaataaaagtgttgc

SEQ ID NO: 25343 - DNA, 346 bp, Glycine max
  Clone ID: LIB3051-060-Q1-K1-H10
gtcgaaacgacgtcgttcattgtgcgatgaaagtagctcaacaagtgttgaatctctgaactgtttgggattcgaatcttgagtcgttgatcgtttccggcaatggattcgtggctcaaagccgctgaaggtttatttgaagttgtagatcgacgagcgaaggctgttgccagtgacttatcagaggagcagggtgattctaagtctccagcatcaaatgggcaaggatctcagggcaagaggacaaaatcaaaaccaaaggctcaaaaggcactatccgactcaccaactataattagtgatactactcacgagaaaagtggatcttcatcagcacctgtggaca

SEQ ID NO: 25344 - DNA, 392 bp, Glycine max
  Clone ID: LIB3051-014-Q1-E1-C9
gacccacacgtcaggccaattgttaggatctccctcaggttatgttggttatggagagggtggcgttttaacagaagcaattagaagataactattcacactgttattgttggatgaagtagaaaaagctcatccagatatattcaacatgcttcttcagattttagaagatggtcaacttactgattctcagggtcggagagtttcagttaatgatgcactggtggtgatgacgtcaaatgtggggtcgagtgccattgctaagggtcgacacagctccagaggtttcttgattccagatgataaaacaatatcatacaatggcttgacatcgatggtaattgaagaactgaggtcatattttcgtctagaactgctcaacaggatagatg

SEQ ID NO: 25345 - DNA, 427 bp, Glycine max
  Clone ID: LIB3051-069-Q1-K1-H2
agctgatgagaataaaaaacatcttgaaaggcaaaggatggaaatgcaagaggacatagatgtacttgttgacctcaacaggaagctgaaaaatcagcgggaacaatttattgtggaaagacgacgctttattgagtttgttgagaaacttcggagttgccagaactgtggggaaatgatctctgaatttgtgctttctgatttacaatcctctgttgacattgagaacttggaagtgccatctctcccaaaattagcagctgatattgtacagggagtttctaatgaaaatttagcttcttcaaggcaaaatactggattgtctcctgcaactgatcccaagtcacctgtttctggtggcactgtctcttggctacgtaaatgcacctctaagatttttaaaatcttcccgattagaaagattgaa

SEQ ID NO: 25346 - DNA, 416 bp, Glycine max
  Clone ID: LIB3051-070-Q1-K1-H2
cggacgcgtgggttccaaatcatttttacatagggacatcaagccagacaacttcctaatgggttgggggaggcgtgcaaatcaagtttatgccattgactttggtcttgctaagaagtacagagacacctctacccatcaacatattccttacagagagaataagaatttgactggaactgctagatatgctagtatgaatactcatcttggaattgagcaaagccgtaaggacgacttagaatcacttggatttgttcttatgtattttttgagaagaagtctcccgtggcacggattgaaagcaggtactaagaagcaaaagtatgagaaaatcagtgagaagaaagtttctacttctatcgagtctctgtgccgtggctacccctcagagttcgctttatactttcattact

SEQ ID NO: 25347 - DNA, 436 bp, Glycine max
  Clone ID: LIB3051-048-Q1-K1-E10
gcttcttcgagtttcacagccaagtcgtaaaagggtttcaagggatggaaaacatgcagagcttctggcaattgggtgatgaactccgtgggcactcaaaagcatcggaggatcacaagtggttaatggttgcctcgaaactggccgaacagacaagattgaagggggagcgtgtgaacaaccttgatctttcaaagggacccattgaaacaaggtcaagggataaatttgggttccaggaagagaacaaatttgattctcttaacttgagcatgttgaacctggactctaaatttactgagaatgtgagcaaaagctcacttcgaaatggtgtttatggtatgaatgcagtgtatcagaaaaacaatgcaaacttggtgagtaatgtcaggccagtattgcatcattatgacgggccaaagtttcgtcttgaact

SEQ ID NO: 25348 - DNA, 442 bp, Glycine max
  Clone ID: LIB3051-027-Q1-K1-A5
cccacgcgtccgaaaaacaccaattctccaccctctcattgaaaaaaaaacaaccaaacaaaaaaaatcaatcattttattttatttttctacgaaaatggttgatttacattggaaatcaaagatgcctagttccaaaacaccaaaactctctctctccgacaacaagtccttaccctctttgcaactacccttccgcaccacagatatctctcccgccgctccttccgtttgcgccgcttacgactactatctccgtcttcctcaactcagaaagctttggaactccactgattttcctaattggaacaacgaaccgattctaaaaccaattttgcaagctctcgaaatcacgttccgctttctttccattgttctctccgatcccagaccttactccaaccacagagaatggactcgccggatagagtctctcatcatg

SEQ ID NO: 25349 - DNA, 414 bp, Glycine max
  Clone ID: LIB3051-064-Q1-K1-B2
caaaactctctctctccgacaacaagtccttaccctctttgcaactacccttccgcaccgcagatatcgctcccgccgctccttccgtttgcgccgcttacgactactatctccgtcttcctcaactcagaaagctttggaactccactgattttcctaattggaacaactaaccgattctaaaaccaattttgcaagctctcgaaatcacgttccgctttctttccattgttctctccgatcccagaccttacttcaaccacagagaatggactcgccggatagagtctctcatcatgcatcaaattgaaatcattgccatactttgtgaagaagaggaacaaaattccgacacacgtggcactgcatcaaccgctgatctcagcagcagcaatagcagcgtgagcagaaact

SEQ ID NO: 25350 - DNA, 461 bp, Glycine max
  Clone ID: LIB3051-087-Q1-K1-D4
aaaattaatcatcttacttatttattctccgaaaatggttgatttacattggaaatcaaagatgccaagttccgacatgccttccaaaactctaaaactctctctctccgacaacaagtccttaccctctttgcaactacccttccgcaccacagatatctctcacgccgcaccttctggttgcgccacttacgactactatctccgtcttcctcaactcagaaagctttggaactcctcagattttcctaattggaacaacgaaccaatcttaaaacctatcttgcaagctctcgaaatcaccttccgctttctctccattgttctctccgatccaagaccttactccaaccacagagaatggactcgcaggatagagtctcttatcacacatcaaattgaaatcattgccatactttgtgaagatgaggaacaaaattccgacacacgtggcactgcac

SEQ ID NO: 25351 - DNA, 319 bp, Glycine max
  Clone ID: LIB3051-095-Q1-K1-B11
acggcggggaagccgagcctgctctacgatctcttgtgcaagccgaatgagatccacgctctgaagactacgccgggggaggagcgcgtggagaaccacgagaaccacgcggtgcacgccacgcaccagatcgcggagtcgtggattcacgcgtcgcggaaggttcttgatagaatcgcggactctgtgctctccagaacctttctgaaagcagtatatgactgctactccgtggagaggatctggaagcttctctcggaggtggaggacctccaccttattatggatccggacgattttttgaggctaaagaatcaac

SEQ ID NO: 25352 - DNA, 448 bp, Glycine max
  Clone ID: LIB3051-108-Q1-K1-A2
caaaaacaccaattctccaccctctcattgaaaaaaaaaacaaccaaacaaaaaaaatcagtcattttattttatttttctacgaaaatggttgatttacattggaaatcaaagatgcctagttccaaaacaccaaaactctctctctccgacaacaagtccttaccctctttgcaactacccttccgcaccacagatatctctcccgccgctccttccgtttgcgccgcttacgactactatctccgtcttcctcaactcagaaagctttggaactccactgattttcctaattggaacaacgaaccgattctaaaaccaattttgcaagctctcgaaatcacgttccgctttctttccattgttctctccgatcccagaccttactccaaccacagagaatggactcgccggatagagtctctcatcatgcatcaaattgaaatca

SEQ ID NO: 25353 - DNA, 315 bp, Glycine max
  Clone ID: LIB3051-001-Q1-E1-C4
agcttatgtgcttcactcttgggctggagggttaactgagttcacagatggaaggaatcaagagagcacaagtgaggctgtgagtgcatattattctgctgctttgatgggattagcatatggtgatgtacctcttgttgcacttggatcaacactcacagcattggaaattgaagggactaaaatgtggtggcatgtgaaagaaggaggtactttgtatgagaaagagtttacacaagagaatacggtgatgggtgttctatggtctaacaagaaggacactggactttggtttgctcctgctgagtggaaaga

SEQ ID NO: 25354 - DNA, 426 bp, Glycine max
  Clone ID: LIB3051-102-Q1-K1-H2
cccacgcgtccgaggaaatagctagtgagactaatccatcgcacaaacctcaccgattcagtgacctctaagctaattgcttccaatctccgtcaccaaatcacaaaatcagcccaaaacctccgccgccagctcctatccacggcggcggcggcagtgccggaacacgatgggaacaactccaactctttgggaatgacgatgaagggcgttcgaatctccggaagacccctttacctggacgtgcaggcaacatctccggtggacccgcgcgtacttgacgcgatgctccctttctacatctctcgctacggaaaccctcactctcgcacccacttctacggctgggaatccgacgaggccgtggagcacgcgcgcgctcaggtcgcttccctcatcggcgcttcccccaaggagatagtcttc

SEQ ID NO: 25355 - DNA, 358 bp, Glycine max
  Clone ID: LIB3051-017-Q1-E1-C3
ccacgcgtcaggcaaaaccctagctgaaccctctttcccttctccggccaccgcaatggacttcactacgccgccgatcgaggacggtttcaccgccgagaagctcttcacgcacggcttctcctacacctacgatgacgtcatcttcctcccccactacatcgacttcgccgccgacgccgtggacctctccacgcgcctcacgcgccgtctccccctcgccgtgccgtttgtggcctctcctatggacaacgtgtccgagttcggcattggcgccgccatggcctccctccgggggatccccgttcttcaactcaaagttcccgccgccgatcatgcggccatcctccgcagagcg

SEQ ID NO: 25356 - DNA, 266 bp, Glycine max
  Clone ID: LIB3051-036-Q1-K1-D11
ccgggttggaccaagccttcggccaacgcttccgggaagattgcaagaggtgttgccttcccgacatgtgtgcctgtgaacaacactgcctgccacttctatcttcttgccagtgatgaaacattgttggaagacggcgatatattgaaaattgacatggcttgtcttttacatgggttcattgttgctgtggctcacacccatgttcttcatgaggggcctgttacgggacggccagctgatgctattgcagcagcaaacaccgc

SEQ ID NO: 25357 - DNA, 404 bp, Glycine max
  Clone ID: LIB3051-110-Q1-K1-H2
agactgtcaatgaagctgctaaattcagataccggagtggtaaccaatttaatcgcgcaggcttaacagttagagccccttatggagctgtgagtcatggtgggcattaccactctcagtctcctgaggctctcttctgtcatgttcctggtatcaaagtggtcatgcctcgaagtccactggaagcataagggttattgctatcttgcgtacgagatccaaatgctatcgtattctttgaaccgaagtggctatatcgttcggctgttgaagaagttccagaggatgactacatgctgcctttatctgaagctgaggtaattcggcaaggaagtgatataacacgtggtggatggggaactcaattatctataatggaacatgcttgtcttgatgctgaaaaa

SEQ ID NO: 25358 - DNA, 402 bp, Glycine max
  unsure (1)..(402): unsure at all n locations
  Clone ID: LIB3051-001-Q1-E1-D2
aggcaaactctggtggcagatgcctctcagttgaatatacagacagagttggagagttagctaagaagcatggactgaagcttcacattgatggggcccgtatttttaacgcatcagttgcacttggtgttccagtggataagcttgtccaggcggctgattcagtttccgtttgcctatctaaaggtataggtgctccagttggatctgttattgttggttccaagaattttattgccaaggctanacgactccggaaaaccttaggacgtggaatgagacagattggcctcctttgtgccgctgcacttgttgccttgcaggaaaatgttgggaagctggaaagtgatcacaagaaagctagacttttggctgatggattaaaagaagttaaaggactga

SEQ ID NO: 25359 - DNA, 325 bp, Glycine max
  unsure (1)..(325): unsure at all n locations
  Clone ID: LIB3051-117-Q1-K1-G1
attcagcgattagcaaaaagcagaagaagaatgagaacccgacaaaaatggaagaggacgacggcgaaggcgaaaaagaagaagaggaagaagaggaagaagaagaagaagaagaagaagaagaagtgtgggacgattgggaaggagaagacgaaggagagagagaatctgaattcgtgtgtctattctgtgactcccggtacagttcgtgcggttccttgttcgaccactgcgcctnccttcaccgctttgatttccacacgatcagaacaactctcagcttggatttctatgcctccttcaagctcattaacttcattcgctc

SEQ ID NO: 25360 - DNA, 432 bp, Glycine max
  Clone ID: LIB3051-103-Q1-K1-F5
cccacgcgtccgcccacgcgtccgggaaggtcctgttactggaagggcagctgatgtgattgctgctgctaatactgctgctgaggtggccttgaggcttgtcaggccgggaaagaagaacaaggatgtaagtgatgcaattcaaaaggttgctgctgcctatgactgtaaaattgttgagggtgttcttagccaccaaatgaagcagtttgttattgatgggaataaagttgtgcttagtttgtctaatccagacacaagggttgacgaagcagagtttgaggagaacgaagtttatgcaattgatatagtaacaagcactggggatggcaagcctaagctgttggatgagaagcagacaactatttataagagggctgttgacaagagttatcacttgaagatgaaagcgtctaggttcattttcagtga

SEQ ID NO: 25361 - DNA, 363 bp, Glycine max
  Clone ID: LIB3051-003-Q1-E1-H6
cccacgcgtccgcagagatactgaaaaatagactcaaccaatatgttcaaggaaacaaagagggttttgttaatgatgcagaagctgaagtagcccggctatctaatgcagcttatggggttgatatgttgaataccattggctacatatacgcaaggcaggcagcaaaagagctagggaagaaagcaatttatttgggtgtgccttttattgctgagtggtttagaaacaaagggcactctattaaatctcaagttacagcagcaacaggggcaattgctttaatccaattgcaggaggatatgaaaaagcaactcagttcagaaggggactatactgaagaagagcttgaagaatacatgc

SEQ ID NO: 25362 - DNA, 421 bp, Glycine max
  Clone ID: LIB3051-065-Q1-K1-C10
cccacgcgtccgcccacgcgtccgggaaaatggtctgttgtttgttccaaagggccaggggcagaatccgcaagcacagatgttctctgatccgaacatggccatggatatgatgaagaaaaacctttcaatgatcattcctcagactcttacttttgcttgggtgaactttttcttttctggatttgtagcagccaagataccctttccattgacacagaggtttaggtcaatgctacagaatggaatagaccttagcaccgtagatgttagctatgtcagcagtcgctcttggtacttcctcaatctgtttggattaagaggattgtttagtctcatattgggtgaagaaaatgctgtagatgatacacaacgtatgatgcaaatgggtggatttggatttgatccttcaaagggtctg

SEQ ID NO: 25363 - DNA, 430 bp, Glycine max
  Clone ID: LIB3051-092-Q1-K1-G4
gtgaccccattaaaagtggcacaatcattatattgcagcacatgagaacaaggaagtgggtgcacaggcattttcatgcatccccgatatcaagcaatcttgaggtcagtcgttttggaggataatccgaatctgacaccggtgactattgaaagcttataatagaatgatatgctaagacttgtaaacactatcaaaagattcgtcttcagcatattgacactggaggctatctacatagtcatgataagaaatacatccctattgctactggtcagcacgcagtatgttgtgctcctgaaaagcatgctgtcaatgcgcagctgtcaaccgaatgtgactacgattcccttacgcaaagcatatgatatactcagtatctgttcttattctaaacgggtaaaccattcatagtgagagatcattgcta

SEQ ID NO: 25364 - DNA, 435 bp, Glycine max
  Clone ID: LIB3051-027-Q1-K1-H6
cccacgcgtccgcccacgcgtccgcccacgcgtccgcccacgcgtccggcaaaagtgatatatcgagacttcaaagcttcaaatatcttacttgattcgaattacaatgcaaaactttctgattttggcttggcaaaggatggaccagctggtgataagagccatgtctctacaagggtaatgggcacatatggctatgctgctcctgaatatatggccacaggtcacttgacaaagaagagtgatgtatacagcttcggggttgttctgcttgaaattatgtccggcaaacgtgcacttgacagcaacaggccaagtggggagcacaatttaattgaatgggccaaaccttacctcagcaacaagcgcaggatcttccaagtcatggatgcgcgcattgaaggccaatacacgttgcgcgaatcaatgaaagta

SEQ ID NO: 25365 - DNA, 446 bp, Glycine max
  Clone ID: LIB3051-035-Q1-K1-H6
agttactgttgatgttggccacacaccaagggaaaatcaaagcacagggaaaatggtcttgccctttgagccactgtcaatagcatttaaggatgttcagtattttgttgacattcctccggagatgaaaaaacatggttccgatgagaaaaggctacaattgctttgtgatatcacaggagcctttaggccaggaattctcactgcactgatgggggtcagtggagcaggaaagacaactctgatggatgttctttcaggaagaaaaactggaggtatcattgaaggagatataagaatcggaagctaccccaaagtgcaaaagacatttgaaagagtttcaagttactgtgagcagaatgacatacattctccatatataaccgttgaagaatctgtcacatactcagcttggttgcggttgccaacagaaattgattctgtca

SEQ ID NO: 25366 - DNA, 435 bp, Glycine max
  unsure (1)..(435): unsure at all n locations
  Clone ID: LIB3051-040-Q1-K1-H6
ttgcaaattgagaaacgtttgagaactgatttggaagaggaaaaggcacaagaaattgctaagttacaggaagctttacatgcaatgcaaatacaagtagaagaagcaaataccaaggtcatcaaagagcgcgaggcagcacgaaaggccattgaagaagcacctccagttgttaaggagactcctattataattcaagatactgaaaagattaattcattattggctgaagtcaatagtttgaaggaatcactcctattggaaaaagaggctaaagaagaggccagaaaagctcaggctgaggctgaagctagaaataaagagatggttaaaaaggttgaagattctgaccgcanagtggatcaacttcaagaattggttcagagattggaggaaaagatttccaatgcagagtcagaaaatcaagttcttcgc

SEQ ID NO: 25367 - DNA, 415 bp, Glycine max
  Clone ID: LIB3051-001-Q1-E1-E4
agggaccttaaagttaaaggatataccatatcaacacatataagaagaccgctacaataagagtcttcaacttcttggatacaacacagtatacaatagcactccagtgcttgtccaacaacgggaaaacccttaatgtgtagtctattgccttacttgttgaaatacaattgaatgagattttggtcaaataaatcataactcctgcggatccctacgaaagaaccctggaaaggttttgggttaaatatgctgatgatgacatgttttctgcagttattgcattcttccttatcactaatgatgaagagcgagaaaagagcatagagaagatatgggagcatctcaaggttgttgagaatcagtgttttggtgatcagaagaaattttttgggggagacattattaacattat

SEQ ID NO: 25368 - DNA, 414 bp, Glycine max
  Clone ID: LIB3051-001-Q1-E1-H1
agcagaggtgaagcttcatggattttggtatagtccctacactttgagggtggtatggaccttaaagttaaaggatataccatatcaaaacatagaagaagaccgctacaataagagtcttcaacttcttgaatacaacccagtatacaagaaaactccagtgcttgtccataatggaaaacccttatgtgagtccatgcttattgttgaatacattgatgagatttggtcacataattcattacttcctgctgatccctacgagagagctctggcaaggttttgggttaaatatgctgatgatgacatgttttctgcagttattgcattcttccttagcaataatgatgaagagcgagaaaagagcatagagaagatatgggagcatctcagggttgttgagaatcagtgttt

SEQ ID NO: 25369 - DNA, 363 bp, Glycine max
  Clone ID: LIB3051-004-Q1-E1-H10
gcagaggtgaagcttcatggattttggtatagtccctacactttgagggtggtatggaccttaaagttaaaggatataccatatcaaaacatagaagaagaccgctacaataagagtcttcaacttcttgaatacaacccagtatacaagaaaactccagtgcttgtccataatggaaaacccttatgtgagtccatgcttattgttgaatacattgatgagatttggtcacataattcattacttcctgctgatccctacgagagagctctggcaaggttttgggttaaatatgctgatgatgacatgttttctgcagttattgcattcttccttagcaataatgatgaagagcgagaaaag

SEQ ID NO: 25370 - DNA, 424 bp, Glycine max
  unsure (1)..(424): unsure at all n locations
  Clone ID: LIB3051-026-Q1-K1-B10
ggtgaagcttcatggattttggtatagtccctacactttgagggtggtatggaccttaaagttaaaggatataccatatcaaaacatagaagaagaccgctacaataagagtcttcaacttcttgaatacaacccagtatacaagaaaactccagtgcttgtccataatggaaaacccttatgtgagtccatgcttattgttgaatacattgatgagatttggtcacataattcattacttcctgctgatccctacgagagagctctggcaaggttttgggttaaatatgctgatgatgacatgttttctgcagttattgcattcttccttagcaataatgatgaagagcgagaaaagagcatagagaagatatgggagcatctcagggttgatgagaatcagtgttntggtgatcagaagaaa

SEQ ID NO: 25371 - DNA, 384 bp, Glycine max
  Clone ID: LIB3051-027-Q1-K1-B9
acaggtgaagcttcatggattttggaagactgcctacactgtgagggcggtatggaccttaaagtgaaaggatataccatatcaaaacatagaagaagaccgctacaataagagtcttcaacttcttgaatacaacccagtatacacgaaaactccagagcttgtccataatggaaaacccttatgtgagtacatgcttatcgctgaatacattgatgagatacggtcacataattcattacttcctgctgatccctacgagagagctctggcaaggttttgggttaaatatgctgatgatgacatgttatctgcagttattgcattcttccttagcaataatgatgaagagcgagaaaagagcatagagaagatatgggagca

SEQ ID NO: 25372 - DNA, 453 bp, Glycine max
  Clone ID: LIB3051-027-Q1-K1-G9
cagaggtgaagcttcatggattttggtatagtccctacactttgagggtggtatggaccttaaagttaaaggatataccatatcaaaacatagaagaagaccgctacaataagagtcttcaacttcttgaatacaacccagtatacaagaaaactccagtgcttgtccataatggaaaacccttatgtgagtccatgcttattgttgaatacattgatgagatttggtcacataattcattacttcctgctgatccctacgagagagctctggcaaggttttgggttaaatatgctgatgatgacatgttttctgcagttattgcattcttccttagcaataatgatgaagagcgagaaaagagcatagagaagatatgggagcatctcaggggtgttgagaatcagtgttttggtgatcagaagaaattttttgggggagacattattaaca

SEQ ID NO: 25373 - DNA, 430 bp, Glycine max
  unsure (1)..(430): unsure at all n locations
  Clone ID: LIB3051-050-Q1-K1-E7
tgaagcttcatggattttggtatagtccctacactttgagggtggtatggaccttaaagttaaaggatataccatatcaaaacatagaagaagaccgctacaataagagtcttcaacttcttgaatacaacccagtatacaagaaaactccagtgcttgtccataatggaaaacccttatgtgagtccatgcttattgttgaatacattgatgagatttggtcacataattcattacttcctgctgatccctacgagagagctctggcaaggttttgggttaaatatgctgatgatgacatgttttctgcagttattgcattcttccttagcaataatgatgaagagcgagaaaagagcatagagaagatatgggagcatctcannggttgtgagaatcagtgttttggtgatcagaagaaattttttgg

SEQ ID NO: 25374 - DNA, 381 bp, Glycine max
  Clone ID: LIB3051-059-Q1-K2-G6
cagaggtgaagcttcatggattttggtatagtccctacactttgagggtggtatggaccttaaagttaaaggatataccatatcaaaacatagaagaagaccgctacaataagagtcttcaacttcttgaatacaacccagtatacaagaaaactccagtgcttgtccataatggaaaacccttatgtgagtccatgcttattgttgaatacattgatgagatttggtcacataattcattacttcctgctgatccctacgagagagctctggcaaggttttgggttaaatatgctgatgatgacatgttttctgcagttattgcattcttccttagcaataatgatgaagagcgagaaaagagcatagagaagatatggg

SEQ ID NO: 25375 - DNA, 418 bp, Glycine max
  Clone ID: LIB3051-064-Q1-K1-C12
gcggggaagcttcatggattttggtatagtccctacactttgatggtggtatggaccttaaaggtaaaggatgggccatatcaaaacatagaagaagaccgctacaataagagtcttcaacttcttgaatacaacccagtttacaagaaaactccagtgcttagccataatggaaaacccttatgtgagtccatgcttattgctgaatacattgatgagatacggtcacataattcattacttgctgctgatccctacaagagagctctggcaaggctcagggttaaatatgctgatgatgacatgttttctgcagatatacgcattctttcttagcagtaatgatgaagagcgagataagagcatagagaacatatgggagcatctcacggttgttgagaatcactgtttaggtgat

SEQ ID NO: 25376 - DNA, 304 bp, Glycine max
  unsure (1)..(304): unsure at all n locations
  Clone ID: LIB3051-075-Q1-K1-G5
gtgaagcttcatggattttggtatattccctacactttgagggtggtatggaccttggagttagaggatataccatatgaaaacatagaagaagaccgctacaataagagtcttcaacttcttgaatacaacccagtatacaagaaaactccagtgcttgtccataatggaaaacccttatgtgagtccatgcttattgttgaatacattgatgagatttggtcacataaatcattacttnctgctgatccctacgagagagctcttgcaggttttgggttaaatatgctgatgataacatgtt

SEQ ID NO: 25377 - DNA, 450 bp, Glycine max
  Clone ID: LIB3051-086-Q1-K1-E6
agcttcatggattttggtatagtccctacactttgagggtggtatggaccttagggttaaaggatataccatatcaaaacatagaagaagaccgctacaataagagtcttcaacttcttgaatacaacccagtatacaagaaaactccagtgcttgtccataatggaaaacccttatgtgagtccatgcttattgttgaatacattgatgagatttggtcacataattcattacttcctgctgatccctacgagagagctctggcaaggttttgggttaaatatgctgatgatgacatgttttctgcagttattgcattcttccttagcaataatgatgaagagcgagaaaagagcatagagaagatatgggagcatctcagggttgttgagaatcagtgttttggtgatcagaagaaattttttggcggagacattattaacattatgg

SEQ ID NO: 25378 - DNA, 385 bp, Glycine max
  Clone ID: LIB3051-095-Q1-K1-F4
tgattgctgcctgctgatacctacgagagagctctggcaaggttttgggttagatgtgctgatgatgacatgtgtgctgcagttattgcatgctgccttagcaataatgattaatagcgagaaaagagcatagagaatatatgggagcatctcacggttgttgagaatcaatgttttggtgatcagaagaaattttttgggggagacattattaacattatggacatagctattgggtccatatataaaattcttggggttgcagaagatattattgactcgaatgtgctggaagattagaaattccctcacttgcattcatggtataataatttcaaggatgtagcacatattaaagaaaacctcccagaccatgagaaaatgg

SEQ ID NO: 25379 - DNA, 460 bp, Glycine max
  Clone ID: LIB3051-112-Q1-K1-A12
cagaggtgaagcttcatggattgtggtatattccctacactttgagggtggtatggaccggaaagttcaaggatataccatatcaaaacatagaagaagaccgctactataagagcattcaacttcttgaatacaacccactatacaagaaaactgcagtgcttgtccataatggaaaacccttatgtgagtccatgcttattgctgaatacattgatgagatttggtcacataattcattacttactgctgatccctacgagagagctctggcaaggttctgggttaaatatgctgatgatgacatgttttctgcagttattgcattcttccttagcaataatgatgaagagcgagaaaagagcatagagaagatatgggagcatctcagggttgctgagaatcagtgttttggtgatcagaagaaattttttggtggagacattattaacattatgga

SEQ ID NO: 25380 - DNA, 434 bp, Glycine max
  Clone ID: LIB3051-113-Q1-K1-H11
gtgaagcttcatggattttggtatagtccctacactttgagggtggtatggaccttaaagttaaaggatataccatatcaaaacatagaagaagaccgctacaataagagtcttcaacttcttgaatacaacccagtatacaagaaaactccagtgcttgtccataatggaaaacccttatgtgagtccatgcttattgttgaatacattgatgagatttggtcacataattcattacttcctgctgatccctacgagagagctctggcaaggttttgggttaaatatgctgatgatgacatgttttctgcagttattgcattcttccttagcaataatgatgaagagcgagaaaagagcatagagaagatatgggagcatctcagggttgttgagaatcagtgttttggtgatcagaagaaattttttggggg

SEQ ID NO: 25381 - DNA, 422 bp, Glycine max
  Clone ID: LIB3051-116-Q1-K1-A3
gctcgtaccggaatctgcatttccgagccaggcgtccgcagaggtgaagcttcatggattttggtatagtccctacactttgagggtggtatggaccttaaagttaaaggatataccatatcaaaacatagaagaagaccgctacaataagagtcttcaacttcttgaatacaacccagtatacaagaaaactccagtgcttgtccataatggaaaacccttatgtgagtccatgcttattgttgaatacattgatgagatttggtcacataattcattacttgctgctgatccctacgagagagctctggcaaggttttgggttaaatatgctgatgatgacatgttttctgcagttattgcattcttccttagcaataatgatgaagagcgagaaaagagcatagagaagatatgggagc

SEQ ID NO: 25382 - DNA, 402 bp, Glycine max
  Clone ID: LIB3051-116-Q1-K1-F12
cccacgcgtccgcccacgcgtccggcagaggtgaagcttcatggattttggtatagtgcgtacactttgagggtggtatggaccttaaagttaaaggatataccatatcaaaacatagaagaagaccgctacaataagagtcttcaacttcttgaatacaacccagtatacaagaaaactccagtgcttgtccataatggaaaacccttatgtgagtccatgcttattgttgaatacattgatgagatttggtcacataattcattacttcctgctgatccctacgagagagctctggcaaggttttgggttaaatatgctgatgatgacatgttttctgcagttattgcattcttccttagcaataatgatgaagagcgagaaaagagcatagagaagata

SEQ ID NO: 25383 - DNA, 436 bp, Glycine max
  Clone ID: LIB3051-042-Q1-K1-H10
gaagcatcaagatttagccccaagcctgatataattttgcagaggtgtgatccaacataccaagcaacaaaattgcattttgaagacctagctaagagatatggcaatccaattattgttctgaatttgattaagacagttgagaagcggcctcgagaaatgatgttgaggcgtgaatttgcaaatgctgttgggtatctgaaccaaattctaccagtggagaaccatcttagatttattcactgggattttcacaagtttgcaaagagcaagtctgccaatgttttggcagttttaggagctgtagcaagtgaagcgcttgatttaactggtttttactacagtggtaaacccagcatcattaagagagccaacaagagcaatcaaacaagcacagggagggatacttcactgagagatctgaaagctagttctg

SEQ ID NO: 25384 - DNA, 440 bp, Glycine max
  Clone ID: LIB3051-116-Q1-K1-G5
cccacgcgtccggttcaaaacaaggtttccatcaactggctactcgaccaaggtcccagcttaggtattgtccgagtgcatggggttgggcttttacacaccgagctagtgtctggaatccctgtaattttcttccagtttgtagccaacctcccagccttccatcaggtcctagttttcctatgcatcaaacatgtgccggttccacatgttaaagctaaggaacggtttctagttggtcgtattggtccaaaagagttcagaatctaccggtgcatagtgcgatacggataccatgacgttcacagagatgattttgagtttgagaatgatcttatatgcagcatagctgagttcatacgcacagaaagaaccgaatcgaactctccaaatgatgagcccctaaaggatgacagaatggcaattggaaggacatgttc

SEQ ID NO: 25385 - DNA, 366 bp, Glycine max
  Clone ID: LIB3051-044-Q1-K1-H6
cccacgcgtccgatacccacctgaagcaaattatttatttctcggagattatgttgatcgtggtaagcagagcatagagacaatatgtttactcctcgcctacaagatcaaatacaaggagaatttctttcttctcaggggcaaccatgagtgtgcatccatcaatcgtatatatggtttctatgatgagtgtaagaggaggtttaatgttcgcctctggaagacatttactgattgctttaattgccttcctgtcgctgctctgatagatgagaagatcctttgcatgcatggtggactatcgcctgatcttaaacacttggatcagattcgaagtattgctcgtcctattgatgtgccagatca

SEQ ID NO: 25386 - DNA, 432 bp, Glycine max
  Clone ID: LIB3051-020-Q1-E1-F4
acctggaaattttccttccctcaaacctaaaatggccaaggtggtgttccggttccccccaaagcacccctgagattcgttcgcaaaaagcttaataagaacaaaaaataaaaataatattcttcgttattatttcatttcaatttcgttttcgttttcgttttctgttttgatttgatcttccaatggcgtccgatggctttaccgacaagaacaccgtgttcagaaagctcaaggcgaagtctgaaaataagatgtgtttcgattgcaatgcgaagaaccctacctgggcgtccgtcacgtatgggatctttctctgcatcgattgctccgccgtacaccgcagtctcggcgtgcacatcagcttcgtgaggtctacaaatttagactcatggagtcctgagcaactaaaaacaatgagctttggaggaa

SEQ ID NO: 25387 - DNA, 448 bp, Glycine max
  Clone ID: LIB3051-025-Q1-K1-F10
ctgcctgcaaattttcttcccctcaatctatattactcaggtggtgttcctgttcccctcaagcacccctgagattcattcccaaaaagcttaaaaaattctattcaattcaaattctaaatttaatttccatttcgttttcgttttctgttttgatttgatcttccaatggcgtccgatggcttcaccgacaagaacaccgtgttcagaaagctcaaggcgaagtccgaaaataagatgtgtttcgattgcaatgcgaagaaccctacctgggcgtccgtcacgtatgggatcttcctctgcatcgattgctccgccgttcaccgcagtctcggcgtgcacatcagcttcgtgaggtctacaaatttagactcatggagtcctgagcaactaaaaacgatgagctttggaggaaacaatcgtgcacatggtttctttaagcaacatg

SEQ ID NO: 25388 - DNA, 400 bp, Glycine max
  Clone ID: LIB3051-046-Q1-K1-H10
aaagcttctctcgagtcagatattgagtgttttataagtgaaaagattatacttgccaacaaggtgatagtgaagcatgctgtcaccaaaataagagatggtgatgttcttctaacttttgggtcttcatctgctgttgaaatgatactattgcatgcacatgagttgggaagacagtttcgtgttgtggtagttgactctcgtccgaagcttagagggcaacttttacttcgccggcttgtggagaacggtcttagctgtacatacactcatataaatgctgtttcctacataatgcacgaagttactcgagtttttctgggtgcatcagcagttttgtctaatggaacagtatattcaagagtggggactgcatgtgttgcaatggttgctcatgcat

SEQ ID NO: 25389 - DNA, 389 bp, Glycine max
  Clone ID: LIB3051-024-Q1-K1-B11
atttccggcgagttttcctctctcgaatctgcgagaccgacgaatctcgctcaccggaatttcgcattcagaaaatggctttaggtggaacagctcccccaagaggaagtgcagcggctactgcaagcatgaggagaaggagaacaaccggtggtgcggcctctggaggagcagctggaactatgctccaattttacacagatgatgcccctggactcaagatctccccaaatgttgttcttgtaatgagcattggcttcatagcatttgttgccatccttcatgtgatgggcaagctgtactttgtgcgtaaggaggcttagagaatagatcaagatgttaagtccaatttttttggattttcaatacacctctggtatgaaatttag

SEQ ID NO: 25390 - DNA, 394 bp, Glycine max
  unsure (1)..(394): unsure at all n locations
  Clone ID: LIB3051-095-Q1-K1-A4
ggagttctaaatttccggcgagtttccctctctcgaatctgcgacaccgacgaatctcactaagcggaacttcgcattcagaaaatggctttaggtggaacagctcccccgagaggaagtgcagcagctactgccagcatgaggagaaggagaacaaccggtggtgcggcctctggaggagcagctggaactatgctccaattttacactgatgatgcccctggactcaagatctccccaaatgtggttcttgtaatgagcattggctttatagcatttgttgccatccttcatgtgatgggcaagctgtactttgtgcgtagggaggcttangaaatagatcaagatgttaggtccatttttggattttcaatacacagtctctgatatgaaa

SEQ ID NO: 25391 - DNA, 418 bp, Glycine max
  Clone ID: LIB3051-060-Q1-K1-D8
ctacgtctcatcgaataatttcagatctcgtcgatctgagctcaaaacaatggcgaaacgaaggtactctcgtcttccacctcgcaagtcatcgtcgtcttccacgctgattctgactctgttcctggtcttcaccttcctcgttctaattctcctggctctcggcatcctctccattcctagctcctcgcgtggaaatttgcccaaacctaacgatctcgcatccattgctcgcaacacaatccacacttccgacgatgacgacgtgaggggagagcagtgggttgaagtagtgtcgtgggagccgagagcctttgtctatcacaattttctgacgaaggaggaatgcgagtatctaattgacatagcaaagccaaatatgcataagtcatcagttgttgatagcgaaaccggaaag

SEQ ID NO: 25392 - DNA, 471 bp, Glycine max
  Clone ID: LIB3051-077-Q1-K1-G4
ctcgtcttccacctcgcaagtcatcgtcgtcttccacgctgattctgactctgttcctggtcgtcacggtcctcgttctaattctcctggctctcggcatcctctccattcctagctcctcgcgtggaaatttgcccaaacctaacgatctcgcatccattgctcgcaacacaatccacacttccgacgatgacgacgtgaggggagagcagtgggttgaagtagtgtcgtgggagccgagagcctttgtctatcacaattttctgacgaaggaggaatgcgagtatctaattgacatagcaaagccaaatatgcataagtcatcagttgttgatagcgaaaccggaaagagtaaagacagcagagtacgtacaagctctggaacttttctggccagaggtcgggataagattgtcagggatattgagaaaagaattgctcactatagttttattcctgttgagcatggtg

SEQ ID NO: 25393 - DNA, 449 bp, Glycine max
  Clone ID: LIB3051-067-Q1-K1-B5
cccacgcgtccgaagatcaccaacactttgctggtgccactctttctgacttctcttccaaggacacttcctccaccaaccttaaaaaaacagaggaaagccatgagtcgcagaaacgaaagtggtccaaagcttgacttgaagctgaacctgtccccaccgagggctgatcggagactggagtcaccgacacgatcggcgacggcgtcgccgacgtcaccgccgagctcgtgcgtgtcgtcggagctgaaccaagaggacaaaagttactctaacagccctgaagccacttccatggttcttgtgggttgccctcgctgcctcatgtatgtgatgctctctgaggatgatccaaagtgccccaaatgcaaaagcaccgttttgcttgattttctccatgacaccaaaaaccccaccataaggaggagttagactgatagagttatgat

SEQ ID NO: 25394 - DNA, 456 bp, Glycine max
  unsure (1)..(456): unsure at all n locations
  Clone ID: LIB3051-067-Q1-K1-A1
gtgaatttgaaattgaattagctggggcatgtgggtatggctctttggcactagacataagtggtgggcaccttgcagctggtgtggcttctctcttcaaagatggagcagtttgtggtgcctgctttcagataagatgcaagaacccaactctatgcagcaaagaaggtaccagagtggtattgactgatcttaatcacaataatcaaactgattttgtgctaagcagcagagcctttgcgggcatggctcaaaagggtatgggcaaacaaatattgaagcttggcattgctgacattgaatacaagagagtaccttgtgaatacaaaaaacagaatttagccgttcgtgttgaagaatcaagcaagaagccagaatacttagcaattaaatttttgtatcaagggggacaaacggagatagtagcccgtgatgtggctcaagttgngtcttcaa

SEQ ID NO: 25395 - DNA, 405 bp, Glycine max
  Clone ID: LIB3051-059-Q1-K2-B10
atgaatcattagttagggtttattctccaagaaaagcaatgagtgcgtccaggttcatcaagtgtgtcactgtgggtgacggtgccgttggcaagacttgcatgctcatctcctacaccagcaacacttttcctacggactacgtgccaactgtctttgacaatttcagtgcaaatgtagttgtggatggaagcactgtgaatcttgggttgcgggatactgctggccaagaagattacaatagattaagacccttaagctatcgtggagcatatgtattcctgcttgctttctctctcatatgcagggctagctatgaaaatgttgccaagaaatggattcctgagttgaggcattatgctcctggtgttccaattattcttgttggaacataacttgatcttc

SEQ ID NO: 25396 - DNA, 391 bp, Glycine max
  Clone ID: LIB3051-001-Q1-E1-E8
ccaaaccagggacccaaaacattgaggtagaacaactgaagaaccaacaagaggggtattgagattgagattcaagtaatggggaagagcaaggttcttgtggtggggggaactgggtacatagggaggaggatagtgagggcaagcctggcactgggccatgagacctatgtggttcagaggccagagttgagcctccagatagagaagctgcagaggctcctctccttcaagaagcaaggtgctcatctcattgaggcctctttcaatgatcacaagagccttgttgatgctgtgaagcacgttgatgttgtcatcagtgccatctctggtgttcacatcaggagccacagcatcactctgcaactcaaacttgttgaggccatcaaag

SEQ ID NO: 25397 - DNA, 407 bp, Glycine max
  Clone ID: LIB3051-018-Q1-E1-A12
agaggaagggtagcatttgaggacatgatggctgtaaggaaagcactagaggaagctaatatccctttcacttagatctccgcaaacgctctttgctggatactttgctggcagcctctctcagatggggtcctttgtgccaccaacggacaaggtgcatctctttggagatggcacactcatagctatttttctggatgaagatgatgttgcaacatatacaatcaaggcaatagatgatccacgatcccttaacataacattgtacctaaagcctccagacaatattatctctcaagcatagcttattggaatttgggagagacttattggaaaggaactagagaagacatacatacctccagaacgctttctgacaacactgaaaaggttggattataaacttc

SEQ ID NO: 25398 - DNA, 436 bp, Glycine max
  Clone ID: LIB3051-026-Q1-K1-C6
caatgaactaaaatgcgctattgaccacattttggatgcccagagaaaaggcgagatcaacgaagacaacgtcctttacattgttgaaaacattaatgtcgctgcaattgagacaactctatggtcgattgaatggggcattgctgagcttgtgaaccacccagagatccagcagaaggtgagggatgaaattgatagagttcttgaagcagggcaccaagtgactgagccagacatccaaaagctgccataccttcaagcagttgtgaaggaaactcttcggcttcgaatggcaatccctttccttgtcccacacatgaacctccacgatgcgaagcttggtggctatgacatcccagcagagagcaagatattggtgaatgcatggtggctggccaacaaccctgcacactggaagaagccagaggagttccgg

SEQ ID NO: 25399 - DNA, 432 bp, Glycine max
  Clone ID: LIB3051-101-Q1-K1-G7
tgattcgtccacgacggagcagaaagcgccgccgccgaggcaatcaccggcggtggcgaggccgcagcaatggctgccgatgcagtaccctgcggcggcgatggtaatgccgcaccacatgttgccgcctcagcattacgcgccgccgccctacgtgcccttccaccaccaccaccaccatcaccagtacgcggcgccgcacgtgccgaaccaacatcagcagcagcagcagcatcaccaccatcagaacggatccggcggcgagaacaaaaccatctggatcggcgatttgcatcactggatggacgaaaactatctccatcgctgtttcgcttccaccggcgagatttcctccatcaaggttattcgcaataagcaaactggcttatcagagggttatggatttgtggagttctattcacatgctacagc

SEQ ID NO: 25400 - DNA, 446 bp, Glycine max
  Clone ID: LIB3051-116-Q1-K1-D4
cccacgcgtccgcccacgcgtccggaaattgggcgtgtgggagttgttgaatcgggaagcagaaaaaatgagaatccatcacatagcatgcctccaagacaattattcctatctgatcgtagacgagagcacgaaggaagccgcggcggtggacccggtcgaaccggagaaggttcttgaagttgccagctcgcacggcctcactctcaaattcgtcctcaccacccaccatcactgggatcatgctggtggaaacgacaagataaagcagctggtgccaggaatcaaagtctatggtggttccattgaaaacgtcaagggttgcactgacaaagttgaaaacggtgataaggtctctcttggagctgaaatcactatattggcccttcacactccttgccacacacaaggtcatataagttactatgttactggcaaagaggatg

SEQ ID NO: 25401 - DNA, 364 bp, Glycine max
  Clone ID: LIB3051-044-Q1-K1-G8
ctctctctctctctctctctctcttcacgttcgatctttcgcttctgaatctccaacgatggtgctcgaggcgactatgatctgtattgacaattcggaatggatgcgtaacggggattactctccttctcgatttcaagcccaaacagacgccgtcaatcttatttgcggtgctaaaacccagtctaatccagaaaatacggtgggagttctcacgatggcggggaagggcgttcgtgttttggtgacccctaccagtgatctgggcaagatcttagcttgcatgcatggactagaaataggcggtgagatgaatctagctgctggcattcaggttgcacaattggctcttaagcatcggcag

SEQ ID NO: 25402 - DNA, 405 bp, Glycine max
  unsure (1)..(405): unsure at all n locations
  Clone ID: LIB3051-010-Q1-E1-E7
tttttgtattgtttctatttttatctttattttgttttggactaaaatttggtaaaacttagtttacattgcacactgtattgtgaaaacactcataccgctagatcttaaattttgggattctgctaggtgtggacattgcaaaagtcttgctcctgtaagtatatctttgaggttccttgttatcaatttaaggttgggacctttaattttcataaaaccaatattgtggaacctgactatgctcttttttccctccagacttacgagaaagttgccacagcatttaaattggaggaagatgtagtaattgcaaatctggatgctgataaatatanggatctggctgaaaagtacgacgtgagtggatttcctaccttgaagttcttcccaaagggcaacaaa

SEQ ID NO: 25403 - DNA, 394 bp, Glycine max
  Clone ID: LIB3051-026-Q1-K1-G3
gaagaagaagatggagaagtatcagatctggagcaggagaatagcgttggcagcgtttgcgtttgctctgctgttccaatcggcctcagcagacgacgtcgttgtgctctctgaagataacttcgagaaggaagttggtcaggacagaggagctctcgttgagttctatgctccttggtgtggacactgcaaaaagcttgctccagaatatgaaaagcttggtagcagcttcaagaaagccaaatctgttttaattggcaaggttgactgtgatgagcataagagtttgtgcagcaagtatggagtctctgggtacccaacatttcaatggtttccaaaaaggatctcttgaaacccaaaaagtatgaagggccacgcactgctgaatcacttg

SEQ ID NO: 25404 - DNA, 463 bp, Glycine max
  Clone ID: LIB3051-071-Q1-K1-C7
gaagtatcagatctggagcaggagaatagcgttggcagcgtttgcgtttgctctgctgttcgaatcggcctcagcagacgacgtcgttgtgctctctgaagataacttcgagaaggaagttggtcaggacagaggagctctcgttgagttctatgctccttggtgtggacactgcaaaaagcttgctccagaatatgaaaagcttggtagcagcttcaagaaagccaaatctgttttaattggcaaggttgactgtgatgagcataagagtttgtgcagcaagtatggagtctctgggtacccaacaattcagtggtttccaaaaggatctcttgaagccaaaaagtatgaagggccacgcactgctgaatcacttgttgagtttgtgaatacggaaggaggaacgaatgtaaagattgctacagtttcctttcatgtagtggtgcttacacctgaaaatttt

SEQ ID NO: 25405 - DNA, 400 bp, Glycine max
  unsure (1)..(400): unsure at all n locations
  Clone ID: LIB3051-082-Q1-K1-C10
agaagacgaacatggagatgtatcagatctggagcatgagaatagcgttgagagcgtgcgcggttgttctgctctggctatcggcctcagcagacgacgtcgttgtgctctctgaagataacttcgagaacgaagttggtcatgacagatgagctctcgttgagttctatgctccttggtgtggacactgcaaaaagcttgctccagaatatgaaaagcttggtagcagcttcaataaagccaaatctgttttaatcggcaaggttgactgtgatgagcacaagagtttgtgcagcaaatatggagtctctgggtacccaacaattcagtggtttccaaaaggatctcttgaacccaaaaagtatgaanggtcacgcactgctgattcactagctgagtt

SEQ ID NO: 25406 - DNA, 394 bp, Glycine max
  Clone ID: LIB3051-092-Q1-K1-G6
cccacgcgtccggatgtatcagatctggagcaggagaatagcgttgggagcgttcgcgtgtgttctgcttttcctatcggcctcagcagacgacgtcgttgtgctctctgaagataacttcgagaaggaagttggtcaggacagaggagctctcgttgagttctatgctccttggtgtggacactgcaaaaagcttgctccagaatatgaaaagcttggtagcagcttcaagaaagccaaatctgttttaatcggcaaggttgactgtgatgagcacaagagtttgtgcagcaaatatggagtctctgggtacccaacaattcagtggtttccaaaaggatctcttgaacccaaaaagtatgaagggccacgcactgctgattcacttgctgag

SEQ ID NO: 25407 - DNA, 435 bp, Glycine max
  Clone ID: LIB3051-102-Q1-K1-G7
caaatatggagtctctgggtacccaacaattcagtggtttccaaaaggatctctggaaccgaaaaagtatgaaggggcgcgcactgctgattcacttgctgagtttgtaaatacggaaggaggaacaaatgtgaagattgctacagctccttccaatgtagtggtgcttacatctgaaaattttaatgaggttgtcttagatgaaaccaaagatgtcttggttgagttttatgcaccctggtgtggacattgcaaaagtcttgctcctacttacgagaaagttgccacagcatttaaattggaggaagatgtagtaattgcaaatctggatgctgataaatataaggatctggctgaaaagtatgatgtgagtggatttcctaccttgaagttcttcccaaagggcaacaaagctggtgaagagtacggaggtgg

SEQ ID NO: 25408 - DNA, 348 bp, Glycine max
  Clone ID: LIB3051-106-Q1-K1-F1
cccacgcgtccgcccacgcgtccgcccacgcgtccgcagaggagctctcgttgagttctatgctccttggtgtggacactgcaaaaagcttgctccagaatatgaaaagcttggtagcagcttcaagaaagccaaatctgttttaatcggcaaggttgactgtgatgagcacaagaattttgtgcagcaaatatggagtctctgggtacccaacaattcagtggtttccaaaaggatctcttgaacccaaaaagtatgaagggccacgcactgctgattcacttgctgagtttgtaaatacggaaggaggtactgcttgagcttttgaaacctttgtgcttaatttct

SEQ ID NO: 25409 - DNA, 424 bp, Glycine max
  Clone ID: LIB3051-107-Q1-K1-D10
gaagatggagatgtatcagatctggagcaggagaatagcgttgggagcgttcgcgtttggtcggcttttcctatcggcctcagcagacgacgtcgttgtgctctctgaagataacttcgagaaggaagttggtcaggacagaggagctctcgttgagttctatgctccttggtgtggacactgcaaaaagcttgctccagaatatgaaaagcttggtagcagcttcaagaaagccaaatctgttttaatcggcaaggttgactgtgatgagcacaagagtttgtgcagcaaatatggagtctctgggtacccaacaattcagtggtttccaaaaggatctcttgaacccaaaaagtatgaaaggccacgcactgctgattcacttgctgaatttgtaaatacggaatgaggaacaaatgtgaag

SEQ ID NO: 25410 - DNA, 390 bp, Glycine max
  Clone ID: LIB3051-114-Q1-K1-C3
cccacgcgtccggtacggaggtggaagagacttggatgactttgtggcttttatcaatgggaaagctggaacaagtcgagatgtaaaaggacaacttacttcccaagctggtatagtagaaagcttggatgtcttggttaaggagtttgtagctgccagcgatgaagagaagaaattcgtgtttacccgaatggaagaggaagttgagaagctgaagggttctgcctcaaggcacgggaagatttacttgaaagctgccaagaattacttggaaaaaggttctgattatgctaagaacgaaatccagcgcctacagcgcatacttgacaagtccattagtcctgccaaagccgacgagttaactctaaaggaaaatatcttgtcgacata

SEQ ID NO: 25411 - DNA, 327 bp, Glycine max
  Clone ID: LIB3051-081-Q1-K1-F6
cccacgcgtccgcccacgcgtccgtttttccctttaataggcaaggagattcatatatcatggatgggacaaaatggtggacaagtggtgctatggatccaagatgtagaattctgatagtcatggggaaaactgacttcaatgcagtgaagcataaacagcaatctatgatcttagtggatgtccagactcctggcgttcacataaagagaccattgacagtgtttggctttgatgatgcaccgcatgggcatgcagaagtaacatttgaaaatgtttgtgtgcccgcaaaaaacatcatacttggcgaaggacgtggatttgaga

SEQ ID NO: 25412 - DNA, 435 bp, Glycine max
  Clone ID: LIB3051-063-Q1-K1-E7
ttccattctctctctatctgttcaatcttctctcccttctacttctagggtttagcttcggcatcggacatgtcttcttcaactcatcacagttgactttactagcgaattcaatcaggcttgagaaggtatcctgatgtttcttgttcaccatcatatccatgatggaatactgtaaagatgtcctcagctatcttgattctgatacatctattaagatactcatgtctctggatgatctggctgaccttgttcgggccacctgtgtctcgcgctcttggagagacattgtgattgcaaatggtctttgcaagcagctgtgcttgagaatgtttcctcagttatctagagttgcttttgttgttgaactgaatcaaaatggagcgaatgaacatgcagaggttggatctagctattctatggaatggctatctc

SEQ ID NO: 25413 - DNA, 451 bp, Glycine max
  Clone ID: LIB3051-086-Q1-K1-D5
cccacgcgtccggtgttggagaatgaaaactgtaacagagccaaatgaaaccgagtcagatgggagcgagttgactcgcgagtgcctcatcaacatcctctctcgactcagcgtcgaggatcgatggcgcggcaccatgctcgtttgcaagtcatggttcagcgtcttcaaggaaccctctcttcacttcgtcttcaacctcgaccctcaattcgactcgcccaccgaatcaactcgctggtggacccccgagttcgaggccaagatcgataacatgcttcgatctgtcgtcgaatgggcccaatcctctctcacccatatacgcattcgccactgttctgatcgttctctcgccctcgtcgcccaaagttgcccaaaccttgaggtgttgtttatcagaagctgtcctcgtgttaccgatgattctatctctaggatagctttgagttgt

SEQ ID NO: 25414 - DNA, 446 bp, Glycine max
  Clone ID: LIB3051-110-Q1-K1-G5
ctctctctcgatctgggtactaaccctaacccgcttcgaaccgtggcttcctcaggctcgcagaacctctctcgaagaaaaccttcttcttcttcgtcttcgtcttctcaacaaacacccgggtcgacccggatcgtttaccgagaatctcggatcccatcggaatccgatttcccgatctggcagcagaactggttcatcgcattgctcttcgtcatggctctcggattcttcgccctcgccattttcctcttcctcactctcgactctgacatcgctccttcttccaccgcctccgcctccgcctccgccgcttcctccgaaggcgtcgaggtgcaggttacttacggcacggttctgaagcttatgcacgagaagaccaaatttcggttgcattctcatgacgtgccctacggttctggcagtggacaacaatcggttactgg

SEQ ID NO: 25415 - DNA, 468 bp, Glycine max
  Clone ID: LIB3051-085-Q1-K1-C6
ggagaaagggtgggtattgcttcacacaaacacaacagtgtctgctgcacctggcgaatggtggcgctatcaacatggtttcgctacattgcccacaagctcgaatactccttctccctcagctggaagaactacaaaggaggtcaaattacagacagagaggtacgtgatgttgtttggaaaaacttctttcaaggaaagctgacgtacttgcactggaataaaggagaggagatggcccctactattgatggaaaagcagtaactcttgttcggaaattaccagttgtagacccaacgtaatttcacacactccttttgtgcaaatctattgactgttattgttagttgtttggcgtgtttttgtaggagatgttgcggttgtgaaggaccctgagaagccagataactacctactcagaagattaactgcaattgaaggctatgaaatgggttctacttgatgaa

SEQ ID NO: 25416 - DNA, 434 bp, Glycine max
  Clone ID: LIB3051-041-Q1-K1-B3
cccacgcgtccgtggagctgaatatggctgtggaagctctagagattgggctgccaagggtccaatgctactgggagtcaaagctgtgatagccaagagtttcgagagaattcatcgtagtaacttggtaggaatgggtatcattcctctttgcttcaaacccggtgaggatgcggacacattgggattaactggtcatgaacgttattcaattgacctaccaagtaaaatcagtgagattaggcctggccaagatgtgacagtcacaaccgataatggaaaatctttcacctgcacagtacgctttgacactgaagtcgaacttgattacttcaaccatggaggcatacttccatatgtcataaggaacctcattaagcagtgaaggccattgtcgatggaaaaattccaggtcattgtcccaatatgctttt

SEQ ID NO: 25417 - DNA, 431 bp, Glycine max
  Clone ID: LIB3051-065-Q1-K1-D8
ggtccaatgctactgggagtcaaagctgtgatagccaagagtttcgagagaattcatcgcaggaacttggtaggaatgggtatcattcctctttgcttcaaacccggtgaggatgcggacacattgggattaactggtcatgaacgttatacaattgaactaccaagtattatcaatgagattaggcctggccaagatgtgacagtcacaaccgataatggaaaatctttcacttgcacagcacgctttgacactgaagtcgaacttgcttacttcaaccacggaggcatacttccatatgtcataaggaacctcattaagcagtgaagccatagccgattgaaaattccaaggtcattgttcccatatgcttttaaagttgtaaaatgtgagaataattttctgagagataggaaaagatcccttttttt

SEQ ID NO: 25418 - DNA, 379 bp, Glycine max
  unsure (1)..(379): unsure at all n locations
  Clone ID: LIB3051-104-Q1-K1-E12
agaacatcaacgactacaactaccaaaccttgaaggacaacgtggacatgttggagctgagccaattaggtctgactttctccgacgagaatggtaacctccctacctgcggcacggagagcacctgcatctggcaattcaacttccgcgagttcaacatcagcgaagacatcttcgcgagcgactcgatcgagttgctgcgccagtgcgggatcgacttcaagaagaacagcgagaaagggatcgacgtgaaccggttcggggagctcctcatgtcctncgggatcgtcgtgaacgacgccgtgcactgggttaccttccacagcgggtacgatttcgggtaccctctgaagctgttgacatgccggagcttgccgga

SEQ ID NO: 25419 - DNA, 437 bp, Glycine max
  Clone ID: LIB3051-031-Q1-K1-E4
gaagaattgaattcgaaaaatcgtagcgtagcgttggttgcgattgaaacggtacggtgggaagaggaaaattcaagagcaagcccaccggtcgccgccagttctccaccccggaagatatgcttgctggaacctctaaccgtcctcgaacttttagacagaaagaagctgagcatgaagaggagcctgaggaagtatctggggatgaatctggagaagaatcagaagaggaaacttctaagaaaaaaggaacacaaggagttattgagattgaaaatcctaacttggtaaagccaaagagcttgaaagctagagatgttgatgttggaaaaacaacagaactttcaaggcgtgaaagagaggagatagagaaacagagagcccatgagcgctatatgaggctgcaagagcaaggaaaaacagaacaagcaaagaaa

SEQ ID NO: 25420 - DNA, 362 bp, Glycine max
  Clone ID: LIB3051-054-Q1-K2-D3
ttctattcctcactcaagggatgcgtcggaacagccctgcatactacagtcctccgcggcgaggatacggcggtggtggccgaggaggaggaggaggaggaggaggaggagggtccggcaggagggggttcggtggaggcaggcgcagggacagcaatgggagcctcttggttcgtaacattcccctcgattgcagacccgaggagcttcgcgtccctttcgagcgatttggacctgttcgtgacgtttacatacccaaggattattactctggagaacctcgaggctttgcctttgtgcaatttgtggatccttatgatgcctcagaggcacaataccatatgaacagacagatttttgct

SEQ ID NO: 25421 - DNA, 370 bp, Glycine max
  Clone ID: LIB3051-026-Q1-K1-G10
cccacgcgtccggaagaacgaatcgaataaagaaagatcatggcgatggcaaacttggctcgacggaagggttacgccgtcgttttgtcgtcgaggtcgtcgctttgtctgacaaggtggagggggttcgcgtccggatctgacgaaaacgacgtcgtggtcatcggcggcggtcccggcggctacgtggcggccattaaagcggcgcagctgggtctgaaaaccacttgcatcgaaaaacgtggcactctcggcggtacctgcctcaacgtcggatgcatcccttccaaggcacttttgcattcttcccacatgtatcatgaggctaaacatgcatttgccaaccatggggtcaagttttcatctgtcg

SEQ ID NO: 25422 - DNA, 439 bp, Glycine max
  Clone ID: LIB3051-030-Q1-K1-H2
ctcttctcttcgctcctgcacttgttgtttctttgcccttcatggcatctcaagctagccttgtccttcaaaagcagctcaaagatctttgcaaaaaccccgtcgacggcttctctgccggtttggtcgatgaaaccaacatttttgaatggagtgtcaccataattgggccgcccgatactctctacgaggggggatttttcaatgctattatgagtttcccatccaattacccaaatagtccaccttcagtgaagttcacctcagagatatggcaccccaatgtatatcctgatggccgggtttgcatatcaattcttcatcctcctggtgaggatccaaatggttatgagcttgcaagtgagcgctggacacctgttcatactgtagagagtatagtattgagtatcatatcaatgctttccagccctaatgatga

SEQ ID NO: 25423 - DNA, 431 bp, Glycine max
  Clone ID: LIB3051-098-Q1-K1-C12
acccacgcgtccgccctcgcgtccgctcgcttacaaagccggttcctccatctacacgcgcttcatcgcgctgggcgggttcgaaaacggtgtcgttcccgaaaccgttctcgccctaacaccccaacagcttcgccagattggggtttctgggcggaaggcgagttaccttcatgatttggcgaggaagtatcagaacgggatactctccgattccgccattgtgaacatggatgataagtcgctctttaccatgctcaccatggtcaatggcattggctcttggtctgttcacatgttcatgattttctcactccacagacccgatgttctccccatcaatgaccttggcgtcaggaaaggagttcagcttctctacaaccttcaggacttaccccggcccttgcagatggaccagttgtgtgacaagt

SEQ ID NO: 25424 - DNA, 226 bp, Glycine max
  Clone ID: LIB3051-006-Q1-E1-F3
gcgtccaaaaggaaatggctgaagcacaactacgagaccagcatggcaaccctgtcccactcaccgatcaatacggtaatccggttatcttaactgacgagcgcggtaatcccgtccaactcactggtgtcgctaccaccgctaccggcacagcaggttctgggtttgggtcctatggtatcggtgcttaccgtggtggtgcaagtgcaaccaccgttgcagatct

SEQ ID NO: 25425 - DNA, 344 bp, Glycine max
  Clone ID: LIB3051-006-Q1-K1-F3
gaaggaaatggctgaagcacaactacgagaccagcatggcaaccctgtcccactcaccgatcaatacggtaatccggttatcttaactgacgagcgcggtaatcccgtccaactcactggtgtcgctaccaccgctaccggcacagcaggttctgggtttgggtcctatggtaccggtgcttacggtggtggtgcaagtgcaaccaccgttgcagatcttttggcaacccaaccaaggagtggcagggaggctatagagcttcgtcgttcctccagttcaagctctagctcgttttggatgaatgttttatagtctgaggatgatgggcaagggtggaggagga

SEQ ID NO: 25426 - DNA, 351 bp, Glycine max
  Clone ID: LIB3051-026-Q1-K1-C1
ggaaatggctgaagcacaactacgagaccagcatggcaaccctgtcccactcaccgatcaatacggtaatccggttatcttaactgacgagcgcggtaatcccgtccaactcactggtgtcgctaccaccgctaccggcacagcaaggtctgggtttgggtcctatggtaccggtgcttacggtggtggtgcaagtgcaaccaccgttgcagatcttttggcaacccaaccaaggagtggcagggaggctagagagcttcgtcgttcctccagttcaagctctagctcgtctgaggatgatgggcaaggtgggaggaggaagaagggagtgaagggttaaattaaaggaga

SEQ ID NO: 25427 - DNA, 418 bp, Glycine max
  Clone ID: LIB3051-034-Q1-K1-B12
ggaaatggctgaagcacaactacgagaccagcatggcaaccctgtcccactcaccgatgaatacggtaatccggttatcttaactgacgagcgcggtaatcccgtccaactcactggtgtcgctaccaccgctaccggcacagcaggttctgggtttgggtcctatggtaccggtgcttacggtggtggtgcaagtgcaaccaccgttgcagatcttttggcaacccaaccaaggagtggcagggaggctagagagcttcgtcgttcctccagttcaagctctagctcgtctgaggatgatgggcaaggtgggaggaggaagaaaggagtgaaggataaaataaaagagaaactaccaggggtaggaggagggaataataataaggagcatgcacacacaacaactgctccaaccacc

SEQ ID NO: 25428 - DNA, 361 bp, Glycine max
  Clone ID: LIB3051-035-Q1-K1-H1
ctgaagcacaactacgagaccagcatggcaaccctgtcccactcaccgatcaatacggtaatccggttatcttaactgacgagcgcggtaatcccgtccaactcactggtgtcgctaccaccgctaccggcacagcaggttctgggtttgggtcctatggtaccggtgcttactgtggtggtgcaagtgcaaccaccgttgcagatcttttggcatcccaaccaaggagtggcatggaggctagagagcttcgtcgttcctccagttcaagctctagctcgtctgaagatgatgggcaaggtgggaggaggaagaaaggagtgaaggattaaatatatgagaactaccaagggtaggagga

SEQ ID NO: 25429 - DNA, 300 bp, Glycine max
  unsure (1)..(300): unsure at all n locations
  Clone ID: LIB3051-054-Q1-K2-H12
ggaaatggctgaagcacaactacgagaccagcatggcaaccctgtcccactcaccgatcgatacggtaatccggttatcttaactgacgagcgcggtaatcccgtncaactcaatgggggcggttccaacggttcccggaccagaaggtcctgggttggggtcctatggtcccggtgcttacggtggtggtgcaagtgcaaccaccgttgcagatcttttggcaacccaaccaaggagtggcagggaggctagagagcttcgtcgttcctccagttcaagctctagctcgtctgaggata

SEQ ID NO: 25430 - DNA, 416 bp, Glycine max
  Clone ID: LIB3051-016-Q1-E1-H10
gacaacgcgtcagctaactagctgagcagacggaggagaactcgactgaagctgcctctgcgacgccgtttcgattcagcctcagacatttccgttgcagtcatggtgcaagaaaatggcaagaggaagaaaccaaacattctggtgactggcacaccggggacaggaaagacaactgtgtgcactgctctagctgaagccacccagctctgccacatcaatgtcggagaattagtcaaagaaaagaacttgcatgatggatgggatgatgagcttgattgttaccttcttaatgaagacttggtttgtgatgaacttgaggatgttatggaagaggggggaaacattgtggactaccatggctgtgatttctttcctgagcgttggtttgattgcgtggttgtacttcaaactga

SEQ ID NO: 25431 - DNA, 333 bp, Glycine max
  Clone ID: LIB3051-061-Q1-K1-H1
tcatggtgcgggaaaatggcaagaggaagaaaccaaacattctggtgactggcacaccggggacaggaaagacaactgtgtgcactgctctagctgaagccacccagctctgccacatcaatgtcggagaattagtcaaagaaaagaacttgcatgatggatgggatgatgagcttgattgttaccttcttaatgaagacttggtttgtgatgaacttgaggatgttatggaagaggggggaaacattgtggactaccatggctgtgatttctttcctgagcgttggtttgattgcgtggttgtacttcaaactgataacaccattttgtatg

SEQ ID NO: 25432 - DNA, 375 bp, Glycine max
  Clone ID: LIB3051-039-Q1-K1-A1
gacgtgagagagattgagaagtgtgctcatagcggatcaagaaattctccgctatatgtacacactttaactgagtttgtgaagacatataattactagctactaaaagatggccacagttggaaggaacgcagcatcttcctagctgtttcttaacttgatcatgtattctattgacctaggcttagctagtatggtgcctgaacaaggacatcaatggccaaacttaccaccctagctttgctggaaatggtgcatctatgtattgctaaatcttctacatactagcatccgatgagggcatagtgatcaagcttttgggtgcgcatcacatgatgacatggacgaatgacagtttagcatctgcaggagcca

SEQ ID NO: 25433 - DNA, 437 bp, Glycine max
  Clone ID: LIB3051-092-Q1-K1-B3
gagagattgccaagtcaaaatcggtgcacgaaattctccactttatctaaggcaattcggggagtttgtgaagacagataatcactagctactcaaaaatggctcacagtaggaaggaacgttgcagctcctttgatgttacttaactagatcatctattttattgttcttggcttcgctagttgatgcctcaacacgatcatctatggccaaacttaccaccctagtttaggttgaaatagtgcaaccatgtctttcttaaccttatctatactaacagctgttctgggcatcatgtacaaacttgtgggtcggaatcacatgacgacattgaagagtgacagtttagcatttgctggagccacatcaatggatgcttgttcaggcacagctctagcattatggatggcttagaagcaaatacacttatgatggca

SEQ ID NO: 25434 - DNA, 425 bp, Glycine max
  Clone ID: LIB3051-107-Q1-K1-G12
gagattgtgaagtagaaatcggtgcaagaaattctccactttatctaaaaaaattcggtgagggtgtgaagacaaaaaatcactagctactcaaaaatggccacagtaggaaggaacgttgcagctcctttgctgtttcttaacttgatcatgtattttattgttcttggctttgctagttggtgcctcaacaggttcatcaatggccaaacttaccaccctagttttggtggaaatggtgcaaccatgtttttcttaaccttctccatactagcagctgttctgggcatcgtgtccaaacttttgggtgggaatcacatgaggacatggaggagtgacagtttagcatctgcaggagccacatcaatggttgcttgggcagtcacagctctagcatttgggttggcttgcaagcaaatacactt

SEQ ID NO: 25435 - DNA, 446 bp, Glycine max
  unsure (1)..(446): unsure at all n locations
  Clone ID: LIB3051-053-Q1-K2-B5
ctttcttctaaaccctatggccgacgaagccaaagccaaaggcaacgcagccttctcctgcggggactatcctgccgccatccaccacttctccgatgccatcgccctggctccctccaaccatgtcctctattccaaccgatccgccgcatacgcctccctcaaaaactacgcagatgcattagcggatgccaaaaagacagttgaactcaagcccgactggtccaagggttacagccgtctcggtgccgcgcatcttggcctttcccaatacgatgatgctattttggcttacaaaaggggtctcgaaatcgaccctcacaacgagccccttaagtctggtttggcagatgcgcagaaggccttggccgcggcctncaggcctcgcccctcggcctctaaccccttcggtgatgctttctctgggcctgagatgtgggcccgtc

SEQ ID NO: 25436 - DNA, 334 bp, Glycine max
  Clone ID: LIB3051-072-Q1-K1-A10
tctaaaccctatggccgacgaagccaaagccaaaggcaacgcagccttctcctccggggacgatcctgccgccatccaccacttctccgatgccatcgccctggctccctccaaccatgtcctctattccaaccgatccgccgcatacgccttcctcaaaaactacgcagatgcattagcggatgccaaaaagacagttgaactcaagcccgactggtccaagggttacagccgtctcggtgccgcgcatcttggcctttcccaatacgatgatgctattttggcttacaaaaggggtctcgaaatcgaccctcacaacgagccccttaagtct

SEQ ID NO: 25437 - DNA, 481 bp, Glycine max
  Clone ID: LIB3051-080-Q1-K1-D1
cccacgcgtccgaacaatggcgtctctctctcacctcaacaaactcctctgcatgcccccgcgcgactctggaccctctatttcgccaccacgcagcagcgtcggaatttggaccaaacctgtcggaaggccgaggctactggtgcgtgtccgagcggtcacgagcgacgacgagtgggggccggagaaggaggaggcgtacggcggcggcgtagcggtggaggagaaaccgacgaagtcggagacggagacggagaagctgaagaaggccttggtggattcggtttatggcaccgatcgtggactgaaagcaacgagcgaaacgagagcggagatcgttgaactcatcacacagctcgaggccaagaaccctaaccctgttcccaacgacgccttgactcttcttaacggaaaatggattctcgcgtatacatactttgcaagtttattcccattggtgacaagtgggacactaccattg

SEQ ID NO: 25438 - DNA, 397 bp, Glycine max
  Clone ID: LIB3051-018-Q1-E1-H5
agcccacgcgtccgcccacgcgtccgcccacgcgtccgcgattatccgaaatacctgctaagcagttggaaaatgataaatctgagcagaaaaaaattgttattagacctaggcctaataaaaacagtttgaatgatgctaacggagttgggaggaaaggaaaccctttaagaagtgtggaagaaaggaaggaggaatatgaccgggcacgggcacgtatctttagtagccctagaagctctgaatcaggtgatacctcatccgtggttccaatggatgggagatattcttctactagcaaggatgagaatgaaactagcaagaaccccatggctgattcagaaagatatatcagtaccagggatagttgttcgactcgagttgccatactcagaga

SEQ ID NO: 25439 - DNA, 438 bp, Glycine max
  Clone ID: LIB3051-080-Q1-K1-A1
gttgggttgagttgggtttggattggatttctaatctaatctatacctttctttttcctattgttttaaggcacaaatccttctgccttctctcttctttcttcttcttctcctgacccttattattattccttgcccttaccctttaggcaagggaaggaagaaagaataactatattattatctttattgtaatctatctttttattataattataattataattattgttgttattattccttaaatatggattcgccgtgtctctccaacgattcggtttctggattcaaagacaaggagtcaatggttgacccctttttggtcgaagctctccagaaccctcgtcaccggcttaccattttgaggatggagctggagatccaaaagttttgaataatgctgatcagctgcatttgagtttcatcaattccctt

SEQ ID NO: 25440 - DNA, 439 bp, Glycine max
  Clone ID: LIB3051-101-Q1-K1-B8
gaagttgttgggttgagttggattggatttctaatctaatctatacctttcttttttcgtatgcttttaaggcacaaacccttctttcttccctcttctttcttcttcttattgttattccttgcctttaccctttagggaaggaagaaggaacaactatactactattatccttattattgttattattgtaattaatctttttattatagttattgttgttgttattattcctcaaatatggattcgttgtgcctctccaacgactcagttgtttctggattcaaagacaaggagtcaatggttgacccctttttggtcgaggctctccagaaccctcgtcaccggctcaccattttgaggatggaactggacatccagaagtttttgaataatgctgatcagcagcattttgagtttcaacatttcccttcttcct

SEQ ID NO: 25441 - DNA, 417 bp, Glycine max
  Clone ID: LIB3051-115-Q1-K1-D9
tggagatccagaagttctcgaataatgctgatcagctgcattttgagtttcatcatttgccttcttcctatctccgactggctgcacaccgtgttgctcaacactacaacatgcaaacaatggttcaagataatggcttagatggccagggaagtaaaattctggttaggaagttacctgaaagcaagtaccctgtagttcgattatccgaaatacctgctaatcagttggaaaatgataaatctgagcagaaaaaaattgttattagacctaggcctaatataaacagtttgaatgatgctaacggagttgggaggaaaggaaaccctttaagaagtgtggaagaaaggaaagaggaatatgaccgtgcacgggcacgtatctttagtagccctagaagctctgaatcacgtgata

SEQ ID NO: 25442 - DNA, 397 bp, Glycine max
  Clone ID: LIB3051-098-Q1-K1-B12
ccggtaaagtggacgggagaggccggttgccgcttccgccatttacttcctcaacctccgcggcgacgttctcatcaaccgcctctatcgcgacgatgtcgggggaaatatggtggatgcttttaggacgcatattatgcaaacgaaggagcttggtacttgcccagtgaggcagattggtggatgctctttcttttacatgaggatcagtaatgtctacattgtcattgttgtcagcaacaacgccaatgtcgcttgcgctttcaagtttgatgttgaggctgttgcattgatccgatcatactatggtggagcttttgacgaggatgcaattcgcaataaattttgtactcatttatgagcccctagatggaactatgggacttggttacccaca

SEQ ID NO: 25443 - DNA, 473 bp, Glycine max
  Clone ID: LIB3051-070-Q1-K1-A12
gtgagatgggtatgtcatggctgtgctgctgagaatggctcagcctcacaatggcagcaccagcaacacttcaaaccagcaattggtactccatgactttctgggtatgaggcccgccgccgattcccccaaaaccgccgatgtcaggttaccggagccttcggcctccgcctcttccaccggaggacgcggccccttctccgccacctccgacatcgcttccgaaaaacaggtacgaaatcatctcgagggagtttcattctatggcccgaggagtgatttttctggcactgagataagcaacagattagtgtgaagcaagagatgtaattctgattccacttttatgggttcctccagagatgccttccaattggtccctgattcctttcaagactcacatttgatgaaggttctccggaatgcagctggaggagaaagggctataagcccaatgatgatgcagtgttact

SEQ ID NO: 25444 - DNA, 405 bp, Glycine max
  Clone ID: LIB3051-051-Q1-K1-G1
cccacgcgtccgcccacgcgtccggttgatttgagagcattggctaggcacactcaagggttcagtggtgctgatattacagaaatatgccagcgagcatgcaaatatgccataagagaaaacatagagaaggacattgagcgagagaggaagagtagggaaaaccctgaggccatggatgaagataccgtcgacgacgaagttgcggagatcaaggctgctcattttgaggagtcaatgaagtttgcacggaggagtgttagtgatgctgatattcgcaagtatcaagcatttgctcagaccttacagcaatcaagagggtttggaagtgaatttaggtttccagagtctggagataggactactactggatctgacccctttgcagcttctgctggtggggct

SEQ ID NO: 25445 - DNA, 392 bp, Glycine max
  unsure (1)..(392): unsure at all n locations
  Clone ID: LIB3051-085-Q1-K1-A7
ggaattcaatgaggtggatcatctgttcaagcatcggattaatagcagtgtattacatgctagtaactatatcaagcaatttccttcgcctatcatatctatcattgcanaattcatctcatttgtatcgggtggctttgctgcaattctgatcatcattgcttttctagaggagtctctgctggagggtcatatatttggtcggaacttgttctggtatgctgctgtttttggaactataactgctattagacgggcttcaattacagatgagcttctagtcatagaccccgaaggagcaatgtcaatggtagttgagcatacacattatatgcccaagagatggcggggaaaagaaagtactgaaatggtccggatggagtttgaaacct

SEQ ID NO: 25446 - DNA, 445 bp, Glycine max
  unsure (1)..(445): unsure at all n locations
  Clone ID: LIB3051-086-Q1-K1-A7
ttttcattttctaatctctctctctcccacctttcacactctgtttttcctctggctttctgaggcttctcaacacaaaatacacccttctacatggcgactgaagctgagttcgaatatgaagaggcgagtgaagctgagatcaaatatgatgaggaatacgtacagaattctcgaggcttgaagctttttgcatgccgatggcttccggcgaatggaagtccaaaagcgttaatcttcctgtgccatggctacgccatggaatgcagcatcacaatgaaaagcacaggaacaaggctcgcaaaagcgggttttgcagtgtatgggattgattatgaagggcatggaaaatcagaaagagttcctggccttgttatgaattatgattntgtcatcgacgattgctcccaacatttcactagaatttgtgaaaaagcagagaaca

SEQ ID NO: 25447 - DNA, 332 bp, Glycine max
  Clone ID: LIB3051-061-Q1-K1-G3
ggaaaaaaaaagaaggaaatgcttccgagattgttattaagtcacaagcacttcaacagcttcaaatcaatttaccccttttcaggaaactatgtattttgaaaggtgtaactccccgggagcccaagaaaaagttcaagggaactcatcaaacttattaccatgtcaaggatgtttccttccttcatcacgagcctttggttgaaatacatagagcgataagagtgcatgagagaaaaattaagaaagccgaggcaaagaaaaaccttgaacgtgctaacaggcttcgcgagaaaacacccaaaccgaagatcgctaggattattcggcag

SEQ ID NO: 25448 - DNA, 315 bp, Glycine max
  Clone ID: LIB3051-088-Q1-K1-A7
ggagagcgcctgaaaatcggaggcgtggaagtggggagaaagatgagcgaggggatgagctccatgagtttcaagctcaaggagttcttccagcctgggcccaatcaggccgacaagcttgtggaggacgctacttccgaggccctggacgagcccgaatgggccctcaatctcgatctctgcgacctcgtcaacaccgacaagctcaactgcgtcgaactcgtccgcggaatcaagaagcggatcattctcaagagccctagggttcagtacctcgcccttgtccttctcgaaaccctagtcaagaactgcgag

SEQ ID NO: 25449 - DNA, 409 bp, Glycine max
  Clone ID: LIB3051-080-Q1-K1-C2
aattccggtcgaccacgcggcggggatatcgtgtctgctggagtatatcgtgtctttgggtcagaaatagctgagcttccattgggtgctacgactgctgatcatcaaggacagggttattttcagtgcctgttatcttgtattgagacgctacttggatctttaaatgtgaaaaaccttgttctaccatctgccgatgaaactgattcaataggactggtgaatttgggtttacaaagctaccccaagatgagataaacaaatataagaaattatatcgcatgatgatatttcaagggacctcaattgtacagaatcctgtttctgaaacactctgagctactttctagctggagtttgtgtaaagtttttttgtatgccccttatgcaatatactattttcttggtt

SEQ ID NO: 25450 - DNA, 439 bp, Glycine max
  Clone ID: LIB3051-093-Q1-K1-A7
cccacgcgtccgcggggagaatgtgctcttaatgattcagactgtgtgataactattgatgacatttataaatggcttgcggctactttctttctctggtttgttctggccatttactttgacaatataatcccaaatgcatcaggtgtgaggaaatcaatattgtactttctaaatcccagttattggatgggaaaaggaggtcaaaaagtgaaagagggtggggtttgtagctgtataggttcagccccacgtcaagaacaaagtacaccagatgatgaggatgtccttgaagaagaaaacaaagtgaaacagcaactaacagaaggtcttcttgatgcaaatgttgctgttcagatacgtggccttgcaaagacatatcctggcacacgtagcattggttgctgctttaaatgtaaaagaactttaccttacaatg

SEQ ID NO: 25451 - DNA, 404 bp, Glycine max
  Clone ID: LIB3051-012-Q1-E1-C10
acccaagcgtcagaaaaaaatggatttccacggcggaggaccactccgttcccgcagttcccagtccccttctccctctcactccgcctccgcctccgccacctcctccatccagaagcgcaagctcgtgtccgaggaccacgcgcctcccttccccccctcctccttctccgccgacacccgcgacggtgccctcacctccaacgacgacctcgagagcatctccgcccgcggcgccgactccgactccgactccgaatccgaggacgccgtcgtcgacgacgacgaggacgactacgacaacgacaacgacaacgactcctccatgcgcaccttcaccgcctccaggctcagcaaccctccctccgctccccgcaacaccaagctcaagaccgataactcca

SEQ ID NO: 25452 - DNA, 369 bp, Glycine max
  Clone ID: LIB3051-014-Q1-E1-C6
acccacgcatcagcccacgcgtccgttagaattaaaaagcgtgaaggacagtgataggtttggtttggaaggaagaagaaaatgaaggccatagtgataacgaggccaggaggtcccgaagtgctccaacttgaggaagtggaagatcccctagtcggagacgacgagcttctcatcggagtccacgccacttcccttaacagagccgatacctttcagaggaaaggctcctaccctccccctaagggcgccagcccttacctcggtctcgaatgttccggaactgtcctttccctgggtaaaaacgtttccagctggaaaatcggtgatcaggtgtgtgctcttctcgccggaggcggatatgccgag

SEQ ID NO: 25453 - DNA, 374 bp, Glycine max
  Clone ID: LIB3051-019-Q1-E1-A10
aacaggattgagtctcgccgccccgagcaaaactttaccatattgagggaactggatatccggcaaaggcaggaagacgacatagctagagtagcggcagttctttccatacctcgggtttctgcgagcatcctacttcgtcactacaactggagtgttagtaaggtgcatgatgcttggtttgctgatgaagatcaagtccgaaaaacagttggtttgttggagaagccagttttccagaattctaatactagagagcttacttgtggcatctgttttgaaatgtatcctcgtgcacgggttgaatctactgcttgtggccacccttaatgctattcatgctgggcaggataatttagcacatcaattaatga

SEQ ID NO: 25454 - DNA, 348 bp, Glycine max
  Clone ID: LIB3051-019-Q1-K1-A10
accggattgagtctcgccgccccgagcaaaactttaccatattgagggaactgtataggcggcaaaggcaggaagacgacatagctagagtagcggcagttctttccatacctcgggtttctgcgagcatcctacttcgtcactacaactggagtgttagtaaggtgcatgatgcttggtttgctgatgaagatcaagtccgaaaaacagttggtttgttggagaagccagttttccagaattctaatactagagagcttacttgtggcatctgtttttaatatgtgttctactgcacgggtgggatcttctgcttgtgtgctcgcttactgctatggatgctgtgca

SEQ ID NO: 25455 - DNA, 418 bp, Glycine max
  Clone ID: LIB3051-094-Q1-K1-H3
cacgcgtccggaaagaactggtggtttttatgcttgcaatcgatatgaagcagctaaacaagggggagtgtatgatgatactgaaagaagaagggaaatggcaaagaattcgctggagagatacactcattattatgagcggtgggccagcaatcaatcttcaaggcaaaaagctcttgcagatctacagcagatgcaaactgttcatattgagaagcttagtgacatacagtgtcagcctgagtcacagcttaagttcataactgaagcctggctacaaataattgagtgtagaagagtgctgaaatggacatatgcatatgggttctatttgccggagcatgagcatgcaaaaaagcagttctttgagtacttacaaggtgaagcaaaatctggtcttgagagacttcatcaatgc

SEQ ID NO: 25456 - DNA, 442 bp, Glycine max
  Clone ID: LIB3051-016-Q1-E1-E7
tccggctcaccacgcgtcagagcagttccaggtatagttcatgtgctgaagaagggaagcatggaggctcgggaaaatgcagcagcaacacttttcagcctttcagtaatagatgaaaacaaggttacaattggatctttaggagccataccaccactagtgacactgctaagtgagggtaaccaaaggggtaagaaagatgctgcaacagcactcttcaatttgtgcatttatcagggcaacaagggaaaggcagtgagggctggcgttattcccacgctgatgcgactactgactgaacctagcgggggaatggtggatgaagcattagctattttggcaatattggctagccatcctgaagggaaggctactattagagcttcagaggcagtgccggttttagtagagtttattgggaatggctcaccaaggaacaaag

SEQ ID NO: 25457 - DNA, 436 bp, Glycine max
  Clone ID: LIB3051-047-Q1-K1-E11
gcagttccaggtatagttcatgtgctgaagaagggaagcatggaagctcgggaaaatgcagctgcggcacttttcagcctttcagttatagatgaaaacaaggttacaattgggtctttaggagccataccaccactggtgacactgctaagtgagggtagccaaaggggtaagaaagatgctgcaacagcactcttcaatttgtgcatttaccagggcaacaagggaaaggcagtgagggctggcgttattcccacactgatgcgactactgaccgaacctagcgggggaatggtggatgaagcattagctattttggcaatattggccagccatcctgaagggaaggttactattagagcttcagaggcagtgccagtgttagtagagtttattgggaatggctccccaaggaacatagagaatgctgctgctg

SEQ ID NO: 25458 - DNA, 380 bp, Glycine max
  Clone ID: LIB3051-107-Q1-K1-A7
tcggaagaagggacgcatggcagctcggtaaaatgcagctgcaacactgttcagcctttgggttatacatgaacacagggttgcacttgcgtctttaggagccataccacctctggtgacactgctaagtgagggtagccaaaggggtgagatagatgctgctactgcactcttcaatttgtgcatttaccagggcaacatgggaaaacgactgtgggctaacgttattcccacactgatgcaactactgaccgaacctagcggaggaatggtggattaagcattagctattttggcaatattggccagtcatgctgaatgaaaggttactattagagcttcagaggcagtgccagtgttactagagttcatagcgaatg

SEQ ID NO: 25459 - DNA, 415 bp, Glycine max
  Clone ID: LIB3051-015-Q1-E1-D1
gcgtcagtaacaatccgcatggttactggtgataacataaatacagctaaagctatagctaaagaatgtggtttacttacagagggtggtctagccatagaaggtccagattttcgtgacttgtctcctgagcaaatgaaggatgttataccaagaatccaggtgatggcacgatccttacctctggacaagcacagattagtaaccaatttgaggaaattgtttggtgaggttgttgctgttactggtgatggaactaatgatgctcctgcactgtgcgaggcagacattggacttgcaatgggcatagcaggaactgaggttgccaaagaaaatgccgatgtcattataatggatgataacttcacgactattgtcaatgttgtcaaatggggacgtgcagtatacataaaca

SEQ ID NO: 25460 - DNA, 383 bp, Glycine max
  Clone ID: LIB3051-023-Q1-K1-H10
cttggggaaggtttacagaaaggagtgggtgttatcaaccatggatatggactgcaggaaaccatgaaattgattttgctccagaaattggtgaaactgtacctttcaagccttatacccaccgttaccatgttccttataaagcatctcaaagtacttcacccttctggtattctatcaagagagcttcagcacacatcattgttttggcctcatattcagcgtatggaaaatatacaccacaatataaatggcttgaaaaggagctaccgaaagttaacaggacagagactccttgggtgattgtactcatgcattcaccttggtataatagctacaattatcactattatggaaggtgaaacaatgagagtcaatgtatg

SEQ ID NO: 25461 - DNA, 420 bp, Glycine max
  unsure (1)..(420): unsure at all n locations
  Clone ID: LIB3051-041-Q1-K1-F7
cccacgcgtccgcccacgcgtccgcacaatcagccccttcgtcaggaaagttgagaaggctgtagatatgccacttgacagcgatgtctttgctattcctcctggttataatgccccccagcaggttcatataacgcaaggtgacctagtggggaaagcagtgatcgtgtcatgggtgactgtggatgagccggggtcgagcgaagtgcgttactggagtgagaacagtgaccagaagaagatagttgaaggaaaacttgttacttataggttcttcaattacacatctggttttattcatcacaccaccatcagaaatttggagtacaacaccaaatactactatgaggttggacttgggaacacaacacggcagttttggtttgtgactcctnctgaaatcggtcccgatgtgccata

SEQ ID NO: 25462 - DNA, 436 bp, Glycine max
  Clone ID: LIB3051-046-Q1-K1-F10
cccacgcgtacgcccacgcgtccgcccacgcgtccggctttgttgtacgtgtgaaactgtacctttcaagccttatacccaccgttaccatgttccttataaagcatctcacagtacttaacccttctggtattctatcaagagagcttcagctcacatcattgttttggcctcatattcagcgtatggtaatgctagatgtcttttgcatgatacatatatatgtagagagcactggctgattctatgatttcagacaaacacgattctgaatgtaataattacaccttactgattacctatatgacttggaaaagatcaaatttgactgaataatttcagttcttagatctatatatatctatctgtatgtatgtatgttaccattaaatgtggaatgttaaatatcacagacaaacacttgccttaaatgatc

SEQ ID NO: 25463 - DNA, 388 bp, Glycine max
  Clone ID: LIB3051-049-Q1-K1-E1
tcgacaacaccaaatactactatgaggttggacttgggaacacaacacggcagttttggtgtgtgactcctcctgaaatcggtcccgatgtgccatatacatttggtctcataggggatcttggtcagagttttgattcaaataaaactctttctcactatgaattgaacccaagaaaaggacaaactgtactattcgttggagacctctcttatgcggataactacccaaatcatgataacattaggtgggattcttggggaaggtttacagaaaggagtgttgcttatcaaccatggatatggactgcaggaaaccatgaaattgattttgctccagaaattggtgaaactgtacctttcaagccttatacccaccgttaccatgt

SEQ ID NO: 25464 - DNA, 357 bp, Glycine max
  Clone ID: LIB3051-116-Q1-K1-A7
atcattataaagatcagacagtgccttggcataataaattcgcgagtgttgcgaccctggatcactagaatcacgggttttgagcaacatgggtgttgtggatggtctcttggcattgggtttgattctgaatgtgtgtgttgtgtgcaatggatgcacaagcagccccttcgtcaggacagctgaaaaggctgtagatatgccacttgacagctatgtctttgctattcctactggatataaagccccccagcacgttcatataacgcaaggtgacctagtggggaaatgcatgatcgtgtcatgggtgacttgggatgagccgtggtcgagcgaagtgcgttactggagtgagaa

SEQ ID NO: 25465 - DNA, 397 bp, Glycine max
  Clone ID: LIB3051-005-Q1-E1-A1
gagagagtccatggggagtcaccggagagaatcatcctgaacccaaagctcaccgctgcaatgaccgtgtcgaggacgttattcaggcttgctttgagggaaacccattcaagactgttccgggacctttcaagctcttctggcagtgcatgcgttccaaacccggtgaggaaccaacagccccatttacttatctggatttggagcctctaaagagagaaacggaacctgtgaaacctgagtagtgtcacttttacttacaaatgccttaacagctttggcactgcatggtcctttagtggtttctaaatttccctccgtgtggatttttttttttgagaaaaatatgttactaaattgtttttgttgctttgctacataaaacagacgtcctatg

SEQ ID NO: 25466 - DNA, 357 bp, Glycine max
  unsure (1)..(357): unsure at all n locations
  Clone ID: LIB3051-049-Q1-K1-H6
aagatgagtagttcatcaaggccggtgccgaggagagagagtccatggcgagtcaccgtatagaatcatcctgaacccaaagctcaccgctgcaatgaccgtgtcgaggacgttattcaggcttgctttgagggaaacccattcaagactgttccgggacctttcaagctcttctggcagtgcatgcgttccaaacccggtgaggaaccaacagccccatttacttatctggatttggagcctctaaagagagaaacggaacctgtgaaacctgagtagtgtcacttttacttacaaatgccttaacagctntggcactgcatggtcctttagtggtttctaaatttcccttcgtgt

SEQ ID NO: 25467 - DNA, 422 bp, Glycine max
  Clone ID: LIB3051-014-Q1-E1-B6
gacccacgcatcagaaaaataacaattaaccacacgactcacgacccagtaaccgggttctgcaaatttcgccacttgcagatgaaaagttccaaactttccactccaatccccggttaaatcctaaccccttgttcctttcactggttcttagaactactaggaccttgccaccaccatggctgccaaaaaggcatgtgagacattctcaaagtcattgattgaggaagtgaatagatggggttgcttgaagcagacaggggtgagtctcaggtacatgatggaattcgggtccaaacccactaacaagaatttgctgatctctgcccattttcttcacaaggaacttgccatcagaattgccagaagggccgttgaacttgagaatcttccctatggtttgtctcaaaaacctgctgttc

SEQ ID NO: 25468 - DNA, 345 bp, Glycine max
  Clone ID: LIB3051-054-Q1-K2-H6
agggccattgagcttgagaatcttccctatggtttgtctcaaaaacctgctgttttaaaggttagggattggtatgtggattctttccgtgatctcagagccttccccaacatcaagaatgtgaatgatgaacaagatttcactgaaatgatcaaggccatcaaagtgaggcacaacaatgtggtacccacaatggccttgggtgttcagcaattgaagaaacgtatggatccaaagattgtttatgaagatcttgttgagattcatcagtttctagaccggttctacatgtcaaggattggaatccgtatgcttatcgggcagcatgttgagttgcacaatccc

SEQ ID NO: 25469 - DNA, 420 bp, Glycine max
  Clone ID: LIB3051-009-Q1-E1-F11
atccagatctgtgttgtgatggcagcagcaccagcagctaccttcgctattggaaccaccggttccctcggccaaagaggaagctcgcttcctcaatcaaagtcctttgggttgaaattcaactctctgaatcatttgaagagcttctgtggcctcaaggccatgtcatccgtgagatgtgagtcggaatcctccttcttcggtaacaaaaccggtgctgctctacgggcgtcttttgcatccaaagctcaaaaggaaaacaaccacaactcgcagcctcaggcttcgtacaaagttgcggttcttggtgctgctggagggataggtcagccgctctcgcttctcatcaagatgtcgcctttagtttccaacctgcatctctatgatattgcgaatgtcaagggatttgctgctgatatc

SEQ ID NO: 25470 - DNA, 448 bp, Glycine max
  Clone ID: LIB3051-108-Q1-K1-B2
ctcctctctccgattccttttattaattggagttttctcgctcctttttctttccctgagaacatttcatcttcgtattgatgtcggaaaagggtcggccacttcccaaatttggtgaatgggatgtcaatgatccagcctcagctgaggggttcacagtgatttttaataaggccagggatgagaaaaagacaggtggcaacccagagtcaccaggaaagactgctactgatcctcatagcaaacctgcagtagagcctggcaaaactcagactaaaaaatggttttgctgcatgcaaaacccttctgccgaatcatagcatagcaatggttgctcctgtgaaaagcctgaacagaagaacaatgtttatgtgtaactagcgtcacagtattttctcaaagataagagctgtagagccataagcgaattctacggaatttatatttt

SEQ ID NO: 25471 - DNA, 434 bp, Glycine max
  unsure (1)..(434): unsure at all n locations
  Clone ID: LIB3051-031-Q1-K1-D4
ccaagcctgagactcgcgactcaccaccactgctcgccggcctctaattttgaaagcgtgtgcgcctcccacgccatttttgatactctctttgtgttcgcatagtgagatatggggaagaaggcgaagaaagctatgaagaagaatttgaaaagggcttcctttaataagaatccatctgaggatgctgatttcttgcccttggaaggtggccctgctcgtaagctcgccggccagcagaagccgccgccgccgccggagaacaccgccacggttttgtacgtcggtcggatcccacatgggttctatgagaaggagatggaaggttattttgggcaatttggaaccattaagaggttgagaatcgcaaganataaaaagtctggaaaatcaagacatttgggttcatagaatttgaatctcccgaggtagca

SEQ ID NO: 25472 - DNA, 444 bp, Glycine max
  Clone ID: LIB3051-038-Q1-K1-B9
tgcttcacaagccaaatctaacttgtctctgtgttctccgatctagtactactatcaatggccggaaaaggagatggtcctgctatcggaatcgatctcggcaccacctactcctgcgtcggagtgtggcagcacgaccgtgtcgaaatcatcgccaatgaccagggtaacagaaccacgccgtcttacgtcgctttcactgattccgagcgtttgatcggtgacgccgccaagaaccaggtcgccatgaaccccgtcaacaccgtcttcgatgctaagcgtttgattggaaggagattttctgatgcctccgttcagagtgacatgaagctatggccatttaaggtcatccctggtcctgctgacaaacctatgattgtggtcaactacaaaggtgaggacaagcagttctccgctgaggaaaattcttccatggttctcatg

SEQ ID NO: 25473 - DNA, 457 bp, Glycine max
  Clone ID: LIB3051-077-Q1-K1-H10
cccgactactgattcctagcaaaccaactagagagttttcccttgatatggaggatttggacggaccgtggactgatcttgatttaaaagggagaataggatcaggttcttttggaactgtacatcatgcagagtggaatggctcggaggttgctgttaaaattctgatggaacaagacttcaaaggtgaacgcttcaaggaattcctgagggaggttgcaataatgaaaggcttacggcatccaaacattgttttacttatgggtgcagtcactaagcctcctaatctatcaattgtcacagaatatttgtcaaggggtagcttgtataggctgttgcataaacctggtgccacagagatgttggatgagagacgtaggcttagtatggcttatgatgtggctaaggggatgaattatcttcataaacgcaatccttccattgttcatagagatct

SEQ ID NO: 25474 - DNA, 419 bp, Glycine max
  Clone ID: LIB3051-043-Q1-K1-B1
gctaaagaggtcaagcatccattcaggaatcttctcaagcgcaggaaccgaccccaacttgtcatttccgttgccctacagatattccagcaattcacaggcatcaacgcaatcatgttttatgccccggtgctgttcaacacgttaggattcaagaacgatgcatccctgtattctgctgtgataactggggctgtgaacgtgctctccactgttgtatcgatctactcagtggacaaagtgggacgtcgcattctgttgctggaagctggtgtgcagatgttcttgtctcaagtggtgattgcaatcatactgggaataaaagtgacggaccattctgatgacctttcaaaaagcattgcaattctggtgggtgtgatggtctgcactttcgtgtctttcttgcatggtcttggggt

SEQ ID NO: 25475 - DNA, 427 bp, Glycine max
  unsure (1)..(427): unsure at all n locations
  Clone ID: LIB3051-093-Q1-K1-D9
attcactccctctctcttgtcttttcctctacgttcctgcattgctcgtgtgaaacgcggaccatggccggcggaggtttcaccagcggcggcggcgccggagatttcgaggccaaaatcactcccatcgtcatcatttcatgtatcatggctgccaccggaggtctcatgttcggctacgacgtctgcgtttcaggtggtgtgacgtctatgcccccgttcttgaagaagttttttccgacggtatacagaaagacagtggaagagaaaggactggacagtaattactgcaaatacgacaaccaatgattacagcttttcacgtcgtctctgtatctggctggtttgacttcgacgttctntgcttcatacacgactcgtaggttgggaagaaggctgaccatgttgattgctggggtattcttca

SEQ ID NO: 25476 - DNA, 292 bp, Glycine max
  Clone ID: LIB3051-109-Q1-K1-A4
ctttgcttcatacacgactcgtaagttgggaagaaagctgaccatgttgattgctggggtattcttcatctgtggagttgtccttaatgctgctgctcaaaaccttgccatgctcatcgttggcagaatcttacttggctgtggtgttggctttgctaatcaggccgtgccagtgttcctctctgagatagcaccttcaagaatacgaggagcattgaatatattgttccagctcaatgtcacaattggcattctatttgctaaccttgtcaactatggcaccaacaaaatc

SEQ ID NO: 25477 - DNA, 428 bp, Glycine max
  unsure (1)..(428): unsure at all n locations
  Clone ID: LIB3051-098-Q1-K1-C9
cccacgcgtgcgnaatactnngaagagctttcgcatcaaccttaggagctagggtacgacccgaacgtttgtgcccgactcggtaaaatcttttgtggttcacctgtaccgtcacatccgtgaaaagaacgtgtacgagatccaccagatgtacgagagctccttccagaccctctcggagcgtctcttcaaggataccccgtggccctccgtggacgccgtcgcgcactacgtcgacaacgaccacgtcttctgcctcctctaccgcgagatgtggttccgccacctctacgctcgtctcactccgacgctccgccagcgcatcgactcgtgggacaactactgcagcctcttccaggttgtccttcacggtgtcgtcaacatgcagcttcttaaccagtggctatgggacatggtcgacgagttcg

SEQ ID NO: 25478 - DNA, 390 bp, Glycine max
  Clone ID: LIB3051-049-Q1-K1-B1
tcgtccacgcgttcgtccacgcgttcgcacgtctatattggatatggctggagttttgttacctttgttgaagtggtttattggaggaagctcttcaaatggtcctaaagtactcaattttcttgtacgttctccgtggagtactattgatgttgttggccagatcaaacaacctatcctttttctctctggattgcaagatgagatggtccccccatcacatatgcaaatgctatatgctaaagcagctgctcgaaataatcagtgtctctttgtggattttcctactggcatgcatatggatacttggctggctggtggtgatcagtactggagaacaattcagcagtttcttgagcagcatgccccagagcaaaaagaagacagatc

SEQ ID NO: 25479 - DNA, 408 bp, Glycine max
  Clone ID: LIB3051-032-Q1-K1-A8
cccacgcgtccggttcactcactcaaccgttcctttatcttttggattcccttctgattcactttcactttcactccttagcctggttataggagctagggtttatcgagggtttcgttccttcctctctgcaacaacaatggcgaaacctgggcgaggtcgtcgctctccctccggttccgtttccggctcctcctctcgctcctcttccccctccgactctcgttcctcctctcgctcgcgctccctttctcggtcccgttctccctcgcgctccagatcctcttccccctcctcctgctcttcctcccgaagctcccgcagccgcagccctcccccgcagaggcgccgaagtcctgctgacgcaactaggcgaggtcggtctcctccacctcagtctaagagagc

SEQ ID NO: 25480 - DNA, 411 bp, Glycine max
  unsure (1)..(411): unsure at all n locations
  Clone ID: LIB3051-018-Q1-E1-C11
agctttgctcgcttgtcaaagctcttgaatgatgataaggtttctggcaagattgtttatggaggcgaaaaggatgaaaagaaattaaggattgctcccactattttattggatgttccgcaagattcttcgataatgggtgaggagatatttggtccattgcttcccatcatcacggtcaataagctcgaagaaagtatagatgtgatcaactcaggagcaaagcccctcgctgcatatgtatttacaaccgacaacaagttcaaggagcagttcgtaaagaatgtttctgccgggggtttgctcgtcaatgacactgccttacatcttgtggttgataccttgccatttgggggaattggggagagtggaatgggtgcataccatgggaagttctcntttgatgctttt

SEQ ID NO: 25481 - DNA, 394 bp, Glycine max
  Clone ID: LIB3051-051-Q1-K1-B1
gcccctcgctgcatatgtatttacaaccgacaacaagttcaaggagcagttcgtaaagaatgtttctgccgggggtttgctcgtcaatgacactgccttacatcttggggttgataccttgccatttgggggaattggggagagtggaatgggtgcataccatgggaagttctcttttgatgcttttacacacaaaaaagcagttctttatcgcagttttgctggggattcaaccataagggtcccaccataccacgatacaaaactgagattgatgaaggctcttcgcggtggtcgtatcctcggaataattcgtgctcttttcggatggtcctaagcttaacttggtttgaaacctaactattttttatggattcttcggtccgggtttttt

SEQ ID NO: 25482 - DNA, 440 bp, Glycine max
  unsure (1)..(440): unsure at all n locations
  Clone ID: LIB3051-063-Q1-K1-B1
atccactcttgcctcatctcctgaatcagattcatccttttttaagacacactcctcaggtcctcttgtacaaagtggctctggcagtgatgttgtgtacacaccatctgaccctggtggactaggcaactcaaggtcatggttttcatatgaagaactaatcaaggtcacaaatggtttctcaactcaaaatcttttgggcgagggtggatttggttgtgtgtataaagggtgccttcctgatgggagagacatagcagtcaaacagctgaagattggtggaggtcagggagagagagagttcaaggccgaagtggaaattattggtcgcatacatcatcgccatttggtttctctggtgggatactgcattgaagacagcagaagactacttgtctatgactatgtccctaacaataacctntattttcatctacatg

SEQ ID NO: 25483 - DNA, 440 bp, Glycine max
  Clone ID: LIB3051-065-Q1-K1-B1
cccacgcgtccgtaaagaagaaactaaccatagatgatatccatgacatttatgggctgcgcttgattgttgacaaggaagaagactgttacaaagctttgacagttgttcatcgattatggtctgaggtgcctggaaagctgaaagattacatatgtcgtcccaagttcaatggatatcaatctctgcatactgttgtgatgggtgaaggcaaggttccccttgaagtacaaattcggaccaaagatatgcatttacaagcagaatttggatttgctgctcattggagatacaaggaagatgattgtcagcattcttcatttgtgcttcagatggttgagtgggctcgatgggttgtcacctggcagtgcgaagcaatgagtagagattgttcatctgttggatatgctgattcagtcaatcccccatgcaagttccct

SEQ ID NO: 25484 - DNA, 406 bp, Glycine max
  Clone ID: LIB3051-001-Q1-E1-H11
agctcaggttatggtttccttggggtacatgcacagtcaaggtgttcataccctttttatataacattctcaagaaagcaaacttatggtacttttttttttggtctatttacatgatataattattgtaggtgataatgggttaatgaccttaaaaaacaaattataagggagaagttagctacttagtttgagaagaatgatcttcggaagctgaagtacattcttgggatagaagttgcctactctaagtaaggtatctttaattctcaaaggaaatatgtgcttgatctccttaaatagactggtaagttgggttgtaagatgtgcttgaccatgtgtacagggcccttaaccagctaaaatactcctaaagaaagacacatcagataaatctggattctac

SEQ ID NO: 25485 - DNA, 384 bp, Glycine max
  Clone ID: LIB3051-023-Q1-K1-F10
ctactgggatttgacaatttcatcccacgcgttgcaaacactagtggctcagacacacttaagggtgtgaactatgcatccggagcagctgggattctaccagagagtggtacacatatgggtgccaacatcaatttgagggtacaaatgttaaatcacctattcatgtactccacaattgctatcaaacttggaggttttgtcaaagctaaacagtacctcaacaagtgtttgtactacgttaatataggaagcaatgattacataaacaattacttccttccccagttttacctaacaagccgcatctatacccctgatcaatatgccaacattcttattgcccagctatctcaatatatgcagacactgcatgacgaaatt

SEQ ID NO: 25486 - DNA, 426 bp, Glycine max
  unsure (1)..(426): unsure at all n locations
  Clone ID: LIB3051-034-Q1-K1-B11
tttttggaattcattattattattccacttattttgtctcattactaatagtttctctaggatgaagctaaacctaatcatgcgtagttctaccttttcttctattggttgcaattttcatgcaacaatgtgtccatggagaatcgcaagtgccctgcctttttgtctttggggactctctgtctgataacggaaataataacaaccttccaagcactacaaagtccaattacaaaccatatggcatcgacttcccaaccggcccaacaggacgatttacgaatggacaaacatctattgacctaattgctcaactactgggatttgagaatttcatcccaccctttgcaaacactagtggctcagacacacttaagggtgtgaactatgcatncggagcagctgggattctaccagagagtggta

SEQ ID NO: 25487 - DNA, 421 bp, Glycine max
  Clone ID: LIB3051-036-Q1-K1-E7
cccacgcgtccgcaattacttctggaatcataattaataatccaacttattttgtgtcatgactatagtttctctagatggaagctaaaactaagtcatgcgtagttctaccttttcttctattggttgcaattttcatgcaacaatgtgtccatggagaatcgcaagtgccctgcctttttgtctttggggactctctgtctgataacggaaataataacaaccttccaagcactacaaagtccaattacaaaccatatggcatcgacttcccaaccggcccaacaggacgatttacgaatggacaaacatctattgacctaattgctcaactactgggatttgagaatttcatcccaccctttgcaaacactagtggctcatacacacttaagggtgtgaactatgcatccggagcagc

SEQ ID NO: 25488 - DNA, 407 bp, Glycine max
  Clone ID: LIB3051-059-Q1-K2-F4
acgcccacgcgtccgacttctggaatcataattaataatccaacttattttgtctcattactatagggtctctagatggaagctaaaactaagtcatgcgtagttctaccttttcttctattggttgcaattttcatgcaacaatgtgtccatggagaatcgcaagtgccctgcctttttgtctttggggactctctgtctgataacggaaataataacaaccttccaagcactacaaagtccaattacaaaccatatggcatcgacttcccaaccggcccaacaggacgatttacgaatggacaaacatctattgacctaattgctcaactactgggatttgagaatttcatcccaccctttgcaaacactagtggctcagacacacttaagggtgtgaactatgc

SEQ ID NO: 25489 - DNA, 383 bp, Glycine max
  Clone ID: LIB3051-072-Q1-K1-B9
ctggaatcataattaataatccaacttattttgtctcattactatagtttctctagatgggagctagaactaagtcatgcgtagttctaccttttcttctattggttgcaattttcatgcaacaatgtgtccatggagaatcgcaagtgccctgcctttttgtctttggggactctctgtctgataacggaaataataacaaccttccaagcactacaaagtccaattacaaaccatatggcatcgacttcccaaccggcccaacaggacgatttacgaatggacaaacatctattgacctaattgctcaactactgggatttgagaatttcatcccaccctttgcaaacactagtggctcagacacacttaagggtgtgaac

SEQ ID NO: 25490 - DNA, 447 bp, Glycine max
  Clone ID: LIB3051-073-Q1-K1-B9
ctggaatcataattaataatccaacttattttgtctcattactatagtttctctagatggagtctagaactaagtcatgcgtagttctaccttttcttctattggttgcaattttcatgcaacaatgtgtccatggagaatcgcaagtgccctgcctttttgtctttggggactctctgtctgataacggaaataataacaaccttccaagcactacaaagtccaattacaaaccatatggcatcgacttcccaaccggcccaacaggacgatttacgaatggacaaacatctattgacctaattgctcaactactgggatttgagaatttcatcccaccctttgcaaacactagtggcttagacacacttaagggtgtgaactattcattcggagcagctgggattctaccagagagtggtacacatatgggtgccaacattaatt

SEQ ID NO: 25491 - DNA, 448 bp, Glycine max
  unsure (1)..(448): unsure at all n locations
  Clone ID: LIB3051-084-Q1-K1-E12
gtctcattactatagtttctctagatggaagctaaaactaagtcatgcgtaggtctagcttttcttctattggttgcaattttcatgcaacaatgtgtccatggagaatcgcaagtgccctgcctttttgtctttggggactctctgtctgataacggaaataataacaaccttccaagcactacaaagtccaattacaaaccatatggcatcgacttcccaaccggcccaacaggacgatttacgaatggacaaacatctattgacctaattgctcaactactgggatttgagaatttcatcccaccctttgcaaacactagtggctcagacacacttaagggtgtgaactatgcatccggagcagctgggattctaccagagagtggtacacatatgggtgccaacatcaatttgagggtacanatgttaaatcacctattcatgt

SEQ ID NO: 25492 - DNA, 409 bp, Glycine max
  Clone ID: LIB3051-103-Q1-K1-C1
cccacgcgtccgctggaatcataattaataatccaacttattttgtctcattactatggttgctctagatggaagctaaaactaagtcatgcgtagttctaccttttcttctattggttgcaattttcatgcaacaatgtgtccatggagaatcgcaagtgccctgcctttttgtctttggggactctctgtctgataacggaaataataacaaccttgcaagcactacaaagtccaattacaaaccatatggcatcgacttcccaaccggcccaacaggacgatttacgaatggacaaacatctattgacctaattgctcaactactgggatttgagaatttcatcccaccctttgcaaacactagtggctcagacacacttaaaggtgtgaactatgcatttcgagc

SEQ ID NO: 25493 - DNA, 396 bp, Glycine max
  Clone ID: LIB3051-112-Q1-K1-G12
atcaattactcgtgcaatcataattaataatccatcttatttggtctcattactatagtttctctagatggaagggaaaactaagtcatgcgtagttctaccttttcttctattggttgcaattttcatgcaacaatgtgtccatggataatcgcaagtgccctgcctttttgtctttggggactctctgtctgataactgtaataataacaaccttgcaagcactacaaagtccaattacaaaccatatggcatcgacttaccaaccggcccaacatgacgatttacgaatggacaaacatctattgacctaattgctcaactactgggatttgagaatttcataccaccctttgcaaacactattggctcatacacacttaagggtgtgaacta

SEQ ID NO: 25494 - DNA, 451 bp, Glycine max
  Clone ID: LIB3051-114-Q1-K1-G8
atcaatttgagggtacaaatgttatatcatttattcatgtactccacaattgctgggaaggttggaggttttgtcaaagctaaacagtacctcaacaagtgtttgtactacgttaatataggaagcaatgattacataaacaattacttccttccccagttttacctaacaagccgcatctatacccctgatcaatatgccaacattcttattgcccagctatctcagtatatgcagacactgcatgacgaagttggggccagaaaattcgtgctagttgggatgggtcttataggttgcactccaaatgccatctctacccataatacaaatggatcttgcgttgaggagatgaataatgctacgttcatgttcaatgcaaagcttaaatctaaagtggaccaattcaacaacaagttctttgctgattccaaattcatcttttataaca

SEQ ID NO: 25495 - DNA, 414 bp, Glycine max
  Clone ID: LIB3051-116-Q1-K1-E5
taataatccaacttattttgtctcattactatagtttctctagatggaagctaaaactaagtcatgcgtagttctaccttttcttctattggttgcaattttcatgcaacaatgtgtccatggagaatcgcaagtgccctgcctttttgtctttggggactctctgtctgataacggaaataataacaacctttcaagcactacaaagtccaattacaaaccatatggcatcgacttcccaaccggcccaacaggacgatttacgaatggacaaacatctattgacctaattgctcaactactgggatttgagaatttcatcccaccctttgcaaacactagtggctcagacacacttaagggtgtgaactatgcatccggagcagctgggattctaccatagagtggtacaca

SEQ ID NO: 25496 - DNA, 430 bp, Glycine max
  Clone ID: LIB3051-051-Q1-K1-G3
cacaaatttacattaagcatagtacaaaacaatgaagaccaaactgctagcatttctgctcttctttgccttgactacaaaaccactactacttggagcagctggagctgctccagagccagtgattgatacatcaggcaagaagctgagagctgatgcaaattaccatatcatccctgcagtgcccttcaccatatgtggctttgttggctgtttcactggtggaggcctttcactagacagcatagatgaatcttgccctcttgatataataatcgagaaagccaatgaaggcctaccactgagattctcaccagttaacaccaaaaaaggtgttattcgtgtctccaccgatttgaacatttttttctctgattctgatgaaaggtgtccacaccattccactgtgtggatgcttgatcaatttgat

SEQ ID NO: 25497 - DNA, 433 bp, Glycine max
  Clone ID: LIB3051-116-Q1-K1-D9
atgaagaccaaactgctagcatttctcctcttctttgccttgactacaaaaccactacgtacttggagcagctggagctgctacagagccagtgattgatacatcaggcatgaagctgagagctgatgcaaattaccatatcatccctgcagtgcccttgaccatatgtggctttgctggctggttcactggtggaagcctttcactagacagcatagatgaatcttgccctcttgatataataatcgtgaaagccaatgaatgcctaccactgagattctgaccagttaacaccaaaaaaggtgttattcgtgtctccaccgatttgaacattattttctctgattctgatgaaaggtgtgcacaccattccactgggtggatgcttgatcaatatgatgcctgtattgtacagacatatgtgaccactggt

SEQ ID NO: 25498 - DNA, 437 bp, Glycine max
  Clone ID: LIB3051-034-Q1-K1-D12
gttgctctctactctgcttagggttccaactttcaacccaacacttaatggtctcatgcaacaagggaaaatgaagcctattttctgtggaaattttgaatatgatgcccggcagtcagagctggagcggctttttagacgatatgggaaggttgatagggtggatatgaagtctggttttgcttttatctatatggaagacgagagagatgctgaagctgctattcgtgctcttgatcgagtagaatttggtcggaagggacgcagactccgtgtggaatggacaaagcatgaacgtggtgttagaaagcctgctagttcaagaagatcttcagctaatgggaggccatcaaagaccttgtttgtaattaattgtgatacataccataccagaacaagggacttggagaggcactttgaaccatatggaaagatag

SEQ ID NO: 25499 - DNA, 411 bp, Glycine max
  Clone ID: LIB3051-001-Q1-E1-H12
aggacaattcgggcttctcgggcccgcgccgcagccccagtttcaacaacacgtgtggccgtggcgggagccgtggtggcggtggtgccggtgccggtgccggtagaggggtggtggtgaatgcagagaaagtctgtaattattggattcaggggaattgtagttatggagagaggtgcaagttccttcacacttggagtgtgggggatgggttttctttgctgacccagcttgaagggcatcagaaggctgtgagtgcaattgcctttccctctggttcagataagctgtataccggaagcactgatgagactgcaaggatttgggactgccaatctggaaagtgtgtacgtgtgatcaatcttggtggtgaagtacgttgtatgatcagtgaaagcccttgggtccttg

SEQ ID NO: 25500 - DNA, 378 bp, Glycine max
  Clone ID: LIB3051-001-Q1-E1-H8
agggcgaataatacgttaggtgggagtattcctaaagagttatgggacctgcctgtgcttaattatcctgatctttcaaggaatcagttctctggtgagattccaattgagctgcagaagttgaagcctgatttgttgaatttgtcgaacaatcagctttctggggtgattcctcctctttatgctaatgagaattatacaaagagttttcttgggaatcctggtttatgcaacgctctctctggattgtgtccaagcttgggtggtgacagtgatggtaagagcagaaagtatgcgtggattttccggttcatatttgtgcttgctgggattgtgttaattgttggggtggcgtggttttacttcaaattccgggac

SEQ ID NO: 25501 - DNA, 445 bp, Glycine max
  Clone ID: LIB3051-026-Q1-K1-H4
ttcttcattctccctttttttgccctaaattagatcctttcttttacaatcattaattaattagattagaattgatttgatttgatttaccttaatccttcgtctgctttttccttcccttaactccaccattcctgaattttctgcatcaatctatcaagttcattgtaggtgtatatccttgattttgtgtgggtttgagttagggtgcatgtgaatgaaaaggagatttgctggaggtgatgcatttgcatagatgaaggcagaaaaagtttggcgtttaggcagcatgggtgatatgcaaatactgcctgggtctcgccaccgtcctcccatgaagaagccgatgtggattattgtcttggtgttgtttgtctgtgtctttctaatctgtgcttatatctacccaccgcagagcagttcagcctgttatgtcttctctttc

SEQ ID NO: 25502 - DNA, 411 bp, Glycine max
  unsure (1)..(411): unsure at all n locations
  Clone ID: LIB3051-034-Q1-K1-H12
gattccatctctcacatcatttcccactcccgcgtttcctttatcatattcttattccgccatgtcccagttgaacggagcctactatggcccctccatcccgccgccgaaaacctnctaccaccgcccagggcgcggcggaggctgctgctgcggctgcctcttcagcctcatcttcaagctcatcttaaccgtgataatcatcgttggcatcgccgggttcgtgttctggctcatagtccgtccgaacgtggtgaaattccacgtgaccgacgccaccctgacgcagttcaactacaccgncaacaacactctccactacgacctcgccctaaacatcacggtccgaaaccccaacaagaggctcggaatctactacgaccgcatcgaggcgcgtgcaatgttccacga

SEQ ID NO: 25503 - DNA, 434 bp, Glycine max
  Clone ID: LIB3051-078-Q1-K1-E1
atttcgtgtgaaaacaagttccaaaactagaggtttcttgagtcttttttttagttttgcttgctctactctagagccattctaagtttctctttgagtcctagcttgcttttatgtgcttttcatcgctttaattgttgaataatacttgaaaatttgtcttgttaaaactatattgttttagctttcatttcatttttttggtcattggttattgcttgtctctttgtttccttgtttgtgagttgccatatagggaatttgaaaaaaggattagtgccatcccttgaagaatttgagtcaagaagcaaggggaaaaccaccttaagagctattggactaagaagcactccaaattgagtaaatcaccaaagacagaacaaccacccaaattgaggacctttttgtaattttgtaattgacaatttacttac

SEQ ID NO: 25504 - DNA, 427 bp, Glycine max
  Clone ID: LIB3051-065-Q1-K1-F12
gtcaaacacaaataccactcctttcttcaacaggtttatagaaaccttggattactacggggcaatgtttgagtccattgatgtgtctcttccgagaaagagcaaggtgcacattaatatggagcaacattgatcggctcgggatattgtcaacattattgcttgtgaagggaaggaaagggtagagagacatgagctgctacgcaagtggaagtctaagttaacaatggctggctttcatcaatatgctttgagttcttatatgaattctgtcataagaagcctgctgaggtgctattcaaaacattataatcttgtggagaaggatggtgccatgctactggcatggaaggacagaaatttgatttcaacttcagcttggtatcgattacatgcagataggaaataatgcagtggtagaaatatg

SEQ ID NO: 25505 - DNA, 398 bp, Glycine max
  Clone ID: LIB3051-054-Q1-K2-H4
gcgccaaacggcttgatagcatatggggtgcttggtttttcttcagattttacttcaagccggcattggttgagaagtccaaggccaaggttgttagggacagcaatggtgtttcggggttcgataaatccgatatcaagcttgatgttttcatggttcaacacgacatggaaaacatgtacatgtgggttttcaaggagaagccggagaatgctttgggtaagatgcagttgaggagctacatgaatgggcattcccgccaaggggagcgcccatttccatttagtgctgaccggggttttgttcgatcccaccggatgcagcggaagcattatagaggactttcaaatccacaatgtgtgcacggcattgagggtgttccatcacccaatcttatg

SEQ ID NO: 25506 - DNA, 429 bp, Glycine max
  Clone ID: LIB3051-006-Q1-K1-D4
ttatcctttcctgaaccttcttgtgatctcaaagcttaacgaatcaatcaaccgctgacatggcagaagaagaagaagaacgcaggatcctggtggccgtggatgaaggcgaggagagcatgtatgctctctcatggtgcctcaagaacctttcttttcaaaattccaaagacacccttattctcctatacgtcaagccccctcgagtcacttattcagccttcgatggcacaggatatttttttgcctctgacataacggctaccatggagaggtatagccaacaagttgccgattgcgtcttggagaaagccaagaaattgtgtaaaaatattgaaaatgtggagactagggtagagaatggcgatacaagggatgtgatttgtcagatggttcaaaagtagggtgctgatgtcttaatcatgggaa

SEQ ID NO: 25507 - DNA, 291 bp, Glycine max
  Clone ID: LIB3051-017-Q1-E1-E2
cacgcgtcaagcaacgcgtccgcccacgcgtccgataaaatcgaagtcccttaggtcttcatcttctgttctgatccatgtatggcttcataacgcatcttgaacgatctcaaggatttgcaaaacgatcctcctacctcatgctgtgcaggccctatggctgaggacatgtctcactggcaagccacaatcatgggacctgctgatcacccataatcatgtggtgtattcctagtttcaattcattttcctcctgatcatcccttcaagccaaccaaagttgcttttccg

SEQ ID NO: 25508 - DNA, 429 bp, Glycine max
  Clone ID: LIB3051-025-Q1-K1-F12
cccacgcgtccgcttcatcttctgttctgatccaggtatggcttctaaacgcatcttgaaggagctcaaggatttgcagaaggatcctcctacctcatgcagtgcaggccctgtggctgaggacatgtttcactggcaagccacaatcatgggacctgctgatagcccatatgcaggtggtgttttcctagtttcaattcattttcctcctgactatcccttcaagccaccaaaggttgcttttcggactaaggtgttccacccaaacatcaacagcaatggcagtatatgtcttgacattctcaaggagcaatggagcccagccctaaccatttccaaggtccttttgtcaatttgctcattgttgacggatcccaaccctgatgatccactcgtaccagagattgcacacatgtacaagactgacag

SEQ ID NO: 25509 - DNA, 330 bp, Glycine max
  Clone ID: LIB3051-085-Q1-K1-H12
tccgggtcgacgacgcgtccgctttggtcttcatgttctgttctgatccaggtatggcttctaaacgcatcttgaaggagctgaaggaggtgcagaaggatccttctacctcatgcagtgcacgccctgtggctgacgacatgtttcactggcaagccacaatcatgggacctgctgatagaccatatgcaggtggtgtttgcctagttacaattcattatactactgactatcccttcaagccaccaaaggttgcttttcggactaacgtgtttcacccacacatcaacatcgatggccgcatatgtcttgacattctcaaggaccaat

SEQ ID NO: 25510 - DNA, 361 bp, Glycine max
  Clone ID: LIB3051-030-Q1-K1-A8
cccacgcgtccgcccacgcgtccggattttttcacgaactgtggaaagattcggttcgattgttgggatactgctgggcaagagaagtttggtggcctcagagatggatattatatccatgggcaatgtgcgattatcatgtttgatgttactgcccgtctaacatacaaaaatgtccctacctggcaccgtgatctttgccgggtctgtgaaaacatcccaattgttctttgcggtaacaaggttgatgtcaagaataggcaagtgaaggcaaagcaggttactttccacaggaagaagaatttgcagtactatgagatatctgctaagaaccaccttccatttttgaaaggccattttt

SEQ ID NO: 25511 - DNA, 432 bp, Glycine max
  Clone ID: LIB3051-086-Q1-K1-A6
ctccgctctaaattctctgtctctctctctctctctcgatcaatcatggctttgcccaatcaggaaaccgtcgattaccctagtttcaaactcgtcatcgtcggtgacggtggtacaggaaagacaacgttcgtgaaaaggcatcttaccggtgaatttgagaagaaatacgaaccgaccattggagtggaggttcacccattggatttcttcacaaactgtggaaagattcgcttctactgttgggatactgccggacaagagaagtttggaggcctcagggatggatattatatccatgggcaatgcgccattatcatgtttgatgttactgcccgactaacttacaaaaatgtccctacctggcatcgggatctttgccgggtctgtgagaacatcccaattgatctttgcggtaacaaggttgatgtg

SEQ ID NO: 25512 - DNA, 443 bp, Glycine max
  unsure (1)..(443): unsure at all n locations
  Clone ID: LIB3051-094-Q1-K1-D12
gcgacgccagcgcgnntccgcccacgccgtnnncggcagcatcgcttatactttcttcatttccatggggctttgcccaatcagcagaaccgtggggattaccctagntttcaaacctcgtnntatcgtcggtgaatgggtggcaccaggaaagaacaacctttgtgaaaaggcatctcaccggagaattcgagaagaaatatgagccaaccatcggtgtggaggttcacccattggattttttcacaaactgtggaaagattcgattctactgctgggatactgctggacaggagaagtttggtggcctcagagatggatactatatccatgggcaatgtgctattataatgtttgatgttactgcccggctaacatacaaaaatgttcccacctggcaccgtgatctttgcagggtctgtgaaaacatcccaattgttctt

SEQ ID NO: 25513 - DNA, 369 bp, Glycine max
  Clone ID: LIB3051-098-Q1-K1-G5
ccacgcgtccgcttggcttcatttcttttcaatctctcttaatacatatcactttcttcaccgttcgctctgtctttctcccctacacaaaacatggctttgcccaatcagcaaaccgtcgattaccccagcttcaagcttgtcatcgtcggcgacggtggcacaggaaagacaaccttcgtgaagaggcatctcactggtgaattcgagaagaaatatgaaccgaccattggtgtggaggttcatccgttggattttttcacgaactgtggaaagattcgcttctattgttgggatactgctgggcaagagaagtttggtggcctcagagatggatattatatccatgggcaatgtgcgattatcatg

SEQ ID NO: 25514 - DNA, 411 bp, Glycine max
  Clone ID: LIB3051-012-Q1-E1-B9
gactcacgcgtcagcccacgcgtccgctctataagaaggtgttcccgcacttctacatactgggctggtattcgactgggagtgatgcagaggaatcagatatgcatattcacaaagctttgatggatatcaatgaaagtccagtttatgttcttctcaatccttctatcaaccattctcagaaggatctacctgtcagtatttttgaaagtgaactgcatgtcatagatgggattccacaacttatctttgttcgctcaagttatactattgagactgttgaagcagaacggatatcagttgatcatgttgctcatcttaagccatctgatggtggttcagctgctacacaattggctgctcaccttactggtacacacagtgccatcaaaatgcttcatagcagaataa

SEQ ID NO: 25515 - DNA, 420 bp, Glycine max
  Clone ID: LIB3051-107-Q1-K1-D8
gttttggttttggctgggaaggctcaacaagaggagattggggatggagctaatttagcggtttcatttgctggggaactcctgcagggtgctgaggaacttatcaggatgggtttgcatccgagcgagatcatcagtggatacactaaagcgatcaacaagactgttcaaatattggatgaactggttgagaatggttcagagagtatggatgttcgtgataaggaacaggttgtttctagaatgaaagcagctgttgccagcaagcaatttggccaagaagataccttatgttcgcttgttgctgatgcatgcatccaagtgtgtcccaaaaaccctgcaaactttaatgtggacaacgttcgtgttgcaaagctcttgggagggggcttgcataacagtactgtcgttcgaggattg

SEQ ID NO: 25516 - DNA, 173 bp, Glycine max
  Clone ID: LIB3051-022-Q1-K1-B8
cgcccacgcgtccgttcaaaccgacaaaaaaacttgttacgatggtttcttccgacaaggagccaggagaggaagtccttcaagcatggtacatggatgatagtgattaagatcaaagactcccccaccacatagaacccaatgagtttgtctcgttggaccaacttgctgaa

SEQ ID NO: 25517 - DNA, 386 bp, Glycine max
  unsure (1)..(386): unsure at all n locations
  Clone ID: LIB3051-024-Q1-K1-F12
gaaaaacttgtcaccatggtttcttccgagaaggatccacgagaggatgtccttcaagcctggtacatggatgatagtgatgaagatcaaagactcccccaccacaaagaacccaaggagtttgtctcgttggaccaacttgctgaacttggagtccttagctggaaactagatgctgataaccatgaaaatgatccagagctgaagaagattcgtgaagagcgtggttacacctacatggatgtttgtgaggtctgcccagaaaagttgccaaattatgaacagaaaatcaaaagcttctttgaagagcatcttcacactgatgaggagatccgcttttgtgctgctggaagtggctattntgatgttanggatcgcaatgaagc

SEQ ID NO: 25518 - DNA, 405 bp, Glycine max
  Clone ID: LIB3051-029-Q1-K1-E11
acagcatcgaacccgtcgtagcagataatcttgtcaccatggtttcttccgacaaggatccacgagaggatgtccttcaagcctggtacatggatgatagtgatgaagatcaaagactcccccaccacaaagaacccaaggagtttgtctcgttggaccaacttgctgaacttggagtccttagctggaaactagatgctgataaccatgaaaatgatccagagctgaagaagattcgtgaagagcgtggttacacctacatggatgtttgtgaggtctgcccagaaaagttgccaaattatgaacagaaaatcaaaagcttctttgaagagcatcttcacactgatgaggagatccgcttttgtgctgctggaagtggctattttgatgttagggatcgcaatg

SEQ ID NO: 25519 - DNA, 360 bp, Glycine max
  Clone ID: LIB3051-108-Q1-K1-F2
tccacgcgtccgcagaagacaggttcaaaccggagcaaaaaaacttgttacgatggtttgttgcgacaaggatccacgagaggaagtccttcaagcatggtacatggatgatagtgatgaagatcaaagactcccccaccacaaagaacccaaggagtttgtctcgttggaccaacttgctgaacttggagtccttagctggaaattagatgctgataaccatgaaaatgatccagagctgaaaaagattcgtgaagagcgtggctacacctacatggatgtttgtgaggtcttgccagaaaaagtgccaaattatgagcagaaaatcaaaagcttctttgaagaacatcttcacactga

SEQ ID NO: 25520 - DNA, 308 bp, Glycine max
  Clone ID: LIB3051-036-Q1-K1-E5
ctcaaaggaaagaaaaggaaagaaaagaaaagaaaaagaagagagtgtaggtaaacagaagcacacactacacagttaccaaaatcaggttcaaacgcacagatctgggagaagagaagaagaagaagaagaagatgggacaggatcagaaccagagatcgctgatctacgcgttcgtgtctcgcggcacggtgattctcgccgagtacactgaattcagtggcaacttcaacacaatcgcgttccagtgccttcagaagctccctgccttcaacaacaagttcacctacaactgtgacggccacacc

SEQ ID NO: 25521 - DNA, 397 bp, Glycine max
  Clone ID: LIB3051-062-Q1-K1-F11
gcggaagaacgaagcctcctcgttcttcttcttctgcgctttctctctccctctctagaaccgtaaccgtcgtttctttctttctctctcctcaaccagagataaagagtcaccttcttatttttctgaatctcgcggcgttgttctttctgctgctgcggctgtggttccggcggcgatgggacagcaatcgttgatctacagcttcgtcgctcgaggcaccgttatcctcgcggagtacaccgagttcaccggaaacttcaccggcgtggcggcgcagtgcctccagaaactcccttcctccaacaacaagttcacctacaactgcgatggccacaccttcaactacctcgtcgataacggattcacttactgtgtggttgccgttgagtctgct

SEQ ID NO: 25522 - DNA, 368 bp, Glycine max
  Clone ID: LIB3051-109-Q1-K1-C11
cgaagccttctcgttcttcttcttccgccctttctctctctagaaccgtacgggcgtgtctttctctctgctcaaccggagacagcgtcgccttcttttctgaatctcgcggcgttgttagttctgcggcggttgtagttccggcggcgatgggacagcaatcgttgatctacagcttcgtcgctcgcggcaccgtgatcctagcggagtacaccgagttcaccggaaacttcaccagcgtggcggcgcagtgccttcagaaactcccttcctccaacaacaagttcacttacaactgcgatggccacaccttcaactacctcgttgataacggattcacttactgtgtggttgctgttgagtctgct

SEQ ID NO: 25523 - DNA, 429 bp, Glycine max
  Clone ID: LIB3051-031-Q1-K1-C12
cccacgcgtccgaatttgttgaggcacattaccttggacaacaatgagaacaaacctggcagtaacagtagggatacacaagaggttatgttggagcctgggctgaaattaattaaaattttcaaggaatataccagcaagacatgcattttggatgattttggcttctatgaggctcgtcagaaaactattttggagaagaaagcaaagcaacaattcccaaagcaggtatgggaagggaaacctgctgatgagaagattgagataaatggggaagttaatactcaaaaatctgaagttagctcggaattgctcaaggagtctacccttgctgagaaggatagtgatgaccacaaagttcccgagaatggatctgctacaaaaactggagatgccccaaagggtgctaaaccagttgttcccgagagt

SEQ ID NO: 25524 - DNA, 418 bp, Glycine max
  unsure (1)..(418): unsure at all n locations
  Clone ID: LIB3051-079-Q1-K1-B1
cccactcgtccgctcaaacctcttcgttccttcgattcattccatttcttccaaaatggccaaagacccagttcgcgttctcgtcactggagccgcagggcaaattggatatgctcttgtccctatgattgctaggggagtgatgctgggtcctgaccagcccgtgatcctccacatgcttgacattcctccagcagcagagtcgttgaatggggttaaaatggaattggtggatgctgcattccctcttcttaaaggtgttgttgctacaaccgatgtggttgaggcatgcactggggtcaatattgcagtgatggttggtggattccctagaaaagaaggtatggagaggaaggatgtgatgactaagaacgtctncatttacaagtcccaggcttctgcccttngaaagcatgct

SEQ ID NO: 25525 - DNA, 382 bp, Glycine max
  Clone ID: LIB3051-012-Q1-E1-F8
agcccacgcgtccgcaatgccctatatatgggtgatgttcgagaacgtgtgaagatattggaaaatgtgggccatttgcctcttgcttacatcactgcatcagtccatgggctacatgatgttgcagaacggcttgcagctgaattgggagataatgttccatctttgcctgcaggaaaagtgccttctctcgtgatgcctccatcacctgtcatgtgtggaagtgattggcctcttctcagggtcatgcgaggcatgtttgatggggtgcttgacaatacaggtcggggagttgctgatgaagaagagtatgaggctgctgatggtgattggggtgaggagcttgacatagttgatgcagatgggttacaaaatggagatg

SEQ ID NO: 25526 - DNA, 464 bp, Glycine max
  Clone ID: LIB3051-070-Q1-K1-D8
acggattagcatcaaagcaagttaacaaaatttgggtgcgtcctggattgacccttttggcccctctccctcaccctccactaactcctcctttttggtttttataaagcacattcccaatagaggagggtccctacacaacacaacccttcaatgacgtccatggccactttcttcgcccaaacctccttcccctcccactctctctccaaaaccttcgatacccatttcgcccctgccccgaaagtcaacgtctttgtgaacttcagggcgaggaggcacgttggggtgcgagtttcgaacgcgctgatcgaaccagatggagggaagctcgtggagcttgtggtgacggattttgagagggatttgaagaagggtgaagctctttcgttgccgaggatcaagctctcaaggattgacctttgagtggtccatgtcctcagcgaaggattggccacacccct

SEQ ID NO: 25527 - DNA, 427 bp, Glycine max
  Clone ID: LIB3051-018-Q1-E1-D2
agcggacgcgtgggcggacgcgtgggcggacgcgtgggcggacgcgtgggttctcttcctccctggaagaaaaagaagagtcaccgctacgacgccgttcgtgcttttttgaggtgccacagtcatgtttgggcgtggtggaccaaggaggagtgacaactccaaatattatgatattctcggggtttccaaaaatgccagtgaagatgaaatcaagaaggcctatagaaaggctgctatgaagaaccatccagataagggaggagatcctgaaaagttcaaggagttaggtcaagcatatgaagttttaagtgatcctgagaagaaagacctgtatgaccagtatggtgaagatgcccttaaagaacgaatggggggaggaggctcgtttcataatccatttgatatatttgaatcattttttggg

SEQ ID NO: 25528 - DNA, 429 bp, Glycine max
  Clone ID: LIB3051-031-Q1-K1-F11
cggacgcgtgggacgaagtgcaaatagcaattccgctactcacaaaaaaccttttcctattccctttctctttcctgaacccaacacaacaacacaacacaggataaataaattaaattaaaaactagctaaattcctctctctctctctttctcttcgagggtttgggtttctcttcctcccttggagaaaaagaagagccaccgctgcgacgccgttcgtgcatttttgaggtgccgctgtcatgtttgggcgtggtggaccaaggaggagtgataactccaaatattatgatattctcgggatttccaaaaatgccagtgaagatgaaatcaagaaggcctatagaaaggcggctatgaagaaccatccagataagggaggagatcctgaaaagtttaaggagttaggtcaagcatatgaagtttt

SEQ ID NO: 25529 - DNA, 386 bp, Glycine max
  Clone ID: LIB3051-032-Q1-K1-G10
cccacgcgtccgggatttccccgactcagggtttctttcccctgaccaatgccagttattggaaaaggtgttgcctcagaagagcagcaagcacgtctcagatatggagctggatgattgtgaggagaccactttgcatgatgtcaactttaaggaggagatgagacgaaagcagcaacagcaacaccgcgaggcatacgacgaagatgatgatgagccatctggtcaccgagtgcaatgtgctcaacagtagtgcaatttatggtagtagaggttctataatttctgcttggtttatcttttgtttggataatgcagttataactgcgtgataaatttacctttaggttttggctggtaatgttatttagtttacagttcttggc

SEQ ID NO: 25530 - DNA, 395 bp, Glycine max
  Clone ID: LIB3051-065-Q1-K1-C2
ggcaggtactggaaaaggtgttacctcaaaagagcagcaagcatgtgtcagacatggagctggatgattgtgaggggaccactttgcatgatgtcaactttaaggaggagatgagacgaaagcagcaacagcaatatcgcgaggcatatgatgaagatgatgatgagccatctggtcaacgagtgcaatgtgctcaacagtagtgcaatttatggtagtagaggttctataatttctgcatggttattatcttttgattgcataatgcagatataactgcgtgataaatttaccctttaagttttggctggtaacggtatttagtcttggcagatttctaaagtctgttatttggtggaatatatgaaaattaaatgatttggtacaaagcgcgc

SEQ ID NO: 25531 - DNA, 449 bp, Glycine max
  unsure (1)..(449): unsure at all n locations
  Clone ID: LIB3051-004-Q1-E1-B2
aaagaaaagaagaacaaagatgcaatcctcaaaggagaagatgaaaaacatggcaagtgctgccaaggaacaagtcgacatctataaagccaaaatagacgagaaggcagagaaagcaacggcaagaacagaagaggagagggtgatagcccatgagcacgcaaaggcaaaggaagctggagcaaagatggagctgcatgaagctaaagcaaggcatgcagcagagaagctaagcgccaaccaatcacattatggtctccaccatggccacaacaaccctcccttagtaggaacaactcagactcactaccagcaagggcaccagcaccagccacttggggcagttcctatgcctggaaccacttatccatcttatccactaggagggaaatcctaacctccaaggaacanacatatataatagatctatctgtgttttgctgtagtac

SEQ ID NO: 25532 - DNA, 429 bp, Glycine max
  Clone ID: LIB3051-116-Q1-K1-E4
gaaaagaagaacaaagatgcaatcctcaaaggagaagatgaaaaacatggcaagtgctgccaaggaacaagtcgacatctataaagccaaaatagacgagaaggcagagaaagcaacggcaagaacagaagaggagagggtgatagcccatgagcacgcaaaggcaaaggaagctggagcaaagatggagctgcatgaagctaaagcaaggcatgcagcagagaagctaagcgccaaccaatcacattatggtctccaccatggccacaacaaccctcccttagtaggaacaactcagactcactaccagcaagggcaccagcaccagccacttggggcagttcctatgcctggaaccacttatccatcttatccactaggaggaaaccctaacccttcaaggaacaaacatatataatagatctatct

SEQ ID NO: 25533 - DNA, 412 bp, Glycine max
  Clone ID: LIB3051-032-Q1-K1-B9
aaaaaagcttctttgtctctcgtgccgattctccaccactattcccttcaccggaatgacactttccgctattagtgtagaagatgagtacgctggatgcaacaagggctgaacttggtcttcttgttttatatttgggcaaggctgaagcaagggacaaaatatgcagggcaatacaatatggttccaaatttttgagtaatggggaacctggtactgctcagaatgtagacaaaacaaccagcttggcacgaaaagtcttccgtctctttaagtttgtcaatgacctacatgctttgataagtccaacaccacaggggacacccctccccctagctctgttgggaaagtccaagaatgctctactctccactttcttggttcttgatcaatttgtgtggcttggcagaac

SEQ ID NO: 25534 - DNA, 406 bp, Glycine max
  unsure (1)..(406): unsure at all n locations
  Clone ID: LIB3051-040-Q1-K1-B4
aattgatactgtggtagcagtaggactgcttcaattggcacccaagacagttactcctcgcgtaactggggcttttggatttgtttcgtctctaatatcttgctatcagttgcttcctgccccggtcaagtccaaaactgtgtgaagtgtggaagaatagaaaggttctcatgacgtgtctgtcgtcaaataattatatgaattggtcaggaaatgtcggttggtgtgagcattgaccaattttcatcatagttacaattgttctctaaaactgttgtgtagggcatctttctattttggtctttcaaaatatatgcaactataatatgttgctccataatttacaaatacatgaatttgtcccctaaaagacatgcaatatcaaattggttcccccacttncnct

SEQ ID NO: 25535 - DNA, 377 bp, Glycine max
  unsure (1)..(377): unsure at all n locations
  Clone ID: LIB3051-029-Q1-K1-A11
canaactcatctcgaaaccctaagcactcgctcgggttcgtgtagtgccaaaccctagggctcattttccagatctattcagtttttctctcctctcttttccgatccaccgttggagatcgaagatggtgtccgacgccagcaagaagaaggccgcacagaagaaggccgtcgccgccgccaagagaggtggcaaagctgccgccgctgccgttatggccgtcacctcttgcaaagccgccgacaaggtcgccaacggaatcgccgatattcagatttcggatcggacctgcaccggcgtcctctgttcgcatcctctctccagagatattcgaatagagtctctatccgtcacattccatggacatgatctcatt

SEQ ID NO: 25536 - DNA, 347 bp, Glycine max
  Clone ID: LIB3051-054-Q1-K2-D5
cccacgcgtccgacaacatcgtattctgcaaattcaaaccgggtcttggttttctgaaagatgggaggtggcaaggacaagcatcatgatgaatctgacaaaggaattttttcacaccttgctcatggggtagctggtgcagcacatggtggacatgggtacccacctggggcttacccaccaccacctggggcataccctccacaacaaggatatcctccagctgggtatcctccacaacaagggtattctccagctgggtacccttcacatcaaggctatcctcctgctggttaccccccagctggttatcctggttcatcacatgcaccaggttctcatgggca

SEQ ID NO: 25537 - DNA, 399 bp, Glycine max
  unsure (1)..(399): unsure at all n locations
  Clone ID: LIB3051-059-Q1-K2-G12
caatttctctctttttgctcagtttctgttgtattttctcaattacaacatcgtattctgcaaattcaaaccgggtcttggttttctgaaagatgggaggtggcaaggacaagcatcatgatgaatctgacaaaggaattttttcacaccttgctcatggggtagctggtgcagcacatggtggacatgggtacccacctggggcttacccaccaccacctggggcataccctccacaacaaggatatcctccagctgggtatcctncacaacaagggtatcctccagctgggtaccctncacatcaaggctatcctcctgctggttaccccccagcttgttatcctggttcatcacatgcaccangttctcatgggcacggcggtatgggagcaatgc

SEQ ID NO: 25538 - DNA, 430 bp, Glycine max
  Clone ID: LIB3051-102-Q1-K1-D5
tgcaatttctcaattactacatcgtattctgcaaattcaaactgggtcttggtttgctggaagatgggaggtggcaaggacaagcaccatgatgaatctgacaaaggaattttttcacagcttgctcatggggtagctggtgcagcacatggtggacatgggtacccacctggggcttacccaccaccacctggggcataccctgcgcaccaagggtaccctccacaacatgggtatcctccggctgggtaccctccacatcaaggttaccctcctgctggttacccaccagctggttatcctggttcatctcatgcaccaggttctcatggtcacggcggcatgggagcaatgctcaccgtgggtgctgccgcggctgctgctgcttatggtgctcaccatgtctctcatggctcccatggctcctatg

SEQ ID NO: 25539 - DNA, 178 bp, Glycine max
  Clone ID: LIB3051-022-Q1-K1-B2
ggaaaaatggtttcgctgaaactgctgaagcggctcgcagccagcgtcctcaagtgtggcagatgaaaggtttggcttgaccccaatgaagtcaacgaaatctccatggctaattctcgccaaaacataaggaacctggttaaggatgggttaataatcaggaaccccttcaagattc

SEQ ID NO: 25540 - DNA, 444 bp, Glycine max
  Clone ID: LIB3051-016-Q1-E1-E5
tcccgggcaataacacactgtaaccgttccgttccgttttcctctgttttttttttctttctttcaaatccccgcttcgtggaaatcccgaaccagaaaccatgcttctccgaaccgctgctgcttctgcttcgtccctctccctcttcagcccgaacgccgaacctccccgttcggttcccgctcgtggattggtggttcgcgcagcgaaaggatccacgaaccaccgcgccctgaccggagtgatttttgaaccgttcgaagaggtgaagaaggagctcgatctcgttcccaccgttccgcaagcttctctcgcgcgccaaaaatacgttgacgaatctgagtccgccgttaacgaacaaatcaatgtggagtataacgtttcgtacgtgtaccatgccatgtttgcgtacttcgatacggacaacgttgcgctgagaggac

SEQ ID NO: 25541 - DNA, 392 bp, Glycine max
  Clone ID: LIB3051-051-Q1-K1-B6
cccacgcgtccgcccacgcgtccgtctgagtccgccgttaacgaacaaatcaatgtggagtataacgtttcgtacgtttaccatgccatgtttgcgtacttcgatagggacaacgttgcgctgagaggacttgccaagttttttaaggaatcgagtgaagaagaaagagagcatgctgagaaattgatggagtatcagaacaaacgtggtggaaaagtgaagttgcagtcaattgtgatgccgctttctgattttgatcatgcagataagggagatgcgctgcacgcaatggaactcgctctgtcattagagaagctaaccaacgagaagctccttaacttgcacagtgttgccacaaagaatggtgacgtgcagttggctgacttcgtgga

SEQ ID NO: 25542 - DNA, 443 bp, Glycine max
  Clone ID: LIB3051-008-Q1-E1-F5
accacgcgtccgaaaaaaaattagaaaacaatatagatacgatcttttatcctataattttatcaattatgcagataagaaagactcatatatttatggatatagatccctatttcaagtaaaaaaaaaccaagtgatttcttctaattacaacacgtataaaaaagaattattggatatcatagataatctctttatcaagaattatatatcggaagatgcgattctagatatggaaaaaaatatgtatagaaagtattttgattggatgggaatcaatagagaaatactaaatcgttccatatcgaatccagaattttggttcttttcaaaatttgtgatattttatgacgcatataggggtaactcgcaggttataccaatcaaattactttttttttcttctaatgtaaatcaaaatgttagtgaaaataaaaagaaca

SEQ ID NO: 25543 - DNA, 413 bp, Glycine max
  Clone ID: LIB3051-016-Q1-E1-G9
agcttttcgtctcaaaccttggcacaaatctaagctacgatccaatgaaaagaaaaaggatctaatgaaaaaaaagaacttttgttttctaacagtttgggggatggaagtcgacttgcccttttctggttctccccaaaaaaatagattttcatcattttttgaccccatttttaaagaactaaaaaaaaaaacgaaacaatttcaatttttcacttttcgagttctaaaagttttaagtgaaaaattgaaattgtttctaactatcttaatagaaaaagcaaaaaggattagcaaaagtattatcgaaagtattcttaaaagtattctcaaaagtattctaagcctaacgaaaataaaacaatttttcaaattgctatttattaaatttaaattcaaaaagatagatgaat

SEQ ID NO: 25544 - DNA, 381 bp, Glycine max
  Clone ID: LIB3051-004-Q1-E1-E10
attttcttcatccttctctgttctcctagaacttgattacttgaacattccctatgacagatgaggtggttcttctggatttctggccaagtccatttgggatgagggtcaggattgcacttgctgaaaagggtatcgaatatgagtacaaagaagaggacttgaggaacaagagtcctcttctcttacaaatgaacccggttcacaagaagattccggttctcatccacaatggcaaacccatttccgaatccctcattgctgttcagtacattgaggaggtttggaatgacagaaatcccttgttgccttcagacccttaccagagagctcaggctagattctgggctgattatgttgacattaagatacatgatcttg

SEQ ID NO: 25545 - DNA, 367 bp, Glycine max
  Clone ID: LIB3051-008-Q1-E1-H8
cccacgcatccgcttgatccttctttttctccttgaactcaaacatggcagatgaggtggttctgctagatttctggccaagtccatttgggatgagggtcaggattgcacttgctgaaaagggtatcaaatatgagtacaaagaagaggacttgaggaacaagagtcctcttctcctccaaatgaacccggttcacaagaagattccggttctcatccacaatggcaaacccatttgtgaatccctcattgctgttcagtacattgaggaggtttggaatgacagaaatcccttgttgccttctgacccttaccagagagctcaggctagattctgggctgattatgttgataagaagatatatga

SEQ ID NO: 25546 - DNA, 467 bp, Glycine max
  Clone ID: LIB3051-012-Q1-E1-F6
ccggtcaagacttcccggcttctactttgagtcatcttgatccttctttttctccttgaactcaaacatggcagatgaggtggttctgctagatttctggccaagtccatttgggatgagggtcaggattgcacttgctgaaaagggtatcaaatatgagtacaaagaagaggacttgaggaacaagagtcctcttctcctccaaatgaacccggttcacaagaagattccggttctcatccacaatggcaaacccatttgtgaatccctcattgctgttcagtacattgaggaagtttggaatgacagaaatcccttgttgccttctgacccttaccagagagctcaggctagattctgggctgattatgttgataagaagatataggatcttggaaggaagatttggacatcaaaacgagaagaagaagaagctgccaagaaagagttcataaaagcccttaaat

SEQ ID NO: 25547 - DNA, 376 bp, Glycine max
  Clone ID: LIB3051-017-Q1-E1-H6
aggtttggaatgacagaaatcccttgttgccttcagacccttaccagagagctcaggctagattctgggctgattatgttgacattaagatacatgatcttggaaagaagatttggacatcaaagggagaagaaaaagaagctgccaagaaggagttcatagaggcccttaaattgttggaggaacagctgggagataagacttattttggaggagacaatattggttttgtggatatagcacttgttccattctacacttggttcaaagtctatgagacttttggcagcctcaacattgagaatgagtgccccaagtttgttgcttgggccaagaggtgcctacagaaagagagtgttgcaaagtctcttcctga

SEQ ID NO: 25548 - DNA, 442 bp, Glycine max
  unsure (1)..(442): unsure at all n locations
  Clone ID: LIB3051-027-Q1-K1-D6
cggacgcgtgggcggacgcgtgggcggtcgcgtgggcggacgcgtgggcagttttctacttgaatcttcgttatccttctttttttctccttgaactcgaatattcactatggcagatgaggtggttctgctagatttctggccaagtccatttgggatgagggtcaggattgcacttgctgaaaagggtatcaaatatgagtccaaagaagaggacttgcagaacaagagccctttgctcctcaaaatgaacccggttcacaagaaaatcccggttctcatccacaatggcaaacccatttgtgaatctctcgttgctgttcagtacattgaggaggtctggaatgacagaaatcccttgttgccttctgacccttaccagagagctcaggctagattctgggctgactntgttgacaataagatatttgatcttggaaga

SEQ ID NO: 25549 - DNA, 422 bp, Glycine max
  Clone ID: LIB3051-034-Q1-K1-E4
attttcttcatccttctctgttctcctagaacttgattacttgaacattccctatgacagaggaggtggttcttctggatttctggccaagtccatttgggatgagggtcaggattgcacttgctgaaaagggtatcgaatatgagtacaaagaagaggacttgaggaacaagagtcctcttctcttacaaatgaacccggttcacaagaagattccggttctcatccacaatggcaaacccatttccgaatccctcattgctgttcagtacattgaggaggtttggaatgacagaaatcccttgttgccttcagacccttaccagagagctcaggctagattctgggctgattatgttgacattaagatacatgatcttggaaagaagatttggacatcaaagggagaagaaaaagaagct

SEQ ID NO: 25550 - DNA, 410 bp, Glycine max
  Clone ID: LIB3051-034-Q1-K1-E6
cccaattccgacccgcacgtacgcatctcttgatccttctctgttctcctataacttgattacttgaacattccctatgacagatgaggtgcttcttctggagttgtggccaagtccatttgggatgagggtcacgattgcacttgctgaaaagggtatcgaatatgagtacaaagaagaggacttgaggaacaagagtcctcttctcttacaaatgaacccggttcacaagaagattccggttctcatccacaatggcaaacccatttccgaatccctcattgctgttcagtacattgaggaggtttggaatgacagaaatcccttgttgccttcagacccttaccagagagctcaagctagattctgggctgattatgttgacattaagatacatgatcttggaaaga

SEQ ID NO: 25551 - DNA, 432 bp, Glycine max
  Clone ID: LIB3051-040-Q1-K1-C3
gaaaagggtatcgaatatgagtacaaagtagaggacttgaggaacaagagtcctcttctcttacaaatgaacccggttcacaagaagattccggttctcatccacaatggcaaacccatttccgaatccctcattgctgttcagtacattgaggaggtttggaatgacagaaatcccttgttgccttcagacccttaccagagagctcaggctagattctgggctgattatgttgacattaagatacatgatcttggaaagaagatttggacatcaaagggagaagaaaaagaagctgccaagaaggagttcatagaggcccttaaattgttggaggaacagctgggagataagacttattttggaggagacaatattggttttgtggatatagcacttgttccattctacacttggttcaaagtctatgag

SEQ ID NO: 25552 - DNA, 418 bp, Glycine max
  Clone ID: LIB3051-041-Q1-K1-F2
gtcttcttgtctctagaactgtttctgaacattccctatgacagatgaggtggtcttctggatttctggccaagtccatttgggatgagggtcacgattgcacttgctgaaaaggtatcgaatatgagtcaaagaagaggacttgaggaacaagagtcctcttctcttacaaatgaacccggtcacaagaagattccgttctcatccacatggcaacccatttccgactccctcattgctgtcagtacattgaggaggttcggaatgacagaaatcccttgttgccttcagacccttaccagagagctcaggctagattctgggctgattatgttgacattaagatacatgatcttggaaagaagatttggacatcaaagggagaagacaaagaaactgccaagaaggagttcataga

SEQ ID NO: 25553 - DNA, 415 bp, Glycine max
  Clone ID: LIB3051-050-Q1-K1-F1
gaatcttcgttatccttcctttttttcttccttggaactcgaatattcactatggcagatgaggtggttctgctagatttctggccaagtccatttgggatgagggtcaggattgcacttgctgaaaagggtatcaaatatgagtccaaagaagaggacttgcagaacaagagccctttgctcctcaaaatgaacccggttcacaagaaaatcccggttctcatccacaatggcaaacccatttgtgaatctctcgttgctgttcagtacattgaggaggtctggaatgacagaaatcccttgttgccttctgacccttaccagagagctcaggctagattctgggctgactttgttgacaataagatatttgatcttggaagaaagatttggacatcaaagggagaagaaaaag

SEQ ID NO: 25554 - DNA, 419 bp, Glycine max
  Clone ID: LIB3051-051-Q1-K1-A5
tcgatctattctactttgagtcttcttgatccttgtacctctccttgaactcaaacatggcagatgaggtggttctgctagatttctggccaagtccatttgggatgagggtcaggattgcacttgctgaaaagggtatcaaatatgagtacaaagaagaggacttgaggaacaagagtcctcttctcctccaaatgaacccggttcacaagaagattccggttctcatccacaatggcaaacccatttgtgaatccctcattgctgttcagtacattgaggaggtttggaatgacagaaatcccttgttgccttctgacccttaccagagagctcaagctagattctgggctgattatgttgataagaagatatatgatcttggaaggaagatttggacatcaaaaggagaagaaaaa

SEQ ID NO: 25555 - DNA, 427 bp, Glycine max
  Clone ID: LIB3051-051-Q1-K1-E4
tgaatcttcgttatccttctttttttctccttgaactcgaatattcactatggcagatgaggtggttctgctagatttctggccaagtccatttgggatgagggtcaggattgcacttgctgaaaagggtatcaaatatgagtccaaagaagaggacttgcagaacaagagccctttgctcctcaaaatgaacccggttcacaagaaaatcccggttctcatccacaatggcaaacccatttgtgaatctctcgttgctgttcagtacattgaggaggtctggaatgacagaaatcccttgttgccttctgacccttaccagagagctcaggctagattctgggctgactttgttgacaataagatatttgatcttgggaagaaagatttggacatcaaagggagaagaaaaagaagctgccaaaaa

SEQ ID NO: 25556 - DNA, 356 bp, Glycine max
  Clone ID: LIB3051-067-Q1-K1-C12
cttcatccttctctggtctactagaacttgattacttgaacagtgccgatgacagatgaggtggttcttctggatttctggccaagtccatttgggatgagggtcaggattgcacttgctgaaaagggtatcgaatatgagtacaaagaagaggacttgaggaacaagagtcctcttctcttacaaatgaacccggttcacaagaagattccggttctcatccacaatggcaaacccatttccgaatccctcattgctgttcagtacattgaggaggtttggaatgacagaaatcccttgttgccttcagacccttaccagaaagctcaagctagattctgggctgattatggtga

SEQ ID NO: 25557 - DNA, 381 bp, Glycine max
  Clone ID: LIB3051-067-Q1-K1-E6
cttgaattttcttcatccttctctgttctcctagaacttgattacttgaacattccctatgagagatgaggtggttcttctggatttctggccaagtccatttgggatgagggtcaggattgcacttgctgaaaagggtatcgaatatgagtacaaagaagaggacttgaggaacaagagtcctcttctcttacaaatgaacccggttcacaagaagattccggttctcatccacaatggcaaacccatttccgaatccctcattgctgttcagtacattgaggaggtttggaatgacagaaatcccttgttgccttcagacccttaccagagagctcaggctagattctgggctgattatgttgacattaagatacatga

SEQ ID NO: 25558 - DNA, 380 bp, Glycine max
  unsure (1)..(380): unsure at all n locations
  Clone ID: LIB3051-068-Q1-K1-H11
ctngaatnnncttcatccttctctgttctcctagaacttgattacttgaacattccctatgacagatgaggtggttcttctggatttctggccaagtccatttgggatgagggtcaggattgcacttgctgaaaagggtatcgaatatgagtacaaagaagaggacttgaggaacaagagtcctcttctcttacaaatgaacccggttcacaagaagattccggttctcatccacaatggcaaacccatttccgaatccctcattgctgttcagtacattgaggaggtttggaatgacagaaatcccttgttgccttcagacccttaccagagagctcaggctagattctgggctgattatgttgacattaagatacatg

SEQ ID NO: 25559 - DNA, 415 bp, Glycine max
  Clone ID: LIB3051-075-Q1-K1-G4
gaattttcttcatccttctctgttctcctagaacttgattacttgaacattccctatgacagatgaggtggttcttctggatttctggccaagtccatttgggatgagggtcaggattgcacttgctgaaaagggtatcgaatatgagtacaaagaagaggacttgaggaacaagagtcctcttctcttacaaatgaacccggttcacaagaagattccggttctcatccacaatggcaaacccatttccgaatccctcattgctgttcagtacattgaggaggtttggaatgacagaaatcccttgttgccttcagacccttaccagagagctcaggctagattctgggctgattatgttgacattaagatacatgatcttggaagaagatttggacatcaaaaggagaagaaa

SEQ ID NO: 25560 - DNA, 414 bp, Glycine max
  Clone ID: LIB3051-075-Q1-K1-H8
cttcatccttctctgttctcctagaacttgattacttgaacattccctatgacagatgaggtggttcttctggatttctggccaagtccatttgggatgagggtcaggattgcacttgctgaaaagggtatcgaatatgagtacaaagaagaggacttgaggaacaagagtcctcttctcttacaaatgaacccggttcacaagaagattccggttctcatccacaatggcaaacccatttccgaatccctcattgctgttcagtacattgaggaggtttggaatgacagaaatcccttgttgccttcagacccttaccagagagctcaggctagattctgggctgattatgttgacattaagatacatgatcttgggaagaagatttggacatcaaagggagaagaaaaagaa

SEQ ID NO: 25561 - DNA, 424 bp, Glycine max
  Clone ID: LIB3051-084-Q1-K1-F2
cccacgcgtccgcttcatccttctctgttctcctagaacttgattacttgaacattccgtatgacagatgaggtggttcttctggatttctggccaagtccatttgggatgagggtcaggattgcacttgctgaaaagggtatcgaatatgagtacaaagaagaggacttgaggaacaagagtcctcttctcttacaaatgaacccggttcacaagaagattccggttctcatccacaatggcaaacccatttccgaatccctcattgctgttcagtacattgaagaggtttggaatgacagaaatcccttgttgccttcagacccttaccagagagctcatgctaaattctgggctgattatgttgacatttagatacatgatcttggaaagaaaatttggacatcaaagggagaagaaaaag

SEQ ID NO: 25562 - DNA, 376 bp, Glycine max
  unsure (1)..(376): unsure at all n locations
  Clone ID: LIB3051-085-Q1-K1-D6
cccacgcgtccgcccacgcgtccgtgaatcttcgttatccttctttttttctccttgaactcgaatattcactatggcagatgaggtggttctgctagatttctggccaagtccatttgggatgagggtcaggattgcacttgctgaaaagggtatcaaatatgagtccaaagaagaggacttgcagaacaagagccctttgctcctcaaaatgaacccggttcacaagaaaatcccggttctcatccacaatggcaaacccatttgtgaatctctcgttgctgttcagtacattgaggaggtctggaatgacaganatcccttgttgccttctgacccttaccagagagctcaggctagattctgggcttgactt

SEQ ID NO: 25563 - DNA, 440 bp, Glycine max
  Clone ID: LIB3051-086-Q1-K1-D4
gcgcccacgcgtccgattttcttcatccttctctgttctcctagaacttgattacttgaacattcggtatgacagatgaggtggttcttctggatttctggccaagttcatttgggatgagggtcaggattgcacttgctgaaaagggtatcgaatatgagtacaaagaagaggacttgagtaacaagagtcctcttgtcttacaaatgaaccctgttcacaagaagattccggttctcatgcacaatggcatacccatttccgaatccctcattgatgttcagtacattgaggaggactggaatgacagaaattccttgatgacttcagacccttaccagagagctcaggctagaatctgtgctgattatgtcgacattaagatacatgatcttggaaagaagatatggacatctaaggaagaaggaaacgaagctgtc

SEQ ID NO: 25564 - DNA, 404 bp, Glycine max
  unsure (1)..(404): unsure at all n locations
  Clone ID: LIB3051-097-Q1-K1-E8
cccacgcgtccgantttcnncattcnnttttgncctccgagtttcttgactacttgaacattccctgtgacagatgaggtggttcttctggatttctggccaagtccatttgggatgagggtcaggattgcacttgctgaaaagggtatcgaatatgagtacaaagaagaggacttgaggaacaagagtcctcttctcttacaaatgaacccggttcacaagaagattccggttctcatccacaatggcaaacccatttccgaatccctcattgctgttcagtacattgaggaggtttggaatgacagaaatcccttgttgccttcagacccttaccagagagctcaagctagattctgggctgattatgttgacattaagatacatgatcttggaaagaagat

SEQ ID NO: 25565 - DNA, 123 bp, Glycine max
  Clone ID: LIB3051-097-Q1-K1-F11
tgggatgagggtcatgattgcacttgctgaaaagggatcgaatatgagtacaaataaatacttgatgaacaagagtcctcttctttaaaatgaaccctgtcacaagaagattccgttctatca

SEQ ID NO: 25566 - DNA, 417 bp, Glycine max
  Clone ID: LIB3051-113-Q1-K1-F1
cccacgcgtccgcttgaatcttcgttatccttctttttttctccttgaactcggatattgactatggcagatgaggtggttctgctagatttctggccaagtccatttgggatgagggtcaggattgcacttgctgaaaagggtatcaaatatgagtccaaagaagaggacttgcagaacaagagccctttgctcctcaaaatgaacccggttcacaagaaaatcccggttctcatccacaatggcaaacccagttgtgaatctctcgttgctgttcagtacattgaagaagtctggaatgacagaaatccccttgtgccttctgacccttaccagaaagctcagggtagattctgggcttgactttgtgacaataagatatttgatctttgaagaaagatttggacattaaaggga

SEQ ID NO: 25567 - DNA, 419 bp, Glycine max
  Clone ID: LIB3051-116-Q1-K1-A10
gaattttcttcatccttctctgttctcctagaacttgattacttgaacattccctatgacagatgaggtggttcttctggatttctggccaagtccatttgggatgagggtcaggattgcacttgctgaaaagggtatcgaatatgagtacaaagaagaggacttgaggaacaagagtcctcttctcttacaaatgaacccggttcacaagaagattccggttctcatccacaatggcaaacccatttccgaatccctcattgctgttcagtacattgaggaggtttggaatgacagaaatcccttgttgccttcagacccttaccagagagctcaggctagattctgggctgattatgttgacattaagatacatgatcttggaaagaagatttggacatcaaagggagaagaaaaag

SEQ ID NO: 25568 - DNA, 345 bp, Glycine max
  Clone ID: LIB3051-003-Q1-E1-B12
caccaccaccaccaaccaaccaccccttccagacaaaaaagtggtgtcatcatgtgagaagaagaagaagaaaagtgtgagtgcagaaaagaagagtggtgggcgagctcggaagaacgtgtacagaggaatcaggcaaaggccgtggggcaagtgggccgcggaaataagggacccacataagggcgtccgcgtctggctcggcaccttccccaccgccgaggaagccgcccgagcctacgacgacgccgccaagcgcatccgcggcgacaaggccaagctcaacttcccggccaccgctccgccaccctccaaaaaacaacgctgccttaggcctgattccac

SEQ ID NO: 25569 - DNA, 446 bp, Glycine max
  Clone ID: LIB3051-004-Q1-E1-H8
gtttgtcacgagacccatagtgctgccaaattatagtaactctctttctctatctgaagaagaagaagttctgaagaagcatgtgtggaggtgctatcatctcagacttcattggtgtgaagcgtggccgcaacctcgccgcgcaggaactgtggtccgagcttgaccctttctctgacctccttggcttcgataccaccaccaccaccaccaaccaaccaccccttccagacaaaaaagtggtgtcatcatgtgagaagaagaagaagaaaagtgtgagtgcagaaaagaagagtggtgggcgagctcggaagaacgtgtacagaggaatcaggcaaaggccgtggggcaagtgggccgcggaaataagggacccacataagggcgtccgcgtctggctcggcacctttcccaccgccgaggaagccgcccgagcctacgacgac

SEQ ID NO: 25570 - DNA, 355 bp, Glycine max
  Clone ID: LIB3051-043-Q1-K1-F7
cccacgcgtccgcacgagactcatacattgtgctgccaattatagtaactctctagttctctttccatctctcaagttctgaagaagaaacatgtgtggaggtgctatcatctcagacttcattggtgtgaagcgtggccgcaacctcgccgcgcaggaactatggtctgagcttgaccctttctctgacttccttggcttcgataccaccaattccaaaaaccaaccacccctgcagaaaattccagacaaaaaagtggtgtcatcatgtgagaagaagaagaaaagcgtggtgggtgcagaaaagaagaagagtgatagtgggcgagctcgtaaaaacgtgtacagaggaatc

SEQ ID NO: 25571 - DNA, 408 bp, Glycine max
  Clone ID: LIB3051-062-Q1-K1-D3
acgagactcatacattgtgctgccaattatagtaactctctatttctctttccatctggcaaggtctgaagaagaaacatgtgtggaagtgccatcatcttagactctaatggtgtgaaacgtgggcgcaaactctccgcgcacgagctctatgctgagctcgagcctttctctgacactcttggctttgataccccccatttcaaaaacccaccacacctgtgcaaaatttcacacacaaaagaggtgtcgtatcatgagaaaaagaaaaaaaacagggtgggtgcagcaaagaagaagaagagtgatagtgggcgagctcgtaaaaacgtgtacagaggaatcaggcaaaggccatggggcaagtgcgccgcggagataagggacccacacaggggtgttcgtgtc

SEQ ID NO: 25572 - DNA, 466 bp, Glycine max
  Clone ID: LIB3051-080-Q1-K1-E2
gtttgtctgtcacgagactcatacattgtgctgccaattatagtaactctctatttctcttggcatctctcaagttctgaagaagaaacatgtgtggaggtgctatcatctcagacttcattggtgtgaagcgtggccgcaacctcgccgcgcaggaactatggtctgagcttgaccctttctctgacttccttggcttcgataccaccaattccaaaaaccaaccacccctgcagaaaattccagacaaaaaagtggtgtcatcatgtgagaagaagaagaaaagcgtggtgggtgcagaaaagaagaagagtgatagtgggcgagctcgtaaaaacgtgtacagaggaatcaggcaaaggccatggggcaagtgggccgccgagataaaggacccacacaagggtgttcgtgtctggctcggcacctttcccaccggcgaagaagcccgcccaagcctacgacg

SEQ ID NO: 25573 - DNA, 436 bp, Glycine max
  Clone ID: LIB3051-096-Q1-K1-G1
gtcacgagacccatagtgctgccaaattatattaactctctttctctatctgaagaagaaggagttctgaagaagcatgtgtggaggtgctatcatctcagacttcattggtgtgaagcgtggccgcaacctcgccgcgcaggaactgtggtccgagcttgaccctttctctgacctccttggcttcgataccaccaccaccaccaccaaccaaccaccccttccagacaaaaaaagtggtgtcatcatgtgagaagaagaagaagaaaagtgtgagtgcagaaaagaagagtggtgggcgagctcggaagaacgtgtacagaggaatcaggcaaaggccgtggggcaagtgggccgcggaaataagggacccacataagggcgtccgcgtctggctcggcacctttcccaccgtcgaggaagccgtccgagccta

SEQ ID NO: 25574 - DNA, 432 bp, Glycine max
  Clone ID: LIB3051-101-Q1-K1-C12
cccacgcgtccggtcacgagactcatacattgtgctgccaattatagtaactctctattgcggtttccatctctcaagttctgaagaagaaacatgtgtggaggtgctatcatctcagacttcattggtgtgaagcgtggccgcaacctcgccgcgcacgaactatggtctgagcttgaccctttctctgacttccttggcttcgataccaccaattccaaaaaccaaccacccctgcagaaaattccagacaaaaaagtggtgtcatcatgtgagaagaagaagaaaagcgtggtgggtgcagaaaagaagaagagtgatagtgggcgagctcgtaaaaacgtgtacagaggaatcaggcaaaggccattgggcaagtgggccgcggagataaggacccacacaagggtgttcatgtctggctcggcacct

SEQ ID NO: 25575 - DNA, 445 bp, Glycine max
  Clone ID: LIB3051-088-Q1-K1-G3
gcacaagttgaacttcgtgacgagcatgggaacccagttgaactaacagatgcatatgggaatccggtttggttaacggacgagaaaggcaacccggtgcacctcacggctgtggcaaccaatgcacacaaatctatgcttcagaatgacaccccacaagagcttcctcactccaagagttcaagctcgtctgaggatgaagggcatggagagaggatcaggaagggactgaaggataacatagaagaaaagttaccagctggagaaggagtagtgaaggagaataaacacaccacaattgctgcttctacttctacaacagatactagtgatgctaatcaccacccaaccactgagcatgagaagaagagtatcatagacaagattaaagaaaaattccaataaatcagcagtgaatattaatatatattcacgaattgaagct

SEQ ID NO: 25576 - DNA, 440 bp, Glycine max
  Clone ID: LIB3051-081-Q1-K1-B1
atctgtattctcttctcatcgcgcgtaagatacacattttagttgctactaatgggaactgttgaagctgcgaacaaggatgcaaatggaagtctcctagagaaaaatccttcagttgtttttgtgttaggtggcccaggaagtggaaagggtacccaatgtgcaaatattgtccaaaattttgggtatactcatctcagcgctggtgatcttctgcgagcagaaatcaaatctggtcctgaaaatggtacaatgattcagaatatgattaaagaaggaaaaattgttccctctgaggtaacaattaagctcttacaaaaagcaatgcaggaaagtggcaatgacaaatttcttattgatggttttccccgcaatgaggaaaaccgggcagcatttgagaaagtgacaggaatagagccagcatttgtcttattttttga

SEQ ID NO: 25577 - DNA, 430 bp, Glycine max
  Clone ID: LIB3051-091-Q1-K1-A6
cccacgcgtccgattaagaaccctccagaagttaagaaaggatccaaagacaagaaggcgatgaggagagctgagaaggagagacagaaggaaggtgaattagctgatgaggaacagaagaaagtgaagaaagaggttaagaagaaaggctcttcatcttctaaggatggcactgctaaatcaacctcttctaagaaaaaagcaagtggctctgatgaagaccacacttcacctactcacagtcaaattgacgagaaagaggaggctccagatgaagatgatgacgacgacgtgcaatggctgacagatacatcacttgatgctgcccgtcaacgtatccaagaacagttaagtgctgtgacagctgataattggttatgctttctacagatgaaccagagaagaagaaaaaaacaataagtaacagaaa

SEQ ID NO: 25578 - DNA, 348 bp, Glycine max
  unsure (1)..(348): unsure at all n locations
  Clone ID: LIB3051-106-Q1-K1-B1
atgcgatacagtggttggaggggaaccagttggcggaagtggatgagtttgaggacaagcagaaggagttggaagggatctgcaaccccatcattgcgaaaatgtaccagggtgctgctgctagacctggtggagatgttcctacgggtgatgatgacatgcctggtgctggtggtgctggttctggcgcgggacctaagattgaagaagttgactaagcttgtgcatgtgactaactcaaaaactttggttaggttcttgttatttggtctaataatgtaagttttagtgatgatgtaaggtttcaggaatcgtgaataagtcttttntgcttcatgtgatgagtgt

SEQ ID NO: 25579 - DNA, 417 bp, Glycine max
  Clone ID: LIB3051-100-Q1-K1-D7
attgattttcagttgcgttttcgatttggcagacaaggagatccaggaaggtccggctttttctggagtgtggaagataacatatttcgtatttttggtggagatcgaattcagggcctaatgcaagcgttcagagttgaagacctacctattgaatccaagatgttgaccaaagctttagatgaagcccaaaggaaagtggagaactatttctttgacattcggaagcaatttgttgagtatgaagaagtacttaacagccaaagagatcgagtttatacagagagaagactagcccttgaatctgacaatcttcagtctctttctaatgaatatgctgaattgacaattggatgacattttagaagcaaacattggttcttatgctccaaaagacagctgggaatcttgaaaaac

SEQ ID NO: 25580 - DNA, 326 bp, Glycine max
  Clone ID: LIB3051-008-Q1-E1-D4
agacttaatggatgcattgaggattatggtgctgatgcatttcctttcacaaggaagaagcatgaagaattgatagccatagatataaggaagcgtgaggaagcaaacttggaagaattattgggacacaaaaggtgccactttctcatctcaagagatgatagaaaggtgcccatatctgaactagctggtaaaaccataggcctttattttggggcctattggtctcctccttgctgcgccttcactgtccaacttaccgatgcatacaacaatctcaaggtggaaaaaggcgactgctttgagaatgtttcaatctcaacaga

SEQ ID NO: 25581 - DNA, 446 bp, Glycine max
  Clone ID: LIB3051-115-Q1-K1-B1
tcgtccacgcgttcgagaatgtacagtgagcttatttcaaagagtattacagaaggtggaccttttgcatctagaacatcctatgtcaaacttctacgttcggttaagagggagacacttaagctgattgagacattcttggataaggcagaagaccagccacaaatcggcaaacaatttgtgccgccaatgatggatcctggtcttggagattactccaggaatgttcctgatgcaagggaatcaaaggttttgtcactttttgcaacaattgttaacaaatataaagctgcaatgattgaagatgtacctcgcatatttgaagctgtttttcagtgcacacttgagatgattacaaaaaaattttgaagattacccagagcatcggctcaagttcttctctctacttcgtgccatagctactcattgtttcctgcattaatctg

SEQ ID NO: 25582 - DNA, 397 bp, Glycine max
  Clone ID: LIB3051-116-Q1-K1-B1
caaacacgtcactaatcgtatcaacaattcaccatgcgcttgagctgcaatggatgccgcgttctccgcagagggtgcaccactgagtgccccattcgcatctccctccaatggatcaattcccctaactcccaatccaacgcaaccctcttccttgcaaagttctatggccgccaaggcctcctcaccctcctcaccaacgctccctcacaactacaacaagccgttttaaaatctttgctttacgaagcatgcggtcgaatagtgaacccggttctcggctcgaccgggttgctctccaccgggaattggcatttgtgcgaagccgcggtcaaagccgttcttaatggcgcgccgattgagcaggctcctttggacggcgccacaagcctgcagc

SEQ ID NO: 25583 - DNA, 424 bp, Glycine max
  Clone ID: LIB3051-018-Q1-E1-D4
gaccacgcgtcagggagtccctaaatacatgtgaatggttcagcgatttttgtccagttcgtgcacaccataataaccaatcactggcccatcaagcctacttctatgttgccatgaaattcaaggacctttatgcatccctcacagggaaaaaactctttgtggcacaagccagggcaatggaccgagtaactgttgatgaggcattcaagtacataaaagatatcctgaaatgggatgaatagaacgaggataatttctatggtccacctgaggattcattttacagcacagacataagctcctctacctttatcatacaatagtgaatgagtgtccataaaataatacattattacttggctgttgaaaacggttaaaaatgtaacgtgctggccagcttgtgttctgtgatcctatatgt

SEQ ID NO: 25584 - DNA, 376 bp, Glycine max
  Clone ID: LIB3051-023-Q1-K1-E9
tctcctaattctctctcactacatccatcctgcggagacaaaacaagcctcttagcgtgcgttcaagtttcacacgttcttccactatgtcctggttgagacacctctcctccaagttctcctccaccaccatcacaagcacgcgccgcttcacttccctgtcccggttcagtacctcgaccgctccggctcgtcatgcgggcctggggcccactcaggcccatgagaaagcccaggtggtggtgctgggctcccggttggcccgggtggccgcttagaaagggctcgacactgcaatctacgacgtcgtttgcgtgatcccttgcatccacatggtcttcacgcctctcttggcctccacggtgtgggaactttt

SEQ ID NO: 25585 - DNA, 358 bp, Glycine max
  unsure (1)..(358): unsure at all n locations
  Clone ID: LIB3051-097-Q1-K1-D12
gtccggccgtctnctgcatcagtttcaactgcactttcaaattcgccaccagtttcccccaagtggttctcaccgccgcttccttcgacccaaacctctggtaccaaatcagcaagactattgggaaggaagcgagggcggtgtacaatgcggggcaagcgacggggatgacgttctgggctccgaacataaacgttttcagggatccacggtgggggagagggcaagagactgcaggggaagaccctctgatgaatgccaagtatggtgtggcgtatgtgagagggcttcaaggggattcctttgaaggagggaaactgggtgagaggcttcaagcttcggcgtgttgcaagcactt

SEQ ID NO: 25586 - DNA, 435 bp, Glycine max
  Clone ID: LIB3051-031-Q1-K1-B5
ctttccacacacacaacacaaatacctctctttctctctcttcttcgcattctgcggacatacaaaaactcacactctctctctctctcttcaaatcaaaacccctcacaaaattcacaacaacatacacacaaatcccaaatcctgtcttctcatataaaagaacccttctttcgaatccttcccgctctctctctctcttattctttttccctatccgattcaattcgcgcgcagttccaaaccctagtccccctctccgagctctgtgattcttgggttgataaaaaaaattagggtttgatggctgaccaaggattggaagggagccaaccagtggatctacagaagcatccttctgggatcgtgcctacccttcaaaatattgtgtccacagtcaatttggactgtaagttggacctcaaaacaattgcc

SEQ ID NO: 25587 - DNA, 460 bp, Glycine max
  Clone ID: LIB3051-102-Q1-K1-E9
cccacgcgtccgtttctctctcttcaaatcaaaacccatcacaattcacaacaacatgcagatcccaaatcctatcttttctcttctcatataaaagaacccttctttcgaatccttcccgctcttttccctctgatttaattcatgcgcagatccaaaccctaatccatctctccgagctctttgatttttgagttaataaaaaaaaaaaaaattagggtttgatggctgaccaaggattggaagggagccagccggtggatctacagaagcatccttctgggatcgtgcctacccttcaaaatattgtgtccacagtcaatttggactgtaagttggacctcaaaacaattgcacttcaagctcgtaatgcagagtacaatcccaagcgttttgctgctgtcattatgaggataagagatcccaaaacaactgcacttatttctgcttctggcaagat

SEQ ID NO: 25588 - DNA, 373 bp, Glycine max
  Clone ID: LIB3051-091-Q1-K1-H4
acagaatatatggagttgggatcatcgtattacttgatacatttgaacggtcaaaagaagaagcttgattggcggataagactgaggatgttgcgtgacatatgcaagggtttgatgtgcatacacagaatgaacgtgtgtcaccgtgatctgaaaagtgcaaattgtctagtgaataagcattggactgtcaaaatatgtgatattgagctttcaagaataatgacagagtctcccatgagagattctgtatcaactggaacgccaaaatggatggctcctgagcttattcgaaatgaaccgttcacagaaaaatgtgatatcttcagacttgtggtgataactgtgggaaactctgtgacctgtgaacaga

SEQ ID NO: 25589 - DNA, 428 bp, Glycine max
  Clone ID: LIB3051-039-Q1-K1-B5
ggaaccttggccacagatatcggagagtgccaagagccttgtgcggcgaatgttggagccggatcctaaaaagcgcttgacagcggaacaggtgcttgaacatccctggctgcaaaatgcaaagaaagctccaaatgttccattaggagatattgtgaggtcaaggcttaagcagttttctgtgatgaatagattcaaaaagaaagctctgcgggtaattgcagaacatttatctgttgaagaggtagaaataatcaaagacatgtttacattgatggatactgacaaagatggcagagtaacatttgaggaactgaaggctgggttgaggaaagttggttcacaattggctgagccggagattaagatgctgatggaagtggctgatgttgatgggaatggagtacttgactatggagagtttgtag

SEQ ID NO: 25590 - DNA, 409 bp, Glycine max
  Clone ID: LIB3051-110-Q1-K1-H4
gctatggcggcctccttgttggggaagcttgttagccaaccaatgcacggaccaagagtggctatcacacttgcaaggtttctccctgatggccttgtatcagtaatcagggatggacctggtgaagcagttgtagttgcccttgagcagactacagagacaccagaacttgtatggacgccagcgatggcgacttccttatctgcacaaatttccactatggcatcagagctataccgtgagcagatgaaagggcgtgttgttgattgggatgtgcctgagcaggcatctggacagcaggaaatgagagatgagccacaggttggtggcatctatgttaggctgtttctgaaagatcccaaattccctcttagaaaccctaaaaggttcttggaaggtctactagatc

SEQ ID NO: 25591 - DNA, 429 bp, Glycine max
  Clone ID: LIB3051-112-Q1-K1-H4
aaaggaccttaaggcaagggacattgaagcctacagattgcaaactcttccaccacaatcggtggggtaatgtggtcattacaactcctgatggcatttgggatcatgaagaggccattaggaagaatgtaggtggccaggttcttggttactttcactaaaatgatcattactgtgctgttttggccaggtattaagttctgctatgtttccacataaacattccataaatgttttatgcgattacagaattttttctcttcctgtatgaatgttataacatggctgctcatgcatgatgagtatgatggattggatttgatgctctgtggaaatttttcctgagtttgataaatggtgtactagacatgaatggttattatatccttagtttgtaatctatttcaaattcaaattccatgtagtcat

SEQ ID NO: 25592 - DNA, 385 bp, Glycine max
  Clone ID: LIB3051-036-Q1-K1-A11
ctcgtaccgattcgcaggtccgaccaaggcgtccgtgttatttccgttcccaggtcaggggcacttgataccaatgagtgatatggcgagagcatgtaatggaagaggggtgaggacaaccatagtgaccactccactcaacgtagccactattcgtggaacaataggaaaagagacagagacagatatagaaatcctgacggtgaaattccctagtgcagaggctggtttacctgagggatgcgaaaatacagagtcaatcccctcccctgacttggtactgactttcttaaaggcaatcaggatgttggaagcccccttggaacacctactccttcaacaccgtcctcattgccttatagccagtgctttcttcccttgggca

SEQ ID NO: 25593 - DNA, 379 bp, Glycine max
  Clone ID: LIB3051-046-Q1-K1-B5
gggcgggggaatatggatggggaactacacataatgttatttccgttcccaggtcaggggcacttgataccaatgagtgatatggcgagagcatttaatggaagaggggtgaggacaaccatagtgaccactccactcaacgtagccactattcgtggaacaataggaaaagagacagagacagatatagaaatcctgacggtgaaattccctagtgcagaggctggtttacctgagggatgcgaaaatacagagtcaatcccctcccctgacttggtactgactttcttaaaggcaatcaggatgttggaagcccccttggaacacctactccttcaacaccgtcctcattgccttatagccagtgctttcttccctt

SEQ ID NO: 25594 - DNA, 394 bp, Glycine max
  unsure (1)..(394): unsure at all n locations
  Clone ID: LIB3051-046-Q1-K1-B9
gttagaacgggcacatatgggcatctttactgagttaggagttctgtatgctagagacggccctgagaagcttatggagcatatcaaactattctcaacccgcctcaatattcctaaactcataagagcttgtgatgaacaacagcattggaaagaattgacctatttgtatatacaatatggtgagtttgataatgctgcaactaccatcatgaaccattcacctgaagcatgggatcacatgcaattcaaagatgttgttgttaaagttgccaatgtggagttgtactacaaggctgttcacttctacttggaagagcatccagatcttatcaatgatgttctgaacgtccttgcacttcgtgtggaccatgcacgtgttgntgacatcatg

SEQ ID NO: 25595 - DNA, 437 bp, Glycine max
  Clone ID: LIB3051-096-Q1-K1-C9
aactttgatcaaataggccttgctcaaaagattgaaaagcatgagcttcttgagatgagacgtgttgctgcttatatttacaagaaggcaggtaggtggaagcagtctattgctttgtcaaagaaggataacctttacaaagatgccatggagacagcctcccaatccggggagcgtgaacttgctgaggagttgcttgtttatttcattgatcagggaaagaaggaatgctttgcctcatgtctatttgtttgctatgatctcatacgggcagacattgttcttgaactagcttggatgcacaatatgattgactttgcctttccatatctattgcagtttattcgtgagtacactggcaaagtcgatgaactagtgaaagacaaaattgaagcacaaaatgaagtgaaagctaaagagcaagaagaaaaggatgt

SEQ ID NO: 25596 - DNA, 366 bp, Glycine max
  unsure (1)..(366): unsure at all n locations
  Clone ID: LIB3051-099-Q1-K1-C9
acgcgtcctaactttgatcaaataggccttgctcaaaagatttaaaagcatgagcttcttgagatgagactgattgctgcttatatttacgggaaggcaggtaggtggaagcagtctattgctttgtcaaagaaggataacctttacaaagatgccatggagacagccttccaatccgtggagcgtgaacttgctgaggagtcgcttgatcatttcattgatcagggaaagaaggaatgctttgcctcatgtctatttgtttgctatgatctcatacgggcagacattgntcttgaactatcttggatgcacaatatgattgactttgcctttacatatctattgcaggtcattcgtgagtacact

SEQ ID NO: 25597 - DNA, 431 bp, Glycine max
  unsure (1)..(431): unsure at all n locations
  Clone ID: LIB3051-117-Q1-K1-F8
tccggcaatgttaaccatgacttggtgaaatacttgctaatggtaagaggggaagcaaaagaacccaaggtcgacagtgagctcatttatgcatatgcaaaaatagataggctgagtgacattgangagttcattcttatgcctaatgttgctaatcttcaaaatgttggtgaccggttgtacgatgaagcattatatgaagctgcaaaaatcatatttgcttttatatctaactgggccaagttggctatcacactggtcaaattacaacagtttcaaggtgctgttgatgcagcaaggaaagccaacagctcaaagacatggaaggaagtttgctttgcttgtgttgatgcagaggagtttcgtttggcccaaatttgtggactaaacattattattcaagtggatgacttggaagaagtcagtgaata

SEQ ID NO: 25598 - DNA, 422 bp, Glycine max
  unsure (1)..(422): unsure at all n locations
  Clone ID: LIB3051-047-Q1-K1-B5
caaaatatcatttcatgcagtatgctgaccaaattatgggtttgtttttgagagtgtttgcttctcgaagtgcaacagctcatgaggaggctatgcttgccattggggctttggcctatgcaaccggtgctgattttgcgaaatacatgacagaattttacaagtatttggagatgggtctccaaaatttcgaggactaccaggtttgtgctatcacagtgggtgtggttggtgatgtatgcagagccttggaggagaaaatactgccttattgtgatgggataatgacccaacttcttaaagatttgtctagcaatcagttgcataagtccggtaaagcttctaatttttcatgttttggaaacattgccttggcattggnagaaactttgagaaatacctgttatatgcaatgcctatgc

SEQ ID NO: 25599 - DNA, 422 bp, Glycine max
  Clone ID: LIB3051-115-Q1-K1-H4
aaacacatcattagagggactttacaaatcatatgggaatttctgtactcaatgtgaggctgaaggcttccgtaaaattacatcttatcaggatcgacctgatataatggcaaaatatacagttcgcattgaggcagataaatcactgtatccagtgatattgtctaatggaaacctagctgaacaaggtgacttataggatggcaggcactatgctgtttgggaggaccccttcaagaaaccttcttatctgtttgccttggatgctgggcaattgcagagcatagatgacacatttatcacccattcagggcggatggtgacccttaggatatggacacctgcagatgatgtacctaagactgtacatgctatgtattctctgacagcagctatgacatgggatgaagatgtttttggac

SEQ ID NO: 25600 - DNA, 390 bp, Glycine max
  Clone ID: LIB3051-048-Q1-K1-B5
attcctatgttgccaatcagatattcccaaattccaccctcgcaccctggaacggggagtccgattccgacaccaccgccaccaacgcccccgtggtggcgatggccgaggccgaggccgaggctgtggtggaacaagaagaggaacagaaaaaaatggaagaagtggaagagaaagatgatgatgaggaggatgagggggaggaggaggaggaggaggaggaagaggagaaggagaagagattgatgtggtggaaggttccttttgatgtgaactggtcacgctcgtatacttgagtgtactccatgtaatgactagtctatatatgtctaagccgtcgatgctcttctgagacttttattcctgggacggaggttgcacagaaagagg

SEQ ID NO: 25601 - DNA, 445 bp, Glycine max
  unsure (1)..(445): unsure at all n locations
  Clone ID: LIB3051-011-Q1-E1-E3
cacgcgtcaggcttaccctttcaatctcatcagatcctttcgtggttgcgcgaaaccctaattttgaatccgcaaacatgtctgcagctatggaaatgtcgctcgacgacataatcaagaacaacaaaaaatctggattcggaagttcccgtggccggattcgaccctccggttccggaccttctcgccggttccccaaccgtgccgccaancgcgccgctccttatgccaccgctaaggcgccggangcgacgttgcaacaagaattaaaaggcaaatcagcaagtggctgcggcggggtaccctgctcaaggtggtcgtgcggcttccatagaaactgggactaagctttacatttcaaacttggattatggtgtttccagtgacgatattaaggaattgtttgctgaagttggtgacctgaaacggcatgcggttcattatg

SEQ ID NO: 25602 - DNA, 443 bp, Glycine max
  Clone ID: LIB3051-048-Q1-K1-B9
gccttagtgatccaagctagtattttagggatcagggcatgaagtctattcaaactgggcaaccagcaccagatccatttggtttgcttggcctgttaagtgtgatcaggatgagtgatcctgacctgacatctcttgctcttggaattgatcttactacactggggttaaatttgaattcatcagaaaatcttcacaagacctttgggtctccatggactgatgaatcagctaagggagatccagagtttacagtgccacaatgttattttgccaaacagccacctgctctacatcaaggttatttttccaagttttcggtggaaacattgttttacatattttatagcatgcccaaagatgaagcccaattatatgccgccagtgagctttacaacagaggttggttttatcacatagaacatcgtttatggttaataaga

SEQ ID NO: 25603 - DNA, 307 bp, Glycine max
  Clone ID: LIB3051-001-Q1-E1-A7
agtataaccattcaaaatcctaatgcacttgacagcaaggttcttctggattttgatcatgttaaaaatagtttgaaagttgatgatgaagaactacagaaaatgagttcagatccaacctataacataaacatgtcgggtgatataaagcaaatgcttaaggagcttggaactgagaaaggaaaggaaactgcattgcatgggggaggcggtggcaaggcacaaaaagaaagagctgctgcacttgctgccatcttagctgcaaggtcacgtgttgaagaagattccaaatcaaatccaaataaag

SEQ ID NO: 25604 - DNA, 376 bp, Glycine max
  unsure (1)..(376): unsure at all n locations
  Clone ID: LIB3051-012-Q1-E1-H1
aggagaatatcattgtccagtgctaaacaaagttttcactgaatttactcatattgtggcagtgaagaccacaggaaatgtgttctgctatgaggctgttaaagagttaaatattaagacaaaaaactggaaggagctcctcaccgatganccattcactaaggatgaccttataaccattcaaaatcctaatgcacttgacagcaaggttcttctggattttgatcatggttaaaaaataggtttgaaagttgatgataaggactacagaaaatgagttcagatccaacctataacataaacatgtcgggtgatataaagcaaatgcttaaggagcttggaactgagaaagggaaggaaactgcattgcatgggg

SEQ ID NO: 25605 - DNA, 438 bp, Glycine max
  unsure (1)..(438): unsure at all n locations
  Clone ID: LIB3051-088-Q1-K1-G1
agaaaacgctgtgctgtggctgagaaggggaaaggcgcggttgaaagattgaaagctcgacatgtcagggaaaggcgcaaagggtttgataactgctaaggacaaagataagaaaaaaccaatttctcgctcctcaagagccggtcttcagtttcctgttggacgcattcatcgtcttctgaagtcaagggtgacagcacatggaagagttggggcaacagctgcagtttattctgctgccatcctggagtatttaactgcagaggtgttggagttggctggcaatgcgagcaaggatctgaaggtgaagcgtattaccccaagacatctacagcttgccatccgtggagatgaagaacttgataccctcatcaaaagaacaataactggtggaggtgttattcctcatatccacaagtcccttatcaacanatcttc

SEQ ID NO: 25606 - DNA, 167 bp, Glycine max
  Clone ID: LIB3051-001-Q1-E1-G2
aggcagaggttggtgtcctcgaagagcacaacgaggtaggcctctgcgacttcttggagagtggagacggcgctgctgtggaagtagagattggtcttgaagtccagagcgatttcccttacaagtctttggaaaggaagcttccttatgagaagctcggtgttcct

SEQ ID NO: 25607 - DNA, 421 bp, Glycine max
  Clone ID: LIB3051-036-Q1-K1-E3
ccgggtcggaccaagccttccgccaagccttccgattaattgcagggcgagcaaccatttcaaatatttcatggttttgccgttggtccgattgaattctaaatttccctcaagtgacaatgctattgggagaattaaagctaagttgatctctggagggggtgatctactttcctatccaaatggcaatggcattgtgataggtaaaaatctggttggtgatgaatctgttcgaattgaagtacagccgaatagaacactggcagcagacacagggctaacaagcaatgttttctctattgacaacgatgaatttgatttggacagccccacagcaggttttgcttccatttctgaggcaattgaagacattcgccagggaaagatggtagtggttgtggacgatgaagatcgagaaaat

SEQ ID NO: 25608 - DNA, 251 bp, Glycine max
  Clone ID: LIB3051-042-Q1-K1-D10
gtttgaaaaagtttctacaagtgaggaacgccagtccttcattgataagcttgatcaggtgcaagattggttgtatacagatggtgaagatgccaatgccacagagtttcaagagcgtctagatcagttaaaagctgttggagatccaattttcttcaggttaaaagagcttacagctcggccagcagcagttgagcatgctaataaatacattgatgagttgaaacagattgttgaggagtggaaagcat

SEQ ID NO: 25609 - DNA, 320 bp, Glycine max
  Clone ID: LIB3051-059-Q1-K2-B5
aaaagatgcagacagaaaaagaacagctgagttaaagaataatttagaaggatatatatatactaccaaggaaaagattgaaacgcttgaggagtttgaaaaagtttctacaagtgaggaacgccagtccttcattgagaagcttgatcaggtgcaagattggttgtatacagatggtgaagatgccaatgcaacagagtttcaagagcatctagatcagttaaaagctgttggagatccaattttcttcaggttaaaagagcttacaactcggccagcagcagttgagcatgctcataagtacattgatgagttgaaac

SEQ ID NO: 25610 - DNA, 336 bp, Glycine max
  unsure (1)..(336): unsure at all n locations
  Clone ID: LIB3051-061-Q1-K1-A9
nccacgcgtacggncacctcttgtgtggcctaatcttcaaggaagaagttcagttggtgtctttcatatttgcacacagcattgtctatgcttttaggacctttgagcaagtttgggaggagctttgtgttgatatcaaggaaggtgtccttaacagcaaggtcacagtgccctccattatggaagccatgtctaaactcctaaaacctgaccctgagctggccaacttgatccacaacaagtgcatggggcttagcaactggtatggcctaataccagagctttttcccaatgttaagtatgttcatgggatcatgactgggtcaatggaacctt

SEQ ID NO: 25611 - DNA, 202 bp, Glycine max
  Clone ID: LIB3051-098-Q1-K1-E3
atgaagcaggagttagaatattggtatttaattgatcttcgagattctggtaaggatctcatccagaatcatcttaccttctgcatttacaaccatactgcaattatggccaagcatcactggccttccaggtttagatgcaacggacacattatgctcaattctgagaaaatgtccaagtccactggaaatctcaggactt

SEQ ID NO: 25612 - DNA, 197 bp, Glycine max
  unsure (1)..(197): unsure at all n locations
  Clone ID: LIB3051-026-Q1-K1-H12
gangtgatttcgaacattggctcgcaagacagagggttttcaggttcagatatatctgtctgtgtgaaggatgttttatttgaacctgttcgcaaaacccaagatgccatgtttttctttaggaatcctgaagatatgtggatcccatgtggaccaaagcaacagagtgcagtacaaactacaatgcaggatcttgc

SEQ ID NO: 25613 - DNA, 352 bp, Glycine max
  Clone ID: LIB3051-027-Q1-K1-H8
atttggctaagcaagcttttgatgaggcaattgcggagttggacaccctgagtgaagagtcatacaaggacagcactttgatcatgcagctgttgagagacaacctgactctctggacctctgatttgcctgaggatggaggtgaggacagcataaaagctgaagaaaccaaaccttctgagcctgagcattgatgtgattcaatagtcagaaatctaaggtactctcaaagaggacattttctagcaatggatttggacccggacaatagggactgtggttggtggccatttcataattcttatgctctttaatatctttacccaagctagaagatctgaccctttttttt

SEQ ID NO: 25614 - DNA, 339 bp, Glycine max
  unsure (1)..(339): unsure at all n locations
  Clone ID: LIB3051-101-Q1-K1-D7
aacataaggaacttctatcgtgttcaagaggttcctcatgaagggcccatgtgcgatctgttgtggtctgatccagatgataggtgcggcttgtgaatttcttcttgtggtgctggatatacatttggccaggatatatccgaacaatttaatcactcaaacaagctcaagttaattgctagtagctcattagctggntatggatgtatttaactaggctcatgaatgaaaggtggataccatttttagtgcacctaactactgttatcgatgtgggaacatggcttccattttggaggttgatgatatcaagggccatacgtttatacagtgtgatcc

SEQ ID NO: 25615 - DNA, 363 bp, Glycine max
  Clone ID: LIB3051-078-Q1-K1-A6
gcacaagccactcatgcgtgacaagactgtgctggtaaccggcggagccggttagatgggcacccacaccgttcttcagctcttgctcggaggttgcagaaccgtcgtcgtcgacaatctcgacaattcctccgaggtttctatccaccgagtcagggagcttgccggcgaatttgggaacaacctctcctttcacaaggtggacctacgggacaaggatgcactagagcaaatttttgtttccacacaatttgatgctgtcatacactttgctggactgaaagcagtaggagaaagtgtgcaaaaacctttactatactattacaacaacttgactgggacaatcactctattggaagtcat

SEQ ID NO: 25616 - DNA, 405 bp, Glycine max
  Clone ID: LIB3051-084-Q1-K1-D9
tttcttgcagattcgatgctgtcatacattttgctggactgaaagcagtaggagaaagtgtgcaaaaacctttactatactataacaacaacttgactgggacaatcactctattggaagtcatggctgcccatggatgcaagaagctcgtgttttcatcttcagcaactgtatatggttggccaaaggaggttccatgcacagaagagttccctctgtcagcaatgaacccatatggacgaactaagcttatcattgaagaaatttgccgtgatgtccactgtgcagagccagattgtaaaataattttgttaagatacttcaacccagttggtgcacaccccagtggttatattggggaggatcctcgtggaattccaaacaatctcatgccatttgttcagc

SEQ ID NO: 25617 - DNA, 436 bp, Glycine max
  Clone ID: LIB3051-090-Q1-K1-F6
cacaattcattttcgaacgaacgtgtcacagaattctcgccttttccgaatatggcatcgcgcgtcagcattggcaatctcacttcctccgcgccgtatattaattcccctcattttcgctcacaacttaagctttccagcaactcctgtttgcacaagccactcatgcgcgacaagactgtgctggtaaccggcggagccggttacatcggcacccacaccgttcttcagctcttgctcggaagttgcagaaccgtcgtcgtcgacaatctcgacaattcctccgaggtttctatccaccgagtcaaggagcttgccggcgaatttgggaacaacctcttctttcacaaagtggacctacgggacaaggatgcactagagcaaatttttggttccacacaatttgatgctgtcatacactttgctggactgaaag

SEQ ID NO: 25618 - DNA, 437 bp, Glycine max
  Clone ID: LIB3051-117-Q1-K1-F11
aaactcgctcagatctacacgtctctgctgattcatccttttcttctgcagaggaaagaaccaaccaacacttgtttcttcagccatggccagtcaacctgaatcatctgacgcaaagggcacaaaaagggattttagcaccgccatattagagcgtaagaaggctccgaatcggctcgtggttgatgaagctgtcaacgacgacaactctgttgtcgcgcttcatcctgataccatggagaaacttcaactttttcgtggtgacaccatcttgatcaaggggaaaaaaagaaaggatacaatatgtatcgcacttgctgatgagacatgcgaggaaccaaaaataagaatgaacaaggttgtaagaaacaaccttaaggttaggcttggagatgttgtttcagtgcatcagtgtcctgatgtcaaatatggaaagc

SEQ ID NO: 25619 - DNA, 414 bp, Glycine max
  Clone ID: LIB3051-032-Q1-K1-H8
cggagccacattcgtgtctccgaagttcgaacttcgattagagagctattccacgtttggtcgagtggaaataagaacgagtctagttatactttggtggatattacgcaatggttcgcgtatttaactttcaacatggttgtgcgaatggtcgttgggaagaggtattttggtgtcatgcacgttgaaggcaaagacaaagcagaaaggtttatgaaaaatataagagagttcatgaatttgatggggactttcacggtggcagatggggttccttgtttgaggtggttggatttggggggttatgagaaggccatgaagggaaccgctaaggaaattgataaattattgagtgagtggttggaggagcaccttcagaagaagcttttgggtgaaaaggttgaaagtgataga

SEQ ID NO: 25620 - DNA, 382 bp, Glycine max
  Clone ID: LIB3051-006-Q1-K1-A1
cctggaattaagcacgttatttcattagggttggttttgttgaacagaaaaaaagagagaaaaaaattatgggaagcgatggcgtgaggaaaccaagattcctatgccttcatgggttccgaacaagcggagaaatattgaaaacacagttacataagtggcctcaatcggttctagacaacctcgatctagtatttgtggatgctccttttccttgccttcgcaaatccgatgtagaaggcatttttgatcccccttactacgagtggtttcagttcaacaaggaatttacagagtacaccaactttgacgagtgccttcagtacattgaggaatgcatgatcaagtaccgacctattgataggcttcttgggtttttaca

SEQ ID NO: 25621 - DNA, 439 bp, Glycine max
  unsure (1)..(439): unsure at all n locations
  Clone ID: LIB3051-036-Q1-K1-G7
aaaccctggaattaagcacgttatttcattagggttggttttgttgaacagaaaaaaagagaaaaaaaaattatgggaagcgatggcgtgaggaaaccaagattcctatgccttcatgggttccgaacaagcggagaaatattgaaaacacagttacataagtggcctcaatcggttctagacaacctcgatctagtatttgtggatgctccttttccttgccttggcaaatccgatgtagaaggcatttttgatcccccttactacgagtggtttcagttcaacaaggaatttacagagtacaccaactntgacgagtgccttcagtacattgaggaatgcatgatcaagtacggacctattgatgggcttcttggtttctcacagggatcaatattatcggctgcgctgccgggtcttcaggagaaaggcgtggcac

SEQ ID NO: 25622 - DNA, 417 bp, Glycine max
  Clone ID: LIB3051-039-Q1-K1-H8
ggaacatttggatatttggccccagagtactttatgcatggagttgtggatgagaaaactgatgtatttgcttttggagttttgctgttggagctcataacaggtcaccgtgctgttgattcgaatagtagacaaagtcttgtcatctgggcaaagccactgctggacacaaacaatgtaaaggatttagcagaccccagattaggagaggaatatgatcttactgaaatgaagcgcaccatgttgacggcttccatgtgtgtccaccatgcatcctccaagcggccatacatgaatcaggttgtgcttctactaaagggtgaagagacaattatagaaccaaagaaaaatttagttgcacagaaatctctcatgttagaggcatgtgacctagaagattatacttgctcaagttac

SEQ ID NO: 25623 - DNA, 414 bp, Glycine max
  Clone ID: LIB3051-040-Q1-K1-H12
cttttcttattgcttgttgcgttctccctcgttttcgcggccgtgtcggcctcttcggacggcggcaacgaggaaccgctgatcatgcaggtggtcgatggcggtgacgtccggctgggagcagagcaccactttttggagttcaagcgcaggttcgggaaggcgtacgattccgaggacgagcacgattacaggtacaaggtgttcaaggctaacatgcgccgcgcccgccgccaccagagtctggacccttcggcggctcacggcgttacgcgcttctccgatcttacgccgtcggagttccggaacaaggtgttgggtctgagaggtgtgaggttgcctttggacgcgaacaaggctcccattctccccactgataatcttccgagtgattttgattggagagatcacgga

SEQ ID NO: 25624 - DNA, 311 bp, Glycine max
  Clone ID: LIB3051-035-Q1-K1-B1
gaccaatgctcgaggtgaacttaaatacccaatcaagggaatcactatctggatagctgatggaaaaagtgctagagacagctttctgatgaatggttatgctctaaatactggccgtgctgctcaaggaatgccttttagggttgcccctgcaagaattgcctgtcttgatctctatcttcagaagacaaaaatgcagttgcgtgttcaagttctagttacagatcctagggagctagagaaagttcgttaaaaacaggctgatatgactaacgaacgtattgaaaaactgctgaaggctggatctaatg

SEQ ID NO: 25625 - DNA, 451 bp, Glycine max
  Clone ID: LIB3051-075-Q1-K1-F6
gtgaagccctagactacactacacactttgcaatggcggttgttgcgcaaacccctgacatcggcggcgagcgacagtccggccaagacgttcgcacccaaaacgttgtggcatgccaagccgttgccaacatcgtcaaaagctctttaggccccgttggcctcgacaagatgctcgtcgacgacattggcgacgtcactatcaccaacgacggtgccacgattctcaagatgcttgaagtggagcatcctgctgccaaggttttggtggaactcgccgagcttcaggaccgagaagtcggagacggcactacttcggtcgtcattgtcgctgctgagcttctcaaaagggcaaatgaccttgtcaggaacaagattcatcctacctcgattatcagtggatatagacttgctatgcgtgaggcttgtaaatatgtagaagaaaaactagc

SEQ ID NO: 25626 - DNA, 435 bp, Glycine max
  Clone ID: LIB3051-041-Q1-K1-H8
gagtgataacacccaccaaagaaccatggctacgcagttcctcaaatgcctccttctcctgtggaccttaaccctaaccatctcagcagaatacacaggctttgagggcacaatagacccaaagtccataggcataaagcacaagaaaaccctaagccacttcagattctactggcacgaagtcttcagcggagaaaaccccacatcggttagaatcattcccgcactccccaaatacaacacaaccacaacctttggttcggttgggatcttcgacaacgctttaactgtgggacccgaggtttactccaaggttgtcggaaaagccgagggcttgattgcctccacgtcgcaaacgcagttggatcttttgctgattttcaacttcgcattgacacaagggaagtacaacggcagcaccatcacgttcactgg

SEQ ID NO: 25627 - DNA, 469 bp, Glycine max
  Clone ID: LIB3051-060-Q1-K1-B1
taccggtacggcagttcggggaacacgagacccaaagtccataggcatacaccacaagaaaaccctaagccacttcaggttctactggcacgagggcttcagcggagaaaaccccacatcggttagaatcattccctcactccccaaatacaacgcaaccacaaccttcggctccgttggaatctttgacacccctttaaccgtgggacctgaggtgtactccaaggttgtcggaaaagccgagggcttgtttgcctccacgtcacaaacgcagtttgacctgttactgatttacaacttcgcgttgacccaagggaagtacaacggcagcaccatcacgttcacggggaggagccccctctcggagaaggtgagggagctgcccattgttggtggtagtggggtcttcaaatttgccactgggtatgttgagtctaggacgctaagttttgatccccaaacaaggaat

SEQ ID NO: 25628 - DNA, 454 bp, Glycine max
  Clone ID: LIB3051-042-Q1-K1-H12
tcgagcaaagcgtccggccacgcgttcggctatcgaaccgggcgagggggtgggccatcccagggcgaatccggatatggatccccagcagcgtccgttaatgtcggaccgggtcaccgttaacggctccgtcacgccgcttgctcttctcgccgacggccgtctatggtggtctgagggaatccaacggtgtttgtcgatcgaaaaggacgtcctcgggatcgttgccagtgggccctacataaaaatcaagagcctcgtggagacccgagacggatgctgcatcaccagcgcccctgcaagactcgttagaaacgacgtcgtctttatgccttcctacgaggaatctcacaggctctggtgccataaacttcgtgaattcattgattctctcggtcgtcctaagaggttgttggttgatgctaatcccgttggtgggaagaaatccgctacg

SEQ ID NO: 25629 - DNA, 419 bp, Glycine max
  unsure (1)..(419): unsure at all n locations
  Clone ID: LIB3051-051-Q1-K1-H12
aaaagctcagaaactcttaatgttgttccgagagcagcgacgggacccttcaccaggtaagacacataagtgcccacctgaaactgctagtgatttgtctatgccacctgctgaaatgaaaccgatatgcaagtcgattttgagaagaaagtccgggagagcttttagctttttctggaaaaacaagagctattctgtataccagtgttaagttccattggttgttgtaaatctgtgttagcatcttttatttttgtggccctgcttttatcctcctnctctacttcttggtcccatggggtgctctggttaattttggttcaaagcgaaaaaaaaatgtacaagccctgtgtaatttatggatttgttttcttctttcgcttttctctttgtgaaaatcaaatttccagggttttttc

SEQ ID NO: 25630 - DNA, 428 bp, Glycine max
  Clone ID: LIB3051-115-Q1-K1-H11
caagcttaagaaaagagctttaagggtgattgctgagcatttgacggtagaagaagctgccgggctaaaagagggattccaggttatggatacaaacaacagaggcaagattaacattgatgaattacgagtagggttgcataaacttggtcatcaagttcccgaatcagatgtccaagctcttatggatgctggtgatgtagacggggatgggcacctagattatggagagtttgtagccatttctgttcatctgagaaagatgggaaatgatgagcatcttcgcaaagccttccaattttttgatcagaacaaaagtgagtatattgagattgaggagctgagtagcgccttatctgatgatcttgacacaaacagtgaagaagttgtcaatgcaattatgcatgatgtggacacagacaaggatg

SEQ ID NO: 25631 - DNA, 387 bp, Glycine max
  Clone ID: LIB3051-051-Q1-K1-A10
ggcctcgaaagccttaagcctgaactcaaatcatcaattgagaagggaatcaaatttgccaaccagtaattgaacatgttatcacatacatgtctggtaggttactggatattcctttaagaaccaaatcaaattttgcattctcagaaccattgatgtattgttgtcggcagtggtgtggcggttttgttgttttatttagtgtaggtatacgccatggtttaataattaaagtctgagagctgtttgttgccaaagggattgaacgatcttaaaaccaggtttaggatttggcattccattaataatggtcccttttaactgtatggtttcacttaatgtaatttgcagggtgttgtaccctttattcacatttttttctcactt

SEQ ID NO: 25632 - DNA, 352 bp, Glycine max
  Clone ID: LIB3051-116-Q1-K1-G1
ctcagaaccttctgaggttaaagcatacaacaaagagagagagagagagaagatgaggaagccatctatgctgagatctctccactccgccgccacccgcggcgcctctcatctcttccgccgtgggtacgcctccgagccggtgccggagcgcaaggtagccgttctcggcgccgccggcgggatcgggcaggctctctcccttctgatgaagctcaagcccctcgtttagagcctctccctttaccatatcgccggaactaccggcgtcgccgtcgatatcagccacataaacaccagatctgaggtagtggggtaccaaggagatgaatagcttggaaaagctttggag

SEQ ID NO: 25633 - DNA, 434 bp, Glycine max
  Clone ID: LIB3051-059-Q1-K2-H6
cccacgcgtccgagattcaatttcgaagggcacaaggggatggaaggagaggctcttgtctcccaattcttctatgtcagaacttggttcagaagttaggagagaattgaatgctaaaattgctagcgtgtcccgattgatggagcgccttgaaacaagagaaaataatagtgctgcaggaacttctttatcaaatcatttggtgaaccgttccattgcagagacaagcaaccaaagcaatgtggaagctcgtggagagaactctttgcatggcaataatactccaactactttttctgcaagctcagattcaaaatgatctctagtttgcttctgtgaaggcatctttgctcaacgtatcatgtttgaaggctaactgtttgctcagacatgacatgatgaggaatatatgctcatggcagttgttggatttc

SEQ ID NO: 25634 - DNA, 443 bp, Glycine max
  Clone ID: LIB3051-041-Q1-K1-H9
tctccttttctctctctagaattctcagatttgcggggcgagatgatgcagcagccaggacccggcatggcacctcccaccatgggccagcagccgcagcaacagtaccagcagcagcctccgccgcagcagcaacaaccctacgtcatgatgccgccgcagcatcaggcgccgcagcctatgtgggccccatccgcccagcctccgctgccgcagcagcctgctagcgccgacgaggtccgaaccctctggatcggggatctgcagtactggatggacgagaactatctctacacctgctttgctcataccggcgaggtttcgtcagttaaagtgattcggaacaagcaaactagtcaatctgaaggttatgggtttattgagtttaatagtcgtgctggagctgagagaattctccaaacatataatggggctattatgcc

SEQ ID NO: 25635 - DNA, 429 bp, Glycine max
  Clone ID: LIB3051-062-Q1-K1-A8
tttctctctctagaattctcagatttgcggggcgagatgatgcagcagccaggacccggcatggcacctcccaccatgggccagcagccgccgcaacagtaccagcagcctccgccgcagcagcagcaaccctacgtcatgatgccgccgcaggcccaggccccgcaggccatgtgggccccctccgcccagcctccgcctcagcagcagcccgccagcgccgacgaggtccgaaccctctggatcggggatctgcagtactggatggacgagaactatctctatacctgctttgctcacaccggcgaggttacatcggttaaagtaattcgaaacaagcaaactagtcaatctgaaggttatgggtttattgagtttaatagtcgtgctggagctgagagaattcttcaaacatataatggggcaata

SEQ ID NO: 25636 - DNA, 418 bp, Glycine max
  Clone ID: LIB3051-051-Q1-K1-A6
aaaaaaaaaaacgaaaatgctgagaatcgccgcaagcgcaaagagaattgttcaaacggcgtcgttggaggcgccaccgttggggattagggttctgccgcgtctctaccacgagagggtggtggaccactacgacaacccccgcaacgttggatccttcgacaagaacgaccccaccgtcggaacgggtcttgttggtgcacccgcgtgtggcgacgtcatgaagctccagattaaggttgacgacaaaacggggaagatcgtcgatgctcgcttcaaaaccttcggttgtggatccgccattgcttcttcctccgtcgctactgaatgggtgaagggaaagcaaatggaggaagttttgaccattaaaaacactgaaattgcaaagcatctttcacttccaccagtcaagcttcac

SEQ ID NO: 25637 - DNA, 433 bp, Glycine max
  Clone ID: LIB3051-040-Q1-K1-E1
attttctgtatcaattgttacgagggctcaaatatgtacattcagcaaatgttttgcaccgagatctaaagcctagtaatttgctattgaatgccaattgtgaccttaagattgcggactttggtcttgctagaaccacatctgaaactgactttatgactgagtatgtggtcactagatggtaccgagctcccgaattgcttcttaattgttcagaatatacagcagccattgatatatggtctgttggttgcatacttggtgaaatcataacaaggacaaccgctctttcctggcaaagattatgttcatcagctgagacttatcacagagctgataggttcgccggatgatgccagccttggatttctacgaagtgataatgctcgtagatacgtaaaacagcttccgcagtatccaaaacaaaactttt

SEQ ID NO: 25638 - DNA, 398 bp, Glycine max
  Clone ID: LIB3051-040-Q1-K1-E2
aaaaaaagaaacaattgttacaagggcattaaatttgtacattcagaagatgttaagatgcgagatctaaaacctagcatatatgctattgaatgcaaattagagaccttacgattgctgacttgggtcttgctagaaccacatatggatactgactttatgactgagtatgtggtcactagatggtaccgagctcccgaattgcttcttaattgttcatagtgtacaccatccattgatatatggaactgttggttgcatacttggtgaaatgataacatgacatccgctctataatggccaagatgatgtgcattagctcagacttatcacacagctgataggttcgcccgatgatgccagcctcggattaatacgaagtgataatgctcgtacat

SEQ ID NO: 25639 - DNA, 370 bp, Glycine max
  Clone ID: LIB3051-095-Q1-K1-H8
aagacatcaaggaactcatctggagagaatctgtgaagttcaatcctgttccaccaggctactgagattttgtatttatgttgtatatgtttagtgaaatatctgatgactaatatatacattttatgaccactacttggcaagttgcagcgcacagaagatatgaaaacgtattggagatactgagattcactgagtttgttgaaggtttctttcgttttagtctcatctcagatacttggataatcatattgttgagatgtactgaggaaagaaaggatcaaaatatgtttcagcagaatatcctaaagctccaactcctttgtgtacttctatccttctttttagaatcaagtccataagttagtgc

SEQ ID NO: 25640 - DNA, 414 bp, Glycine max
  Clone ID: LIB3051-030-Q1-K1-C10
cccacgcgtccgcccacgcgtacgggaagatggcttgggtcaaaattctcattctctgaagaagggctgtgattgtgtaggctatatcaaatactctgatgcgcatttcacaaacttctatggaggtgttgaaacaatcgaaaactgtgtttgtttgcacgaagaagatcatggtattttatggaagcatcaagattggacaacaggtttggctgaagttcgaaggtctagaatgctgacagtttcgtttatatgcactgtggctaactatgagtatggatctttctggcacttttatcaggatggcaagatagaagcagaagtcaagctcacaggaattctcagcttacgagcattgcagccagatgcatctcgaaattatggcacaaccatcgcacctggactatacgcgcc

SEQ ID NO: 25641 - DNA, 338 bp, Glycine max
  Clone ID: LIB3051-044-Q1-K1-G3
tcgaagcaatgcgtgattgtgaccctttatctgctcgtcactggattgttaggaacactaggactgtaaaccgaactgggcatctaactggttacaagctagtacctggctcaaattggttacctttagctggctcagaggccaagtttttgagaagggcagctttcttgaaacacaacctttgggttactccttatgcacgcgatgaaatgcatcctggaggagagttccctaatcaaaatccacgtgttggaaaaggtttggctacttgggttaagcaaaatcgatcactggaggaagctgatataggtctttggtacgtatttggagtgacacac

SEQ ID NO: 25642 - DNA, 379 bp, Glycine max
  Clone ID: LIB3051-116-Q1-K1-A1
aaaacttccattcttggttttgattgtcaagaatctaaagaagtatttcacatttgagattcaagttttggatgataagaatgtcagacgacgatttcaagcctcaaattttcaagtgtgctgtcactcgggtaaagccctacattgcactatgccactgagaatgatgaggggtggaatcaaatccagtttaacctggctgatttcaccaagagagcatatggtactaattatgtggagacactgcaagttcaggtccatgcaaactgtcgcctgagaaggatttacttctctgaccgcctctactctgaagaggaactccctccagagttcaaattgtaccttccaatgcagaaatcatgaaaaaatgggagtttgg

SEQ ID NO: 25643 - DNA, 403 bp, Glycine max
  unsure (1)..(403): unsure at all n locations
  Clone ID: LIB3051-092-Q1-K1-C1
cccacgcgtccgaaatacctaagattcgctaaaatcccttccccgtcgccagatcgcatggacccttgaattccgattcggataggcatgtccggagcggccttgtcgccgccgacgaattcgaagtcgctgacgcagacggtgagcgggtcgcacaagttcgtgatcgagggctattcgctggcgaaggggatgggagtggggaagcacattgcaagcgacgtgttcaccgtcggaggttaccactgggcgatctacttctaccccgacggcaagaatcccgaggacaattccgactacgtctncgtcttcatcgtcttggccagcgaaggcaccgacgtcagggcgcttttcgagctcacgctcctcgaccagagcggccagnggaagcacaaagttcata

SEQ ID NO: 25644 - DNA, 432 bp, Glycine max
  Clone ID: LIB3051-008-Q1-E1-D9
aggaagcgtgggtcacaaaggagcagctccactctctcgtcacgcaggccgtggatatgtttcccgaattcgtcgatagcgtgcgccggcttgctgacgtggaccctgcgcacaggaaaatcttcgtccatggccttggctgggacgccactgccgatactctaaccgccgtgttcgggaaatacggcgagatcgaggattgcaaggccgtcaccgacaaggtctccgggaaatcaaagggttacgcctttatcctcttcaagcacagggacgatgctcgcaaggcgctgaaacaccctcaaaagaagatcggaaaccgcaccacctcgtgccagctggcctccgccggccccgttccggctccaccgccgaacgtgaccccggtgtctgagtacacccagaggaagatttttgtgagcaatgtgaatgctg

SEQ ID NO: 25645 - DNA, 433 bp, Glycine max
  Clone ID: LIB3051-055-Q1-K1-A8
ccgctcgaccacgcgtccgagaggatcagctcttctctttcggcatgcaagccgcggatatgtatcccgaattcggcgattttttaagcctgcttgatcacgtgtaccctgcgcacaggaaaatcttcgtccatggccttggctgggacgccactgccgatactctaaccgccgtgttcgggaaatacggcgagatcgaggattgcaaggccgtcaccgacaaggtctccgggaaatcaaagggttacgcctttatcctcttcaagcacagggacgatgctcgcaaggcgctgaaacaccctcaaaagaagatcggaaacctcaccacctcgtgccagctggccttcgcctgccccgttccggcttcaccgccgaacgtgaccccggtgtctgagtccacccagaagtaagattttgtgatcaattgtaatgc

SEQ ID NO: 25646 - DNA, 439 bp, Glycine max
  Clone ID: LIB3051-105-Q1-K1-F11
ccgccggccccgttccggctccaccgccgaacgtgaccccggtgtctgagtacacccagaggaagatttttgtgagcaatgtgaatgctgagattgatcctcagaagctgcttgaattcttcaagcagtttggggaggttgaggatggtcctcttggtttggataagaacactgggaaacctaagggttttgcgctttttgtgtacaagtctgtggagagtgccaagaaggctttggaagagcctcataagaactatgaggggcatactttgtattgtcagaaggctgttgatggtcctaaggggagcaaggggtatcatcatcagcagcattctcatcctcatcaccaccaccaccatcagcctcattaccagaggaaggagaagaacacgtattcctctggtggtggtggaccatcgcatggaagtggtcatttgat

SEQ ID NO: 25647 - DNA, 304 bp, Glycine max
  Clone ID: LIB3051-060-Q1-K1-D9
ggaacctcatcaaaaccaagaacagcttcgtcacaaccatcagaaacttcgtccaagcgcaaaggaggagttttccaaaaagaattgcagcacatgatgtatggctttggagatgatcctaatccacttcctgaaagtgtggctcttatggaggacattgttgtggagtatgtcacagaactggtacataaagcccaagatattggatctcagagggggaagctatcagttgaggatttcctctatttgattcgcaaggattcgccaaaacttaaccgctgtacagaactactttctatgaatg

SEQ ID NO: 25648 - DNA, 465 bp, Glycine max
  unsure (1)..(465): unsure at all n locations
  Clone ID: LIB3051-068-Q1-K1-G4
cccacgcgtccgcccacgcgtccgcagaaacaaacattatttggttttctgaattgtttggattgcgagaaaaaaaaagggggggaaatggcaaaggatattcgattcttcgacctcaacacgggcgccaagatcccttcagtcggcttgggaacttggcagtctgatcctggccttgttgctgaagccgtcgcggcggccatcaaggttggttaccgccacattgattgtgctcaaatctatggcaatgagaaggagattggctctttgttgaagaatctgtttgaggagggtgtagtgaagcgcgaggatttgtggattacatctaaactctggaatactgatcatgctccagaagatgtaccactggcactggaccggaccttgaaagatttgcagctggattatgtagaattggatcttatccactggcctgctncgatgaaaaaaggatcaactggcttt

SEQ ID NO: 25649 - DNA, 381 bp, Glycine max
  unsure (1)..(381): unsure at all n locations
  Clone ID: LIB3051-059-Q1-K2-F3
gttttgtcccattggccaattcggccactctcctctgagaaagcctccagcctctcctccaaagtcccctgcggttcgttcggttattcttcgaaccgttgtctgaagtttacaactcaaaacttcaccgaacgcatttcattcaccaattcgtccaagtctcgtatcaatcaatcagcctatccgtcttgcggttggagagatcggaggggagagcagccatggcgcatcgagtagaccacgagtatgactatctgttcaagatcgttttgatcggagactcaggtgtaggcaaatccaacatcctctccaggttcactcgaaacgagttctgtttggagtccaaatccactatncgagttgagttcgccaccagaactc

SEQ ID NO: 25650 - DNA, 349 bp, Glycine max
  Clone ID: LIB3051-058-Q1-K2-A2
atgcgtgctcttactactgaatacgatgagcgtactaagatctaccgcatgaaacttctgggccactctacgaggtacgtgccaaatccaagttctggtattttttgagaaaattgaagaaggttaagaaaagcaatggacaagtgctagccatcaatgagatttttgagaagaatcctaccaagattaagaattatggaatttggctgcgttatcagagccgcactggttatcacaatatgtacaaggaataccgagatacaactgtgaatggtgcagttgaacatatgtacactgaaatggcatctggtcatagggtgaggcattcatgcattcagataattaagac

SEQ ID NO: 25651 - DNA, 451 bp, Glycine max
  Clone ID: LIB3051-058-Q1-K2-A6
ctcgtactcggtacctgaatgtctcggactcgacgcgacgcggtctgctcactccgtgaatatgatgagcgtactaagatctaccgtatgaaaatctgtgccaccatacgtaggtcacgtgccaaatccaagttctggtattttttgagaaaattgaagaaggttaagaaaagcaatggacaagtgctagccatcaatgagatttttgagaagaatcctaccaagattaagaattatggaatttggctgcgttatcagagccgtactggttatcacaatatgtacaaggaataccgagatacaactctgaatggtgcagttgagcatatgtacactgaaatggcatctcgtcatagggtgaggcatccatgcatacagataattaaaactgccaacatcccagctaagctgtgcaaaagggagagcaccaagcaatttcacaattcttaaa

SEQ ID NO: 25652 - DNA, 413 bp, Glycine max
  unsure (1)..(413): unsure at all n locations
  Clone ID: LIB3051-051-Q1-K1-F5
cgccggcatggagccacgcataatccgcgagatcgacgccatgcgccgcctccaccagcaccctaacatcctcaaaatccacgaggtgctcgccaccaaaaccaagatccacctcgtcgtggagctcgccgccggcggcgagctcttcgccaaaatctcccgccgcggaaagcttccggagtccaccgcgcgccgctacttccagcagctcgtctcggcgctccggttctgccaccgcaacggcgtggcgcaccgcgacctgaagccgcagaatctcctcctcgacggcgacggcaacctcaaggtctgcgacttcgggctctccgcgctgccggagcagctcaagaacggcctcctccacaccgcctgcggcacgccggcgtacaccgngccggagatcctccgccagagcg

SEQ ID NO: 25653 - DNA, 440 bp, Glycine max
  Clone ID: LIB3051-045-Q1-K1-C5
cccacgcgtccgcccacgcgttcgcccacgcgtccgctgattttctgatgtggcagaggaagtgaaggcaaaatatcctaaaattacatatgcagatctcttccagcttgcgggtgttgttgcagttgaggttactgggggtccaacaattgatttcgttcctggtagaagagattcaaaagtatctcctaatgaagggcggcttcctgatgctaaaaaaggtgttccacatctccgtgatatcttttatcgaatgggcttgactgaccgagatattgttgcactatctggaggacatacactggggagagcacatccagagagatcagggtttgatggcccttggacggaggaccctctgaagtttgataactcatactttgtggaacttttgaaagaagattctgctgggctgcttaaacttccaacagacaaggctt

SEQ ID NO: 25654 - DNA, 330 bp, Glycine max
  Clone ID: LIB3051-017-Q1-E1-F1
actctgggtaggcggttgatcaagcaatcctggcagaagaggagcgtctggtcgtgatccgtttcgggcacgactgggacgaaacctgcatgcagatggacgaggtgttggcgtcggtggcggagacgataaagaactttgcggtgatatacctggttgacataacggaggtgccggatttcaacaccatgtacgagctctacgacccttccacggtgatgttcttcttcaggaacaagcacatcatgattgatctgggaaccggtaacaacaacaagatcaactgggctctcaaggacaagcacgagttcatcgacattgttgagaccg

SEQ ID NO: 25655 - DNA, 435 bp, Glycine max
  Clone ID: LIB3051-060-Q1-K1-B6
ggaaacgtgaaattagggttcatcgaggaggaagaagaagaagaagatgtcgtacctggggcctcacttgcactctggatgggccgtcgatcaagcaatcctcgccgaagaggagcgtctcgtcgtcatccgtttcggccacgactgggacgaaacctgcatgcagatggacgaggtgttggcgtcagtggcggagacgataaagaactttgcggtgatatacctggtggacataacggaggtgccggatttcaacaccatgtacgagctctacgacccttccacggtgatgttcttcttcaggaacaagcacatcatgattgatctcggaaccggtaacaacaacaagatcaactgggctctcaaggacaagcaggagttcatcgacattgttgagaccgtctatcgtggagccaggaagggacggggtctcgt

SEQ ID NO: 25656 - DNA, 411 bp, Glycine max
  Clone ID: LIB3051-003-Q1-E1-B5
atctagccttctttctttttttcaatttccaaatcacgaaactcaagaagatggagaaagcgatcaacagacagaagattttgcttcatcatctcaacccttcatcatccacccaccccaacgaatcatcctccctccatgcttcagcatgtgtggcgggggatagcgctgcttatcaaaggacatcgacattcggggacgatgttgtgatcgtggctgcttatcggactgctcattgcaaagctaaacgaggtggtttcaaagacactcttcctgatgatctactggctcctgttttgaaggctgtaattgagaaaaccaatgtgaacccaagtgaagttggggatattgttgtacgtagtgtattggctcctggagctcagggagctagtgaatgccgaatgggtgcat

SEQ ID NO: 25657 - DNA, 440 bp, Glycine max
  unsure (1)..(440): unsure at all n locations
  Clone ID: LIB3051-013-Q1-E1-F3
accaagcgtccgcttctttctttttttcaatttccaaatcacgaaactcaagaagatggaaaaagcgattaacaaacaaaagattttgcttcaacatcccaacccttcatcatccaaccaccccaacgaatcatcctccctccatgcttcagcatgtgtggccggggatagcgctgcttatcaaaggacatcgacattcggggacgatgttgtgatcgtggctgcttatcggactgctcattgcaaagctaaacgaagtggtttcaaagacactcttcctgatgatctactggctcctgttttgaaggctgtaattgagaaaaccaatgtgaaaccaagtgaagttggggatatttgtgtaggtagtgtattggctcctgaagctcanagagctagtgaatgccgaattgctgcattttatgctggttttcccgaaactg

SEQ ID NO: 25658 - DNA, 417 bp, Glycine max
  Clone ID: LIB3051-029-Q1-K1-A12
tagcctactctctttttttcaatttccaaatcacgaaactcatgagatggagaaagcgatcaacagacagaagattttgcttcatcatctcaacccttcatcatccacccaccccaacgaatcatcctccctccatgcttcagcatgtgtggcgggggatagcgctgcttatcaaaggacatcgacattcggggacgatgttgtgatcgtggctgcttatcggactgctcattgcaaagctaaacgaggtggtttcaaagacactcttcctgatgatctactggctcctgttttgaaggctgtaattgagaaaaccaatgtgaacccaagtgaagttggggatattgttgtaggtagtgtattggctcctggagctcacagagctagtgaatgccgaatggctgcattttatgctgg

SEQ ID NO: 25659 - DNA, 432 bp, Glycine max
  unsure (1)..(432): unsure at all n locations
  Clone ID: LIB3051-037-Q1-K1-E2
caggtctagagcttgatgatattgatctttttgaaataaatgaggcatttgcctcccagttcgtgtattgccgtaacaagctagggcttgatccagaaaagatcaatgttaatggaggtgcaatggcaattgggcatcctctgggttcaacaggtgctcgatgtgttgcaactctgttgcatgaaatgaagaaacgtgtcaaggactgtcgatttggagttatatctatgtgcataggtactggaatgggggcagctgctgcttttgagagtggtgattgtgctgatgagctatgcaatgcccggaaagtggatgaccttcttttatccaaagatgctcgcttgaaataggtactttatactcactatatntggtcatcatataagaaatcacagtanagtctttttctatggtagtgataatgtcaaccac

SEQ ID NO: 25660 - DNA, 431 bp, Glycine max
  unsure (1)..(431): unsure at all n locations
  Clone ID: LIB3051-041-Q1-K1-G1
ctttctttttttcaatttccaaatcacgaaactcaagaagatggagaaagcgatcaacagacagaagattttgcttcatcatctcaacccttcatcatccacccaccccaacgaatcatcctccctccatgcttcagcatgtgtggcgggggatagcgctgcttatcaaaggacatcgacattcggggacgatgttgtgatcgtggctgcttatcggactgctcattgcaaagctaaacgaggtggtttcaaagacactcttcctgatgatctactggctcctgttttgaaggctgtaattgagaaaaccaatgtgaacccaagtgaagttggggatattgttgtaagtagtgtattggctcctggagctcanagagctagtgaatgccgaatggctgcatnttatgctggttttcccgaaactgtgcctg

SEQ ID NO: 25661 - DNA, 389 bp, Glycine max
  Clone ID: LIB3051-042-Q1-K1-G1
ccagatcacgaaactaaagaagatggagaaagcgatcagcagacagaggattttgcttcatcatctcaacccttcatcgtctacccacgtcaacgaatcatcctccctctatgcttcagcatgtgtggcgggggacagcgctgcttatcaaaggacatcgacattcagggatgatgttgtgatcgtggctgcttatcggactgctcattgcaaaggtaaacgtggtggtttcaaagatactcttcctgatgatctactggctcctgttttgaaagctgtaattgagagaaccaatgtgaaccccagcgaagttggggatattgtcgtaaggagtgtattggctcctggagctcaaagagctagtgaatgccgaatggctgcattttatg

SEQ ID NO: 25662 - DNA, 390 bp, Glycine max
  Clone ID: LIB3051-059-Q1-K2-B1
gagaaatctgtcaccatttctgttgatgatggaattcgacctggcacaacagtgtctgatctaggaaggctcaaacctgtgttcaagaaagacggaagcactactgctggtaattctagtcaggtgagtgatggtgctgcagctgttctgctgatgaaaagaagtgttgcgttgcaaaaggggctacccattcttggtgtattcaggactttcgcagcagttggtgttgatcctgccataatgggtgttggtcctgctgctgcaattcctgttgctgttaaggctgcaggtctagagcttgatgatattgatctttttgaaataaatgaagcatttgcttcccaggtcgtatattgtcgtaacaatctaaggcttgatccaaaaaagatc

SEQ ID NO: 25663 - DNA, 404 bp, Glycine max
  Clone ID: LIB3051-079-Q1-K1-E12
cttgttctcaatttccaaatcacgaaactcaataagatggagaaagcgatcaacagacggaaggttttgcttcatcatctcaacccttcatcatccacccaccccaacgaatcatcctccctccatgcttcatcatgtctggcacgggatagctctgcttatcaaaggacatcgacattcggggacgatcttgtgatcgtggctgcttatcggactgctcattgcaaagctaaacgaggtggtttcaaagacactcttcctgatgatctactggctcctgtttcgaaggctgtaattgagaaaaccaatgtgaacccaagtgaacttggggatattgttgtacgtagtgtattggctcctggagctcaaagagctagtgaatgccgaatggctgcattttatgc

SEQ ID NO: 25664 - DNA, 437 bp, Glycine max
  Clone ID: LIB3051-087-Q1-K1-B3
cggacgcgtgggttctttttttcaatttccaaatcacgaaactcaagaagatggagaaagcgatcgacagacagaagattttgcttcatcatctcaacccttcatcatccacccaccccaacgaatcatcctccctccatgcttcagcatgtgtggcgggggatagcgctgcttatcaaaggacatcgacattcggggacgatgttgtgatcgtggctgcttatcggactgctcattgcaaagctaaacgaggtggtttcaaagacactcttcctgatgatctactggctcctgttttgaaagctgtaattgagaaaaccaatgtgaacccaagtgaagttggggatattgttgtaggtagtgtattggctcctggagctcaaagagctagtgaatgccgaatggctgcattttatgcctgtttttccgaaactgtg

SEQ ID NO: 25665 - DNA, 274 bp, Glycine max
  Clone ID: LIB3051-100-Q1-K1-A11
cccacgcgtccgcacgaaactcaagaagatggagaaagcgatcaacagacagaagattttgcttcatcatctcaacccttcatcatccacccaccccaacgaatcatcctccctccatgcttcagcatgtgtggcgggggatagcgctgcttatcaaaggacatcgacattcggggacgatgttgtgatcgtggctgcttatcggactgctcattgcaaagctaaacgaggtggtttcaaagacactcttcctgatgatctactgcctcctgtt

SEQ ID NO: 25666 - DNA, 372 bp, Glycine max
  unsure (1)..(372): unsure at all n locations
  Clone ID: LIB3051-104-Q1-K1-A9
tcatccacccaccgcaacgaatcatcctccctccatgcttcagcatgtgtggcgggggatagcgctgcttatcaaaggacatcgacattcggggacgatgttgcgatcgtggctgcttatcggactgctcattgcaaagctaaacgaggtggtttcaaagacactcttcctgatgatctactggctcctgttttgaaggctgcaattgagaaaaccaatgtgaacccaagtgaagttggggatattgttgtaggtagtgtattggctcctggagctcaaagagctagtgaatgccgaatggctgcattntatgctggttttcccgaaactgtgcctgttaggaccgttaataggcaatggtcatctgggctc

SEQ ID NO: 25667 - DNA, 435 bp, Glycine max
  Clone ID: LIB3051-105-Q1-K1-H7
cccacgcgtccgcttagagagaaaaaaaaatggctgatacaggtggaggagatgcagtgagaccagtggtaatatgtgataacaagtgtggctgcacacttccatgcactggtggttccacttgcaggtgcacaagtgctggcactgccacaggagggggtgatcacgtgacatgctcgtgcggagagcactgtggttgcaatccatgctcatgtcccaagattgcggctgctggaagtggttgcagatgtggcacagattgtgcatgtgcctcctgccgcacttagtatcacaccttaaggcttaaacttcacgttttattttatgtcttcaaatcttgaatacgttttctatatattagtcttgtttaaagttcaaagtgtggacgtggtttctacttagtactcaaacgtattagtaattggtatcaaaact

SEQ ID NO: 25668 - DNA, 449 bp, Glycine max
  Clone ID: LIB3051-025-Q1-K1-F9
tcttcttactccttacaagatgggcaaattcaatctgtcccatagagttgttttggcaccgctgaccagacagaggtcttacgacaacgtcccacaaccccatgccatcctctactactcccagagaacttccaacggaggccttctcattactgaagccactggcgtctctgacacggctcaaggctatccgcaaacccctggcatatggactaaagaccatgttcaagcttggaaacccattgtcgatgccgtccacgccaaaggcggtgttttcttctgtcagatttggcacgttggaagagtttcagattcagtttatcagccaaatggacaagcacccatatcttctacggacaagccactcacaccccaaattcgaagtaatggcattgatcaagtacaatttacccctccaaggagattaaggactgatgaaattccgcata

SEQ ID NO: 25669 - DNA, 432 bp, Glycine max
  Clone ID: LIB3051-027-Q1-K1-E5
cccacgcgtccgggcttctcctcttcttactccttacaagatgggcaaattcaatctgtcccatagagttgttttggcaccgctgaccagacagaggtcttacgacaacgtcccacaaccccatgccatcctctactactcccagagaacttccaacggaggccttctcattactgaagccactggcgtctctgacacggctcaaggctatccgcaaacccctggcatatggactaaagaccatgttcaagcttggaaacccattgtcgatgccgtccacgccaaaggcggtgttttcttctgtcagatttggcacgttggaagagtttcagattcagtttatcagccaaatggacaagcacccatatcttctacggacaagccactcacaccccaaattcgaagtaatggcattgatcaagtacaatttac

SEQ ID NO: 25670 - DNA, 413 bp, Glycine max
  Clone ID: LIB3051-062-Q1-K1-F12
gatggcttctcctcttcttactccttacaagatgggcaaattcaatctgtcccatagagttgttttggcaccgctgaccagacagaggtcttacgacaacgtcccacaaccccatgccatcctctactactcccagagaacttccaacggaggccttctcattactgaagccactggcgtctctgacacggctcaaggctatccgcaaacccctggcatatggactaaagaccatgttcaagcttggaaacccattgtcgatgccgtccacgccaaaggcggtgttttcttctgtcagatttggcacgttggaagagtttcagattcagtttatcagccaaatggacaagcacccatatcttctacggacaagccactcacaccccaaattcgaagtaatggcattgatcaag

SEQ ID NO: 25671 - DNA, 467 bp, Glycine max
  unsure (1)..(467): unsure at all n locations
  Clone ID: LIB3051-068-Q1-K1-A4
cccacgcgtccgcccacgcgtccggtaatttcccccaccttttgctcctgccaaatactagtgtttcaaataccctgccaaatactaacatcatatccatggctgtgcaaattgtaggttttgatggggttgagatccatggggctcatggctacctgcttgagcaatttatgaaagataaagtgaatgaccgaacagacgaatatggtggatcccttgagaaccgctgccgatttgctttggaagttgttgaagcttgtgttaatgagataggggcggacagagttggaattaggctatcgccattcgcagaatattcagagtctggagactctaatccaaaagaattggggctttacatgatgaatgccctcaataagtatggtattctntactgtcacatggtggaaccaagaatgaagactgttggagaaaaaactgaatgccctcatagcctggtgcctatg

SEQ ID NO: 25672 - DNA, 455 bp, Glycine max
  Clone ID: LIB3051-090-Q1-K1-F2
aagagatggcttctcctcttcttactccttacaagatgggcaaattcaatctgtcccatagaggtgttttggcaccgctgaccagacagaggtcttacgacaacgtcccacaaccccatgccatcctctactactcccagagaacttccaacggaggccttctcattactgaagccactggcgtctctgacacggctcaaggctatccgcaaacccctggcatatggactaaagaccatgttcaagcttggaaacccattgtcgatgccgtgcacgccaaaggcggtgtattcttctgtcagatttggcacgttggaagaggttcagattcagcttatcagccaaatggacaagcacccatatcttctacggacaagccactcacaccccaaattcgaagtaatggcattgatcaagtacaatttacccctccaaggagattaaggactgatgaa

SEQ ID NO: 25673 - DNA, 435 bp, Glycine max
  Clone ID: LIB3051-105-Q1-K1-E9
cccacgcgtccgggcttctcctcttcttactccttacaagatgggcaaattcaatctgtgccatagagttgttttggcaccgctgaccagacagaggtcttacgacaacgtcccacaaccccatgccatcctctactactcccagagaacttccaacggaggccttctcattactgaagccactggcgtctctgacacggctcaaggctatccgcaaacccctggcatatggactaaagaccatgttcaagcttggaaacccattgtcgatgccgtccacgccaaaggcggtgttttcttctgtcagatttggcacgttggaagagtttcagattcagtttatcagccaaatggacaagcacccatatcttctacggacaagccactcacaccccaaattcgaagtaatggcattgatcaagtacaatttacccc

SEQ ID NO: 25674 - DNA, 445 bp, Glycine max
  Clone ID: LIB3051-042-Q1-K1-E12
gagagagagagaggagagagtattggcgcttcatcaagatgggtatgggtagggattccatgcacaagaggcgtgccactggtggcaagaaaaaggcttggagaaagaagagaaagtatgagcttgggcgtcaggcagcaaacaccaagttatcaagcaacaagacaatcaggaggattcgtgttagaggtggcaatgttaaatggagggcattgaggctggatactggcaattactcatggggtagtgaagcagttactcgcaagactcgtattctagatgttgtttacaatgcctcaaacaacgagcttgtgcgaactcagaccctggtcaagagtgctattgtccaggttgatgctgctcctttcaggcagtggtaccttcagcactatggtgttgaaattggtagaaaaaagaaagtggcagccaagaaggattctactga

SEQ ID NO: 25675 - DNA, 382 bp, Glycine max
  unsure (1)..(382): unsure at all n locations
  Clone ID: LIB3051-058-Q1-K2-C2
ctttgagagagagagagggaggagggagagtgttgacgctccatcaagatgggtatttctagggattccatgcacaagaggcgtgccactggtggcaagaagaaggcatggagaaagaagagaaagtatgagcttgggcgtcaggccgcaaacaccaagttatcaagcaacaaaactatccggaggattcgtgttcgaggtggcaatgttaaatggagggcattgaggttggataccggcaattactcatggggtagtgaagcagttactcgcaagactcgtattctagatgttgtttacaatgcctcaaacaatgagcttgtgcgaactcagaccctggtcaagaatgctattgntcaggttgatgctgctcctttcaagc

SEQ ID NO: 25676 - DNA, 340 bp, Glycine max
  unsure (1)..(340): unsure at all n locations
  Clone ID: LIB3051-107-Q1-K1-C6
ggaagcttagagagagagagagagagagagagagagaggagagagtattggcgcttcatggagatgggtatttctagggattccatgcacaagaggcgtgccactggtggcaagaaaaaggcttggagaaagaagagaaagtatgagcttgggcgtcaggcagcaaacaccaagttatcaagcaacaagacaatcaggaggattcgtgttagaggtggcaatgttaaatggagggcattgaggctggatactggcaattactcatggggtagtgaagcagttactcgcaagactcgtattctagatgttgnttacaatgcctcaaacaacgagcttgtgc

SEQ ID NO: 25677 - DNA, 432 bp, Glycine max
  unsure (1)..(432): unsure at all n locations
  Clone ID: LIB3051-045-Q1-K1-C8
gccaagctcgcgtctcacttctctctcttatattaatcactcccgcacacagagcatggttcacctttcttttccgaccaaaggttcgccagaaaatgcttctatcctcctcctgctccgccgccggctccgccgtctccggcgagatcatgctgttcggcgtgagagtcgtagtggactccatgaggaagagcgtgagtatgaacaacctctcgcagtacgagctccctcgcgacgccgncaacgccaaagacgacgtcgctgccggctacgcctncgctgacgatgccgctccgataaactccggcaagaaccgcgaccgcaagcgagggattccatggacggangaagagcacaagctattcttggtggggttgcagaaagtggggaaaggtgattggagagggatctcaaggaactatgtcaaaacga

SEQ ID NO: 25678 - DNA, 403 bp, Glycine max
  unsure (1)..(403): unsure at all n locations
  Clone ID: LIB3051-015-Q1-E1-F9
aattctaaggccgaccgacgcgtcaacccacgagtccgcttctattaacaagagacctattaatctttctctttccaaccctacgttcacagtcagaatgcactgctgaagaagcttacaagtggagccagggacgtgccatttttgcaagtgggagtccatttccccctgttgagtacgagggcaaagtgtttgtgcctggccaggccaataatgcatacatattccctggatttggtctcggtttaataatgtctgggaccattcgagtgcatgatgacctgcttctggctgcctctgaggctttgggcggcacaagtgagccaagaaaacttttgataaggactcatatacccaccatttcacancatcagaaagatttcagcacacatagctgccaatg

SEQ ID NO: 25679 - DNA, 444 bp, Glycine max
  Clone ID: LIB3051-101-Q1-K1-E2
cagggaacagcatccgtggttcttgctggactagttgcatctctgaagttggttgggggtaacttagctgatcacagattcttattccttggtgctggagaggctggcactggcatagcagaactcatagcacttgaaacatcaaaacagacaaatgctccactggaggaagtgcgcaagaatatttggctggtggactcaaagggattgattgtcagttctcgcaaagattcgctccaacattttaagaagccctgggctcatgagcatgaacctgttaaaaatcttctagatgctgttaataaaattaagccaacagtgttgattggaacatcgggacaaggaagaacttttactaaagaagtgattgaggcaatggcttctattaacaagagacctattattctttctctttccaaccctacgttacagtcagaatgcact

SEQ ID NO: 25680 - DNA, 283 bp, Glycine max
  Clone ID: LIB3051-117-Q1-K1-A9
cttattcttgtgtatcaccatcagggacgtgccatttttgcaagtgggagtccatttgcccctgttgagtacgagggcaaagtgtttgtgcctggccaggccaataatgcatacatattccctggatttggtctcggtttaataatgtctgggaccattcgagtgcatgatgacctgcttctggctgcctctgaggctttggctgcacaagtgagccaagagaactttgataagggactcatatacccagcattcaccaacatcagaaagatttcagcacaca

SEQ ID NO: 25681 - DNA, 368 bp, Glycine max
  Clone ID: LIB3051-094-Q1-K1-G9
gcagggtctaatgggtaactgcctagattcttctgccaaagttgatgcagctcagagcgtccagatccactgctgcatcaggaatctcaaaaactactccttccagtgtatctattccatcatacagtgaaaaaagcaatgcctcaagtcttcccacaccaacgtccgagggtgaaatcttgtcttctgccaatcttaagcccttcacattcaatgagctgaagaatgccaccagaaattttcgccccgatagtcttctcggtgaagggggatttggatatgtctacaagggatggattgatgaacacacatttacagcttcaaaacctggatcaggaatggttgttgctgtaaaaaggcttaaacct

SEQ ID NO: 25682 - DNA, 438 bp, Glycine max
  Clone ID: LIB3051-104-Q1-K1-G3
cgggccgaccgacgcgtgcgcccacgcgttcgcccactcgtccgctcactcttgcgaccggctattggtgtatgagtctaggcctagggggagcttatagatccatctatttagaagaggacctcaaccactctcttggtcggtgaggatgaaagtggctattggtgctgccagaggactctcctttcttcataatgccaaatcacaagtcatataccgtgattttaaagcttctaacatcctgctggatgctgagtttaattcgaaactctctgactctggtttagctaaggcgggtcctactggtgatagaactcatgtgtctactcaagtcatgggtactcaaggatatgcatcacctgaatatgctgcaactgatcggttgacggccaaaagtgatgtctacagcttcggagttgtgttgcttgaacttctatc

SEQ ID NO: 25683 - DNA, 237 bp, Glycine max
  Clone ID: LIB3051-006-Q1-K1-D8
tgcagaccgagctagctagctagcaagcaagcacagagatggaggcaaagcgaggcgatgccctcatgtgcttggcacgtgtttcactcttcctctgcgctctaaccctatccgctgctcacggaagcaccacggttcaagacatcgcgagaaagttgaaactcggggacaacgagcttctgcgcacggagaagaagttcaaggttttcatggaaaattacgggaggagctactcca

SEQ ID NO: 25684 - DNA, 215 bp, Glycine max
  Clone ID: LIB3051-019-Q1-K1-A8
taaaaaatggtacacttgctatgggcgtgaatgcaattttcatgcagacatacattggtggtgtctcatgcactgtgatatgtagcaagaaaaggctgaaccatggtgtgttacttgtgagatatggtggaaaaggattctgaatagaagagatggtgggcaagccatgatggagcatgaggaattcgtggggggagaaatggggagaagatggc

SEQ ID NO: 25685 - DNA, 386 bp, Glycine max
  unsure (1)..(386): unsure at all n locations
  Clone ID: LIB3051-027-Q1-K1-G2
tgcagaccgagctagctagctagcaagcaagcacagagatggaggcaaagcgaggccatgccctcatgtgcttggcacgtgtttcactcttcctctgcgctctaaccctatccgctgctcacggaagcaccacggttcaagacatcgcgagaaagttgaaactcggggacaacgagcttctgcgcacggagaagaagttcaaggttttcatggagaattacgggaggagctactccacagaggaagagtatttgcgccgtttggggattttcgcccagaacatggtcagagcggcggagcatcaagcgctggaccccaccgncgttcacggcgtcacgcagttcttcgatctcaccgaggaccagtttgaaaagctctacactggc

SEQ ID NO: 25686 - DNA, 326 bp, Glycine max
  Clone ID: LIB3051-030-Q1-K1-G9
atggagcattacaggaggagctactgcacatacgacgagtcttagcaccagttgtggatgctcgcccagaacatggtcagagccgcggatcatgaggcgctggaccacaccgtcgtccacggcgtcacgcacttcttcgatctcaccgaggacgagtttgagaagctgtacgctggcctcaatggcggcttcccgtgatcgaataatgcctccggcggtattgcccccccgtttgaggtggactggctggcggacaatcttgattggaaagaggaaggaactgtcaccggagctaagttacagggtaaatgtcgatcatgctgggc

SEQ ID NO: 25687 - DNA, 405 bp, Glycine max
  unsure (1)..(405): unsure at all n locations
  Clone ID: LIB3051-038-Q1-K1-F7
gctagctagcaagcaagcacagagatggaggcaaagcgaggccatgccctcatgtgcttggcacgtgtttcactcttcctctgcgctctaaccctatccgctgctcacggaagcaccacggttcaagacatcgcgagaaagttgaaactcggggacaacgagcttctgcgcacggagaagaagttcaaggttttcatggagaattacgggaggagctactccacagaggaggagtatttgcgccgtttggggattttcggccagaacatggtcagagcggccgagcattaagcgctggaccccaacgncggtcacggcgtaacgcagttctcgatctcaccgaggacgagnttgagaagctctacanctgcgtcaatggcggctttccgtcatcgaataatgccg

SEQ ID NO: 25688 - DNA, 419 bp, Glycine max
  Clone ID: LIB3051-040-Q1-K1-F10
cccacgcgtccgacgggaggagctactccacagaggaggagtatttgcgccgtttggggattttcgcccagaacatggtcagagcggcggagcatcaggcgctggaccccaccgccgtccacggcgtcacgcagttctccgatctcaccgaggacgagtttgagaagctctacactggcgtcaatggcggcttcccgtcatcgaataatgccgccggcggtattgcgccgccgttggaggtggacgggctgccggagaattttgattggagagagaaaggagctgtcaccgaagttaagttacagggtagatgtggatcatgctgggctttcagcaccacaggatctatagaaggagccaattttcttgccaccggaaagctcgtcagtcttagtgaacaacagctccttgactgtgac

SEQ ID NO: 25689 - DNA, 440 bp, Glycine max
  Clone ID: LIB3051-065-Q1-K1-H5
gggctttcagcaccacaggatctatagaaggagccaattttcttgccaccggaaagctcgtgagtcttagtgaacaacagctccttgactgtgacaacaagtgtgacataacagaaaagacttcatgtgacaatgggtgtaatggaggtcttatgacaaatgcctacaattatttgctcgagtctggtgggttggaggaggagtcttcatatccctacactggggagagaggtgaatgcaagtttgatccagagaaaatagcagttaagatcacaaatttcaccaatatccctgctgatgagaaccaaattgccgcatatttagtaaaaaatggtccacttgctatgggcgtgaatgcaattttcatgcaaacatacattggtggtgtctcatgccctctcatatgtagcaagaaaaggctgaaccatggtgtgttactt

SEQ ID NO: 25690 - DNA, 389 bp, Glycine max
  Clone ID: LIB3051-071-Q1-K1-F3
tgcagaccgagctagctagctagcaagcaagctcagagatggaggcaaagcgaggccatgcggtcatgtgcttggcacgtgtttcactcttcctctgcgctctaaccctatccgctgctcacggaagcaccacggttcaagacatcgcgagaaagttgaaactcggggacaacgagcttctgcgcacggagaagaagttcaaggttttcatggagaattacgggaggagctactccacagaggaggagtatttgcgccgtttggggattttcgcccagaacatggtcagagcggcggagcatcaggcgctggaccccaccgccgtccacggcgtcacgcagttctccgaatctaccgaggacgagtttgagaagctctacactggcgtc

SEQ ID NO: 25691 - DNA, 417 bp, Glycine max
  Clone ID: LIB3051-079-Q1-K1-H10
cccactcgtccgcccactcgtccgcgcactcgtccgcgagcttctgcgcacggagaaggagttcaaggttttcatggagaattacgggaggagctactccacagaggaggagtatttgcgccgtttggggattttcgcccagaacatggtcagagcggcggagcatcaggcgctggaccccaccgccgtccacggcgtcacgcagttctccgatctcaccgaggacgagtttgagaagctctacactggcgtcaatggcggcttcccgtcatcgaataatgccgccggcggtattgcgccgccgttggaggtggacgggctgccggagaattttgattggagagagaaaggagctgtcaccgaagttaagttacagggtaaatgtggatcatgctgggctttcagcaccacaggatc

SEQ ID NO: 25692 - DNA, 280 bp, Glycine max
  Clone ID: LIB3051-079-Q1-K1-H11
tcccactcgtcctcccactcgttcgtgcactccttctctagcttctgcgcacggataatagctcgagtgctttcatggagaattacgggacgagctactccacacatgaagagtatttgcgccgtttggggattttcgcccataacatggtcagagcggcgtatcatcaggcgctggaccccaccgccttccacggcgtcacgcagttctccgatctcacctaggactagtttgagaagctctacactggcgtcaatggcggcttcccgtcatcgaataa

SEQ ID NO: 25693 - DNA, 433 bp, Glycine max
  Clone ID: LIB3051-082-Q1-K1-C7
gcagaccgagctagctagctagcaagcaagcacagagatggaggcaaagcgaggcgcataccctcatgtgcttggcacgtgtttcactcttcctctgcgctctaaccctatccgctgctcacggaagcaccacggttcaagacatcgcgagaaagttgaaactcggggacaacgagcttctgcgcacggagaagaagttcaaggttttcatggagaattacgggaggagctactccacagaggaggagtatttgcgccgtttggggattttcgcccagaacatggtcagagcggcggagcatcaggcgctggaccccaccgtcgtccacggcgtcacgcagttctccgatctcaccgaggacgagtttgagaagctctacactggcgtcaatggcggcttcccgtcatcgaataatgccgccggcggtattgc

SEQ ID NO: 25694 - DNA, 330 bp, Glycine max
  Clone ID: LIB3051-094-Q1-K1-H1
cccacgcgttcgcccacgcgttcgagctagctagcaagcaagcacataaatggaggcgaagcgaggccatgccctcatgtgcttggcacgtgtttcactcttcctctgcgctctaaccctatccgctgctcacggaagcaccacggttcacgacatcgcgagaaagttgaaactcggggacaacgagcttctgcgcacggagaataagttcacggtttacatggagaattactggaggagctactccacagaggaggagtatttgcgccggatgtggatactcggccagaacatggtcagagcggttgaccattaggcgctggacctcac

SEQ ID NO: 25695 - DNA, 418 bp, Glycine max
  Clone ID: LIB3051-107-Q1-K1-E2
cgcaagggggaaccgattaaaaaaaggcaaatcaaattcgaaagaaggagagaatttacagaggtgaatgcaagtttgatccagagaaaatagcagttaagatcacacatttcaccaatatccctgctgatgagaaccaaattgccgcatatttagtaaaaaatggtccacttgctatgggcgtgaatgcaattttcatgcaaacatacattggtggtgtctcatgccctctcatatgtagcaagaaaaggctgaaccatggtgtgttacttgcgggatatggtgcaaaaggcttctcaattcttaggcttggcaacaaaccatactggatcatcaagaattcgtggggggagaaatggggagaagatggctattacaagctctgcatagggcatggcatgtgtggaataaacactat

SEQ ID NO: 25696 - DNA, 453 bp, Glycine max
  Clone ID: LIB3051-108-Q1-K1-E3
agttgaaactcggggacaacgagcttctgcgcacggagaagaagttcaaggttttcatggagaattacgggaggagctactccacagaggaggagtatttgcgccgtttggggattttcgcccagaacatggtcagagcggcggagcatcaggcgctggaccccaccgtcgtccacggcgtcacgcagttctccgatctcaccgaggacgagtttgagaagctctacactggcgtcaatggcggcttcccgtcatcgaataatgccgccggcggtattgcgccgccgttggaggtggacgggctgccggagaattttgattggagagagaaaggagctgtcaccgaagttaagttacagggtagatgtggatcatgctgggctttcagcaccacaggatctatagaaggagccaattttcttgccaccggtaagctcgtcagtcttaagtgac

SEQ ID NO: 25697 - DNA, 365 bp, Glycine max
  Clone ID: LIB3051-014-Q1-E1-C8
atcagcccacgcgtccgcccacgcgtccggggctatggcatttgatgtagaatatgcaaggtggctggaagagcagaatcgacaaattaatgagctaagagcaggtgtacattctcatgcaggtgatacagaacttcgcatgattatcgatggtataatggcacattatgatgagatatttaggctgaaggccaatgcagctaaggctgatgtcttccatttgctgtctggaatgtggaagacaccagcagagaggtgttttctatggcttggtggttttcggtcatctgaactcctcaagctcctggtaaatcaattggaacctctgacggagcaacagttagtgggtatcatcaacttgcagc

SEQ ID NO: 25698 - DNA, 435 bp, Glycine max
  Clone ID: LIB3051-084-Q1-K1-B8
acccacgcgtccggaaaaagtcggttgagaaagaaagcttatgttcaacagcttgaaagtagtcgggtaaaggtaacccaactggagcaagagcttcagcgagctaggcagcagggaatcattatatcaaactcaggtgatcaagcacattcaatgagtggaaatggggctatggcatttgatgtagagtatgcaagatggctggaagagcagaatcgacaagttaatgagctaagagcagctgtaaattcccatgcaggtgatacagaacttcgcatgattatcgatggtataatggcacattatgatgagatatttaggctgaaggccgatgcagctaaagctgatgtcttccatttgttgtctggaatgtggaagacaccagcagagaggtgttttctaatgcttgggggtttttcggtcatctgaactcct

SEQ ID NO: 25699 - DNA, 363 bp, Glycine max
  Clone ID: LIB3051-113-Q1-K1-H6
ctggattgttccaaactatacagagggaagcgcaattgattctttttgtgtgtttgactgtgatcaatcagttggatatcgcatagaggattgtgttgccttgaggggaaactcagtttttgactcactaaaagtaagtagccaaacaatttctcggggtcctgttgaagttgattcctttgataagttaccaacttcactcaataaaaacccattaacaagccaaacagagcgacaaagattgcaattacaaaaggttcaattatcaaatctggtcagtggggatacggaacaccaggaagagtctgccatggctgacgccagtcctagaactgatatttctacagatgttgacactgatga

SEQ ID NO: 25700 - DNA, 402 bp, Glycine max
  Clone ID: LIB3051-075-Q1-K1-B5
ataaatcttccctttttgtgtcacaaccatgggttgttgtatgagtaaaaaagggtcagagccagaagaacacattgtttacagacatgttgcgggtgctgggggtgctggtgtgtacaataatcacaagagccatgaacccccttctcatcaaccttacccattacctgagaagcatgccccttggaggcctccaccaagcccaaaacatgttcacaagcatgacacaatcactgggaagccatttgaggatgttaaacagcactacacacttgggaaggaattggggagaggccaattcggggtgacttatctctgcactgagaattcaactggttttcagtatgcctgcaagtccatttcaaagaggaagcttgtgagcagagacgacaaggaggacat

SEQ ID NO: 25701 - DNA, 392 bp, Glycine max
  Clone ID: LIB3051-084-Q1-K1-B5
gtgagttctatatggcttataaggactacaatgacttaatggatctaacagagcaaatgttgagtggtatggttaaggagcttacgaaaggcagctataaaatcaagtatcatgcagatgggattgataaggaacctattgaaattgactttactacaccttttagaaggattgacatgattgaagagttagagaagatggcaggtctaagtattcccaaagacttgtcaagtgaggaagccaatcaatatttgaaggatgcatgcgtgaagtatgagatcaaatgtcctccccctgagacaactgctcgtttgttggataaacttgtgggtcactttttggaagaaacgtgtgtaaatcctacattcatcaaaaaccatcctgagatcatg

SEQ ID NO: 25702 - DNA, 315 bp, Glycine max
  unsure (1)..(315): unsure at all n locations
  Clone ID: LIB3051-038-Q1-K1-D4
gtctcttcctcctctctctgcatcgctgcgttttccgaatcgaaaggtgaggttagtaagtaacaatggtggagaaggccaagggtaggaaggaggaangttgtcactcgagagtacaccatcaaccttcacaaacgcttgcatggctgcacatttaagaagaaggctcctaaagcaattaaggagataaggaagtttgctcagaaagcgatggggacgaatgatgtaagagtggatgtgaagctcaacaaggctgtgtggagccaggggatccggagcgtcccaaggaggattaaggttcgcattgctcgcaag

SEQ ID NO: 25703 - DNA, 434 bp, Glycine max
  Clone ID: LIB3051-009-Q1-E1-H3
aaacactgagctaaggaagctgttgattgagactccgagtaagtctatcacggtgattgaggacattgattgctcactcgatcttaccggccagaggaagaagaaaaaggaagagaatgaggatgaagaacaaaaagatcctatgaggagaaatgaggaggagagtagcaagagtagtaaggtgactctgtctgggttgttgaattttatagatgggatttggtctgcttgtggaggtgagaggatcattgttttcacgacgaattatgtggagaaacttgaccctgctttgattaagagagggaggatggataagcacatagagatgtcttattgttgctatgatgcattcaaggtgctggccaagaactacttggatgttgagtctcatcatttgtttggtgcaattggggaatgttggaagaaacagatat

SEQ ID NO: 25704 - DNA, 434 bp, Glycine max
  Clone ID: LIB3051-084-Q1-K1-E1
cccacgcgtccgcccacgcgtccgggaagctgttgattgagactccgagtaagtctatgacggtgattgaggacattgattgctcactcgatcttaccggccagaggaagaagaaaaaggaagagaatgaggatgaagaacaaaaagatcctatgaggagaaatgaggaggagagtagcaagagtagtaaggtgactctgtctgggttgttgaattttatagatgggatttggtctgcttgtggaggtgagaggatcattgttttcacgacgaattatgtggagaaacttgaccctgctttgattaggagagggaggatggataagcacatagagatgtcttattgttgctatgatgcattcaaggtgctggccaagaactacttggatgttgagtctcatcatttggttggtgcaattgggggattgttggag

SEQ ID NO: 25705 - DNA, 403 bp, Glycine max
  Clone ID: LIB3051-096-Q1-K1-B5
cccacgcgtccggaagaacaaaaagatcctatgaggagaaatgaggaggagagtagcaagagtagtaaggtgactctgtctgggttgttgaattttatagatgggatttggtctgcttgtggaggtgagaggatcattgttttcacgacgaattatgtggagaaacttgaccctgctttgattaggagagggaggatggataagcacatagagatgtcttattgttgctatgatgcattcaaggtgctggccaagaactacttggatgttgagtctcatcatttgtttggtgcaattgggggattgttggaagaaacagatatgtccccggctgatgttgctgagaatctgatgccaaagtctgtggatgaagatgtggagatttgcctgcacaaattgatta

SEQ ID NO: 25706 - DNA, 411 bp, Glycine max
  unsure (1)..(411): unsure at all n locations
  Clone ID: LIB3051-005-Q1-E1-A5
cggctcgacccacgacgtccgcggacgcgtgggaaaaaataatggcaaggaaggtgggtttgaattttatagggtgctccatcgttgcaatggttttcataattggtgtggctgaagcaacagattatatcgttggtgaaggcttcggatggagcgttccctccaatgagagcttttatacagactgggctagcaccaagagattcttcgttggtgacaatctcattttcaacatcagcggagagcattcggtgggaattagaacagaggctacttattatgagaattgcaacaccagcttattaactggtttcacgttcatangcgtcaatgggagtaattcgatgtttccacataatattattcctccaactgggcctcgctatttcctctgcaccgttggaaatcact

SEQ ID NO: 25707 - DNA, 343 bp, Glycine max
  Clone ID: LIB3051-035-Q1-K1-E4
ggcaaggaaggtgggtttgaattttatagggtgctccatcgttgcaatggttttcataattggtgtggctgaagcaacagattatatcgttggtgaaggcttcggatggagcgttccctccaatgagagcttttatacagactgggctagcaccaagagattcttcgttggtgacaatctcattttcaacatcagcggagagcattcggtgggaattagaacagaggctacttattatgagaattgcaacaccagcttattaactggtttcacgttcataggcgtcaatgggagtaattcgatgtttcgacataatattattccttcaactgggcctcgctat

SEQ ID NO: 25708 - DNA, 389 bp, Glycine max
  Clone ID: LIB3051-043-Q1-K1-D1
gaaaaaaataatggcaaggaaggtgggtttgaattttatagggtgctccatcgttgcaatggttttcataattggtgtggctgaagcaacagattatatcgttggtgaaggcttcggatggagcgttccctccaatgagagcttttatacagactgggctagcaccaagagattcttcgttggtgacaatctcattttcaacatcagcggagagcattcggtgggaattagaacagaggctacttattatgagaattgcaacaccagcttattaactgggttcacgttcataggcgtcaatggggagtaattcgatgtttcgacataatattattcctccaactgggcctcgctatttcctctgcaaccgtggaatcactgtgaaagag

SEQ ID NO: 25709 - DNA, 429 bp, Glycine max
  Clone ID: LIB3051-103-Q1-K1-B5
cgaaaaaaataatggcaaggaaggtgggtttgaattttatagggtgctccatcgttggaatggttttcataattggtgtggctgaagcaacagattatatcgttggtgaaggcttcggatggagcgttccctccaatgagagcttttatacagactgggctagcaccaagagattcttcgttggtgacaatctcattttcaacatcagcggagagcattcggtgggaattagaacagaggctacttattatgagaattgcaacaccagcttattaactggtttcacgttcataggcgtcaatgggagtaattcgatgtttcgacataatattattcctccaactgggcctcgctatttcctctgcaccgttggaaatcactgtgaaagaggccagaagtttagtattcagcgttgagtctcatcctgat

SEQ ID NO: 25710 - DNA, 448 bp, Glycine max
  Clone ID: LIB3051-103-Q1-K1-B10
aaaaaataatggcaaggaaggtgggtttgaattttatagggtgctccatcgttgcagggggtttcataattggtgtggctgaagcaacagattatatcgttggtgaaggcttcggatggagcgttccctccaatgagagcttttatacagactgggctagcaccaagagattcttcgttggtgacaatctcattttcaacatcagcggagagcattcggtgggaattagaacagaggctacttattatgagaattgcaacaccagcttattaactggtttcacgttcataggcgtcaatgggagtaattcgatgtttcgacataatattattcctccaactgggccttgctatttcctctgcaccgttggaaatcactgtgaaagatgccagaagtttagtatcagcgttgagtctcatcctgattccgctgctcctactacactgtc

SEQ ID NO: 25711 - DNA, 440 bp, Glycine max
  Clone ID: LIB3051-105-Q1-K1-C5
aaaaataatggcaaggaaggtgggtttgaattttatagggtgctccatcgttgcaatggggttcataattggtgtggctgaagcaacagattatatcgttggtgaaggcttcggatggagcgttccctccaatgagagcttttatacagactgggctagcaccaagagattcttcgttggtgacaatctcattttcaacatcagcggagagcattcggtgggaattagaacagaggctacttattatgagaattgcaacaccagcttattaactggtttcacgttcataggcgtcaatgggagtaattcgatgtttcgacataatattattcctccaactgggcctcgctatttcctctgcaccgttggaaatcactgtgaaagaggccagaagtttagtatcagcgttgagtctcatcctgattccgctgctcctacta

SEQ ID NO: 25712 - DNA, 436 bp, Glycine max
  Clone ID: LIB3051-106-Q1-K1-F12
cccacgcgtccgtcggatggagcgttccctccaatgagagcttttatacagactgggctagcgccaagagattctgggttggtgacaatctcattttcaacatcagcggagagcattcggtgggaattagaacagaggctacttattatgagaattgcaacaccagcttattaactggtttcacgttcataggcgtcaatgggagtaattcgatgtttcgacataatattattcctccaactgggcctcgctatttcctctgcaccgttggaaatcactgtgaaagaggccagaagtttagtatcagcgttgagtctcatcctgattccgctgctcctactacactgtcattcagaatcttatctgcatttctctctagcttggctgtgtatttcttcactgttactagttagttactttgtcgtgtaactctacg

SEQ ID NO: 25713 - DNA, 364 bp, Glycine max
  unsure (1)..(364): unsure at all n locations
  Clone ID: LIB3051-010-Q1-E1-F7
gacccacgcgaccgaagagaattaggcaataagataattaaagatgtctgacgattgcaaaggtaagagctcatggcctgagctagttggagtgcaagggacagttgcggaggctacaattgagagagagaaccctttggtggatgctatcattgtgcccgaaggaaacatggtcatcactgatttccgctgtgatagggtttgggtttggatcgataaagatggaattgtcaaggaagttccccacattggatagaaactgctccccactagctanggatcaaataattgtttccagttttatgttattttattcagaataaagtttcagaaatgtcaaaagattaatgtaataaaccaacta

SEQ ID NO: 25714 - DNA, 399 bp, Glycine max
  Clone ID: LIB3051-020-Q1-E1-C5
acatttataaaaaagtcacaaacagagaattaggcaataagataattaaagatgtctgacgattgcaaaggtaagagctcatggcctgagctagttggagtgcaagggacagttgcggaggctacaattgagagagagaaccctttggtggatgctatcattgtgcccgaaggaaacatggtcatcactgatttccgctgtgatatggtttgggtttggatcgataaagatggaattgtcaaggaagttccccacattggatagaaactgctccccactagctagggatcaaataattgtttccagttttatgttattttattcagaataacgtttcacaaatgtcaaaagattactgtaataaaccacctacagttggccttgtataatgttttagac

SEQ ID NO: 25715 - DNA, 424 bp, Glycine max
  Clone ID: LIB3051-040-Q1-K1-H11
cccacgcgtccgaaaaaaaaaaaaagtcaaacagagaattaggcaataagctaaagatgtctgacgattgcaaaggtaagagctcatggcctgagcttgttggagtgcaagggacagtggcagaggctacaattgagagagagaatcctttggtgaatgctatcattgtgcctgaaggaaacagggtcatcactgattaccgctgtgatagggttgggtttggatcaacaaagatggaattgtcaaggaagttccacacattggatagaaacttttccctctagctagggttcaaataattgtttccagttttatgttattttattcagaaagtttcagaaatgtcaaaagattaatataataaaccaactagagttggccttgtaaaatgttttagattcaaaatctgttgttgtcattgcat

SEQ ID NO: 25716 - DNA, 443 bp, Glycine max
  Clone ID: LIB3051-042-Q1-K1-B12
cccacgcgtccgggcaataagataattaaagatgtctgacgattgcaaaggtaagagctgatggcctgagctagttggagtgcaagggacagttgcggaggctacaattgagagagagaaccctttggtggatgctatcattgtgcccgaaggaaacatggtcatcactgatttccgctgtgatagggtttgggtttggatcgataaagatggaattgtcaaggaagttccccacattggatagaaactgctccccactagctagggatcaaataattgtttccagttttatgttattttattcagaataaagtttcagaaatgtcaaaagattaatgtaataaaccaactagagttggccttgtataatgttttagactcaaaatctgttcttgtcattctatatatataaaaaaaagttaatataacaatctcttatatgc

SEQ ID NO: 25717 - DNA, 428 bp, Glycine max
  unsure (1)..(428): unsure at all n locations
  Clone ID: LIB3051-050-Q1-K1-E12
aaaaaagtcacaaacagagaattaggcaataagataattaaagatgtctgacgattgcaaaggtaagagctcatggcctgagctagttggagtgcaagggacagttgcggaggctacaattgagagagagaaccctttggtggatgctatcattgtgcccgaaggaaacatggtcatcactgatttccgctgtgatagggtttgggtttggatcgataaagatggaattgtcaaggaagttccccacattggatagaaactgctccccactagctagggatcaaataattgtttccagttttatgttattttattcagaataaagtttcagaaatgtcaaaagattaatgtaataaaccaactagagttggccttgtataatgttttagactcaaaatctgntcttgtcattctatatatattaaaaa

SEQ ID NO: 25718 - DNA, 368 bp, Glycine max
  Clone ID: LIB3051-081-Q1-K1-A6
aaaaaaagtcaaacagagaattaggcaataagctaaagatgtctgacgattgcaaaggtaagagctcatggcctgagcttgttggagtgcaagggacagtggcagaggctacaattgagagagagaatcctttggtgaatgctatcattgtgcctgaaggaaacagggtcatcactgattaccgctgtgatagggtttgggtttggatcaacaaagatggaattgtcaaggaagttccacacattggatagaaacttttccctctagctagggttcaaataattgtttccagttttatgttattttattcagaaagtttcagaaatgtcaaaagattaatataataaaccaactagagttggccttgt

SEQ ID NO: 25719 - DNA, 432 bp, Glycine max
  Clone ID: LIB3051-093-Q1-K1-A4
cacaaacagagaattaggcaataagataattaaagatgtctgacgattgcaaaggtaagagctcatggcctgagctagttggagtgcaagggacagttgcggaggctacaattgagagagagaaccctttggtggatgctatcattgtgcccgaaggaaacatggtcatcactgatttccgctgtgatagggtttgggtttggatcgataaagatggaattgtcaaggaagttccccacattggatagaaactgctccccactagctagggatcaaataattgtttccagttttatgttattttattcagaataaagtttcagaaatgtcaaaagattaatgtaataaaccaactagagttggccttgtataatgttttagactcaaaatctgttcttgtcattctatatatataaaaaaaagttaatataa

SEQ ID NO: 25720 - DNA, 417 bp, Glycine max
  Clone ID: LIB3051-107-Q1-K1-F3
ggcaataagctaaagatgtctgacgattgcaaaggtaagagctcatggcctgagcttgttggagtgcaagggacagtggcagaggctacaattgagagagagaatcctttggtgaatgctatcattgtgcctgaaggaaacagggtcatcactgattaccgctgtgatagggtttgggtttggatcaacaaagatggaattgtcaaggaagttccacacattggatagaaacttttccctctagctagggttcaaataattgtttccagttttatgttattttattcacaaagtttcagaaatgtcaaaagattaatattataaaccaactatagttggccttgtaaaatgttttagattcaaaatcttgtgttgtcattgcataaaaaaaagttaatataatcatcttttatatgc

SEQ ID NO: 25721 - DNA, 383 bp, Glycine max
  Clone ID: LIB3051-108-Q1-K1-B5
tgcaaaggtaagagctcatggcctgagctagttggagtgcaagggacagttgcggaggctacaattgagagagagaaccctttggtggatgctatcattgtgcccgaaggaaacatggtcatcactgatttccgctgtgatagggtttgggtttggatcgataaagatggaattgtcaaggaagttccccacattggatagaaactgctccccactagctagggatcaaataattgtttccagttttatgttattttattcagaataaagtttcagaaatgtcaaaagattaatgtaataaaccaactagagttggccttgtataatgttttagactcaaaatctgttcttgtcattctatatatataaaaaaaagttaatat

SEQ ID NO: 25722 - DNA, 442 bp, Glycine max
  unsure (1)..(442): unsure at all n locations
  Clone ID: LIB3051-108-Q1-K1-B9
cccacgcgtccgcccacgcgtccgcgaatcggaatcgagttacaatgaaatcaaatgatgttacacgttggttatgttcgatactattttgcatagttttagtttgtgttcaatttgaaggatgtgtgggatccaagactaagaaaacggacgaggcatacgtcactcttttgtacggggatgaattcttgttgggtgttcgagttctgggcaaatcaatacggaacactggatccaacaaggacatggtcgtgttggtctccgatggtgtgtctgattatgccaaaagcctactccgggctgatgggtggatagtggagatgattagtttactggctaatcctaatcgagtgcgtccaaagagattntggggtgtctacacaaagctcaaaatatttaacatgactgactacaagaaagttgtttaccttgatgcggacac

SEQ ID NO: 25723 - DNA, 322 bp, Glycine max
  Clone ID: LIB3051-061-Q1-K1-C11
gcaaatttattgacccccatcacagggttccattgaccagccctggtggaactctggggtatagaccaccagaactcttacttggagcctctaattacggagatgctgtggatttgtggagcactggttgcatactgggggaactgaatcgtagcagacctatattacctggaaaaacagaggttgaacaattgcatacgatttttaaactttgtggctcaccatctgacgactattggtgcaagctgtggactccacattcaacagtattcaggcctcctcaccattataggcgttgtgttgctgaaacatttaaagaata

SEQ ID NO: 25724 - DNA, 313 bp, Glycine max
  Clone ID: LIB3051-030-Q1-K1-C7
cgtttccattctatctctatcttcacatatctctacctccctcaaacagtttgatgctagctcttgttccaatggcttcctcagttaaactcttatttttgtgctttctctcattgttcatctctttctccatagctcaaccctctttcagaccaaaggcacttgttcttcctgtcaccaaagatgtttctgcctcagttcctcagtatgttacacagatcaaacaaagaaccccacttgtgccagtgaaactaacagttgatcttggtggtggctacttttgggtgaactgtgaaaaaagctatgtctcatc

SEQ ID NO: 25725 - DNA, 414 bp, Glycine max
  Clone ID: LIB3051-034-Q1-K1-E11
cgtttccattctatctctatcttcacatatctctacctccctcaaacagtttatgctagctcttgttccaatggcttcctcagttaaactcttatttttgtgctttctctcattgttcatctctttctccatagctcaaccctctttcagaccaaaggcacttgttcttcctgtcaccaaagatgtttctgcctcagttcctcagtatgttacacagatcaaactaagaaccccacttgtgccagtgaaactaacagttgatcttggtggtggctacttttgggtgaactgtgaaaaaagctatgtctcatcaaccttaaaaccagctcgttgtggctctgctcagtgctcacttttcgggttatatggttgcaatgttgaggacagattctgtagtcgttcttttagcaacac

SEQ ID NO: 25726 - DNA, 428 bp, Glycine max
  Clone ID: LIB3051-046-Q1-K1-F8
atcttcacatatctctacctccctcaaacagtttatgctagctcttgttgcgatggctgcctcagttaaactcttatttttgtgctttctctcattgttcatctctttctccatagctcaaccctctttcagaccaaaggcacttgttcttcctgtcaccaaagatgtttctgcctcagttcctcagtatgttacacagatcagacaaagaaccccacttgtgccagtgaaactaacagttgatcttggtggtggctacttttgggtgaactgtgaaaaaggctatgtctcatcaacctcaaaaccagctcgttgtggctctgctcagtgctcacttttcgggttatatggttgcaatgttgaggacaaaatctgaagtcggtctctaagcaacactgttactggggtctccacatttgggggaattc

SEQ ID NO: 25727 - DNA, 354 bp, Glycine max
  Clone ID: LIB3051-084-Q1-K1-G7
atcttcacatatctctacctccctcaaacagtttatgctagctcttgttccaatggcttgctcagttaaactcttatttttgtgctttctctcattgttcatctctttctccatagctcaaccctctttcagaccaaaggcacttgttcttcctgtcaccaaagatgtttctgcctcagttcctcagtatgttacacagatcaaacaaagaaccccacttgtgccagtgaaactaacagttgatcttggtggtggctacttttgggtgaactgtgaaaaaggctatgtctcatcaacctcaaaaccagctcgttgtggctctgctcagtgctcacttttccggttatatgggtg

SEQ ID NO: 25728 - DNA, 387 bp, Glycine max
  Clone ID: LIB3051-114-Q1-K1-B5
tatctctacctccctcaaacagtttatgctttctcttgttccaatggcttcctcaggtaggctcttatttttgtgctttctctcattgttcatctctttctccatagctcaaccctctttcagaccaaaggcacttgttcttcctgtcaccaaagatgtttctgcctcagttcctcagtatgttacacagatcaaacaaagaaccccacttgtgccagtgaaactaacagttgatcttggtggtggctacttttgggtgaactgtgaaaaaggctatgtctcatcaacctcaaaaccagctcgttgtggctctgctcagtgctcacttttcgggttatatggttgcaatgttgacgacaaaatctgtagtcgttctttaagcaacac

SEQ ID NO: 25729 - DNA, 450 bp, Glycine max
  unsure (1)..(450): unsure at all n locations
  Clone ID: LIB3051-063-Q1-K1-H8
tgcttattttaagtatctatctgagtcaatcagtacagggagtccaacttgtgttgcagagatcttgggcatttatcaggtaacatcaaagcacctcaaaggagggaaggaaacaaagatggatgttttggttatggaaaaccttctttacaggcgtaacattagacgactttatgacctcaaaggttcttcccgatcacggtacaatccagatacaagtgggagcaataaagtgctgctggatcagaatctcattgaagctatgccaacctctccaatatttgttgggaacaaggcatagcggntgcttgagagggccgtgtggaatgacactgccttncttgcatcaatatatgtgatggactactcattgcttggtgagtggatgangaaaaacatgagctgggtttaggtatcattgattttatgaggcagtatacatgggacaaa

SEQ ID NO: 25730 - DNA, 437 bp, Glycine max
  Clone ID: LIB3051-115-Q1-K1-B5
cagagttcagaggaattcgttttctctgatcgggatctggaagggaagcgaatcgacgtgggtttcttggtgacgacgctgatcttcgtagtgatcggaatcatcgcgtgcctctgcaccagaatttgctgcaacagaggaccttctgccaatctatttcaccttactttggtaattactgcaacaatttgctgctggatgatgtgggcgattgtatatctggcacagatgaaaccactcattgtgcctatactgaacgagggtgaataagtctctgaacagatgtaactccttgtaagttagagaatatggatcgcagattggctgctggatagaatttaatcctggctatcatgagtcgctcagtatctgttcagggtggaactggatttatttctcgatggataatggcattccaggtggcatttctattgcta

SEQ ID NO: 25731 - DNA, 429 bp, Glycine max
  Clone ID: LIB3051-065-Q1-K1-H8
attaatgaagaagtggatgttataatttccgaatggatgggctatatgcttctgtatgagagcatgcttggaagtgttattaatgctagagatcgttggctcaaacctggtggtcttattcttccttcaagttcaacgttgtacatggctcctgtcactcatacggacagatacagtgacagtgttgacttctggcgcaatgtttatggaattgatatgtctgccatggtatcactggctaaacaatgcgcatttgaagaaccttccgtggagactataactggtgaaaatgtcttgacatggccacatgtggtaaaatatattgatagttattctgttaccatccaagagttagaatctgtaacagccaagtttaagttcaattccatgatgcgagcaccactgcatggttttgcattttggtttgac

SEQ ID NO: 25732 - DNA, 329 bp, Glycine max
  Clone ID: LIB3051-003-Q1-E1-B3
ctccaatctctatcctcaattcaacccttttggtggcaacttctatttatgctacaaaaaatgctgcgattgcacttcaccaccgcactctctcactttgcttccaaggcctcaccttttcctctcacacccgtttccgttaccgtttccagagctattgtttgcaacaaccccaccaggttcagatcgcaaatgggttctttctccacttcctcttcctcttcctccaaactcttgttccgccagctttttgagaaggaatcttccacctacacttaccttctcgctgatgcctcgcacccagaaaaacctgcacttctgattgaccc

SEQ ID NO: 25733 - DNA, 435 bp, Glycine max
  Clone ID: LIB3051-077-Q1-K1-H12
ggaaatgttttttagatcctaaattatcttactttcttctcctgaatttcaggctctgtatgagtggttgcgcacatacttgctggaacgacgtgatgttgccaataaatctgaacttggtagaatagcaatggctcaacaaagaactcaacaaagtgtttctggtactactagtgttggttctcttggtgggttgtctgatggaaattcaagagtacaaggtccaggtggcagtaacttgccatctgatattcaagttcaccaaggctcccagccaggtggaattggatctcatgatggtggaaactcacatgggcaagaacccgaaaggtctacaattgcagaaagcagcatacacaatggaaatgaccaacctttgcagcaagtttctggaaatgaaggtggtcaaaatactttaagacgtcctggtgcttt

SEQ ID NO: 25734 - DNA, 382 bp, Glycine max
  Clone ID: LIB3051-079-Q1-K1-H12
cttgaatttacttggtgtgaagggtgctagcatggagtcaccaggatcaaactcaagagtctgggccaccattggtgctggatctgttttagcaggagagctgtctctgatgtctgccattgcagcagggcagctagtgaacagccacatgaaatacaacagatcaagcaaagatgtaaccaaaatatcatcatcttgaggtcagggacgtggttgcagtcattaattctggactctagaataaaaaaattgagggtaagcggatttagggaaggaaaatggagaaacattagattagattgttggcatccacgtttggctctgcattgctgtctgtttagatcttttattatttggagagaggaaagtagagtattactct

SEQ ID NO: 25735 - DNA, 427 bp, Glycine max
  Clone ID: LIB3051-013-Q1-E1-F5
gactcacgcatccatttgattaatactatcaactaagcccttttctgtttgcaatctggagctatgagttcgtcttcggcagatgtttttccagcaattcaggaagttatgctggagttccgtgctggcaaaatgtttcttgaggaaaaaagggttgttcccgatacacggaaaggacttgttcgaattgctaggggtgaggagggattagtacattttcagtggcttgatcgcacacaaaatgttgttgaagatgatcagataatatttcccaatgaggctatttttgagaaggttaatcaaacatctggaagggtttacatactgaagtttaatagcgatgacaggaagttcttcttctggatgcaggaatcaaatgctgatggtgattcacaactgtgtagctcagtgaatgattacattaata

SEQ ID NO: 25736 - DNA, 407 bp, Glycine max
  Clone ID: LIB3051-092-Q1-K1-E1
cccacgcgtccgctcgaatccacagagtgagactcatcgtgtgaacaacgatgactgcgggtttgagcgtacttgagaaatttgagcggccatggacgaaaccgccgtaacgacgaagcctgattggctcaacaaccgcgcgagggtcgccggagagagaaccgaagaatttttctgtggcggcgacgacgaagaggaatgcgactacgaggcttgtgacatgttgactcggagcttctggcaggcgcagactgtgctggacgagaaccgtgcgctgatcgacgaagtgaacagcaaccacgagtcgaagattcctgacaacatggcgaagaacgttggcctcattactcagatccacggtaacatcttcaaagttcgctctatttactccgattaatctgtaaatt

SEQ ID NO: 25737 - DNA, 375 bp, Glycine max
  Clone ID: LIB3051-009-Q1-E1-B6
accatttgcattcaggcttagctcgcttaccacactacaccatatggcggttgctgtagccatgttacctcgttggtcggtttttcttctttttctgtttgtcgtgtgtatctcatgagcaaatgttgtcaccattgatgtacgtgcagccaagagtctcatctagaccggttccatttatcctgatgttaggacggtggaggagttcaagaaagggcatgtgtatgcagataatgtccttaacattccatacatgttgaatacacccaagggcaatgtaaagaatggagactttctgaaggaggtttcatcatcatgcaacaaagaagatcatctcgttgtgggttgtcaaagtggggtgagatctctgtatgc

SEQ ID NO: 25738 - DNA, 440 bp, Glycine max
  Clone ID: LIB3051-038-Q1-K1-B11
cccatttgcattcaggcttagatcgcttaccacaccacaccatatggctgttactgtggccatgttacctcgttggtcggtgtttcttctttttctgtttgtcttgtgtagctcaggagcaaaggttgtcgccattgatgtacatgcagcaaagcgtctcatccagaccggttccatttatcttgatgttaggacggtggaagagttcaagaaagggcatgtggatgcagttaatgttcttaacattccatacatgttgaatacacccaagggcaaggtaaagaatccagactttctgaaggaggtttcatcagcttgcaacaaagaagatcatctcattttgggttgtcaaagtggcgtgagatctctgtatgcaactgctgatcttctgtctgaaggttataagaatgtgtaagacatggtaagaggttatgtggact

SEQ ID NO: 25739 - DNA, 454 bp, Glycine max
  Clone ID: LIB3051-091-Q1-K1-B2
aattttgggtcgacttatgcgtacgctgcattcaggcttagctcgcttaccacaccacaccatatggctagttgctgtatccatgtgacctggctgatcggctcatcttctttttctgtttgccttgtgtatatcaagaacaaaggttgtcaccattgatgtacgtgcagtcaagagtctcatccaaaccggttccatttatcttgatgttaggactgtggacgagttcaagaaagggcatgtgtatgcagataatgtccttaacattccatacatgttgaatacacccaaaggcaaggtaaagaatggtgactttctgaaggaggtttcattatcttgcaacatagaatatcatctcgttgtgggttgtcaaagtggggtgagatctctgtatgcaaccctgctgatcttctatctgatggttttaagaatgcgaaagacatgggaagaggtt

SEQ ID NO: 25740 - DNA, 432 bp, Glycine max
  Clone ID: LIB3051-011-Q1-E1-G7
agatttggaggaaggaaggtaaaggaagcaaacgcaagagcaagagcaagagcgaaagcggcagagaagatggaaggagaagagggttctcagcagccacagttggtgctcgcggacaagctattccttctccggcaacccgatgtgcaagacattgacaaggttcgctacaaagaggatgtcttcactcatgtcaaggaaaacgatatggtccctctgtacgaaaccctagtcgctgattccgtgttggacttggatcgtgcccttttggactctatgcgcgctaaaattgacgacgagctcaccaagctcgacgaaaagattgctgatgccgaggaaaacttaggagagagtgaagttcgtgaggctcatttggcaaaatccttgtttttcatccggattatggacaaggagaaagccttggaacatctg

SEQ ID NO: 25741 - DNA, 402 bp, Glycine max
  unsure (1)..(402): unsure at all n locations
  Clone ID: LIB3051-072-Q1-K1-C7
gcaagagcaagagcaagagcgaaagcggcagataagatggaaggagaagagggttctcagcggccacagttggtgctcgcggacaagctattccttctccggcaacccgatgtgcaagacattgacaaggttcgctacaaagaggatgtcttcactcatgtcaaggaaaacgatatggtccctctgtacgaaaccctagtcgctgattccgtgttggacttggatcgtgcccttttggactctatgcgcgctaaaattgacgacgagctcaccaagctcgacgaanagattgctgatgccgaggaaaacttangagagagtgaagttcgtgaggctcatttggcaaaatccttgtttttcatccggattatggacaaggagaaagccttggaacatctgaag

SEQ ID NO: 25742 - DNA, 431 bp, Glycine max
  Clone ID: LIB3051-115-Q1-K1-H12
gagagagaaagagaaccaaaccaaataaagctcttggttggttcacccttgtgcttattttttgttgctgagaaagagcaaagaagaagaataagaagaaggttttgatcggatgcgatgagcacacaaggacaagtgattgatgaggcggttctggatgacataatccggcgcctaacggaggtccgattggcccgacccggaaagcaggttcagctctccgagtctgagatcaagcaactttgcgtcgctttcagagacatcttcattaaccagcccaatttgcttgaactcgaagcccccatcaagatttgtggtgacattcatgggcagtacagtgatttgttaaggctatttgaatatgggggtttgcctcctactgccaattatctctttttgggggactatgtggaccgtgggaagcagagctt

SEQ ID NO: 25743 - DNA, 312 bp, Glycine max
  Clone ID: LIB3051-027-Q1-K1-F11
actgttggggagttctattctgtggctttgacgaataactatcagcatgcggataccgggaccaagatgatacacaaagggaagaacacgaagagtaggattatatgcaaaggaatatcggctgggcattccaggaactgttatagaaggcttgttcaagttctgtccaaggctgacaatgcccgaaactcgtcacagtgtgaatctatgcttattggtgacaatgctgctgcaaatacctatccttatatccaggtgaaaaattcaaccgcaagaattgaacatgaaactagtacatactaaattggagaa

SEQ ID NO: 25744 - DNA, 293 bp, Glycine max
  Clone ID: LIB3051-117-Q1-K1-H8
aaagcagctggtgacaactcaggtcattccgggagcacaaagtctgtgatgacaatagcgtgtccagtttgcgtttgaagtccaccttcaggagaacatagcaaccatggccagacaatatgttcgtagtatcattgcatctgttcaaagggtttcattagcactttcttcttcgcgctttgggtcttacaatgctttccacttaccacctggcacttctgaagcacaaacacttgctcgatggatctggaacagctaccgggtctatcttggggtagaacttctaaaatggg

SEQ ID NO: 25745 - DNA, 389 bp, Glycine max
  unsure (1)..(389): unsure at all n locations
  Clone ID: LIB3051-001-Q1-E1-H4
aggtccacctcattgtatacttgcaagtaacacttccacaattgacttgaatctgattggagagaagacaaagtctcaagatcgaattgttggagcccatttcttcagtcctgcacatgttatgccgcttctggaaattgtacgtaccaagcagacctctccccaagtgatagttgacgtgttagatatttcanagaagataaagaaaactccagtggtggttggaaactgcacaggatttgctgttaataggatgttcttcccatacacgcaagcaggtctcttgcttgttgaacgtggtgcagatgtttatcaaattgatagaataataaccaaatttggaatgcccatggggcctttcagattggctgaccttgttgggtttggtg

SEQ ID NO: 25746 - DNA, 375 bp, Glycine max
  unsure (1)..(375): unsure at all n locations
  Clone ID: LIB3051-059-Q1-K2-B3
cccacgcgtccgcagcgtgtgcttctgctggcggcggcggttcaagctggcgctggcggaggcgccgtcggaaatcaagaccctattcaatgagtactccgagaatgagctcatgacaccttcgcatcttaagagattcctggtcgatgtgcagaggcaagagaaggccactgaagaagacgcgcaagccatcatcgatagcttcaggcatttccatcgcagaggcgctggcctcaatctcgaaactttcttcaagtacctcttcagtgacgataatcctnctcttcttccttctcatggggtgcaccatgatatgactntaccctngtcacattatntcatatatactggccataattcctatttaactgggaa

SEQ ID NO: 25747 - DNA, 455 bp, Glycine max
  Clone ID: LIB3051-084-Q1-K1-H7
ggatttgggcacaattaaatctaagctggagaaaaatatttattctggcactgaggagtgtgcagctgatgtcagactgaccttctcaaatgctatgaaatataatcctcccagtaatgatgttcatttgatggcaaaggaactcagcaaaatatttgacagaaaatggaaagacttaggtcggaaatggaagtgtgaagatgagcatgataaaagcgaatctgaaacaattaaggaaactgggagaaaaagtcttgacatgctgtcccggcatagagattccttgcccaaaaagacacaagtatctgaacacaaaagaatgcccaagattagatcaattgcaacaaaattgcaagcgtgtaattacctaatttccagaacaagaggtaattaaaggcagatatagtcaaaagactagaatccaaacaatatgtgcatttacaataattggctgt

SEQ ID NO: 25748 - DNA, 299 bp, Glycine max
  Clone ID: LIB3051-006-Q1-K1-C4
tggcaatagcaactgctgctgcaacttccatctttcctgctattgagccagggactgtatgtctcattattgagggtttattgtttacatggtggatgtgtggcattcacactggtcaagtgcgccaatctttacagaagaaatatcacttgaagaattcaccgtgtaatgcatgttgtgtgcactgctgctttcactggtgcgcccctttttctaagaacactaggtatatgaaattgactgttttttgttcctacttttttatctataattgtctctttttaaatcctttttccttt

SEQ ID NO: 25749 - DNA, 426 bp, Glycine max
  Clone ID: LIB3051-040-Q1-K1-C5
gcagcgttgcaacgctgtttcctttctgtttcttttcttcttccttccgacgagatctacaacgttgttgttgtttagatcttgaatagtgttttggtgttcggtgagatggaagaaaggaagcaatcacgttatgtgaagttgactaaagatcagacacctctcgaagacattacccctggcgaactcaaccagccaattcaggttcctcagttggacgttcgcaagtgccctgaatgtagacagccgctacctgaaagctatgctcctcctgcagatgaaccttggatgactgggatctttggatgtgctgaagacagagaaagctgcttgaccggactgttttgtccttgtgtattatttgggcgcaatgtagaaagattgaaggaagacactccttggactgggccatgcatttgtcatgcc

SEQ ID NO: 25750 - DNA, 358 bp, Glycine max
  Clone ID: LIB3051-109-Q1-K1-E5
cggacgcgtgggtgctgaaacacttgaggattatttacgccgtgaatgtccagagccgtgtaaggaaattcttgttttgtgtgacaatcgttgcgtactttttgataacaagactaaggatgaagggaagcgctttggacaagttcaacaacttctctcttttgtaaacacagttctatcacgtaatggtggacgaccttatacagatgagttatttacacaactgaagaaaggagcaatggagctgcataaccaacaaagagaggttgattctttaaaaggatattcaaaaggagagatattgaagtttaaaaagcaaatgcagcaaacatatgatgaccaattaaagcgaattact

SEQ ID NO: 25751 - DNA, 415 bp, Glycine max
  Clone ID: LIB3051-096-Q1-K1-B3
gccacgcgtccgtttatggatgagatcgatgctattggaggtcgccgcttcagtgagggaggaggtgcagatcgtgagattcagagaacgctaatggagctgcttaatcaacttgatggatttgatcaacttggaaaggttcaaatgataatggctacaaacccacctgatgtacttgaccctgctctcctgcgtcctgtgagattggatagaaaaatagaaatccctgtgcctaatgaacaatccaggatggaaattcttaagattcatgctgctggcatcgctaagcatggtgaaatagactatgaagctgttgtgaagcttgcacagggatttaatggggctgatcttcgaaatgtctgcacagaagctggaatggcagcaattcgtgcagagcgtgattatgtgatccatg

SEQ ID NO: 25752 - DNA, 377 bp, Glycine max
  Clone ID: LIB3051-048-Q1-K1-B1
ctctttctctctttgaccaatcccaaacccaaaacaaaaaataaaaatggagggggatctgaagcggaagctgttgagaagaagaaaggaagaggaagaagaagaagaagaagagttatcattggccaagagggtgtggaatgagagcaaggttatgtggatagtggcggcaccagccatattcacaaggttttacacctttgggatcagtggtataagccaagcttttgttggccatattggttctaaggaattggccgcttatgctctcgttgtcaccggtctcattaggttcgccaatggtgttctggtaggaatggctaatgcgttgtcaacactatggggacaaacatatggggcaaaaaaattatggcatg

SEQ ID NO: 25753 - DNA, 442 bp, Glycine max
  Clone ID: LIB3051-115-Q1-K1-E6
gcttggcatactggattcctaatattggtcaactcatatttgtcacatgtggtgggtgctctgatacatggaaaggtttcacatttttggcattcaaagacctctggcctgttgtcaagatgtccctttcagctggtgccatgttatgtcttgagctctggtacaacacaatattggttcttttgacgggtaacatgaaaaacgcggaggttgaaattgatgctctatccatatgtctcaacatcaatggatgggaaatgatgatatcccttggtttcatggctgcagcaagtgttcgagtagcaaatgaacttggaagaggaagtgccaaagctgcaaagttctctattattgtgtcagtgctcacatcattggccatcggattccttctgtttatattcttcttattttttagagaaagacttgcatatatatttacctc

SEQ ID NO: 25754 - DNA, 456 bp, Glycine max
  Clone ID: LIB3051-028-Q1-K1-C2
tcgcgccgttgccgacacctcctccgcgtatccttccattcccggcacggaaaccggtgagtgctccctccgcggcgtgggcgtgggcgacggtgttctggttcctccacggcgagaagtatacgatgaggggcgaatcttcgacatcactcacagatatgtccccgagatgccggtgtgggactcgacggaggggctcgagcaacacttcctgtggctcgataagagcatgaagaatggctcgctcgctaacagctctaacatggagctcggtgttcacaccggcacccatgttgactcgcccggtcacttttacgacaattactacgacgctggcttcgacgttgactcactcgacctaacgctgctcaatggccttgcacttctggttgatgttccgcgggataaaaacattactgctgaggttatgaggtccctgaatatccctagaggtgt

SEQ ID NO: 25755 - DNA, 394 bp, Glycine max
  Clone ID: LIB3051-078-Q1-K1-E11
ctttctcagtcaaccatgaactctcgatcactctttgccttcctcttcgcaatgggcgggcactccgtcgccgttgccgacacctcctccgcgtatccttccatccccggcacggaaaccggtgagtgctccctccgcggcgtgggcgtggtcgacggtgttctggttcctccacggcgagaagtatacgaggaggggcgaatcttcgacatcactcacagatatgtccccgagatgccggtgtgggactcgacggaggcgctcgggcaacacttcctgcggctcgataagagcatgaagaatggctcgctcgctaacagctctaacatgaagctcggtgttcacaccggcacccatgtcgacgcgcccggtcacttttacgacaattactacg

SEQ ID NO: 25756 - DNA, 443 bp, Glycine max
  Clone ID: LIB3051-027-Q1-K1-B7
ggactttccatgtcaaaggctactgccaagaaaattgtgaaagctgatgcttatgtagctgcttgtgatgtccctggaattaagagattacttccatcaaagtggagggaacaggagtttttcaataacatatatgaactagttggagttcctgtagtcacagtgcaacttagatacaatggttgggttacagagttgcaggatctagaaaagtcaaggcgactggggaaagctgttgggttggataaccttctctatacacccgatgcagatttttcttgctttgcagaccttgcactttcatctccagaagattattacattgagggacaaggatcattgctccaatgtgttctgacgccaggagatccatacatgcccttaccaaatgacgaaattattgcaagggtagcaaaacaggttttagcgctgttcccatcatc

SEQ ID NO: 25757 - DNA, 436 bp, Glycine max
  Clone ID: LIB3051-088-Q1-K1-A6
ggggaatggcatggttgcagttgcagagaatcatcaccaataccaagggaggtgctaatttgatctcaccgctcccacgattcttctcgaaatgttccccctatgttttgaaagttggaataccagagtttctaaacgggattgggaagggggttgagtcccacgttcctaagcttgaatctgaaatcggtgatttccagaaacttctcgtcattcgaacccttaaactcaagaagctcggtattccttgcaaacataggaagttaatattgaaatacacacacaagtacaggctgggattatggaagccacgtgctgagttcatcactgcctgattggtttctaagtagtaagtagtcgcttgttgttagaccatattgcaaatgtttagccgcagcagaatgacaatgctctacttgaaaagatcaagtcgcac

SEQ ID NO: 25758 - DNA, 434 bp, Glycine max
  Clone ID: LIB3051-091-Q1-K1-F1
aatttagcaatttacccttaaagttgtagcaagaagttaattaataatgagtgcgaatgcggggggggtgttgagcggtgagaggatgggggagaacgagaaaggagagcgatggagcggagcgatgacaaatctgacggagatggcctccaatctcgactctctccagaagcttctcctcaccaaagccgtcttcgtcgacgacgacaccttctccaaagcctacctcgccgccgaccaggcccgcaccatcaagctccttcagcaacgagtccagaccttggagagagaggtcgacgccgtcatcaccaccgccgtccgcgctcgctccgagaagcgccaggccgaggctgctcagaaatccgccgaatccgcggcgctcatcagctcaccgccgaactcgaaaacaccacaaaggtgtttgaactgcacat

SEQ ID NO: 25759 - DNA, 392 bp, Glycine max
  Clone ID: LIB3051-004-Q1-E1-C7
ataaacctacgcattctcacaatctcttcacctctgttatgaccatgggatacagaacctgatcactcatcatcatatccgcaatggacatcagtgaacgtttgtctcttctccacgatggccgtatacactgtcgctacgctctccggagaggctctcgatcctcatggcgccaccagccatgtctacaatgacgacggcagtaaccccatgtggcactaccgcgtgaaattctccgtcaacgaatcgctggccaacgagaatcgtttgtctcttgagatcaagcgcgtctcagaccgcaacctcagtgacatcgttatctgcagcgtccatgttcctctcagggaactcatggacaatcgcggagacgacagttccttccgccacatcag

SEQ ID NO: 25760 - DNA, 426 bp, Glycine max
  Clone ID: LIB3051-039-Q1-K1-B9
ttccaaacaaaacccatcaaagtctttctccctcagtgatcatatattcattcagttctatacaaaatcctcaaaaactcttcctctctgccatgaccatggaatacagaaccttagaactcaacatcatatccgcaaaggacatcaagaatgttaatctcttctccaagatggacgtatacgccgccgtttcgctctccggtgaccctctccaccctcagggcgccaccacccacgtccacaaagacgccggcagcaaccccacgtggaactaccccgtgaaattctctgtcaacgaatcgctggcgaaggaaaatcgtttatctcttgagatcaagctcatctccgaccgcaccctcggcgacaccgtcatcggcaccgtccatgttcctctcagggaactcctggataaccccggcgatgaca

SEQ ID NO: 25761 - DNA, 476 bp, Glycine max
  Clone ID: LIB3051-077-Q1-K1-G6
caagtttcagttccaaacaaaacccatcaaagtctttctccctcagtgatcatatatgcattgagttctatacaaaatcctcaaaaactcttcctctctgccatgaccatggaatacagaaccttagaactcaacatcatatccgcaaaggacatcaagaatgttaatctcttctccaagatggacgtatacgccgccgtttcgctctccggtgaccctctccaccctcagggcgccaccacccacgtccacaaagacgccggcagcaaccccacgtggaactaccccgtgaaattctctgtcaacgaatcgctggcgaaggaaaatcgtttatctcttgagatcaagctcatctccgaccgcaccctcggcgacaccgtcatcggcaccgtccatgttcctctcagggaactcctggataaccccggcgatgacagctccttccgccaagtcagttatcaggtgatgaagcaatc

SEQ ID NO: 25762 - DNA, 400 bp, Glycine max
  Clone ID: LIB3051-013-Q1-E1-A10
ccacgcgtcaggaaacatatccttattcactaaagagaaaccagaaggctcaaaatacaaccatgatcaatcatgctctttgtttcttagtattcctagctgcactccatgcattacatggagttgaatacactgtcattaacaacgcactctcaactcttgtcggcgtggctttccgtgacaaaatatgggctgaatacgccaagcgaagacttgactcggccaattaattcagatagatgatctttcagcataacaacccttctgacagaataaatgtgcagaatgtaagcttattcgttgatgacatcgatggtgttgcatatactagcaatagtcaaatccatctcagtgcaagatacgttggagacaattgaggggacgtgaaaagcgatataac

SEQ ID NO: 25763 - DNA, 424 bp, Glycine max
  unsure (1)..(424): unsure at all n locations
  Clone ID: LIB3051-040-Q1-K1-G10
gcgaaggagatagtgaaagagcttcttcctctaattcgagtgtacaaggatggcagcgtggagcgtcttctaagctctgaaaacgtggcagcctcccctgaagatccccaaactggagtctcatccaaagacatagtcatcgcagacaacccctacgtctccgctcgcattttccttcccaaatcccaccacactaacaacaaactccccatcttcctctacttccacggtggcgccttttgcgtcgaatccgccttctcctttttcgtccaccgctatctcaacatcttggcctcagaagccaacataatagccatctccgtcgacttcagactcctnccacaccaccctatccctgctgcctacgaagacggttggaccaccctcaatggattgcttcccacgccaacaacaccaacaccac

SEQ ID NO: 25764 - DNA, 460 bp, Glycine max
  unsure (1)..(460): unsure at all n locations
  Clone ID: LIB3051-074-Q1-K1-F3
ggcgaaggagatagtgaaagagcttcttcctctaattcgagtgtacaaggatggcagcgtggagcgtcttctaagctctgaaaacgtggcagcctnccctgaagatccccaaactggagtctcatccaaagacatagtcatcgcagacaacccctacgtctccgctcgcattttccttcccaaaatcccaccacactaacaacaaactccccatcttcctctacttccacggtggcgccttttgcgtcgaatccgccttctcctttttcgtccaccgctatctcaacatcttggcctcagaagccaacataatagccatctncgtcgacttcagactnctcccacaacaccctatccctgctgnctacgaagaccgntggaccaccctcaaatggattgcttcccacgccaacaacaccaacaccaccaacccggagccatggctactcaaccacgccga

SEQ ID NO: 25765 - DNA, 441 bp, Glycine max
  Clone ID: LIB3051-102-Q1-K1-B3
gcagaagattaggagtagaatggcgaaggatatagtgaaagagcttcttcctctaattcgagtggacaaggatggcagcgtggagcgtcttctaagctctgaaaacgtggcagcctcccctgaagatccccaaactggagtctcatccaaagacatagtcatcgcagacaacccctacgtctccgctcgcattttccttcccaaatcccaccacactaacaacaaactccccatcttcctctacttccacggtggcgcctttgcgtcgaatccgccttctcctttttcgtccaccgctatctcaacatcttggcctcagaagccaacataatagccatctccgtcgacttcagactcctcccacaccaccctatccctgctgcctacgaagacggttggaccaccctcaaatggattgcttcccacgccaacaacaccaac

SEQ ID NO: 25766 - DNA, 424 bp, Glycine max
  Clone ID: LIB3051-010-Q1-E1-C11
accacgcgtccgctttgtatcacgaaaactatacgattcgattccttgttttcaatggacaccttcttcaattctcaatcttcttcttcttcgagaagccgctggagttacgatactctcaagaatttccgtgagatctctccgctggttcagaatcacatcaaacgggtttattttacgttatgttgcgctgtggtggctgctgctgttggagcttttcttcatgttctgtggaacattgggggttttctcaccacgttggcttccattggaagcatggtttggttgctatctacaccccctgttgaagagcaaaagaggttgtctctgttgatggcttcggccttgtttcagggcgcttccattggacctctgattgatttggctattgccattgattctagccttaatgttagtgcatttg

SEQ ID NO: 25767 - DNA, 367 bp, Glycine max
  Clone ID: LIB3051-042-Q1-K1-B1
gaaaactatacgattcgattccttgttttcaatggacaccttcttcaattctcaatcttcttcttcgtcgagaagccgctggagttacgatactctcaagaatttccgtgagatctctccgctggttcagaatcacatcaaacgggtttattttacgttatgttgcgctgtggtggctgctgctgttggagcttttcttcatgttctgtggaacattgggggttttctcaccacgttggcttccattggaagcatggtttggttgctatctacaccccctgttgaagagcaaaagaggttgtctctgttgatggcttcggccttggttcaaggcgctttcattggacctctgattgatttggctatt

SEQ ID NO: 25768 - DNA, 366 bp, Glycine max
  Clone ID: LIB3051-043-Q1-K1-E10
cgaaaactatacgattcgattccttgttttcaatggacaccttcttcaattctcaatcttcttcttcttcgagaagccgctggagttacgatactctcaagaatttccgtgagatctctccgctggttcagaatcacatcaaacgggtttattttacgttatgttgcgctgtggtggctgctgctgttggagcttttcttcatgttctgtggaacattgggggttttctcaccacgttggcttccattggaagcatggtttggttgctatctacaccccctgttgaagagcagacgaggttgtctctggtgatggcttcggccttgcttcaaggcgcttccattggacctctgattgacttggcta

SEQ ID NO: 25769 - DNA, 412 bp, Glycine max
  Clone ID: LIB3051-087-Q1-K1-A7
tgtctttgtatcacgaaaactatacgattcgattgcttgttttcaatggacaccgtgttcaattctcaatcttcttcttcttcgagaagccgctggagttacgatactctcaagaatttccgtgagatctctccgctggttcagaatcacatcaaacgggtttattttacgttatgttgcgctgtggtggctgctgctgttggagcttttcttcatgtcctgtggaacattgggggttttctcaccacgttggcttccattggaagcatggttcggttgctatctacacccgctgatgaagagcaaaagaggttgtctctgttgatggcttcagacttgtatcagggcgcttccattggacctctgattgatttggctatggccattgatcctagccttattgctagtgcat

SEQ ID NO: 25770 - DNA, 365 bp, Glycine max
  Clone ID: LIB3051-092-Q1-K1-A4
gctattgccatcgatcctagccttattgttagtgcatttgtggcaacttctttggctttggcttgcttctatgcggcagctttagttgcaaggcgtatggagtacctataccatggtggtatgctttcttctgggctgtccattcttatgtggatgcactctgcttactctctctttgggggctcaattgcactcttcaagtttgagctgtactttgggctttaggtgtatgacagctacgttatagtagacactcaagatatcattgaaagggctcacatttggtgacctgcattatgtgaagcatgcattgacattgttcactgatttggctgcaatctttgtgcgaattctaataataatgt

SEQ ID NO: 25771 - DNA, 415 bp, Glycine max
  Clone ID: LIB3051-116-Q1-K1-C9
cccacgcgtccgcccacgcgtccgcttgagcctggcaaagattactacatcaaacctgccataaccgacgttggaggccgcgtcactttgttaagcagaaacaatccatgccctctatatgtaggtcaagagaattctgatgcagcagagggcttaccccttttcttcaccccttttgcagaagaagatgatgttgtgaaggtgaatagggacttcaaggtgacattctcagctgcctcaatatgtgtgcagggcacaaattggaatttggctgagaaggatagtgagagtggaaggaggctcattgctgcatcaggcagggatgattactttagaattactgagacaccaatcaaaggttcatattatataggttggtgtcctacagatgtatgccccttttgtaggtttgact

SEQ ID NO: 25772 - DNA, 376 bp, Glycine max
  Clone ID: LIB3051-006-Q1-E1-G10
aggtgaagcgggtctactatccaggcttgccgagtcaccctgaacatgagcttgccaagaggcagatgactggtttcggtggtgttgtcagttttgaggtgggaatttgacaagttgctattcaaacatgtggtttcctaataacactattttttttttcttttatcaagaatggtgtattggataacatcatgtgccatattttttttatagttaaattgccaatattgcagattgatggagatctacataccacaataaaatttattgattcattgaaaatcccatatattgcggcctcgtttggtggctgtgagagcattgtggatcaacctgctattttgtcctactggtactcatttggaatccatgttca

SEQ ID NO: 25773 - DNA, 398 bp, Glycine max
  Clone ID: LIB3051-006-Q1-K1-G10
ggtgaagcgggtctactatccaggcttgccgagtcaccctgaacatgagcttgccaagaggcagatgactggtttcggtggtgttgtcagttttgaggtgggaatttgacaagttgctattcaaacatgtggtttcctaataacactattttttttttcttttatcaagaatggtgtattggataacatcatgtgccatattttttttatagttaaattgccaatattgcagattgatggagatctacataccacaataaaatttattgattcattgaaaatcccatatattgcggcctcgtttggtggctgtgagagcattgtggatcaacctgctattttgtcttactggtactcatttggattccatgttcaatttgtcatgttgatgatttttg

SEQ ID NO: 25774 - DNA, 392 bp, Glycine max
  Clone ID: LIB3051-114-Q1-K1-H12
cacgcgtccgcgcacgcgtacgcccacgcgtccggatagaaagagagggagtaagtggataaaggaaagaaaactaaagaaacaaacctaacacaacacaaatccttgaaacgacgacggaaatggccgtttcgagctcgcacatgcgtttcacctttgagtgccgctccgatcccgatttctcgcccgccccgccgtccttcgacaacctccgccgccgaaacttccgctcctccgcaggatccggcgcggcgtttcacggcatctactccctcatcctccgcttccctcccaacttccagcgccagctaagcaccaaggcgcgccgcaactgcagcaacatcggcgtcgcgcaaatcgtcgccgcttcgtggtcgaacaacagcgacaac

SEQ ID NO: 25775 - DNA, 467 bp, Glycine max
  Clone ID: LIB3051-085-Q1-K1-C3
cccacgcgtccgcccacgcgtccgtgcagctctactagctagggtttcgcaagtgcgatcgaggaagaacgagggccatggctgctgctctgcgtcgcgaaggaaggcgtttgacccaaccaatcaacgccctgcgttcctctctcatctctcaagaccaatcctctcatggcgctcgcttcatttccactcaagtggtgagaaacctaatgaagagtgtgaggaatatccacaagatcaccaaggccatgaagatggttgccgcatgcaagctgagagccgttcagaccatagctgaaaattcccgcggcctctggcagccgatcaccgctcttctcggcgacaatcccagtgctgatgttaagaaaaacgttgttgttaccatctcttcagacaaaagtctttgtggtggactcaattgcacgtctgttaagataagctgggttttgtccaattgaattctgggc

SEQ ID NO: 25776 - DNA, 395 bp, Glycine max
  Clone ID: LIB3051-024-Q1-K1-G9
aagttttgttctttcctagcaattcggcgcaagcgtcttctgcttcaaggaaggagagcttgttattctctatcaacaaggaaaatgtcaggtgaagaggttgttgttgcagctgagccagctgctgccatcccaggcgagcctatggatatcatgactgccttgcaacttgtgctcagaaaatctctggcttatggtggtcttgcacgaggccttcacgaaggggcaaaagtgattgagaagcatgctgcacaactctgtgttctagcagaagactgtgaccagcctgactatgttaaactggttaaggccctttgtgcagagcacaatgttagcctgctgacagttccgagtgcaaagacccttggagaatgggctggtttgtgcaagattga

SEQ ID NO: 25777 - DNA, 406 bp, Glycine max
  Clone ID: LIB3051-114-Q1-K1-A1
ttttcttagttccatggctttgaagatgaaagacaaatttgacaggtactggagcaagtgcagtttacctttagctgtagctgcagtcctggatcctcggtttaaaatgaagttggttgagtactacttctccctaatttatggtagcactgctctggagcatatcaaggaagtttctgatggtatcaaagaactttttaatgtgtattctatctgttcaactatgattgatcaaggctcggccttgcctggcagcagtttacctagtactagttgtagttccagagataggctaaaaggctttgacagattccttcatgagacatcacagggtcagtctatgatatcagacttagacaagtacttagaggaaccaatctttccacgcaattctgaatttaacata

SEQ ID NO: 25778 - DNA, 418 bp, Glycine max
  unsure (1)..(418): unsure at all n locations
  Clone ID: LIB3051-010-Q1-E1-E4
accacgcgtccgttctccctccttcttcaatggtcttagggtttccggtgtccatgcgtagcagctcgcactaatgcgcttttgaaacccgtgttcatctgtatccaacgatttactagaaggaggtcgcaatttctccatcttcacatttcgctagcacgtgaaatcaaaagttatcgacactttcgcgcgacacgaaatattgggaaccaagcaaaatatctatggctgacgaaccattatatccaatagcggtgcttatagatgagttgaaaaatgatgacatccagctgcggttaaactcaattcgtaggctatcaacaattgcacgtgctcttggggatgagcgaacccgtcgagaattaattccatttttaagtganaataatgatgatgatgacgaagtacttcttgcaat

SEQ ID NO: 25779 - DNA, 418 bp, Glycine max
  Clone ID: LIB3051-029-Q1-K1-H7
gtccatgcgtagcagctcgcactaatgcgcttttgaaacccgtgttcatctgtatgcaacgatttactagaaggaggtcgcaatttctccatcttcacatttcgctagcacgtgaaatcaaaagttatcgacactttcgcgcgacacgaaatattgggaaccaagcaaaatatctatggctgacgaaccattatatccaatagcggtgcttatagatgagttgaaaaatgatgacatccagctgcggttaaactcaattcgtaggctatcaacaattgcacgtgctcttggggaggagcgaacccgtcgagaattaattccatttttaagtgaaaataatgatgatgatgacgaagtacttcttgcaatggcagaaagaagttggagtgttaattccttaggttgggggagtggaaca

SEQ ID NO: 25780 - DNA, 443 bp, Glycine max
  Clone ID: LIB3051-030-Q1-K1-B5
cccacgcgtccgcccacgcgtccgcccacgcgtccggtcatcagattcttctgagcaggtccggtctgctttggcttcagtaataatgggaatggctccagtgttgggaaaggaagcaacaattgagcagcttcttcctattttcctttcccttttgaaggatgaatttcccgacgtgcgcctaaacattatcagcaagcttgatcaagtgaatcaggttataggaattgatctgttatctcagtctttgttaccagccattgttgagcttgctgaggataggcattggaaggtccggcttgcaattatagaatatatacccttattggcaagtcacatgggggttaagtttttcgatgacaagctttgtgctctttgcatgcaatggttacaggataagggtcaatcaattcgtgaagcagctgctaacaacttgaaacgcc

SEQ ID NO: 25781 - DNA, 381 bp, Glycine max
  Clone ID: LIB3051-048-Q1-K1-A9
cggacgcgtgggcggacgcgtgggggaggctgttaggcgttgggatgtctctaccggtgcgtgcctgcaagtttatgaaaaaaacggtcctggcctcatctcctgtgcatggtttccaagtgggaaatatatactttctggcctcagtgacaagagcatttgcatgtgggatttagatgggaaagaagtggagtcttggaaaggacaaagaacccttaagatttctgatttggaaataacaggtgatggggaacacatgctgagtatttgtaaagacaattcaatactgtacttgaacaaagaaacgagggatgagagatatattgatgaggaccagacaataacttccttctctgtatcaaaggatagcagactcttggt

SEQ ID NO: 25782 - DNA, 414 bp, Glycine max
  unsure (1)..(414): unsure at all n locations
  Clone ID: LIB3051-050-Q1-K1-B9
cacaacccatggccaccacctncgcattcctcctccttcccctcctcctgctgctccacctcgccatcgccgctcacggcatcggcatcaactacggcacgctcggcgacaaccttccaccgcccgcggcggtggcgaacttcctgaagacgaagacgaccatcgaccgcgtgaagatctacgacgtgaacccggacatcctgcgggccttcgccggcagcggcatctccgtgacggtgaccgcccccaacggcgacatcgccgccttaaccaaaatcgactcggcgaggcagtgggtggcgacgcacatcaaaccctttcaccctcagaccaaaattaattacatcctcgtcggcagcgaggttctccactggggcgacaccaacatgatccgcggnctcgtccctgccatga

SEQ ID NO: 25783 - DNA, 438 bp, Glycine max
  Clone ID: LIB3051-088-Q1-K1-H12
ggcaggttcaggcccgggtacgcaaagcacgtgttgggcccaatgctgaagtttctgagggagacgagaacacccttgatggtgaacccgtacccgtacttcggttacaacgggaaaaacgtgaactttcttctgttcaggcccaaccgaggcttgtacgacaggtacacgaagaggagttacacgaaccagttcgacgctctgatggacgcggtgcactcggcgatgaatgctttggggtacggtgacgtggacatcgccgtcggcgaaacggggtggccctccgtttgcgacggttgggacgcgtgcagcgtggcgaacgcgcagtcctttaacagggaactggtgaagcacctggcgacggggaaaggaacgccattgatgccaaaccgaagcttcgagacttacatcttcgcgctcttcaatgagaaccaaaag

SEQ ID NO: 25784 - DNA, 418 bp, Glycine max
  Clone ID: LIB3051-110-Q1-K1-D11
cccatggccaccacctgcgcattcctcctccttcccctcctcctgctgctccacctcgcggtcggggttcacggcatcggcatcaactacggaacgctcggcgacaaccttccaccgcccgcggcggtggcgaacttcctgaagacgaagacgaccatcgaccgcgtgaagatctacgacgtgaacccggacatcctgcgggccttcgccggcagcggcatctccgtgacggtgaccgcccccaacggcgacatcgccgccttaaccaaaatcgactcggcgaggcagtgggtggcgacgcacatcaaaccctttcaccctcagaccaaaattaattacatcctcgtcggcagcgaggttctccactggggcgacaccaacatgatccgcggcctcgtccctgccatgagaacccttc

SEQ ID NO: 25785 - DNA, 407 bp, Glycine max
  Clone ID: LIB3051-094-Q1-K1-A3
atttattttctttttttcatatttttcttctaattttccctttgcataatttctcgcgtaacggaaagccatgaaattcggaaagagcctgagcagccagatcgagaaaaccctgccggagtggcgtgacaagttcctctcctacaaggagctcaagaagaagctcaagcaattcgaccctcccgccgccgccgatgagcgccccggcaaacgcctcaagtccgacgccgttcccgacgccgccgacatgtcgaaggaggagagcgacttccggaacctgctggagaatgaactcgacaaattcaacaccttcttcgtcgagaaggaggaagagtacattatcagactcaaggagttacaagatagggttgccaaagttaaggattcaagtgaagagatgatgaaaa

SEQ ID NO: 25786 - DNA, 443 bp, Glycine max
  Clone ID: LIB3051-026-Q1-K1-E5
aggagcccgagcgtgaccgcaagaaaacgaagaacatcaagcacaacggcaacatctcgctagacgacgtcatcgagatcgctagggttatgaggccgaggtcaatggcgaaggacctcagcggcagcattaaggagattctcgggacgtgcgtctccgtcggatgcaccgttgatggaaaggatcccaaggacttgcagcaggagattaccgatggtgatgttgaggtccctctcgattaaggaggaaggctttgttactctctttctctctttttcttttgtctttcttcagatcgtttcgtgttctttttaatataaatttgggggaactatcgaacgttttgtctaaggttattttaccgctttggataatttaaatgaatggttcgagagatattataattatgggctgattagtttctttctctgctcacattatga

SEQ ID NO: 25787 - DNA, 383 bp, Glycine max
  Clone ID: LIB3051-065-Q1-K1-F11
ggccctcaaggagcccgagcgcgaccgcaagaagaccaagagcatcaagcacaacggcgagatctcgctcgatgacgtcatcgagatcgctagggttatgaggccgaggtccatggccaaggacctcagcggctccattaaggagattctcggaacatgcgtctcggttggttgcaccgctgatggaaaggatccaaaggacttgcagcaggatatttccgatggtgatgttgaggtccctctcgattgaggaagaagactttgtttatctctctctttgcttctctcttatagacgtttcgagttttttaaatataaatctggggaaactattgaacgtactgcctaaggctattctactggtttggataatttacatgatg

SEQ ID NO: 25788 - DNA, 370 bp, Glycine max
  Clone ID: LIB3051-067-Q1-K1-A12
tcttcctcttcgatcatcacctctccacaatgccgccgaagttcgacccctcccagatagtcgaggtgttcgtccgcgttaccggcggcgaagtcggcgcggcgagttccctggccccgaagatcggtcccctcggtctctcccccaagaagatcggagaagacatcgccaaagaaaccgccaaggactggaagggcctccgcgtcaccgtcaagctcaccgttcagaatcgtcaggcgaaggtcacggtggtcccctccgccgtcgtcctcgttatcaaggccctcaatgagcccgagcgcgaccgcaagaagaccaagaacatcaagcacaacggcaacatctcgctcgatgacgtcatcgagatcgc

SEQ ID NO: 25789 - DNA, 464 bp, Glycine max
  Clone ID: LIB3051-112-Q1-K1-G7
cccacgcgtccgcaaccctgacactccttcttctccgcttcctcttcgatcatcgggtcagaatgccgccgaagttcgacccctcccagatcgtcgacgtcttcgtacgcgtcaccggcggtgaggtcggcgcggcgagttccctcgccccgaagatcggtcccctcggtctctcccccaagaagatcggagaagatatcgccaaggaaaccgccaaggactggaagggcctccgcgtcaccgtcaagctcaccgtgcagaaccgtcaggccaaggtcacggtggtcccatccgccgccgcgctcgtcatcaaggccctcaaggagcccgagcgtgaccgcaagaaaacgaagaacatcaagcacaacggcaacatctcgctagacgacgtcatcgagatcgctagggttatgaggccgaggtcaatggcgaaggacctcagcggcagcattaaggagattctc

SEQ ID NO: 25790 - DNA, 443 bp, Glycine max
  Clone ID: LIB3051-038-Q1-K1-A9
gagacattacagtttgtattattgtagaagagagagggagagagatggagttgagcatgaaagtgttggtgaaagttgcttcgttgcttttcctattggaattcactgcaacagttgttgatgctcgcttcgatccaagttcattcatcactcagtttctccccaatgctgaagccaacaattactatgttaaatccacaacaaaagcgtgctgtaacagctgtccttgcacaaaatcaatccctccacagtgtcgttgttcagatattggagaaacatgtcactctgcatgcaaaacttgtatttgcactcgctcaattcctccacagtgtcattgcagtgacataaccaaccttctgttatgaaccttgcaactcctctgaaaccgaagctcactaggaatattgagcatgttccagtgactaacatgtttgacagagtca

SEQ ID NO: 25791 - DNA, 425 bp, Glycine max
  Clone ID: LIB3051-079-Q1-K1-C1
caagaagtggagagaaggttttcatgtcacttcaatggctactgctggaagtcgctggggtgttgttatgtctcgaaatgctggattcagtaaacaggtggttgaacttgattttctctatccaagtgagggcatccataaacgttgggataaaggttataggattacagcaaccgcagctacattggatcaatctgctcttatattaagtattccgaggcgcaaactcagtgatgaaactcaggaaactctacgtacatcgcaatttcccggcacacatgttaaggaaaaatggtcaaaaaacctttaccttgcctgtttgtgctacggacgcacagtatgctgatttccatgacattttaaagcattttattgacaagcggattatgagttgtcatcttgcccaccacaaaagatctttttgt

SEQ ID NO: 25792 - DNA, 407 bp, Glycine max
  unsure (1)..(407): unsure at all n locations
  Clone ID: LIB3051-016-Q1-E1-H3
acccacgcgtccggctgatatggcggttgatcgctcncttacgaagtgctgtagcctcgtactgtggtcgtggatgttgctgaggatgatgatggcgcagggtgcagccgcgagggccaaccggaaggagtgggactcggtcataaagttaccggctgaaccggtcgatgctgactcggatcatgaagtgggaacacgatgggcggttcttgtggctggttcaaacggctatggaaactacaggcatcaagcagatgtgtgccatgcgtaccagttgctgataaaaggtgggctaaaagaagagaacatagtggtgtttatgtacgatgacatagctacagacgagttaaatcccagacctggagtcatcatcnaacaccctgagggacangatgtgtatgctggtg

SEQ ID NO: 25793 - DNA, 379 bp, Glycine max
  Clone ID: LIB3051-046-Q1-K1-H9
aagacatgcatatggagggtacaagaagatgctcatatacgtggaagcttgcgaaagggggagcatgtttgagggtataatgcctaaggatctgcagatttatgtcacaactgcatccaatgcacaagagaatagttggggaacttattgccctggaatggatccttctccacctccagagtacatcacttgcctaggggatttgtacagtgttgcttggatggaagatagtgagactcataatctaaaaagggagtccgtgaaacaacaatacaaatcggtaaagcaacggacttcaaatttcaacaactatgcgatgggttcttatgtgatgcaatacggtgacacaaacatcacagctgaaaagctttatttatac

SEQ ID NO: 25794 - DNA, 407 bp, Glycine max
  Clone ID: LIB3051-094-Q1-K1-H2
ctgtgagtctttcttagctgatatggcggttgatcgctcccttacgaggtgctgtaggctcgtactgtggtcgtggatgttgctgaggatgatgatggcgcagggtgcagccgcgagggccaaccggaaggagtgggactcggtcataaagttaccggctgaaccggtcgatgctgactcggatcatgaagtgggaacacgatgggcggttcttgtggctggttcaaacggctatggaaactacaggcatcaagcagatgtgtgccatgcgtaccagttgctgataaaaggtgggctaaaagaagagaacatagtggtgtttatgtacgatgacatagctacagacgagttaaatcccagacctggagtcatcatcaaccaccctgagggacaagatgtgtatgctg

SEQ ID NO: 25795 - DNA, 250 bp, Glycine max
  Clone ID: LIB3051-098-Q1-K1-G2
agtttaaagggagtacgtgaaacaacggacatgttgattaagcaacggacttcaaatttcaacaactatgcgatgggttctcatgtgatgcaatacggtgacacaaacatcacagctgaaaagctttatttataccaatgttttgatcctgacgctgtgaacttcccttcacataactgatggctagatactaaaatggaagtcgataaccaaatagattcataacttttcttcatgtggcaaatgtatt

SEQ ID NO: 25796 - DNA, 409 bp, Glycine max
  Clone ID: LIB3051-040-Q1-K1-E7
aaaaccatgaagaaaggtgaaaatgctattttcaccatcccttccgagctagcttatggtgaatctggttccccttcaactattcctcctaatgctacactccaatttgatgttgagctgctgtcatggactagtgtaaaggacatatgcaaggatggcggtatatttaagaagatagttactgagggggacaaatgggagaaccctaaggatcctgatgaagtattggttaagtatgaagttcatctagaaaatggaaagcttgtagcaaagtctgatggggtggagttcacagtcagagagggtcattattggcctggattggccaaaggctgttaaaaccatgaagaagggagagaaagtgcttttgacagttaagccacaatatggatttggtgagaaggggaag

SEQ ID NO: 25797 - DNA, 460 bp, Glycine max
  unsure (1)..(460): unsure at all n locations
  Clone ID: LIB3051-106-Q1-K1-G7
actaaaactaaaactaaaaccccactcagtcttccagtgaaaaaagaaaggcagcgatggaagaagacttcgacatccccggcggcgaggaaatggatctcggcgaagacaaggtcggcgaggagcgggagatcggctcccgcggcctcaagaagaagctcctcaaagaaggtcaaggctgggaaacccccgaagtcggcgacgaagtccaagttcattacacggggactttgctcgacggaactaagtttgattcgagccgcgacagggattctcccttcagcttcacgctcggacaagggcaagtaattaaaggatgggatgaaggtattaaaaccatgaagaaaggtgaaaatgctattttcaccatccctcccgagctagcttatggtgaatctggttcccctccaactattcctnctaatgctacactccaatttgatgttgagctgctgtcatg

SEQ ID NO: 25798 - DNA, 450 bp, Glycine max
  unsure (1)..(450): unsure at all n locations
  Clone ID: LIB3051-070-Q1-K1-E1
cttgcttacaaaagtttgttttcaaagtgtgttttgtttcccaaatcctactcttgtgggacaacccttcctcctctttcttttgaaacctctttttttctattccccaaccaaacaagcaaacgctactcactcatcatcactgagatcatggctcctaatatcaccactgtcaaaaccaccatcaccgacgctcaagccaaggtcgccaccgatcatggtcgtgcctacgtcaccttcctcgccggaaacggtgactatgtgaaaggtgtcgttggcttggcaaaaggtctgagaaaagtgaagagcatgtaccctctggtggatgcagtgctacccgatgttccccaagatcaccgcaacattctcacctgccaaagttgcattgttagagagattgagcccgtgtacccnccaaagaatcaaacccagtttggcatgggatattac

SEQ ID NO: 25799 - DNA, 389 bp, Glycine max
  Clone ID: LIB3051-001-Q1-E1-F8
agcccacgcgtccgcccacgcgtccgcacacacacagctagcagatattacatacacgtgaatcactaattaagccatggagaagaaatcaatagctgggttgtgcttcctcttccttgttctctttgttgctcaagaagttgtggtgcaaactgaggcaaagacttgcgagaacctggctgatacatacaggggtccatgcttcaccactggcagctgcgatgatcactgcaagaacaaagagcacttgctcagaggcagatgcagggacgattttcgctgttggtgcaccaaaaactgttaaatggatccattcactccaacgtgaagaagatgcatgcagcgctattttataaaaaataaaactactatatactatatataataag

SEQ ID NO: 25800 - DNA, 213 bp, Glycine max
  Clone ID: LIB3051-002-Q1-E1-C12
cacacacacagctagcagatattacatacacgtgaatcactaattaagccatggagaagaaatcaatagctgggttgtgcttcctcttccttgttccctttgttgctcaaaaatttttggtgcaaactaaggaaaaaacttccaaaaacctgcttgtaaaataaaggggccaatccttaacaattggaacttccaagattaatggaagaacaa

SEQ ID NO: 25801 - DNA, 423 bp, Glycine max
  Clone ID: LIB3051-005-Q1-E1-A7
acgtcagcagctagcagatattacatacacgtgaatcactaattaagccatggagaagaaatcaatagctgggttgtgcttcctcttccttgttctctttgttgctcaagaagttgtggtgcaaactgaggcaaagacttgcgagaacctggctgatacatacaggggtccatgcttcaccactggcagctgcgatgatcactgcaagaacaaagagcacttgctcagaggcagatgcagggacgatttttcgctgttggtgcaccaaaaactgttaaatggatccattcactccaacgtgaagaagatgcatgcagcgctattttataaaaaataaaactactatatactatatataataagactggcgctgcatcaatgacctatgtattatagtatatattattaccgatgtcagaacta

SEQ ID NO: 25802 - DNA, 436 bp, Glycine max
  Clone ID: LIB3051-009-Q1-E1-B9
accagcagatattacatacacgtgaatcactaattaagccatggagaagaaatcaatagctgggttgtgcttcctcttccttgttctctttgttgctcaagaagttgtggtgcaaactgaggcaaagacttgcgagaacctggctgatacatacaggggtccatgcttcaccactggcagctgcgatgatcactgcaagaacaaagagcacttgctcagaggcagatgcagggacgattttcgctgttggtgcaccaaaaactgttaaatggatccattcactccaacgtgaagaagatgcatgcagcgctattttataaaaaataaaactactatatactatatataataagactggcgctgcatcaatgacctatgtattatagtatatattattaccgatgtcagaactatagatgcatgtactgtgcataac

SEQ ID NO: 25803 - DNA, 424 bp, Glycine max
  Clone ID: LIB3051-027-Q1-K1-D7
cacacacagctagcagatattacatacacgtgaatcactaattaagccatggagaagaaatcaatagctgggttgtgcttcctcttccttgttctctttgttgctcaagaagttgtggtgcaaactgaggcaaagacttgcgagaacctggctgatacatacaggggtccatgcttcaccactggcagctgcgatgatcactgcaagaacaaagagcacttgctcagaggcagatgcagggacgattttcgctgttggtgcaccaaaaactgttaaatggatccattcactccaacgtgaagaagatgcatgcagcgctattttataaaaaataagactactatatactatatataataagactggcgctgcatcaatgacctatgtattatagtatatattattaccgatgtcagaactatag

SEQ ID NO: 25804 - DNA, 437 bp, Glycine max
  Clone ID: LIB3051-031-Q1-K1-G1
cacacacagctagcagatattacatacacgtgaatcactaattaagccatggagaagagatcaatagctgggttgtgcttcctcttccttgttctctttgttgctcaagaagttgtggtgcaaactgaggcaaagacttgcgagaacctggctgatacatacaggggtccatgcttcaccactggcagctgcgatgatcactgcaagaacaaagagcacttgctcagaggcagatgcagggacgattttcgctgttggtgcaccaaaaactggttaatggatccattcacttccaacgtgaaagaagatgcatgcagcgctattttataaaaaataaaactactatatactatatataataagactggcgctgcatcaatgacctatgtattatagtatatattattaccgatgtcagaactatagatgcatgtact

SEQ ID NO: 25805 - DNA, 421 bp, Glycine max
  Clone ID: LIB3051-033-Q1-K1-G12
cggcgcgtgggcacacacacagctagcagatattacatacacgtgaatcactagttaagccatggagaagaaatcaatagctgggttgtgcttcctcttccttgttctctttgttgctcaagaagttgtggtgcaaactgaggcaaagacttgcgagaacctggctgatacatacaggggtccatgcttcaccactggcagctgcgatgatcactgcaagaacaaagagcacttgctcagaggcagatgcagggacgattttcgctgttggtgcaccaaaaactgttaaatggatccattcactccaacgtgaagaagatgcatgcagcgctattttataaaagataaaactactatatactatatataataagactggcgctgcatcaatgacctatgtattatagtatatattattacc

SEQ ID NO: 25806 - DNA, 273 bp, Glycine max
  Clone ID: LIB3051-037-Q1-K1-D8
gacacacacagcttgcagatattacattcccctggatcactaattaagccctggggaaggaatcaatagctgggttgtgcttgctcttccttggtctctttggtgctcaagaaagtgtggtgcaaactgaggcaaagacttgcgagaacctggctgatacatacaggggtccatgcttcaccactggcagctgccatgatcactggaagaaccaagagcacttgctcagaagcagattccaggaccattttcgcttttggggcccccaaaact

SEQ ID NO: 25807 - DNA, 432 bp, Glycine max
  Clone ID: LIB3051-039-Q1-K1-G5
acacacagctagcagatattacatacacttgaattactaattaagcccttgagaagaaattcattagctgggttgtgcttcctcttccttgttctctttgttgctcaagaagttgtggtgcaaactgaggcaaagacttgcgagaacctggctgatacatacaggggtccatgcttcaccactggcagctgcgatgatcactgcaagaacaaagagcacttgctcagaggcagatgcagggacgattttcgctgttggtgcaccaaaaactgttaaatggatccattcactccaacgtgaagaagatgcatgcagcgctattttataaaaaataaaactactatatactatatataataagactggcgctgcatcaatgacctatgtattatagtatatattattaccgatgtcagaactatagatgcatgt

SEQ ID NO: 25808 - DNA, 366 bp, Glycine max
  Clone ID: LIB3051-058-Q1-K2-B7
cacacacacagctagcagatattacatacacgtgaatcactaattaagccatggagaagaaatcaatagctgggttgtgcttcctcttccttgttctctttgttgctcaagaagttgtggtgcaaactgaggcaaagacttgcgagaacctggctgatacatacaggggtccatgcttcaccactggcagctgcgatgatcactgcaagaacaaagagcacttgctcagaggcagatgcagggacgattttcgctgttggtgcaccaaaaactgttaaatggatccattcactccaacgtgaagaagatgcatgcagcgctattttataaaaaataaaactactatatactatatataataagact

SEQ ID NO: 25809 - DNA, 443 bp, Glycine max
  Clone ID: LIB3051-065-Q1-K1-D3
cacagctagcagatattacatacacgtgaatcactaattaagccatggagaagaaatcaatagctgggttgtgggtcctcttccttgttctctttgttgctcaagaagttgtggtgcaaactgaggcaaagacttgcgagaacctggctgatacatacaggggtccatgcttcaccactggcagctgcgatgatcactgcaagaacaaagagcacttgctcagaggcagatgcagggacgattttcgctgttggtgcaccaaaaactgttaaatggatccattcactccaacgtgaagaagatgcatgcagcgctattttataaaaaataaaactactatatactatatataataagactggcgctgcatcaatgacctatgtattatagtatatattattaccgatgtcagaactatagatgcatgtactgtgcataacggc

SEQ ID NO: 25810 - DNA, 479 bp, Glycine max
  Clone ID: LIB3051-070-Q1-K1-D10
cacacacacagctagcagatattacatacacgtgaatcactaattaagccatggagaagaaagcaatagctgggttgtgcttcctcttccttgttctctttgttgctcaagaagttgtggtgcaaactgaggcaaagacttgcgagaacctggctgatacatacaggggtccatgcttcaccactggcagctgcgatgatcactgcaagaacaaagagcacttgctcagaggcagatgcagggacgattttcgctgttggtgcaccaaaaactgttaaatggatccattcactccaacgtgaagaagatgcatgcagcgctattttataaaaaataaaactactatatactatatataataagactggcgctgcatcaatgacctatgtattatagtatatattattaccgatgtcagaactatagatgcatgtactgtgcataacggctgagttatgtacttatgttaagaataaaat

SEQ ID NO: 25811 - DNA, 398 bp, Glycine max
  Clone ID: LIB3051-074-Q1-K1-H8
ctttgttgctcaagaagttgtggtgcaaactgaggcaaagacttgcgagaacctggctgatacgtacaggggtccatgcttcaccactggcagctgcgatgatcactgcaagaacaaagagcacttgctcagaggcagatgcagggacgattttcgctgttggtgcaccaaaaactgttaaatggatccattcactccaacgtgaagaagatgcatgcagcgctattttataaaaaataaaactactatatactatatataataagactggcgctgcatcaatgacctatgtattatagtatatattattaccgatgtcagaactatagatgcatgtactgtgcataacggctgagtaatgtacttatgttaagaataaaataaagtgctcgtgttgc

SEQ ID NO: 25812 - DNA, 479 bp, Glycine max
  unsure (1)..(479): unsure at all n locations
  Clone ID: LIB3051-075-Q1-K1-E1
cacacacacagctagcagatattacatacacgtgaatcactaattaagccatggagaagaaatcagatagctgggttgtgcttcctgttccttgatctctttgatggctaagaagttgtggtgcaaactgaagcaaagacttgcgagaacctggctgatacatacaggggttcatgctttaccactggcagctgcgatgatcactgcaagaacaaagagcacttgctcagaggcagatgcagggacgattttcgctgttggtgcaccaaaaactgttaaatggatccattcactccaacgtgaagaagatgcatgcagcgctattttataaaaaataaaactactatatactatatataataagactggcgctgcatcaatgacctatgtattatagtatatattaataccgatgtcagaactatagatgcatgtactgtgcataacggctgagttatgtacttatngtaagaataaat

SEQ ID NO: 25813 - DNA, 466 bp, Glycine max
  Clone ID: LIB3051-077-Q1-K1-G1
cacacagctagcatatattacatacacgtgaatcactaattaagccatggagaagaaatcaatggctgggttgtgcttcctattccttgttctctttgttgctcaagaagttgtggtgcaaactgaggctaagacttgcgagaacctggctgatacatacaggggtccatgcttcaccactggcatctgcgatgatcactgcaagaacaaagagcacttgctcagaagcagatgcagggactattttcgctgttggtgcaccaaaaactgttaaatggatccattcactccaacgtgaagaagatgcatgcaacgctattttataaaaaatataactactatatactatatataataagactggcgctgcatcaatgacctatgtattatagtatatattattaccgatgtcagaactatagatgcatgtactgtgcataacggctgagttattacttatgttaag

SEQ ID NO: 25814 - DNA, 379 bp, Glycine max
  Clone ID: LIB3051-079-Q1-K1-H7
cccacgcgttcgcccacgcgttcgcacacagctagcagatattacatacacgtgaatcactaagtaagccatggagaagaaatcaatagctgggttgtgcttcctcttccttgttctctttgttgctcaagaagttgtggtgcaaactgaggcaaagacttgcgagaacctggctgatacatacaggggtccatgcttcaccactggcagctgcgatgatcactgcaagaacaaagagcacttgctcagaggcagatgcagggacgattttcgctgttggtgcaccaaaaattgttaaatggatccattcactccaacgtgaagaagatgcatgcagcgctattttataaaaaataaaactactatatactatatataa

SEQ ID NO: 25815 - DNA, 478 bp, Glycine max
  Clone ID: LIB3051-080-Q1-K1-G1
cacacacacagctagcagatattacatacacgtgaatcactaattaagccatggagaagaaaggaatagctgggttgtgcttcctcttccttgttctctttgttgctcaagaagttgtggtgcaaactgaggcaaagacttgcgagaacctggctgatacatacaggggtccatgcttcaccactggcagctgcgatgatcactgcaagaacaaagagcacttgctcagaggcagatgcagggacgattttcgctgttggtgcaccaaaaactgttaaatggatccattcactccaacgtgaagaagatgcatgcagcgctattttataaaaaataaaactactatatactatatataataagactggcgctgcatcaatgacctatgtattatagtatatattattaccgatgtcagaactatagatgcatgtactgtgcataacggctgagttatgtacttatgttaagaattaaa

SEQ ID NO: 25816 - DNA, 449 bp, Glycine max
  Clone ID: LIB3051-093-Q1-K1-B9
cccacgcgtccgcacagctagcagatattacatacacgtgaatcactaatggagccatggagaagaaatcaatagctgggttgtgcttcctcttccttgttctctttgttgctcaagaagttgtggtgcaaactgaggcaaagacttgcgagaacctggctgatacatacaggggtccatgcttcaccactggcagctgcgatgatcactgcaagaacaaagagcacttgctcagaggcagatgcagggacgattttcgctgttggtgcaccaaaaactgttaaatggatccattcactccaacgtgaagaagatgcatgcagcgcttatttataaaaaataaaactactatatactatatataataagactggcgctgcatcaatgacctatgtattatagtatatattattaccgatgtcagaactatagatgcatgtactgtgcat

SEQ ID NO: 25817 - DNA, 435 bp, Glycine max
  Clone ID: LIB3051-096-Q1-K1-B6
cacacacacagctagcagatattacatacacgtgaatcactaattaagccatggagaagaggtcaatagctgggttgtgcttcctcttccttgttctctttgttgctcaagaagttgtggtgcaaactgaggcaaagacttgcgagaacctggctgatacatacaggggtccatgcttcaccactggcagctgcgatgatcactgcatgaacaaagagcacttgctcagaggcagatgcagggacgattttcgctgttggtgcaccaaaaactgttaaatggatccattcactccaacgtgaagaagatgcatgcatcgctattttataaaaaataaaactactatatactatatataataagactggcgctgcatcaatgacctatgtattatagtatatattattaccgatgtcagaactatagatgcatgta

SEQ ID NO: 25818 - DNA, 417 bp, Glycine max
  unsure (1)..(417): unsure at all n locations
  Clone ID: LIB3051-097-Q1-K1-C12
cgtncgcacttacacagctagcatatattacatacttttgaatcactaattaagccatggagaagaggtcaggttctgggttgtgcttcctcttccttgttctctttgttgctcaagaagttgtggtgcaaactgaggcaaagacttgcgagaacctggctgatacatacaggggtccatgcttcaccactggcagctgcgatgatcactgcaagaacaaagagcacttgctcagaggcagatgcagggacgattttcgcttgtggtgcaccaaaaactgttaaatggatccattcactccaacgtgaagaagatgcatgcagcgctattttataaaaaataaaactactatatactatatataataagactggcgctgcattaatgacctatgtattataagatatattattaccg

SEQ ID NO: 25819 - DNA, 432 bp, Glycine max
  Clone ID: LIB3051-103-Q1-K1-D6
cccacgcgtccgcccacgcgtccgcacacacacagctagcagatattacatacgcgtgaatcactaattaagccatggagaagaaatcaatagctgggttgtgcttcctcttccttgttctctttgttgctcaagaagttgtggtgcaaactgaggcaaagacttgcgagaacctggctgatacatacaggggtccatgcttcaccactggcagctgcgatgatcactgcaagaacaaagagcacttgctcagaggcagatgcagggacgattttcgctgttggtgcaccaaaaactgttaaatggatccattcactccaacgtgaagaagatgcatgcagcgctattttataaaaaataaaactactatatactatatataataagactggcgctgcatcaatgacctatgtattatagtatatattatta

SEQ ID NO: 25820 - DNA, 296 bp, Glycine max
  Clone ID: LIB3051-107-Q1-K1-B3
cccacgcgtacgcccacgcgtccgggacgattttcgctgttggtgcaccaaaaactgttgagtggatccattcactccaacgtgaagaagatgcatgcagcgctattttataaaaaataaaactactatatactatatataataagactggcgctgcatcaatgacctatgtattatagcatatattattaccgatgtcagaactatagatgcatgtactgtgcataacggctgagttatgtacttatgttaagaataaaatacagtgctgttgttgcaaaaaaaatcatatgcac

SEQ ID NO: 25821 - DNA, 433 bp, Glycine max
  Clone ID: LIB3051-113-Q1-K1-D12
cccacgcgtccgcacacagctagcagatattacatacacgtgaatcactaattaagccatggagaagaaatcaatagctgggttgtgcttcctcttccttgttctctttgttgctcaagaagttgtggtgcaaactgaggcaaagacttgcgagaacctggctgatacatacaggggtccatgcttcaccactggcagctgcgatgatcactgcaagaacaaagagcacttgctcagaggcagatgcagggacgattttcgctgttggtgcaccaaaaactgttaaatggatccattcactccaacgtgaagaagatgcatgcagcgctattttataaaaaataaaactactatatactatatataataagactggcgctgcatcaatgacctatgtattatagtatatattattaccgatgtcagaactata

SEQ ID NO: 25822 - DNA, 417 bp, Glycine max
  unsure (1)..(417): unsure at all n locations
  Clone ID: LIB3051-113-Q1-K1-F8
cacacacacagctagcagatattacatgcacgtgaatcactaattaagccatggagaagaaatcaatagctgggttgtgcttcctcttccttgttctctttgttgctcaagaagttgtggtgcaaactgaggcaaagacttgcgagaacctggctgatacatacaggggtccatgcttcaccactggcagctgcgatgatcactgcaagaacaaagagcacttgctcagaggcagatgcagggacgattttcgctgttggtgcaccaaaaactgttaaatggatccattcactccaacgtgaagaagatgcatgcagcgctattttataaaaaataaaactactatatactatatataataagactggcgctgcatcaatgacctatgtnatatagtatatattaataccgatgtca

SEQ ID NO: 25823 - DNA, 433 bp, Glycine max
  Clone ID: LIB3051-114-Q1-K1-C1
agctagcagatattacatacacgtgaatcactaattaagccatggagaagaaatcaatagctgggttgtgcttcctcttccttgttctctttgttgctcaagaagttgtggtgcaaactgaggcaaagacttgcgagaacctggctgatacatacaggggtccatgcttcaccactggcagctgcgatgatcactgcaagaacaaagagcacttgctcagaggcagatgcagggacgattttcgctgttggtgcaccaaaaactgttaaatggatccattcactccaacgtgaagaagatgcatgcagcgctattttataaaaaataaaactactatatactatatataataagacttgcgctgcatcaatgacctatgtattataagatatattattaccgatgtcagaactatagatgcatgtactgtgca

SEQ ID NO: 25824 - DNA, 436 bp, Glycine max
  Clone ID: LIB3051-091-Q1-K1-D9
acaaaggtgaagctcaggctcaggattggagaggcagaccctccaaccctgccaaacacgggggaatgattcccgctgcttttgttcttgggttgcaagcttttgagataatggcaatagccgcagtggggaacaatctgataacctacgtgacgagtgagatgcacttccctttgtccaaggctgccaacctagtcactaactttgttgggaccatctttctcctcgtcctcctcggcggctatctttccgactcttacctcggcagcttctggaccatgctcatctttggtttccgtgaactttgctggttcatattgctttctgtccaagctcatgttcctcagttgaagccacccccatgcaatatcaacgatttaagagaacagtgcttaaaaaccaaaggcctgaagaccatgatattcttcgtagccct

SEQ ID NO: 25825 - DNA, 451 bp, Glycine max
  Clone ID: LIB3051-102-Q1-K1-D9
acaaaggtgaagctcaggctcaggattggagaggcagaccctccaaccctgccaaacactgtggaatgattcccgctggttgtgttcttgggttgcaagcttttgagataatggcaatagccgcagtggggaacaatctgataacctacgtgacgagtgagatgcacttccctttgtccaaggctgccaacctagtcactaactttgttgggaccatctttctcctcgccctcctcggcggctatctttccgactcttacctcggcagcttctggaccatgctcatctttggtttcggtgaactttccggcttcatattgctttctggccaagctcatggtcctcagttgaagccacccccatgcaatatcaacgaattatgagaacaatgctcataagccaacggcatgaagaccatgatattcttcgtagccctcgacttggtggcatt

SEQ ID NO: 25826 - DNA, 444 bp, Glycine max
  Clone ID: LIB3051-106-Q1-K1-D9
gaatctttgaattattgctaagaaagttttgcaggaagcttccagccccaatcgcaccctggaccttgcatcttcccttgacgttggtcccagtggaaaccgagcttcagatgaatgtgctggaaattccagctatatgagatctgtgatgacaatagcatttgaatttgcatttgaaagccatatgcaagagcatgtagcagctatggcacgtcaatatgttcggagcattatatcatcggttcaaagggtaggattagcactttctccttctcatttgagttcacatgcagggcttaggtcaccattgggtactcctgaagcacaaacccttgctcattggatctgcaacagttataggtgctacttgggtgtggagctacttaaatctaataacgaagggaatgaatctttgctcaagtccttgtggcatcactcagatgc

SEQ ID NO: 25827 - DNA, 453 bp, Glycine max
  Clone ID: LIB3051-028-Q1-K1-G8
gcaaaaagaaaatcagtaggcgtagagaacagcaaagaaagaggaataatggagcaggaagagcacgaagtgtacggtgcagacattcccgacgaggagattgacatggacgcagacgccgagcaacaagatgagcaacttgcccccaatcacacaaacaaggaactggaggacatgaagaagaggctgaaggagatcgaggaggaagctagcgcccttcgcgaaatgcaggccaaggtcgagaaagagatgggcgctgttcaagattcgtcgggcacttccgcaactcaagctgaaaaggaggaagtggatgctcggtcaatctatgttggtaatgttgactatgcatgtacgcctgaagaagtccagcagcattttcagtcctgtggaactgtgaacagggtgacaatactgacagacaaatttggtcaaccaaaaaggtttgcttatgta

SEQ ID NO: 25828 - DNA, 450 bp, Glycine max
  Clone ID: LIB3051-111-Q1-K1-D1
agaaaatcagtaggcgtagagaacagcagagaaagaggaataatggagcaggaagagcacgaggtgtacggtgcagacattcccgacgaggagattgacatggacgcagacgccgagcaacaagatgagcaacttgcccccaatcacacaaacaaggaactggaggacatgaagaagaggctgaaggagatcgaggaggaagctagcgcccttcgcgaaatgcaggccaaggtcgagaaagagatgggcgctgttcaagattcgtcgggcacttacgcaactcaagctgaaaaggaggaagtggatgctcggtcaatctatgttggtaatgttgactatgcatgtacgcctgaagaagttcagcagcattttcagtcctgtggaactgtgaacagggtgacaatactgacagacaaatttggtcaaccaaaagggtttgcttatgtagag

SEQ ID NO: 25829 - DNA, 385 bp, Glycine max
  Clone ID: LIB3051-043-Q1-K1-B5
cttcctcagaaacacatcctaatggcagagcgcggaggtggcgatcgtggcggcgaccgtggcggtttcggacgtggattcggcgggcgaggacgcggaggtgacaggggccgaggccggcgccgaggcccccgccgcgaggaagaggagaagtgggtcccagtgaccaaactgggccgcctggtgaaggagggaagaatccgaagccttgaacagatctacctccactcgctcccgatcaaggagcaccagatcatcgacacgctcgtgggtcccaccctcaaggacgaggtgatgaagatcacgccggtccagaagcagacccgggccgggcagaggacccggttcaaggcctttcgcgtcgtcggagacaacaacgggcacg

SEQ ID NO: 25830 - DNA, 441 bp, Glycine max
  Clone ID: LIB3051-064-Q1-K1-H4
gcgatcgtggcggcgaccgtggcggtttcggacgtggattcggcgggcgaggacgcggaggtgacaggggccgaggccggcgccgaggcccccgccgcgaggaagaggagaagtgggtcccagtgaccaaactgggccgcctggtgaaggagggaagaatccgaagccttgaacagatctacctccactcgctcccgatcaaggagcaccagatcatcgacacgctcgtgggtcccaccctcaaggacgaggtgatgaagatcacgccggtccagaagcagacccgggccgggcagaggacccggttcaaggccttcgtcgtcgtcggagacaacaacggccacgtcgggctgggcgtgaagtgcagcaaggaagtggcgacagctattcgtggcgcgattattctggcgaagctgtctgttatccccgtgaggagggggt

SEQ ID NO: 25831 - DNA, 454 bp, Glycine max
  Clone ID: LIB3051-082-Q1-K1-G5
cccacgcgtccggtctgttatccccgtgaggagggggtactgggggaacaagagcggggggccccacaccgtcccgtgcaaggttacggggaagtgcggctccgttaccgttaggatggttcccgcgccgagaggttcggggatcgtggcggctagggttcccaagaaggtgctgcagttcgcggggattgatgatgttttcacctcctccagaggatccaccaagaccctcggcaacttcgttaaggctacttttgattgcttgatgaaaacctatggattcctgacaccagaattctggaaggagactcgcttctccaaatctccattccaagagtacacagatctactggcaaaaccaacaggaaagactctaatcttggaggaggaaagggtggatgcttgatttgctagttttgctttatggatgttttaagaactttattactttaca

SEQ ID NO: 25832 - DNA, 435 bp, Glycine max
  Clone ID: LIB3051-102-Q1-K1-H6
cccacgcgtccgccgcagtctcttctctctcagaaaccctaatggcagagcgcgggggtggcgaacgtggcggcgaccgtggcggtttcggacgcggcttcggcgggcgagggcgcggaggcgacaggggccgcggccggcgtagaggtccccgccgcgaggaggaggagaagtgggtcccggtgactaagctgggacgcctggtgaaggaaggaagaatccgaagcctggagcagatctacctccactcgctgcccatcaaagagcaccagatcatcgacacgctggtgggccccaccctgaatgacgaggtgatgaagatcacgccggttcagaagcatacccgggccgggcagagaacccgttttaaggccttcgtggtcgtcggcgacaacaacggtcacgtgggtctaggcgtgaagtgcagcaaggaag

SEQ ID NO: 25833 - DNA, 428 bp, Glycine max
  Clone ID: LIB3051-004-Q1-E1-D9
cgagtatggtggaactgtggggattgtaacactcgaagatgttgttgaggaaattgttggtgaaatatttgatgaaaatgactcaaaggaggagatacagaaaaaaactggttacattgtaatgcgagctgagggtgtttttgatgtggatgcaaacacatccattgatcagctctctgaagatttgaacatcaagatgccagagggtcaccaatatgagacggtatcaggctttgtgtgtgaagcatttggatacattccaatgacaggtgagtgcatcaaagtagttcttgaaagggaagatgaagatgataacaatgagtccaatgctgaccagcaggatcagaaggagaagaaccagagtttcaaacttgagatactaactggaaatgccagaaagaaaatggaagagtgatgcaaactcagac

SEQ ID NO: 25834 - DNA, 315 bp, Glycine max
  Clone ID: LIB3051-014-Q1-E1-C4
caaaaccgttggccataattggggcaatggcccttgccactgaaccaccaacggcaaggtttggtaaacctggtgtcattgcaccaacaggattaataacggttgcaattttccttcccattgaaatcactcaaaaaagcatagctgtccataacccaacaaaagtggctcggtttgtggtcaggccattggcattggctttccctggtgttgtatcctgtaggaagaattgttacttacctttcaatggggatgctgaaattgcttggcctaaaaggaagaagtgagccatatgtaactgaagatgagctaaaa

SEQ ID NO: 25835 - DNA, 447 bp, Glycine max
  unsure (1)..(447): unsure at all n locations
  Clone ID: LIB3051-086-Q1-K1-H10
cccacgcgtccggaaaaaaagaaaaatgcaggcagcaaagaaagccatagagacctttaaggggaccgcagccaacattggcgcctctgccaagtctggcttggagaaaaccaaggccactatccaagagaagaatgagaagatgaatgcagaagatcaaactcaaatggatatggctaccaagaggaaagaagagaagatcaaccaggctgagatggagaagcagcaggcccgtaagtactacgccgctgcaaaacaatacgccatggctgagcacatggcaaagggcaaccacgacaccgccgggcctagaatcgagactgccacacacatcaccagtgggcccgggactgacaatgctatgtactctaacactgggcctgngactgagactgccacgtacaccactagtgggcttgggcatgacaatgctatacccaccagcac

SEQ ID NO: 25836 - DNA, 435 bp, Glycine max
  unsure (1)..(435): unsure at all n locations
  Clone ID: LIB3051-010-Q1-E1-D5
accacgcgtccgatcaggtcaatcttgaatatcttggaagggttgtattcaacaatgagggcctactctatcctgacagtgtggttgggactgattcacataccactatgatagatgggcttggtgttgctggatggggagttggaggtattgaagctgaggcagcaatgcttggtcagcctttgagcatggttttgcccggtgttgttgggttcaagttatctggaaaactacgcaatggtgttacagcaacagacttagttctaactgtgactcaaattctcagaaagcatggtgttgtggggaaatttgttgaattttatggtgatggtatgggtgaattatctttggctgacanggccactattgccaatatgtctcctgaatatggtgccaccatgggcttcctccctgtggatcatgttacactacaag

SEQ ID NO: 25837 - DNA, 390 bp, Glycine max
  Clone ID: LIB3051-042-Q1-K1-E7
atccgagaattgacaggttaccatattccatcagaattctccttgaatctgccattcgtaattgtgacaattttcaagtcaaaaaagaagatgttgagaagattctcgactgggaaaataattctacgaagcaagttgaaattcctttcaagcccgctcgtgttctcttgcaggattttactggagtcccggctgttgttgacctggcctgcatgcgtgatgctatgaataagcttggcagcgattcaaataagatcaaccctctggttcctgtggatcttgtcattgatcattcagttcaagttgacgttacaaggtcagataatgcaatgcaagccaatatggagcttgaatttcagagaaacaaggagagggttgctttttttaaat

SEQ ID NO: 25838 - DNA, 317 bp, Glycine max
  Clone ID: LIB3051-002-Q1-E1-G2
gacaaatttgcttgctactgtcttgatcttcctaattgtgatatacttccaaggtttccgtgtggtcttgcctgtaagatcaaagaatgctcgtggacagcagggttcatatccaatcaaattgttttatacctccaacatgcccatcattcttcagtctgcccttgtttccaatctctacttcatctcccagctgctccaccgtaagtacagcggaaacttcttcgtaaatttattgggaaaatggaaagaatccgaatatggaagtggtcagtctgttcctgttggtggcattgcatactatatcactgcaccat

SEQ ID NO: 25839 - DNA, 435 bp, Glycine max
  Clone ID: LIB3051-026-Q1-K1-F5
ggcaaatggaaggagtctgaatatggaggtggtcagtctgttcctgttggtggtattgcatactacatcactgcaccttccagcttagctgatatggcagccaatcctttccatgcattattctaccttgtgtttatgttgtcagcctgtgccttgttctctaaaacttggattgaagtctctggttcatctgctagagatgttgcaaagcagctgaaggaacaacaaatggtaatgcctggacatcgggaatcaaacttgcagaaagaactgaaccgatacattcccaccgcggcagcatttggaggcatatgtatcggtgcattgactgtgttggcagatttcatgggggcaattggttcagggacaggaatattgcttgcagtaacaatcatctatcagtacttcgaaacatttgagaaggagagagccagc

SEQ ID NO: 25840 - DNA, 428 bp, Glycine max
  Clone ID: LIB3051-010-Q1-E1-D9
gcctggcctgtttcaaagcctcactcatccagattgaacaatgatcacgtgcttgaccaagttgacaaggagagcaaagttgagactgctacaagttatcggttgtttggaattgatcttattgatcattctaggaactctccttcagtagagaaggcatctgcacaagcaggaaatgcacccaaagttactactgaaggctgcaccagtaccttgacccgaactgatgctggccatctgtcggatgtaccaatggcttcttccaaggagaggaaacaagaacagcagcaagtatcaccaaaagagactcagagcaagcaaatttgtagaagtcgaaccaaggttcaaatgcaaggtgttgcagtgggtcgtgctgtcgatttgaccatgttggatggatatgatcaacttataaatgaattggagga

SEQ ID NO: 25841 - DNA, 291 bp, Glycine max
  Clone ID: LIB3051-012-Q1-E1-D5
agagagtcttcccgtctcttcctcttcacttcttataccgtcgcccccaaacgacgccgttttctgttctcttatgtaaacgccgttcgagaacaaagcaaaaaaagaaaagaaaatcagttattgccgttgttgttttgtttccggttcggtttatttcaatggatcgggcggcgttgacggttggaccgggcatggacatgccgatcatgcacgacagcgaccgttacgatctggtacgcgacatcgggtccggaaatttcggcgtggccaggctgatgcaggataaac

SEQ ID NO: 25842 - DNA, 424 bp, Glycine max
  unsure (1)..(424): unsure at all n locations
  Clone ID: LIB3051-038-Q1-K1-E3
gtcttaccgtctcttcctcttcacttcttataccgtcngccccaaacgacgccgttttctgttctcttatgtaaacgccgttcgagaacaaaccaaataaagaaaagaaaatcagttattgccgttgttgttttgtttccggttcggtttatttcaatgggatcgggcggcgttgacggttggaccgggcatggacatgccgatcatgcacgacagcgaccgttacgatctggtacgcgacatcgggtccggaaatttcggcgtggcgaggctgatgcaggataaacaaaccaaggaactggtcgccgtcaagtacatcgaaaggggtgataagattgatgaaaatgtaaagagggaaatcattaatcacaagtctctgaggcatcctaacattgntagatttaaagaggtaattntaacacct

SEQ ID NO: 25843 - DNA, 453 bp, Glycine max
  Clone ID: LIB3051-071-Q1-K1-D7
gtctgttcctcttcacttcttataccgttgcccccaaacgacgccgttttctgttctggtatgtaaacgccgttcgagaacaaaccaaaaaaagaaaagaaaatcagttattgccgttgttgttttgtttccggttcggtttatttcaatggatcgggcggcgttgactgttggaccgggcatggacatgccgatcatgcacgacagcgaccgttacgatctggtacgcgacatctggtccggaaatttcggcgtgtctaggctgatgcaggatatacaaaccaaggaactggtcgccgtcaagtacatctaaaggggtgataagattgatgaaaatgtaaagagggaaatcattaatcacaggtctctgaagcatcctaacattgttagatttaaagaggtaattttaacacctactcatcttgctattgtaatggaatatgcatctggggg

SEQ ID NO: 25844 - DNA, 427 bp, Glycine max
  unsure (1)..(427): unsure at all n locations
  Clone ID: LIB3051-013-Q1-E1-D5
aaagatttggagattacaaagagagggtgaatgaatggaaggacgccttgctagaagtctacggttggactgctatggaataccaaaatgggtccggatacgaatatgaattcatccgagagattgttgatatagccaagaggcgccagcgccgccgatatgatgtttttctgagttttaggggaagagatacccgccactctttcacaggttttctctataaagccttttgccgggagggattctacgtcttcatggatgatgagggattggagggtgggaatcaaatttcacctacgattatgggagcaattganagatcaaggctttcaattgtagtgttctctgaaaactatgggttattcacgtggtgtcttgatgaactttccaagatcattgagtgcgtgaaaaccaggaatcaaatggt

SEQ ID NO: 25845 - DNA, 456 bp, Glycine max
  Clone ID: LIB3051-104-Q1-K1-F2
cgggccgaccgacgcgtgcgatttacagcggcccacatatgttcctgatactggtttgctttgtgatctcctttggtctgggccgggcacagatgttcaaggatggggaatgaatgacagaggagtttcatttacatttggtgctgataaggtctcagagtttcttcagaaacatgatcttgatcttatttgtcgtgctcatcaagttgtggaagatggatatgagttctttgctaatcgacaacttgtaacaatattttcagcacctaattattgtggggaatttgacaatgctggtgctatgatgagtgtcgatgagacactaatgtgctctttccaaatattaaagccagctgataaaaaagcaaagctcaattttggaagtacaaccactgctaagcctggaaactccccagctggtgtaaagtgctttctgggtgcgaaagtatgaaatta

SEQ ID NO: 25846 - DNA, 424 bp, Glycine max
  unsure (1)..(424): unsure at all n locations
  Clone ID: LIB3051-039-Q1-K1-A8
cccacgcgtccgggaagaatttgatgaatcagacaagtcacatcataatgaagctccagaatatagacacctaattgccattcatgctgggaagcctaaaggtggattagtggaatgcctcaaagtggatcctgaaaaagtgagacgtctaagtttaagtgatcaacagcttgaaaaggctgctataaattatggacaacaaattgtcaggtttactcagcggaatatactgagggtgtatccaaaaggtactcgcattgactcatcaaattataacccattaattgggtggatgcatggagctcagatggttgcatttaatatgcaggggtatgggagatctctttggttgatgcatggaatgttcagagccaatggaggntgcggttatgttaaaaaaccaaattttctattggagactggt

SEQ ID NO: 25847 - DNA, 263 bp, Glycine max
  Clone ID: LIB3051-066-Q1-K1-B11
ctgggagcttagaagtggcattcgagcaattccactgcatagccaaaagggagataaatacaagactgtaaagcttctcatgcgctttgagtttattaataattgattctgtgcaatgtgcatccttctgctccccattattattattattattatgtacagtcattaagatgtgttagtagcaagagtttgtatgtagtagctggatgatatcgtgaattatgtgccccgttaaatgatgtaagaaacaaaatgtgttgtgt

SEQ ID NO: 25848 - DNA, 365 bp, Glycine max
  Clone ID: LIB3051-016-Q1-E1-D5
agcaattctaacatacttttctttcttttttttcccctctttaaaagtctggcttttggtcctttgattcccaacttcacttgtcacatatcatattatgaagctcacaggtttcctgcaagcggtgactcttgctttggtgttagccaccgtctctgcatcagatcctgatcctcttcaagacctctgtgtcgcagaccttgcttcagcggttaaagtgaatggattcacatgcaaagatgctgccaaggtaaatgcgagtgatttcttctcagatatactagccaaaccatgtgccacaaacaacacctatggctccctagtgactggagccaacgttcagaatatcccaggactcaacaccc

SEQ ID NO: 25849 - DNA, 422 bp, Glycine max
  Clone ID: LIB3051-107-Q1-K1-F5
caattctaacatacttttctttcttttttttcccctctttaaaagtctggcttttggtcctttgattcccaacttcacttgtcacatatcatattatgaagctcacaggtttcctgcaagcggtgactcttgctttggtgttagccaccgtctctgcatcagatcctgatcctcttcaagacctctgtgtcgcagaccttgcttcagcggttaaagtgaatggattcacatgcaaagatgctgccaaggtaaatgcgagtgatttcttctcagacatactagccaaaccaggtgccacaaacaacacctatggctccctagtgactggagccaacgttcagaaaatcccaggactcaacacccttggcgtgtctatatcacgcattgactatgccccaggtggcatcaacccaccttacacg

SEQ ID NO: 25850 - DNA, 385 bp, Glycine max
  Clone ID: LIB3051-018-Q1-E1-D9
agcccacgcgtccggaagaggttcttgaaaaagcactattgatgattcaaaattcccagaagaattacctctataaatgtgaccagttaaagtctattcgccaagacctaactgttcaacgaatacgcaatcaattaacagtcaaggtgtatgaaacacatgcccgattggcactggaatttggggacctgtttgagtataatcagtgccaatctcagttgcaaactctttatgccgaaggcattgaggggtctgatatggaatttgccgcttacaacttgctttgtgtcataatgcattcaaataataacagagatcttgtaaccaccatgggcaaggttatctcacgaagcaaagaaggatgaagctgtaaaacatgcccttg

SEQ ID NO: 25851 - DNA, 365 bp, Glycine max
  unsure (1)..(365): unsure at all n locations
  Clone ID: LIB3051-041-Q1-K1-C12
tcgccgatctcggttggtgtagaactcttcatggtcatgccggaaaggtgtactcattggattggacttcagaaaagaatcgaattgttagtgcattccaagatgggagattgatagtgtggaatgctctaacaagccagaaaacacatgccataaagcttccctgtgcgtgggtcatgacctgtgctttcttcccaaccggtcaatctgttgcatgtgggggccttgacagtgtttgctccctttttaatcttaattcccccactgacagggatgggaatctagccgtttcacggatgcttagtggacattaaagttatgtntcctcttgtcagtatgttccagatgaagatactcacttgatt

SEQ ID NO: 25852 - DNA, 438 bp, Glycine max
  Clone ID: LIB3051-074-Q1-K1-B11
ggccttcacgccggaagaggacgtgaccataattagggcccatgctcggttcggtgacaagtgggccaccatagcccggctcctctcgggccgcaccgataacgccatcaagaatcactggaactcaacgcttaaacgcaagtgcgcgtccttcatgaccgccgatgaagccgccgccggcggcttcagcccgaggccgctcaagcgatcgttcagcgccggcacggcggtgcctcctccaggaagcccctcaggatccgacgtgagcgagtccagcgctgctcccggcgtggtctctgtctctgtctctccttcacaagtgtttcgccccgtgccggttcggccggttgtcgaaacggcgtcgttgcaagacgacgccgatgccgactccgaggatgctggacctactacctcgctgtcgctggctctttccggggt

SEQ ID NO: 25853 - DNA, 446 bp, Glycine max
  Clone ID: LIB3051-079-Q1-K1-B3
gtcatcagctagacgactgggtcttgtgtaggatctacaagaagaagaacattggaaagtcaatggaggcaaaagaggaatacccaatagcccaaatcaatcttacaccagcaaacaatgacagtgaacaagaaatggtgaaatttccaaggactagttcccttactcatcttttggaaatggattacttgggtccaatatcacatatattatctgatgccacatacaattcaacctttgattttcaaattaacactgccaatggtggaatagacccgttcgtaaaaccacagccggttgaaatcccttatgcagcagattcagggaagtaccaagtgaaacaaaatagcaccatcaaccccaccatatttgtgaaccaagtgtattatcaaagaggataatgccaaaaaaaatattaaaaaaaatgaaattggattatttggaca

SEQ ID NO: 25854 - DNA, 401 bp, Glycine max
  Clone ID: LIB3051-032-Q1-K1-D8
cccacgcgtccggatacctgctgcaaaaaccatgaatgccattgacgagggttagagaattgcaagggcacaaacacttattgccctatgtagtacaggatctggctactggttcacagtggctctcattgacaagattggaagatttgctatccaattgatgggattcttgttcatgactgccttcatgtttgctattgccattccttatgaccactggactcatatagataaccggataggattcgtggtgagctattcattgaccttcttctttgcaaatttcgcacctaatgccaccacattcgtcgtgccggcagagattttcccagctagattccgatctacttgccatggaatctcatcagcattcgagaagctcggagctattgctggtgcat

SEQ ID NO: 25855 - DNA, 371 bp, Glycine max
  Clone ID: LIB3051-032-Q1-K1-D9
aaaaaacaaacaaatacataatagcaaaaaaccaaaaaagccataaacgaagaaggcagggatacaacaacacaatcacttctatgccctatgtagtacagcatctggctactggttcacagtggctctcattgacaagattggaagatttgctatccaattgatgtgattctagttcatgactgccttcatgtatgctcttgccattccttatcaccactggactcatatggataaccggataggattcgtggtgatttattcgttgaccttcttctttgcaaatttcgcacctaatgccaccacattcgtcgtgccggcagagatttttccagctagattccgatctacttgccatggaatctcatcag

SEQ ID NO: 25856 - DNA, 450 bp, Glycine max
  Clone ID: LIB3051-082-Q1-K1-B7
ggaggtgtctgcgagcgttaacgcaaaaaaacgacaccgtttctcttccgaagcgcatggtctctccgctcactcaccgtgcctccgtttcccaacgccaacgcttcttcccccgttttcaccgtacgcgcctctgtcttcgcgcaatggccccacctccgctatttctcttccgagaaaaaagacgaccacagcgacgaagacgatgatggcgatgaggattacgatgatgaagaagaggattatgttgatgacgacgacgatgatgacgtccctgtgtcgagagggaaaaaagtgtacactgcggaggagaaggaagcggaagccgcggcaattgggtacagagtagtgggtccccttcaaaaggacgaagatagcgtttttaagccttacgagcctgtttttgctgttgttcagattggttcgcaccagtttaaagtaagcaaccga

SEQ ID NO: 25857 - DNA, 430 bp, Glycine max
  Clone ID: LIB3051-035-Q1-K1-B3
cccacgcgtccgcccacgcgtccggtctgatcctacggagaatgacagtgttgaagggctgcggccaaatgctaggggtccaggattagtcacttttgggcctgatcgagtaatggaattttgcaacaacaatgatcttcagctgattgttcgtgcacatgaatgtgtgatggatggctttgagcgttttgcccaggggcatttgatcacacttttctctgctacaaactactgtggtacggcaaataatgctggggcaatattagttttgggtagagatctcgttgtggttcctaaattgattcatccattaccgcctgcaatttcttcaccagaaacgtcaccggatcgtcatattgaggatacatggatgcaggagttgaatgctaacagaccaccaacaccaactagaggccgtcctcaagtaaca

SEQ ID NO: 25858 - DNA, 360 bp, Glycine max
  unsure (1)..(360): unsure at all n locations
  Clone ID: LIB3051-101-Q1-K1-B3
cccacgcgtccgataccacctattcctttgtctcagccctgctttgttagttgaaaatggaaaattcctcctttctgctaagaggacaaggagaacaacttacactgagtacgttatttccatggatgctgacaacatctctagatcaagtaacacttacattggaaagctgagatcaaattttcttggtacaaagttcattatatacgatacacagcctccatactcttctgcccatatatgccctcctgggactgggaagacgagccgcagattttattccaaaaaggtctcgcctaaggtcccatctgggagttacaacatagctcangtaacatatgaattaaatgtgcttgggac

SEQ ID NO: 25859 - DNA, 385 bp, Glycine max
  unsure (1)..(385): unsure at all n locations
  Clone ID: LIB3051-046-Q1-K1-D9
attttcttctatctcatcctttcttttagttttatttttatttttttatcttgggtaaaaaaaatcatgggtgttttcacttctgaaagcgaacacgtttcccccgtctctgctgcaaaattatacaaagctattgtcctagatgccagcaatgtcttcccaaaagcattgccaaatttcattaagagcgtagaaaccattgaaggagatggagggccaggaaccattaagaagcttactcttgctgaaggtttaggttatgtgaagcaccacgtagatgcaattgacacagaaaactatgtgtacaactatagtgtgattgaaggcagtgcattgtcngagccattggagaagatatgttatgagtacaaactggtggcaaccc

SEQ ID NO: 25860 - DNA, 462 bp, Glycine max
  Clone ID: LIB3051-112-Q1-K1-F7
cccacgcgtccgaaaatattttcttctatctcatcctttcttttagttttatttggagttgtttatcttgggtaaaaaaaatcatgggtgttttcacttctgaaagcgaacacgtttcccccgtctctgctgcaaaattatacaaagctattgtcctagatgccagcaatgtcttcccaaaagcattgccaaatttcattaagagcgtagaaaccattgaaggagatggagggccaggaaccattaagaagcttactcttgctgaaggtttaggttatgtgaagcaccacgtagatgcaattgacacagaaaactatgtgtacaactatagtgtgattgaaagcagtgcattgtccgagccattggagaagatatgttatgagtacaaactggtggcaaccccaaatggaagatccattgtgaagtccacaagcaaatactatacccaaggtgatgagcaac

SEQ ID NO: 25861 - DNA, 416 bp, Glycine max
  Clone ID: LIB3051-095-Q1-K1-F12
ccttgttcctccaaaattctatgtggtgttgcagatggtgatgattactgcttgggtgagtgaccttttcactggtatgggtggttgttttggatgctgtatgaaacccacaccaattattgctgtggatgaacctgcaaagggactaagaattcaggggcagacagtaagaaaaccacacatatcagatggtttctggagttcaagcacttgtgatctggataacagcaacattcaatctcagagaagtatctcgtctgtcagtacattaaatcaaattctctatcatagcggtggaacttctaccccaggcgccaatcctgaatttgtaaacccaggtcttcttctttggaatgagagcaggcttcagtgggttggaagtggcaaatctaggaagcataaccaacaaaaaagag

SEQ ID NO: 25862 - DNA, 388 bp, Glycine max
  Clone ID: LIB3051-061-Q1-K1-G12
aacaaattgaagcactatcagaagaagaacgtggtcaaattatgccgactttgtcagagagattaaagctttcaaagttgcagccaatttccacagatggcatggacatgggtacagaaggtggtggtgctgctggactgaaggttgaggagaaaaaggcagagaaaacagcttttgatgtgaagttggagaaatttgatgctgctgcaaagatcaaggtgattaaggaggtaagagcatttaccaacctaggattgaaagaggccaaagatcttgttgaaaaggttccagttgtgctaaaacaaggagtcacaaaagaggaggcaaatgaaataatagaaaaaataaaagctgctggaggagttgcagtcatggagtagaattttga

SEQ ID NO: 25863 - DNA, 438 bp, Glycine max
  Clone ID: LIB3051-002-Q1-E1-B7
attgtttccttttgagacccgacgacagtacttttattctaccgcatttgggttatctcgtgcactgtatcgacttcaacagcagcaaggtgctgatggccatggttcaacaactgagagggaggtgagagttgggagattgcagcgccaaaaggttcgtgtctctcgaaatcgtgtcctggattctgctgcaaaagttatggagatgtattctagccaaaaagctgtacttgaagtagaatattttggtgaagttggcactggtctgggtcccacccttgagttttatacaattctaagtcatgatttgcaaaaagttggactgcaaatgtggagattctagtcttcagacaaacatcaaatgggaatagatggagatgaaaagaacaagaacagtgcaagctccgggcctaatttggctggagatggggaacttgt

SEQ ID NO: 25864 - DNA, 440 bp, Glycine max
  Clone ID: LIB3051-004-Q1-E1-B11
atttttcttctttcggactcagcatcgtccccctccactggcgcaaccccaagaccattctcccgatggccctctccattaacaaccatccgcctcgacgactccgtctcctcctcatccgcgtcactctcctcctcatcatcagcatcgacaacgccatcagcaccctcactgtgcccattgttaatcccaaagggccgatcctcctcagcgccgtcaatctcgccgctcccagggtcatcctcttcctcctcctcctcctcatcctcctcctcgtcgtcactctcgggcctctcgttctcctccgcgtccatcttgtccaagtacttcaacgacttgatcaacccgaaaaccctatatcgatagtccttcacgcgcgtcacggggcactcgtacagattcagcgacaccagcttcaactgcgcgagcggtgcgagatc

SEQ ID NO: 25865 - DNA, 416 bp, Glycine max
  Clone ID: LIB3051-027-Q1-K1-A1
ctctaagaaaccaaaaagatgaagcaaatcgacgacggcgatgacgagcagcgatccctctcccctctgccggaacaggtcctggagaacgtcctggaaagcgtgctccacttcctcacctcccgtcgcgaccgcaacgccgcctcactggtctgcaagtcctggtaccgcgccgaggccctcacccgccccgacctcttcatcggcaactgctacgccgtttccccccggcgcgccaccgcccgcttcccccgcgtccggtccctgaccatcaagggcaagccccgcttcgccgacttcgacctcatgcccctgaactggggggcccacttcaccccctgggccaccgcactctcccaatcttacccttccttcctcaacaaactccaccttaaacgcatgtccctcaccgacca

SEQ ID NO: 25866 - DNA, 384 bp, Glycine max
  Clone ID: LIB3051-016-Q1-E1-B11
aggaagaacaagttcaaaacctcgtccaatcaacggtcgacgcttacggacaagtggacataatgttcagcaacgctgggatccttagtccctcccaacagacggtgcccgaactggacatgtcccaactagacaggctgttcgcggtcaacgtacggggaatggcggcgtgcgtgaaacacgcggcgcgtgcgatgttggaggggcgcgtgaggggaagcatagtgtgcacggcgagcgtgggtgggagccacggtgggccaaatgcgacggactacataatgtcgaagcacgcggtgttggggttgatgcgttcggcgagcgtgcagcttgcggaacacgggataagagtgaactgcgtctcacccaatgggttggcaacgc

SEQ ID NO: 25867 - DNA, 412 bp, Glycine max
  Clone ID: LIB3051-009-Q1-E1-H2
agccgcttaagttaagactataacaacagccaagcgcattggcctatatatatcaacacaaaaactctttgattcagaaacatacatatatattcacacaaatatccatttatatatacatatatatagttctatatggcaatgacaacggtggtgtttgtcttgtgcatctttgtagtgttgaatgcaagtgcctctgatgccactcgcttattgctgaacaaaactgcaacaggtaacgtgtccagagagaagattgagagatacttacttgaaaatggactcggccagacaccccccatgggatggaatagctggaaccactttggctgtgatattaatgaaagtttaattcgagaaacagctgatgcattggtgtcatcgggccttgctgccttgggatacaaataca

SEQ ID NO: 25868 - DNA, 386 bp, Glycine max
  Clone ID: LIB3051-013-Q1-E1-C12
aatatcaatttacatatacatatatatagttctatatggcaatgacaacggtggtgtttgtcttgggcatctttgtagtgttgaatgcaagtgcctctgatgccacgcgcttattgctgaataaaactgcaataggtaacgtgtccagagagaacattgagagatacttacttgaaaatggactcggtcagacaccccccatgggatggaatatctggaaccacgttggctgtgatattaatgaaagtttaattcgagaaacagctgatgcattggtgtcatcaggccttgctgctttgggatacatatacattaatttagatgattgttgggcctaacttaatcgagaccatcatggaaatatggttcccaaggcttcaacattt

SEQ ID NO: 25869 - DNA, 399 bp, Glycine max
  Clone ID: LIB3051-023-Q1-K1-D5
cagccaagcgcattggcctatatatatcaacacaaaaactctttgattcagaggcagacatatatattcacacgaatatccatttatatatacatatatatagttctatatggcaatgacaacggtggtgtttgtcttgtgcatctttgtagtgttgaatgcaagtgcctctgatgccactcgcttattgctgaacaaaactgcaacaggtaacgtgtccagagagaagattgagagatacttacttgaaaatggactcggccagacaccccccatgggatggaatagctggaaccactttggctgtgatattaatgaaagtttaattcgagaaacagctgatgcattggtgtcatcgggccttgctgctttgggatactaatacatttaattaaatga

SEQ ID NO: 25870 - DNA, 289 bp, Glycine max
  Clone ID: LIB3051-036-Q1-K1-A1
attcacacaaatatccatttatatatacatatatatagttctatatggcaatgacaacggtggtgtttgtcttgtgcatctttgtagtgttgaatgcaagtgcctctgatgccactcgcttattgctgaacaaaactgcaacaggtaacgtgtccagagagaagattgagagatacttacttgaaaatggactcggccagacaccccccatgggatggaatagctggaaccactttggctgtgatattaatgaaagtttaattcgagaaacagctgatgcattggtgtc

SEQ ID NO: 25871 - DNA, 423 bp, Glycine max
  Clone ID: LIB3051-047-Q1-K1-B8
gccgcttaagttaagactataacaacagccaagcgcattggcctatatatatcaacacaaaaactctttgattcagaaacatacatatatattcacacaaatatccatttatatatacatatatatagttctatatggcaatgacaacggtggtgtttgtcttgtgcatctttgtagtgttgaatgcaagtgcctctgatgccactcgcttattgctgaacaaaactgcaacaggtaacgtgtccagagagaagattgagagatacttacttgaaaatggactcggccagacaccccccatgggatggaatagctggaaccactttggctgtgatattaatgaaagtttaattcgagaaacagctgatgcattggtgtcatcgggccttgctgctttgggatacaaatacattaatttagatg

SEQ ID NO: 25872 - DNA, 449 bp, Glycine max
  unsure (1)..(449): unsure at all n locations
  Clone ID: LIB3051-047-Q1-K1-G3
tgccgcttaagttaagactataacaacagccaagcgcattggcctatatatatcaacgcaaaggctctttgattcagaaacatacatatatattcacacaaatatccatttatatatacatatatatagttctatatggcaatgacaacggtggtgtttgtcttgtgcatctttgtagtgttgaatgcaagtgcctctgatgccactcgcttattgctgaacaaaactgcaacaggtaacgtgtccagagagaagattgagagatacttacttgaaaatggactcggccagacaccccccatgggatggaatagctgggaccactntggctgtgatattaatgaaagtttaattcgagaaacagctgatgcattggtgtcatcgggccttggctgttttgggatacaaatacataatattagatgattggtgggccgaacttaatcgag

SEQ ID NO: 25873 - DNA, 405 bp, Glycine max
  Clone ID: LIB3051-050-Q1-K1-A1
cccacgcgtccgtgcattggtgtcatcgggccttgctgctttgggatacaaatacattaatttagatgattgttgggccgaacttaatcgagaccatcagggaaatatggttcccaaggcttcaacatttccttcaagaattaaagctctggctcattatgttcatgggaaaagtttgaagttggggatatattcagatgcaggaaatcaaacttgcagtaaacgtatgcctggatcactaggacacgaagaacaagatgcaaaaacatttgcttcttggggaagtgactacttgaagtatgataattgtgaaaataatggtatattagccacagaaaggtatccaccaatgagtgaagctttgttaaaaactggaaggccaatcttcttctctatgtgtgaatg

SEQ ID NO: 25874 - DNA, 375 bp, Glycine max
  unsure (1)..(375): unsure at all n locations
  Clone ID: LIB3051-050-Q1-K1-H8
cccacgcgtccgcccacgcgttcggactataacaaccgccaaacgcattggcctatgtatatcaacaccaaaactctttgaatcaaaaacatacttatttattcacacaaatatncatttatatatacatatatatagttctatatggcaatgacaacggtggtgtttgtcttgtgcatctttgtagtgttgaatgcaagtgcctctgatgccactcgcttattgctgaacaaaactgcaacaggtaacgtgtccagagagaagattgagagatacttacttgaaaatggactcggccagacaccccccatgggatggaatagctggaaccactttggctgtgatattaatgaaagtttaattcgagaaacagct

SEQ ID NO: 25875 - DNA, 407 bp, Glycine max
  Clone ID: LIB3051-066-Q1-K1-C2
caacagccaagcgcattggcctatatatatcaacacaaaaactctttgattcagaaacatacgtatgtattcacacaaatatccatttatatatacatatatatagttctatatggcaatgacaacggtggtgtttgtcttgggcatctttgtagtgttgaatgcaagtgcctctgatgccactcgcttattggctgacaaaaactgcacagggaaacgtgtccaaagagaaaatgggaagatactaactggaaaatggactcggccaaacacccccaatggaatggaatagctggaacaactttggttggaatataaatgaaggttaaattcaggaaacagttgtggcatggtggtaatcggccttggtggttttggattccaattccttaatttagatgaatggt

SEQ ID NO: 25876 - DNA, 366 bp, Glycine max
  Clone ID: LIB3051-079-Q1-K1-G1
atttgcttcttggggagttgactacttgaagtatgataattgtgaaaataatggtgtagtagccacagaaaggtatccaccaatgagtgaagctttgttaaaaactggaaggccaatcttcttctctatgtgtgaatggggatggcaagacccagcaacttgggccaaaactgtgggaaatagttggagaacaacaggggatattgaagataactggaatagtatgacttccatagcagatgcaaatgacagatgggcatcttatgctggaccgggaggatggaatgatcctgatatgctggaagttggaaatggaaggatgaccacagaagaatatcgtgcccatttcagcatatgggctttagc

SEQ ID NO: 25877 - DNA, 340 bp, Glycine max
  Clone ID: LIB3051-079-Q1-K1-G7
gccgaacttaatcgagaccatcagggaaatatggttcccaaggcttcaacatttccttcaggaattaaggctctggctcattatgttcatgggaaaggtttgaagttggggatatattcagatgcaggaaatcaaacttgcagtaaacgtatgcctggatcactaggacacgaagaacaagatgcaaaaacatttgcttcttggggagttgactacttgaagtatgataattgtgaaaataatggtatattagccacagaaaggtatccaccaatgagtgaagctttgttaaaaactggaaggccaatcttcttctctatgtgtgaatggggatggcaag

SEQ ID NO: 25878 - DNA, 396 bp, Glycine max
  Clone ID: LIB3051-093-Q1-K1-B6
atgacttccatagcagatgcaaatgacagatgggcatcttatgctggaccgggaggatggaatgatcctgatatgctggaagttggaaatggagggatgaccacagaagaatatcgtgcccatttcagcatatgggctttagctaaggctcctttattggttggttgtgatattcaagcaatggataataccacatatgaactgataagcaaccgagaagttgttgcagtaaatcaagacaaacttggaatacagggaaagaaggtgaaaaacaataatggtttggaggtgtggacaggtcctcttcgtggtaacaaggtagcagtgatcttatggaacagaagttcatcaaatgcatcagtgactggatgttggtctgacattggcttggaacca

SEQ ID NO: 25879 - DNA, 253 bp, Glycine max
  Clone ID: LIB3051-098-Q1-K1-H5
gccaatcttcttctctaggagtgggtggtgttggcaagacgcagcaacttgtgccaaaactgtgggaaatagtatgagaacaacatgggatattgaagataactggtatagtatgacttccatagcagatgcaaatgacagatggtcattatatgctgtaccgggaggatggaatgaacctgatatgctgtaagttgtaaatggatggatgaccacataataatatcgtgcccattatatcatatgggcttta

SEQ ID NO: 25880 - DNA, 440 bp, Glycine max
  unsure (1)..(440): unsure at all n locations
  Clone ID: LIB3051-102-Q1-K1-B2
cggacgcgtgggtttcttcattatttcagctgatgcattggtgtcatcgggccttgctgctttgggatacaaatacattaatttagatgattgttgggccgaacttaatcgagaccatcagggaaatatggttcccaaggcttcaacatttccttcaggaattaaggctctggctcattatgttcatgggaaaggtttgaagttggggatatattcagatgcaggaaatcaaacttgcagtaaacgtatgcctggatcactaggacacgaagaacaagatgcaaaaacatttgcttcttggggagttgactacttgaagtatgataattgtgaaaataatggtatattagccacagaaaggtatccaccaatgagtgaagctttgttaaaaactggaaggccaatcttcttctctatgtgtgaatggngatggcaagacc

SEQ ID NO: 25881 - DNA, 377 bp, Glycine max
  Clone ID: LIB3051-110-Q1-K1-C12
catcggtggtgtttgtcttgtgcatctttgtagtgttgaatgcaagtgcctctgatgccagtcgcgtattgctgaacaaaactgctacaggtaacgtgtccagagagaagattgagagatacttacttgaaaatggactctgccagacaccccccatgggatggaatagctggaaccactttggctgtgatattaatgaaagtttaattcgagaaacagctgatgcattggtgtcatcgggccttgctgctttgggatacaaatacattaatttagatgattgttgtgccgaacttaatcgagaccatcagggaaatatggttcccaaggcttcaacatttccttcatgaattaaggctctggctcattatgttcat

SEQ ID NO: 25882 - DNA, 280 bp, Glycine max
  Clone ID: LIB3051-015-Q1-E1-A9
gactctaggattgctctggttggaccaatggagctgggaagagtacgttactgaagctaatgactggtgatttggaacctctagatggcatggttcgacgccacaatcaccttcggattgcacaatttcaccagcacttggctgagaagctagacttggaaatgtctgccctccagtatatgataaaagaataccctggaaacgaagaggagaggatgagagcagccattgggaaatttggactgtctggcaaagcgcaggtcatgcctatgaagaattt

SEQ ID NO: 25883 - DNA, 432 bp, Glycine max
  Clone ID: LIB3051-006-Q1-K1-E2
gaaactttttcacccccttgataccgcttcaattcaccaatggcaagtcgaggaaaaaccgagggatctggcacaaccaaaaagggcatctcccgaagcaacaaagctggtctccaattcccagttggtcgtattgctcgatacctcaagattggcaagtatgctgaccgtatcggttctggcgctcccgtgtatctcgcctctgttcttgaatatcttgctgctgaggttttggagttagcggggaatgccgcaatggacaacaagaagactcgtattatgcctcgccatatccaattggctgttaggaatgatgaaaagttgagcatgcttctcggagatgtgactatcgccagtggtggtgtgacacctaacattcacaacatgttgctgcctaagaaggttgggacctcgaccttaacctttatgggt

SEQ ID NO: 25884 - DNA, 212 bp, Glycine max
  Clone ID: LIB3051-007-Q1-E1-H8
ccacgaatccactttgtcattgaagctttttcacccccttgataccgcttcaattcaccaatggcaagtcgaggaaaaacccagggatctggcacaaccaaaaagggcatctcccgaagcaacaaagctggtctccaattcccagttggtcgtattgctcgatacctcaagattggcaagtatgctgaccgtatcggttctggcgctcccgt

SEQ ID NO: 25885 - DNA, 407 bp, Glycine max
  Clone ID: LIB3051-059-Q1-K2-C12
ctttttcacccccttgataccgcttcaattcaccaatggcaagtcgaggaaaaacccagggatctggcacaaccaaaaagggcatctcccgaagcaacaaagctggtctccaattcccagttggtcgtattgctcgatacctcaagattggcaagtatgctgaccgtatcggttctggcgctcccgtgtatctcgcctctgttcttgaatatcttgctgctgaggttttggagttagcggggaatgccgcaatggacaacaagaagactcgtattatgcctcgccatatccaattggctgttaggaatgatgaagagttgagcaggcttctcggagatgtgactatcgccagtggtggtgtgacacctaacattcacaacatgttgctgcctaagaaggttgggacc

SEQ ID NO: 25886 - DNA, 434 bp, Glycine max
  Clone ID: LIB3051-020-Q1-E1-A1
ccgggtcgaaccagccttcgacaaggcttccggtggaattaccacaaacattgcatgttcagctccaatttctgcagtttatactttctcctatgaatcagttaacgcagctttgcttcctcatcttccaaaggagtattgttcttttgcccattgcgtgggaagtgttgtgcaagcattgccacctctttcatttttactcccagtgagcgaataaagcagcagatgcaagttggttctcattatcgcaactgctgggatgtattggttggaattatcagaaatggtggtttttcctccctatatgcaggttggagagctgtactattccggaatgttccacattcaattatcaagttttacacatatgaaagcttgaagcaagtgatgccatctagtattcaacccaactcggttaagacggtaatgtgtgg

SEQ ID NO: 25887 - DNA, 398 bp, Glycine max
  unsure (1)..(398): unsure at all n locations
  Clone ID: LIB3051-043-Q1-K1-A9
tttctctgcaaaagcaccgatctccatcaagctccatgcttccacctcccttttcttgtcttccaagtcctccttcaaaacgggaagactctgcttccagttatgctccactttgcaagaggtagcagcaacagaagaaacacctgagctaacgcaaccaacagacaacgtaaagaagctgtacgtggttaacttgtcttggtctctgacggcggcagacatcaatgacctctttgcccaaagcggaaccgtaaccgacgtcgagagcaaagacgggaggagcaagggctatgccttcgttactatggcttccggggaagaggctcangctgctgntgataaatttgactcttatgaattatcaggacggataataaaggtagaacttgcaaagagat

SEQ ID NO: 25888 - DNA, 405 bp, Glycine max
  Clone ID: LIB3051-025-Q1-K1-A1
cctttttccaaagcgggaccagcacgaagaactatactagctcggtcggaccggaccggtagttaagagagggatcgaattcgaagcgaagttagacggagaaagcgagaatgatgttggacggaaccgaagacgaagagaagtttctcgccgccggaatcgccggccttcagcagaattccttctacatgcaccgtgcattggactcgaacaatctcagggacgctttgaagtattcggctcagatgctctccgagctcaggacttccaagctttcgcctcacaagtactacgaactatacatgcgcgcctttgatcagttaaggaagctggagatgttcttcgaggaagagactcgtcgcggttgctccattattgatctttatgaactcgtccaagacgccg

SEQ ID NO: 25889 - DNA, 378 bp, Glycine max
  unsure (1)..(378): unsure at all n locations
  Clone ID: LIB3051-017-Q1-E1-B8
atcagcttagtgttgcggtggtggagggtttccgtggcctagcagtcacattcaaactagttaaccctaaaaaaggggtcattagggtttctactgacttgaacatcaaaacctccctaactaacacaagttgtagtgagtccacggtctggaagctagatgcctttgatgattcaactggacagtggtttgtgaccactggtggtgtgttgggaaaccctggcaaggataccatcgacaactggttcaagattgaggagtatgatgatgattacaagctcgtgttttgccccacagtgtgcaacttctgcaagcctttgtgtangaatgttggggtgtttagggatagtaatgggaaccagcgcgtggctctcactg

SEQ ID NO: 25890 - DNA, 420 bp, Glycine max
  Clone ID: LIB3051-019-Q1-E1-G7
agaagtttatgtatcttgcattcctacttctatttgttttctctagccaattcttgcttggaggagcagatgcttcccccagacaagtgattgacacagaaggcaagaaagttcgagctggcgtagattactatatccgaccggtcccaacaaccccatgtgatgggcgtgggccgtgtgtggttggaagtggctatgttctcatagcaaggtcatccaaccacacttgccctcttagtgttgcggtggtggagggtttccgtggcctagcagtcacattcaaactagttaaccctaaaaaaggggtcattagggtttctactgacttgaacatcaaaacctccctaactaacacaagttgtagtgagtccacggtctggaagctagatgccctttgatgatcaactggacagtggtttg

SEQ ID NO: 25891 - DNA, 444 bp, Glycine max
  Clone ID: LIB3051-028-Q1-K1-D11
cccacgcgtccgcccacgcgttcgggttaaccatgaagtttatgtatcttgcattcctacttctatttgttttctctagccaattcttgcttggaggagcagatgcttcccccagacaagtgattgacacagaaggcaagaaagttcgagctggcgtagattactatatccgaccggtcccaacaaccccatgtgatgggcgtgggccgtgtgtggttggaagtggctatgttctcatagcaaggtcatccaaccacacttgccctcttagtgttgcggtggtggagggtttccgtggcctagcagtcacattcaaactagttaaccctaaaaaaggggtcattagggtttctactgacttgaacatcaaaacctccctaactaacacaagttgtagtgagtccacggtctggaagctagatgcctttgatgattcaactggac

SEQ ID NO: 25892 - DNA, 376 bp, Glycine max
  Clone ID: LIB3051-029-Q1-K1-G3
accacgcgtgcgattggatctctctatccaattcttgcttggaggagcagatgctggccccagacaagtgattgacacagaacgcaagaaagttcgagctggcgtagattactatatccgaccggacccaacaaccccatgtgatgggcgtgggccgtgtgtggttggaagtggctatgttctcatagcaaggtcatgcaaccacacttgccctcttagtgttgcggtggtggagggtttccgtggcctagcagtcacattcaaactagttaaccctaaaaaaggggtcattagggtttctactgacttgaacatcaaaaccttcctaactaacacaagttgtagtgagtccacggtttggaagctagatgccctt

SEQ ID NO: 25893 - DNA, 333 bp, Glycine max
  Clone ID: LIB3051-037-Q1-K1-F3
taaccatgaagtttatggatcatgcattcctacttcgatttgttggctatagccaacacgtgcttggaggagcagatgcttacagcagacaagtgattgacacagaaggcaagaaagttcgcgctggcgtagattactatatccgaccggtgccaacaaccccatgtgatgggcgtggcccgagatgggaatggaagtggctatggactcatagcaaggtcattcaaccacacttgcgctgttagtgtcgctgtggtagacggtttccgtggcctaacagtcacattcaaactagttaaccctaaaaaaggggtcatcaaggattctactgac

SEQ ID NO: 25894 - DNA, 354 bp, Glycine max
  Clone ID: LIB3051-038-Q1-K1-F12
caactggacagtggtttgtgaccactgttggtgtgttgggaaaccctggcaaggataccatcgacaactggttcaagattgaggagtatgatgatgattacaagctcgtgttttgccccacagtgtgcaacttctgcaagcctttgtgtaggaatgttggggtgtttagggatagtaatgggaaccagcgcgtggctctcactgatgagccttacaaagttaggttccagccatctgcttgaagcttcattaatgcatatgcatgaaaaaagatatgtaattaatgagaacatgatatttcatctggaaaattaagcatcatcatcatgcacgaataaaattgatgcttttgtc

SEQ ID NO: 25895 - DNA, 413 bp, Glycine max
  Clone ID: LIB3051-044-Q1-K1-A1
gtttatgtatcttgcattcctacttctatttgttttctctagccaattcttgcttggaggagcagatgcttcccccagacaagtgattgacacagaaggcaagaaagttcgagctggcgtagattactatatccgaccggtcccaacaaccccatgtgatgggcgtgggccgtgtgtggttggaagtggctatgttctcatagcaaggtcattcaaccacacttgccctcttagtgttgccgtggtggagggtttccgtggcctaacaagcacattcaaacttggtaaccctaaaaaaggggtcaataagggttctactgacctggacattaaaaacctcctaactaacacaagttggagtgagtccacggtctggaagctagatgccttggatgattcaactggacagtggt

SEQ ID NO: 25896 - DNA, 422 bp, Glycine max
  Clone ID: LIB3051-050-Q1-K1-A2
cccacgcgtccggtttatgtatcttgcattcctacttctatttgttttctctagccaatgcttgcttggaggagcagatgcttcccccagacaagtgattgacacagaaggcaagaaagttcgagctggcgtagattactatatccgaccggtcccaacaaccccatgtgatgggcgtgggccgtgtgtggttggaagtggctatgttctcatagcaaggtcatccaaccacacttgccctcttagtgttgcggtggtggagggtttccgtggcctagcagtcacattcaaactagttaaccctaaaaaaggggtcattagggtttctactgacttgaacatcaaaacctccctaactaacacaagttgtagtgagtccacggtctggaagctagatgcctttgatgattcaactggacagt

SEQ ID NO: 25897 - DNA, 451 bp, Glycine max
  Clone ID: LIB3051-069-Q1-K1-H10
cccacgcgtccgcccacgcgtccgaagtttatgtatcttgcattcctacttctattgggtttgtctagccaattcttgcttggaggagcagatgcttcccccagacaagtgattgacacagaaggcaagaaagttcgagctggcgtagattactatatccgaccggtcccaacaaccccatgtgatgggcgtgggccgtgtgtggttggaagtggctatgttctcatagcaaggtcatccaaccacacttgccctcttagtgttgcggtggtggaaggtttccgtggcctagcagtcacattcaaactagttaaccctaaaaaaggggtcattagggtttctactgacttgaacatcaaaaccttcctaactaacacaagttgtagtgagtccacggtctggaagctagatgcctttgatgattcaactggacagtggtttgtgaccactg

SEQ ID NO: 25898 - DNA, 329 bp, Glycine max
  Clone ID: LIB3051-082-Q1-K1-G4
cccacgcgtccggtagattactatatccgaccggtcccaacaaccccatgtgatgggcgtgggccgtgtgtggttggaagtggctatgttctcatagcaaggtcattcaaccacacttgccctcttaatgttgcggtggtggagggtttccgtggcctaacaatcacattcaaactagttaaccctaaaaaaggggtcattagggtttctactgacttgaacatcaaaacctccctaactaacacaagttgtagtgagtccacggtctggaagctagatgcctttgatgattcaacttggcaactgtttgtgaccacttgtggtgtgtt

SEQ ID NO: 25899 - DNA, 432 bp, Glycine max
  Clone ID: LIB3051-082-Q1-K1-H10
cccacgcgtccgggttaaccatgaagtttatgtatcttgcattcctacttctatttgggttctctagccaattcttgcttggaggagcagatgcttcccccagacaagtgattgacacagaaggcaagaaagttcgagctggcgtagattactatatccgaccggtcccaacaaccccatgtgatgggcgtgggccgtgtgtggttggaagtggctatgttctcatagcaaggtcatccaaccacacttgccctcttagtgttgcggtggtggaaggtttccgtggcctagcagtcacattcaaactagttaaccctaaaaaaagggtcattagggtttctactgacttgaacatcaaaaccttcctaactaacacaagttgtagtgagtccacggtctggaagctagatgcctttgatgattcaactggac

SEQ ID NO: 25900 - DNA, 454 bp, Glycine max
  unsure (1)..(454): unsure at all n locations
  Clone ID: LIB3051-085-Q1-K1-E7
gttaaccatgaagtttatgtatcttgcattcctacttctatttgttttctctagccaattcgggcttggaggagcagatgcttcccccagacaagtgattgacacagaaggcaagaaagttcgagctggcgtagattactatatccgaccggtcccaacaaccccatgtgatgggcgtgggccgtgtgtggttggaagtggctatgttctcatagcaaggtcatccaaccacacttgccctcttagtgttgcggtggtggagggtttccgtggcctagcagtcacattcaaactagttaaccctaaaaaaggggtcattagggtttctactgacttgaacatcaaaacctncctaactaacacatgttgtagtgagtccacggtctggaagctagatgcccttgatgattcaactggacagtggtttgtgaccactggtggtgtgttgggaaac

SEQ ID NO: 25901 - DNA, 409 bp, Glycine max
  Clone ID: LIB3051-087-Q1-K1-B4
cccacgcgtccgcccacgcgtccggttaaccatgaagtttatgtatcttgcattcctactgctattggttttctctagccaattcttgcttggaggagcagatgcttcccccagacaagtgattgacacagaaggcaagaaagttcgagctggcgtagattactatatccgaccggtcccaacaaccccatgtgatgggcgtgggccgtgtgtggttggaagtggctatgttctcatagcaaggtcatccaaccacacttgccctcttaagtgtgccgtggtggaaggtttccgtggcctaacagtcacattcaaactagttaaccctaaaaaaggggtcattagggtttctactgacttgaacatcaaaaccttcctaacttacacaagttgtagtgagttcaccgtc

SEQ ID NO: 25902 - DNA, 416 bp, Glycine max
  Clone ID: LIB3051-107-Q1-K1-H5
ggttaaccatgaggtgtatgtatcttgcattcctacttgtatgtgtttgctgtagccaatggtagcttggaggagcatatgcttcccccagacaagtgattgacacataaggcaagaaagttcgagctggcgtagattactatatccgaccggtcccaacaacccgatgtgatgggcatggaccgtgtgtggcttgaagtggctatattctcatagcacggtgatgcaaccacacttgacctcttagcgttgcagtggtggacgttagacgtggcctatcagtcacattcaacctaggtcaccctaataaaggggtcattagggtgactactgagttgaacatcaaaaccttcctaactaacagacgatggatcgaatccacagtatggaagctagatgcctatgatgattcaact

SEQ ID NO: 25903 - DNA, 374 bp, Glycine max
  unsure (1)..(374): unsure at all n locations
  Clone ID: LIB3051-045-Q1-K1-A1
gattcattagaaagtcctctccagatattgntttgttctttgaacggcttgattttatcaatgctggttatgttgacttcccacttttgaaacttgtaactgaagtgtttggctcggcaatttggttcaacaccatcatagtcatgactcattcttcctctgccattccagaaggacctgatggttatacttttaattatgagtcatatatttcttattgtactaatatagtacagcaccatatacaacaggcagtgtttgattctaaggtttgaaaccctgtacttttggtggagaaccattctcgatgcccacanaatattatgggagagaaaattctcccaaatggacaagtttggagatctcaactcttg

SEQ ID NO: 25904 - DNA, 433 bp, Glycine max
  Clone ID: LIB3051-048-Q1-K1-A1
cagaaatctcgtcttctccgaaaacgtcctgcgcgtaacaaactcttatataacaacacgccttctggttctcttttcagtttacgtttacgtttacgcattcactcgcttatatcgtcttcctccgtttttttctttctcgtgaaacgcttcttccaactatgcctgccccattgattctggttactggcggagccggttacatcggtagccacaccatccttcagcttctcttcggcggttaccatgtcttcgccgtcgacaacttcgacaattcttccgaaaccgccatcaacagagtcaaggaactcgccggagaattagcaaataacctttccttttgcaagcttgacttgcgggacagagctgccctcgagaaaatattttcaaccgtaaagtttgatgccgtcatacattttgctgggcttaaagc

SEQ ID NO: 25905 - DNA, 345 bp, Glycine max
  Clone ID: LIB3051-038-Q1-K1-B7
cccacgcgtccggtcaaaaccaagctaaaaggtcatcagaagagaattactggtcttgccttttctcatgttctaaatgtgcttgtctcatctggagctgactctcagttgtgtgtttggagcacagatggatgggaaaagcaagcaagtaaattcctacaaatgcccagtggacgaccgtctgcacctcttgcagatactcgggtccaatttcatctagacccgacacatttactggctgttcatgtaactctaatagccctatattgtggcacccaagttggaatgtattaagcagttttcacctctggaagccgattcaatcacacatgctgcataactctg

SEQ ID NO: 25906 - DNA, 439 bp, Glycine max
  Clone ID: LIB3051-042-Q1-K1-F12
tgatactcgaaatttagctgatgtgaaacccagaattgttgatgaaggtgtggaaaaatctaggatatggaagctgacagaaattaatgaaccatcacaatgccgctccctgaaacttcctgatagtttatcatctatgagggtttctaggttaatttatacaaatcagggggttgcaattttggctttggcagcaaatgctgttcacaagctttggaaatggcagagaaatgagcggaacactactgggaaggcaactgcaagtattcaaccacaactatggcaaccttctagtggaatactgatgactaatgatataagtgatactaacccagaggatgctgtgtcatgttttgcactgtcaaagaatgattcatatgttatgtctgcttcagggggaaaaatttctctattcaatatgatgacatttaagacaatg

SEQ ID NO: 25907 - DNA, 387 bp, Glycine max
  Clone ID: LIB3051-050-Q1-K1-A9
cacaaacagaggctacgtacgatcaaattaattaagatggcggaagtgaagaacaaacaagtggttctgagggactatgtgagtggttttcctaaagaatcccacatgaacatagttgaaaggaccacaatattgaaactttcacaaggttccaatgaatggcttttaaaaatctctacctttcctgtgacccttacatgaagaatgcttcatgaccaaggtggaaaggcctcgacgtgtttggcacctatacacctggctctccattaacagggtatggagtgtccaaagtcctagaatctggacacccagattacaagaaaggtgatttaatggtgggatctacaaaatgggaagaattcaacttggtgtccccaactcaaatac

SEQ ID NO: 25908 - DNA, 418 bp, Glycine max
  Clone ID: LIB3051-108-Q1-K1-G9
aagaatccgacatgaatattgtcgaaagtaccataacattgaagcttccacaaggttccaatgatgtcttgctcaaaaatttgtacttgtcttgtgatccgtatatgaggaatctcatgaacaagcccgaaggccctcccaatagtcgtgcttacactcctggctctccattaataggatatggtgtgtctaaaagtctggaatctgggcacccagattataaggaaggtgatttagtgtggggctttaccaaatgggaagagtatagcttgttaccctcagctcaaatactcttcaaaattgagcacactgatgttccacttacctactacactggaattcttggtatgccaagagtgactgcatatgcaagtctatttgaagtaggatctcttcagaaaggagaaaatgtttttgg

SEQ ID NO: 25909 - DNA, 426 bp, Glycine max
  Clone ID: LIB3051-108-Q1-K1-H10
ggccaatttgctaaattgactgattgttatgtggttggaagtgctggaagtaaagagaaggtggatcttttgaagaataaattaggatttgatgaagcctttaactacaaagaagagtcagacctcaatgcaactttgaaaagatactttccagaaggcattgacatatactttgagaatgttgggggcaagacacttgatgcagtactcccaaatatgagagttcttggtcgcatacctgtttgtggaatggtctcacagtacaatctgacacaacctgaaggtgtaacaaatttggcaaatcttatatttaagcggattcgaatgcaaggttttattgttggtgaattctatcacctatatccaaaattcttggagtttgtcctgcctcatattagagaaaggaaggttgtgtatgtggaagat

SEQ ID NO: 25910 - DNA, 414 bp, Glycine max
  Clone ID: LIB3051-041-Q1-K1-B7
cccacgcgtccgaaataatgaaaaagtacaacctaagagagaagggaggttctgaacatcagacatatgctttgggaattaaagaggtttgggaaattgatgagaaaaagcatcaacctggtgctgtaatccacacattgggatggcccttggatcataaaacatacggaggatcttttctgtatcacatgaaagataaacaaatatctataggccttgtggttgctttaaactatcagaaccctttcatgaatccttatgaggaattccagaaactaaagcatcatcctgcaattaaatcatttctggaaggtggaacagttatccagtatggagctcgcactttaaatgaaagtggttttcagtttttcctggaggagcaattattggatgttcagctggcttcatgaatgt

SEQ ID NO: 25911 - DNA, 365 bp, Glycine max
  Clone ID: LIB3051-057-Q1-K1-A9
agaaggtcctagaacaattgaacgagttttctgatgaagatattgattctgctgcggaggcattgaatgatatgcctatcagaaagctatacatgttgattgagatggcagcgcaaggggagcaaggtggatctgcagaagccatcttttctggcaaagagaagattaatatcgctcatttctatgattgcctccaggatgttgttagataataagttgtcgtgttaagcgctttctcagttagagtgcatataatccttattgagttgaaatctcattttttttttacaacaattcattcctacattgcttgatactgttcagttgcagagtttgtgtgttggttggttgagctgatagttatt

SEQ ID NO: 25912 - DNA, 425 bp, Glycine max
  Clone ID: LIB3051-020-Q1-E1-G6
aacaaacccataaatcctctcaccaaataaacctcaatttattgcattgcataataccatgtcaatgaagttgtatgcttccctcacccttacggtgtggcttttcatggccacattttcgcgagcccaatacgttattgacacaaatggcgaacccgttgacaatgatgatgagtattacatcaggccagccataaccgacaacggagggcgtttcaccttgatcaaccgaaacgggtcgtgccctctctacgtgggtcttgaaaacaccgatacgccacttggttatccagtgaaatttacccattttgccctcaacgttcaagatgaggatataagggtgaacagcgacttgagaatcgaattcctggaagtttccacaacgtgtgtgcaatccacggaatggagggtgggtgagaaccaca

SEQ ID NO: 25913 - DNA, 427 bp, Glycine max
  unsure (1)..(427): unsure at all n locations
  Clone ID: LIB3051-065-Q1-K1-A5
cccacgcgtccgcataaatcctctcaccaaataaacctcaatttattgcattgcataataccatgtcaatgaagttgtatgcttccctcacccttacggtgtggcttttcatggccacattttcgcgagcccaatacgttattgacacaaatggcgaacccgttgacaatgatgatgagtattacatcaggccagccataaccgacaacggagggcgtttcaccttgatcaaccgaaacgggtcgtgccctctctacgtgggtcttgaaaacaccgatacgccactgggttatccagtgaaatttacccattttgccctcaacgttcaagatgaggatataagggtgaacagcgacttgagaatcgaattcgtggaagtttccacaacgtgtgtgcaatccacggaatgganggtgggtgagaacga

SEQ ID NO: 25914 - DNA, 333 bp, Glycine max
  Clone ID: LIB3051-044-Q1-K1-B7
gaataaacatgttctggttgtcggatctggcaattccggcatggagattgcgctggacttgtccaattttggtgccaaaccttccatcattgttcgcagcccggttcattttctttcgagggatatgatgtattatgcgtcgcttatgctgaattacttgtcgctgagtacggtggagaaggtgttggtgatggttagcaaggttgtgtatggagatctgagtgagtatgggataccgtatccgagtgaggggcctttcaccatgaagatgaagtatgccaagttcccaatcatcgatgtaggaactgtcaagaaaattaaatctcgagagat

SEQ ID NO: 25915 - DNA, 338 bp, Glycine max
  Clone ID: LIB3051-012-Q1-E1-A5
cgtcagatttccccaggaagcagtgggatctcagctggaacgattgttgcaattgtggttccaattacggtcgctgtgcttatatttatagtcggaatttgtttcttgagtagaagagcaaggaagaagcagcagggttctgtaaaggaaggaaaaactgcgtatgacatccccaccgtggactccttgcaattcgatttcagcacaattgaagcggccacaaacaagttctctgccgataacaagttggggggaaggtggatttggtgaggtttacaagggcactctttcaagtggacaagtagtagctgtcaagagactctccaaaagctctggac

SEQ ID NO: 25916 - DNA, 349 bp, Glycine max
  Clone ID: LIB3051-063-Q1-K1-H2
tctagatcgcgagcgccgcccttttttttttttgtttttttttttttttgatgtatataggttttaattgaatgaatcaacgggcttacaagaagaagaaatccgacaaatgcacatctaggaaataacagttgcaacaagaaaacaacataaattgcccataaactaaactatgtcaacggcattatatgatcaaaacagcaaaaccccctcttcctcaagttgcagatgagattcaaggttgttgctgagcatcaatgtagccagcatcaacaagaaccttctctttcttagccatctcaatgtcccggtcaaccatcatcttcacaagctgctcaaaccccacttt

SEQ ID NO: 25917 - DNA, 475 bp, Glycine max
  Clone ID: LIB3051-025-Q1-K1-A5
ccgggcccggaattcatggccgggtcgacccaagccgtccggcacgtctctctctctctctcgccatggctatggctatgcaaagcggaatcggagtctccaagatcctcatcatagcaggagcaggttacaccggcaccgtcctcatcaaaaacggaaaactctcggatttaatcggcgagcttcagttgctggtgaagggattggaaaaatctggggagcatgctgaaggtgaaggtgaatatgctgatgccatagctgctcaggtgcgtcgcctggcgaatgaagttcggcagctagcatcaaacaggccaatcacagtactgaatgggggttctgaacaaagtaatttatcatcccttgtcgttccagctgctgccttgggcgctctgggttatggctacatgtggtggaagggaatttcattctcagatcttatgtatgtgactagacggaatatggaaaaagctgttgc

SEQ ID NO: 25918 - DNA, 399 bp, Glycine max
  Clone ID: LIB3051-001-Q1-E1-D7
tgaaaatgtgccttcaaggattaacagatgtttggaggaaggagccgaagaatttttcttgaagcctgtgaggttgtcagatttgaacaagcttaaaccccacatgaagaaaaccaagttcaaagatcaaaagcaagaaacagtagaaaggtttgaagactcagaagttcaacagcaacagtcacaacaacaaatcatcatccaaaatgagcatcaccaagcaccaaaattacaagttcttcagccagagtcagaatcagagtcacatccacaaccaactattgaacaacagcaacaaattctacaacaagccaacaacaataacaagaggaagaccatggaacagggcctttcacctgagactgacagaacaagaccaagatacagtggcatagccac

SEQ ID NO: 25919 - DNA, 479 bp, Glycine max
  Clone ID: LIB3051-068-Q1-K1-E2
ctttcaggtctaatccgcacaaggattgcaagctcctcaaactcttcatggccatgagaagggcatactgagaactcgggggttaagatctggctcgtaattgggtaactcagactgagggtgattatatcttgttcttatgaagggactacatccgagtctactattgaaggtagaaagatgattagcttgcgtgagaatgatgaatgcaactattgacgactatatctttggatctacctcgataaagacgtatctgagaatgtctttatatcatatcaaatgtatgcgttagagatacggcattgacttgccaatgatgactaaggtgctttaatcacagagaatcatcaataatgtgaccatgtcatctgaaaatgtgccttcaaggattaacagatgtttggaggaatgagcatgaagaatttttcttgaagcctgtgaagctgtcagatttaaacaagcttaaaccccatatg

SEQ ID NO: 25920 - DNA, 355 bp, Glycine max
  Clone ID: LIB3051-075-Q1-K1-A1
cccacgcgtccgaaatgattgagaagagagcgaagaaaaaaaacagagccaaaccaaaccccaccgtccccgaaacggttcgttttgcccttcttcggaaccctcccttccgcgccgctgctgctgctccggtcgccgtcggcgattctccggtaaccgaacaccatcgatccgtcaggagcctcggatctcggatctgagcgaaacgaatcgaaacgaaacgaaacgatgccgtctcatgcggatctggaccggcagatcgagcatctgatggagtgcaagcctctgccggaagccgatgtgaaggcgctgtgcgatcaggcgagagcgattctcgtggaggagtggaacgttc

SEQ ID NO: 25921 - DNA, 423 bp, Glycine max
  Clone ID: LIB3051-107-Q1-K1-C3
ccacgcgtccgcccacgcgtccgaaatcaaaccaggccagcttcaaaacgctgcgtttcgctgccccgtcctcgcgttgcttcgaaaccctaaccctatccacggcattcctccgctcgccgtcgacgccgtcaccgtcgcgccaactgccgcaaaccgaataaaccgaatcgatctgagagaagaagaagaagaagacgcgatctcggaggtgggagcgaaacgaaacgatgccgtctcacgcggatctggaacgacagatcgagcagctgatggagtgcaagcctctgtcggagtcggaggtgaaggcgctgtgtgatcaagcgagggcgattctcgtggaggaatggaacgtgcaaccggtgaagtgccccgtcaccgtctgcggcgatattcacggccagtttacgatctcatcgagct

SEQ ID NO: 25922 - DNA, 421 bp, Glycine max
  Clone ID: LIB3051-078-Q1-K1-A9
ccgaaattcgtcgttccgaaacgctatgacattaggctcaagcccgacctcgtcgcgcagcgttttgcatgttccgtcgccgtcaacctcgacatcgtcgccgccacctctttcatcgttctcaatgccgccgaactcgacgttagcaacgacgccgtttcattcaccaaccaagattcctccaaggttattaaaccttctcgagttgagttgtttgaaaatgatgagattctggttttggagttcccagaggaattacctattggcttcggtgtcttgtccattcgctttgaaggaatcttgaatgatagaatgaaaggcttctaccgaagtacctatgagcacaatggtgaggaagaagactatggcagttacacagtttgaaccagctgatgccaggcgatgctttccttggtgggat

SEQ ID NO: 25923 - DNA, 424 bp, Glycine max
  Clone ID: LIB3051-079-Q1-K1-A12
ccgaaactcgtcgttccgaaacgctatgacattaggctcaagcccgacctcgtcgcgcggggtggtgcaggttccgtcgccgtcaacctcgacatcgtcgccgccacctatttcatcgttctcaatgccgccgaactcgacgttagcaacgacgccgtttcattcaccaaccaagattcctccaaggttattaaaccttctcgagttgagttgtttgaaaatgatgagattctggttttggagttcccagaggaattacctattggcttcggtgtcttgtccattcgctttgaaggaatcttgaatgatagaatgaaaggcttctaccgaagtacctatgagcacaatggtgagaagaagactatggcagttacacaggttgaccagctgatgccaggccatgctttccttgttgggatgaacc

SEQ ID NO: 25924 - DNA, 369 bp, Glycine max
  Clone ID: LIB3051-004-Q1-E1-A3
ggtaaaggtccaggggtcgagggacgcgtccggtcgataaactcatctgtcacaatccattctcgcgccctctaacagaagaacaaaagaataaataaataaataaattctccactcttcctcttctttcagtttcagatctctcagaggtgtgatatgtgatgtgattcaggtttgtaaaaatatggagtgtttgaattcggtggaggacgtggtggaggagataatgaggattcacagatcccttccagcccggtcagggatagacgaagtcgaagtggctagaagtttgatcgggaatgttgaaaaagaagaccaggcgaagctccaagccatagcgcggcaaagcaatggcgttcatgtgcccca

SEQ ID NO: 25925 - DNA, 387 bp, Glycine max
  Clone ID: LIB3051-007-Q1-E1-A3
gggccgacctacgaatggaatgaactatttgcaccaaaataatataattcacagggacctcaagactggcaatcttctgatggatgacaatgaagtggtcaaggttgctgattttggggttgccacggtgcaaactcagtctggagtgatgacagctgaaactggaacataccgttggatggctcctgaggtcattgaacacaaaccatatgaccagaacgcagatgttttcagttttggaatagctctttgggagcttttaactggagaactgccttactcttgcctgaccccattagaagcagcaattggccgtggtgcaaaaaggcctgcggcctacaattcccagaaatacgcacccaaagactttctgaacttcttcagcgg

SEQ ID NO: 25926 - DNA, 262 bp, Glycine max
  Clone ID: LIB3051-073-Q1-K1-H1
cccataactacgattatctagaaattagccgttgctactaggcaatatatgagattccatctgtcaaagaagacccttccaagtggattccaatcctaaggaaaatatgttggtacttggttctagcgccctatgatccaattcaatcaagctttctcaattccaccttggctgatttgaatctatctgagattccaaacttcaagctactcttgaaacagctggttaccatggaagttatccaatggacaactctatggga

SEQ ID NO: 25927 - DNA, 361 bp, Glycine max
  unsure (1)..(361): unsure at all n locations
  Clone ID: LIB3051-083-Q1-K1-A1
cccacgcgtccgggaatcatccattgttgagtggaatgaaagtgaaggagctgttaaaaggacttaccaaggatttcgtaagcgatctttgggtgtcgtgcaatttgatactaccaaaaatcgatttttggctgctggtgatgatttctccatcaaattctgggatatggataatgttcagcttttgacaactgttgatgctgatgggggtcttcctgcaagcccgcgtattcgcttcaacaaggatggaactcttttagctgtctctgcaaatgagaatggaattaaaattttagccaatggggatggtattcgcttgtcgcgcacactagagaantctttatatgatgcatcaagagca

SEQ ID NO: 25928 - DNA, 386 bp, Glycine max
  Clone ID: LIB3051-001-Q1-E1-F1
aggttgctactattgaggatatatatcttgcatatgaacagttgaaagtggatgagaattctctatattcatgcattggaattgctggtgctcagactgcacaagatatagcagctcctttagaagaggaagtagcagatgatgtttatccaggtgttattccggtgggacgaggtttatctacaatgacacggccaacaacctgatatttttggactaagttttggcctgcttgctttaagatcgggaggagccatgtctggaagtttgattacaagttgtcgttcaaaggattagcggcatgtgtgtcacaacacaagaagttgctgcattcatttaacattcaaaccactcggtatacaagctgtttgatcaaacctaagaag

SEQ ID NO: 25929 - DNA, 435 bp, Glycine max
  Clone ID: LIB3051-016-Q1-E1-C3
acgcgtcagttttgaaaggacgaccctttggtgtttggatcttcaagaaagagagacccttgggatttcgtcaccatgagtctcttcggtcttggaaacagaaaccaaaaaacatttcgtccaaaaaagagtgctccatctggaagtaagggtgctcaacttcaaaaacacatcgatgccacgttgggtagtgggaacttgagggaggctgttaaactgcctcccggtgaagatattaatgaatggctagctgtaaacaccgtggacttctttaatcaagtgaatatcctgtttggtactcttacagaattctgcacgccaagtaactgcccttcaatgactgcaggaccaaagtatgagtatcgatgggctgatggtgttactataaagaaaccaatagaagtgtctgctccaaaatatgttgagtatttgatg

SEQ ID NO: 25930 - DNA, 434 bp, Glycine max
  unsure (1)..(434): unsure at all n locations
  Clone ID: LIB3051-025-Q1-K1-B4
nccacgcgtccgattaatgaatggctagctgtaaacaccggggacttctttaatcaagtgaatatcctgtatggtactcttacagaattctgcacgccaagtaactgcccttcaatgactgcaggaccaaagtatgagtatcgatgggctgatggtgttactataaagaaaccaatagaggtgtctgctccaaaatatgtcgagtatttgatggactggattgaatctcagctagatgatgaaacgattgtccctcaaagattgcgtatgtatgacatattgataaagctagttggccagttagctgaatcatctggattgttatttgctaataatatgcatcatagcactattttaattaattgctgcatagctataagggcctcctttccaaccaatttccgagatgttgtcaagacaattttgaagcgatt

SEQ ID NO: 25931 - DNA, 376 bp, Glycine max
  Clone ID: LIB3051-012-Q1-E1-H2
ccaagcatccgctcacgttctggcagttgttgccagcgtcttggtcgtggtctgggtcgtcaatttcaggggtggcttggcttgggattctgataacaagtccctcatcttcaacattcaaccagttcttaatgttattggcttactacttcaagggggtgaagctattataagttacaaaacttttcccctaaagaagggagttaagaaatttatacaccttgttttccatgccatcgcattaatacttgggatagttggaatttatactgccttcaagtgtcaaaatgaaagtgggatttgcaatctctaaagcttgcattcatggcttgggattgggggtaatgtcctttaggcattcaggtaaacaaaacac

SEQ ID NO: 25932 - DNA, 415 bp, Glycine max
  Clone ID: LIB3051-015-Q1-E1-C7
gacccaagcgtcagcccacgcgtccggccaaacgtttcctagccgaaaccctagctagctctttcttaatccataatctctcttctcttcttctctttctatctgcaaaacaaaaatgtctcacttcggacgttcgggtcccccagacatttccgacacttactctcttctcgttctcaacatcaccttccgtaccaccgccgacgacctattccctctcttcgacaagtacgggaaggtcgtcgacatcttcatccccaaggatcgaagaactggtgagtcaaggggttttgcattcgtgcgttacaagtatgctgatgaggctcagaaggccgttgagaggctcgacgggagaatggttgatggtcgtgaaataaccgtccagtttgcgaaatatgggcctaatgctgagaag

SEQ ID NO: 25933 - DNA, 439 bp, Glycine max
  Clone ID: LIB3051-004-Q1-E1-B9
ctcacgcatttcctcgtttttttcttcccttttcgctttctccggcgacgatctcagattccggccactcctctcgccggcgagcccttactcttccctcctccgtcgagccctctccgattcgaatcgttcccagcctcgcaccaccatgaatcccgaatacgattatttgttcaagcttttgctgattggagattctggtgtaggcaagtcatgtcttctcctgaggtttgctgatgattcataccttgacagctatatcagtaccattggagtggactttaaaatccgcactgtggagcaggatgggaagactattaaacttcaaatttgggacactgcgggtcaggaacgtttccgaacaatcactagcagctattatcgtggggctcatggcattattgtgagtcttttaaactggtcctcctttttgagttaa

SEQ ID NO: 25934 - DNA, 435 bp, Glycine max
  Clone ID: LIB3051-028-Q1-K1-D10
ctcagattccggtcactcctctcgccggcgatcccttattcctccgtcctccgtcgagtcctttccgattcgaatcgttcccagccttgtgccaccatgaatcccgaatacgattatttgttcaagcttttgctgattggagattctggtgtaggcaagtcatgtcttctcctgaggtttgctgatgattcataccttgacagctatatcagtaccattggagtggactttaaaatccgcactgtggagcaggatgggaagactattaaacttcaaatttgggacactgcgggtcaggaacgtttccggacaatcactagcagctactatcgtggggctcatggcattattgttgtttatgatgtcactgaccaagagagcttcaacaatgttaagcagtggctgaatgaaattgaccgttatgcaagtgaaaat

SEQ ID NO: 25935 - DNA, 455 bp, Glycine max
  Clone ID: LIB3051-066-Q1-K1-B9
cccacgcgtccgcccacgcgtccgcccacgcgtccgcccacgcgtccgggacaatcactagcagctactatcgtggggctcatggcattattgttgtttatgatgtcactgaccaagagagcttcaacaatgttaagcagtggctgaatgaaattgaccgttatgcaagtgaaaatgttaacaagcttctagttggaaacaagtgtgatcttacggcaaataaagttgtgtcctctgagacagcaaaggcatttgctgatgaaattggaattcctttcatggaaactagtgctaaaaatgccaccaatgttgaacaggctttcatggccatggctgctgaaattaaaaacagaatggcaagccaaccagtgaacaatgccaggccttcaacagttcaaattcgaggacagccagtgaaccagaaggctggttgctgctcgacttagaaagagacg

SEQ ID NO: 25936 - DNA, 428 bp, Glycine max
  unsure (1)..(428): unsure at all n locations
  Clone ID: LIB3051-113-Q1-K1-B8
cttcctcacgcatttcctcgtttttttctttccttttctctttctccggcgacgatctcagattccggccactcctctcgccggcgagcccttactcttccctcctccgtcgagccctctccgattcgaatcgttcccagcctcgcaccaccatgaatcccgaatacgattatttgttcaagcttttgctgattggagattctggtgtaggcaagtcatgtcttctcctgaggtttgctgatgattcataccttgacagctatatcagtaccattggagtggactttaaaatccgcactggggagcaggatgggaaagactataaaacttcaaatttgngacactgcgggtcaggaaccgttccgaacaatcactagcagctattatcggggggctcatggcattaattggtgttatgatgtcactga

SEQ ID NO: 25937 - DNA, 446 bp, Glycine max
  unsure (1)..(446): unsure at all n locations
  Clone ID: LIB3051-114-Q1-K1-G2
cccacgcgtccgggctcatggcattattgttgtttatgatgtcactgaccaagagagcttgaatgatgttaagcagtggctgaatgaaattgaccgttatgcaagtgaaaatgttaacaagcttctagttggaaacaagtgcgatctcacggcaaataaagttgtgtcctatgagacagcaaaggcttttgcagatgaaattggaattcccttcatggaaactagtgctaaaaatgccaccaatgttgaacaggctttcatggccatggctgctgaaattaaaaacagaatggcaagccagccagtgaacaatgcgaggccttcaacagttcaaattcgaggacagccagtgaaccagaaggctggttgctgctcgacttanagagagacgaagtatttggggtcttagaagttcatgtgtctcagtggcatctaaaactagcttt

SEQ ID NO: 25938 - DNA, 453 bp, Glycine max
  Clone ID: LIB3051-117-Q1-K1-D6
ctcttctctctctttctccggcgacgatctcagattccggtcactcctctcgccggcgatcccttattcctgcgtgctccgtcgagtcctttccgattcgaatcgttcccagccttgtgccaccatgaatcccgaatacgattatttgttcaagcttttgctgattggagattctggtgtaggcaagtcatgtcttctcctgaggtttgctgatgattcataccttgacagctatatcagtaccattggagtggactttaaaatccgcactgtggagcaggatgggaagactattaaacttcaaatttgggacactgcgggtcaggaacgtttccggacaatcactagcagctactatcgtggggctcatggcattattggtgtttatgatgtcactgaccaagagagcttcaacaatgttaagcagtggctgaatgaaattgaccgttatgc

SEQ ID NO: 25939 - DNA, 331 bp, Glycine max
  Clone ID: LIB3051-002-Q1-E1-G3
gactgcactgacctacattgattctgatggaaattggcatagagctagcaaaggggctcctgagcagataatcaccctttgcaactgcaaagaggatgtcagaagaaaggtccatgctgtaattgataagtttgctgagcgtggacttcggtctttaggtgtcgcaagacaggaagtacctgaaaaatcaaaagatagtcccggtggaccatggcaatttgttggtctgctaccattgtttgatcctcccaggcatgatagtgctgaaaccattcgaagagctcttaaccttggtgtcaatgttaagatgattactggggatcagcttgcc

SEQ ID NO: 25940 - DNA, 400 bp, Glycine max
  Clone ID: LIB3051-039-Q1-K1-F2
gtggacttcggtctctaggtgttgcaagacaggaagtacctgaaaaatcaaaagatagtcctggtggaccatggcaatttgttggtctgctaccattgtttgatcctcccaggcatgatagtgccgaaaccattagaagggctctgaaccttggtgtgaatgttaagatgattactggggatcagcttgccattggaaaggaaacgggccgaaggcttggaatgggaacaaacatgtacccttcatctgcattgcttggccaagacaaggatgcttctatttcagctcttccagttgatgagttgattgagaaggctgatggatttgcaggagtatttcctgaacacaaatatgaaattgttaagaagctgcaagagaggaaacatatatgtggaaatgt

SEQ ID NO: 25941 - DNA, 435 bp, Glycine max
  Clone ID: LIB3051-039-Q1-K1-F3
gtggacttcggtctctagtgttgcatttcagttagtacctggaaaatcaaaagataggcctggtggaccatggctatgtgttggtctgctaccattgtttgatcctcccaagcatgatagtgccgaaaccattagaagggctctgaaccttgttgtgaatgttaatatgattactggggatcagcttgccattggaaaggaaactgtcctaatgcttgtaatgggaacaaacatgtaccctacatctacattgcttggccaagacaaggatgcttctatttcagctcttacagttgatgagttgattgacaaggctgatggatatgcaagagtatttcctgaacacaaatatgaaattgttaagaggctgctagataggaaacatatatgtggaaatgtacggtgatcgtggtgttgaactcgagaatgagtttt

SEQ ID NO: 25942 - DNA, 411 bp, Glycine max
  Clone ID: LIB3051-077-Q1-K1-E6
ctggaaagccacctgttgattaccaaggagcaagagatgtcaaaccaattgctgaatcggcacttcaacaggtaaaggctcttttgaaggatcggttaagtggaaaagcaacaggaggatctagtgacaagacagaaaccagttcttcagtagaattgaactctggcaactttgatgaattggtgatcaaaagcaaagaactctggattgtggaatttttcgcaccttggtgtggacattgtaagaaattagctcctgagtggaagaaagcatccaatagtttgaaagggaaggttaaactgggccatgttgactgtgatgctgaaaagtctctaatgagcatgttcaaagttcatggattcccaactatcttggtgtttggtgctgataaagatagtcctattccttatg

SEQ ID NO: 25943 - DNA, 403 bp, Glycine max
  Clone ID: LIB3051-092-Q1-K1-D4
caacagtgcactctggctcctcagatttcctgcagctggggaaatgagactgagagcatgtgctgctgcacaaggggtacagccggatcaaattattttcacagatgttgcaatgaagaatgaacacatcagacggagttctttagcagacttattccttgactcgcctttatgcaatgcacatacaacaggaacagatatactatgggcaggtttgccaatggttactctgcctcttgagaaaatggctactagggttgctgggtcactctgtcttgccactggactaggggaggagatgattgttagcagcatggaagagtatgaagatagagcagtctcattggctctgaatcggccgaagcttcaggctcttactaataagcttaaagctgtacgcatg

SEQ ID NO: 25944 - DNA, 305 bp, Glycine max
  Clone ID: LIB3051-098-Q1-K1-A11
tgcgatctctccttcctcaaacacaggcatttacctcaatttctggcctgagatctgcttcaatttccagctttgggagaaagaatgtttcttttagcttgcagccacgctcgattcgccttaaaatttcctgtgctgctaaaccagagacagtagagaaggtgtgcaaaatagtaaagaagcagctggctatgcctgaaactgatgttgagacgggggagtcaaaatttgcaactataggtgctgatatccttgacacggatgagatcgtgatggctcttgaggaagcatttggtattgccatt

SEQ ID NO: 25945 - DNA, 373 bp, Glycine max
  Clone ID: LIB3051-079-Q1-K1-D7
cagaccctttctcaccaccatcttctttctcacactcacagtgctcaaggtttcagcaggatcctcagtgattttctacaacaagtgccagcacccagtgtggcccgggatccagcccagcgcaggaaagcccgttctggcccgcggaggcttcaagctcgccccaaaccgggcctactcccttcagctccccgctctatggtccgggcgcttctggggccgtcacggctgttccttcgacgccggcggccgggggcgctgcgccaccggggactgcagcgggtccctgttctgcaacggcatcggcggaagcccaccggcgacccttgcggagttcacccttggcaacgagcatgacttctacgacgtgagc

SEQ ID NO: 25946 - DNA, 356 bp, Glycine max
  Clone ID: LIB3051-085-Q1-K1-G6
caggattttatggaggtggtggaatttcttaagaagcctgagaggttcactgctgttgggggtcgcataccaaaaggtgttcttcttgttggtcctcctggaactgggaagacacttttagcaaaggctattgcaggtgaagcaggtgtcccatttttctcaatctaaggtcctaagttggtaaaaatgttggttggtgttggtgcttctcgagtccgcgatttattcaggaaggccaaagagattgccccatgcattgtttttgttgatgaaattgatgctgttggaaggcaaagaggtactggaattggtggagggaatgatgaaagagaacagaccctcaatcaacttttgac

SEQ ID NO: 25947 - DNA, 448 bp, Glycine max
  Clone ID: LIB3051-081-Q1-K1-C7
cccacgcgtccggcggcaacgagaggtgttcggttgaagctcagatcagcgagggcagcagggacccgcacttctctgcggttcctcctctcagtctccgtaaccctaactctcgctcacctcgccgcctcaaattccgaaggcgacgctctctacacgctgaaacggagcctctcggaccctgacaacgttctccagagctgggatcccactctcgttagcccctgtacttggttccacgtcacctgcaaccaggacaaccgagtcactcgcgtggatcttggtaactctaacctatctggacatttggtacctgaacttgggaagctggagcatctacagtatcttgagttgtacaaaaacaacattcaaggaactattcctccagaacttggaaacctgaagagtctcgttagcttggacttgtacaacaacaacatatcaggca

SEQ ID NO: 25948 - DNA, 412 bp, Glycine max
  unsure (1)..(412): unsure at all n locations
  Clone ID: LIB3051-084-Q1-K1-D4
ggcagcagcaacccgcacttctctgcggttccttctctctctctctctagaacttcgtggtccctctgcttctttctttcttagttgcagcgcgattgctgcatcgtcctccaataagagctcgctgctagtgaaccctaacacggcggcaacgagaggtgttcggttgaagctcagatcagcgatggcagcagcaacccgcacttctctgcggttcctcctctcagtctccgtaaccctaactctcgctcacctcgccgcctcaaattccgaaggcgacgctctctacacgctgaaacggagcctctcggaccctgacaacgttctccagagctgggatcccactctcngtagcccctgtacttgttccacgttacctgcaaccaggacaaccgagtcactcgagtggatc

SEQ ID NO: 25949 - DNA, 407 bp, Glycine max
  unsure (1)..(407): unsure at all n locations
  Clone ID: LIB3051-047-Q1-K1-F4
cccacgcgtccgtttcgtttctatcatacccacttcgccttctccgtttctcactagggtcagatcgcgcctccatttcgctgcattccctctgcgttctccaacgaggaaactcatgtcgcacactcttgcacgtgccactcttggtctcacacacccttctaatatcgaaacccccaagatctcttttggtgctaaggatgttgatgtgacggaatggaaaggggacattctggcagtgggtgttacggaaaaagatttggctagagatgcaaactcgaagtntgagaatgtgantttgagcaagattgactcanagttgggtggtttattagctgaagcctcttctgaagaggatttctctggcaaagttggtcagtcaactgttcttagaattacaggacttg

SEQ ID NO: 25950 - DNA, 449 bp, Glycine max
  Clone ID: LIB3051-085-Q1-K1-E6
gattggtcttggtcagtcaccttccactcctgcaccttttaagagtcttggcgaggccattgtggcggctgccaagtcttctcaagcaagcagtgttgctgttgctcttgcctcttctgaaggactctccgcacaatcaaagcttagcactgcttatgcaattgcttctggggctgtgctgggattatttgaagataatagatacaaatcagaagcaaagaaatcaacactaaggtccattgactttattggtcttgggacaggacctgaactggagaagaaactgaagtacgcatgagatgtttcttccggaattatctttggaagggagcttgtaaattctcctgctaatgtgctcacaccaggggtgttggcagaagaagcagctaaaattgcttccaactacagtgatgttttcacttgctaaaatattaaattctgaagcatgt

SEQ ID NO: 25951 - DNA, 415 bp, Glycine max
  Clone ID: LIB3051-027-Q1-K1-B3
cccacgcgtccggcaggaatggctttgttcggatagaaagagtggtattttttcacgccgagggaccgcaagtacccgaacggttcgcggccgaaccggtccgcgggaaccgggtactggaaggcaaccggagcggataaaccagttggtaaaccgaaaccggttgggatcaagaaagcgttggttttttacgctggaaaagcgcccaagggagagaaaactaactggatcatgcacgagtatcgtcttgcagacgtggatcgttccgttcgcaaaaagaacagcttaaggctggatgactgggtgctgtgccgaatttacaacaagaaaggtgcaattgaaaagcaacaacttccaccaccgagtggggtccgcaaaattgaatgttccgaaatggaggacgagaaaccggaga

SEQ ID NO: 25952 - DNA, 429 bp, Glycine max
  Clone ID: LIB3051-077-Q1-K1-G10
acaaaattgaatgttacgaaatggaagacgtgaagccggagtatacggcggcggattgcctgggcttcgaggcttccgactcggtgccgcggctgcacacgacggagtcgagctgttcggagcaggtggtgtcggcggagtttgcgagcgaggtgcagagcgagcggaagaggcagggcaacagcgagttttcgtataattacatggatgccactctcgggaataatcagatgtcgccgctccaggatatcttcatgtacctctccaggcccttctgaaatcaacacgcacgagacggcacgacgtcgttctttgctttgtgtgtgcatgatgcatttttgacgtgcctgctgcattgcatggaagcacgagactgagtgaatgtccgtgagtgtgtccgtgctggtgcgcgtagatgattattattat

SEQ ID NO: 25953 - DNA, 422 bp, Glycine max
  Clone ID: LIB3051-059-Q1-K2-E4
ccacgcgtccggtcaccggatggcggaccaactggcgaggcccctgccgattccaattccctgatcaagcttcttcttattggcgatagcggtgtgggaaagagttgtctgcttttgcgattttctgatggttccttcacaaccagttttatcaccaccattggcattgattttaagataagaaccattgaacttgatggcaaacgcattaagttacaaatctgggatacagctggtcaggagcgatttcgaactattaccacagcttattaccgtggagccatgggtatcttgctcgtttatgatgttactgatgaagcatctttcaacaatattagaaattggattcgcaacattgaacaacatgcttctgacaatgtaaacaagatacttgtgggtaacaaggctgatatggatgaaag

SEQ ID NO: 25954 - DNA, 439 bp, Glycine max
  Clone ID: LIB3051-065-Q1-K1-C1
caaacgcattaagttacaaatctgggatactgctggtcaggagcgatttcgaactattaccggagcttattaccgtggagccatgggcatattgcttgtttatgatgttactgatgaagcatctttcaacaatattaggaattggattcgcaacattgaacaacatgcttctgacaatgtaaacaagatacttgtgggtaacaaggctgatatggatgaaagtaaaagggctgtgcctacctccaaaggtcaagcccttgctgatgagtatggtatcaagttttttgaaaccagtgcgaagacaaacatgaatgtggaggaggttttcttttcaatagcaagagatatcaagcaaaggcttgcagacacagattctaaggctgaacctcagactatcaagattaaccaacccgaccaggcagccaccgggggtctagct

SEQ ID NO: 25955 - DNA, 440 bp, Glycine max
  Clone ID: LIB3051-026-Q1-K1-H11
gaagaagcgaaatctcctagaaagcgagtttctctcttctctctctcaattttcacatagtcagcgaaaacaaacaaactattggaacacgaaacacaaacatcataacataagcagcagcagcagcaccacccaccttgttcattgttttgaattcaactgagaaaaacgacaaacgaggatgtttcaagagagcagcgcgacacggtggccgactcagccgactcagtggactcgctaccacgacaagctcttcgagcgggctctgctggtcgtgccggaggacctgccggaccggtgggagaagatcgccgaccaggttcccggcaagtcggcggtggaggtcagggaacactacgaggccctcgttcacgacgtcttcgagatcgactccggccgagtcgaggtcccgagttacgtcgatgactcggtggcgacac

SEQ ID NO: 25956 - DNA, 292 bp, Glycine max
  Clone ID: LIB3051-015-Q1-E1-E11
gacgacgcgtcaacggagacattggccatggattatcatcgaggagctggtgttgaggttcgtattgctcgaattttcaatacatatggaccccgcatgtgtttggatgatgggcgtgtcgttagcaattttgttgcacaggctattcgtaaacaaccattgactgtatatggtgatgggaagcaaacaagaattttccaatatgtctcagatttggtaaatgggctggtggctttgatggaaagcgaacatgtgagacctttcaacctgtgtaaccctggggagtttacca

SEQ ID NO: 25957 - DNA, 439 bp, Glycine max
  Clone ID: LIB3051-042-Q1-K1-B11
ccggaagcttgttattgcttccgcttggaggaaacagatgccgaagctcgcgctttcgcttggtctcgctcagcaaatgcctgatatgattgaagagttgatcagcaaagggcagcagcttgatgcggttcactttacctatgaagtgggtctggtggaaaagttccctcctgttcccttgttgaagtcttttctcaaggatgctaagaaagttgcggcttctattttggaagatcctaataatgcaggccgagctgcgtacctagctgcaaggaaagagcagtctgcactcagggctgtgattaaatgcattgaagaatacaaacttgaggatgagttccctccagaaaatctgaagaagcgacttgaccagttagagaaggtgaagaccgagaaaaggaaaccagtggcagttcctgccaataagagaactagagca

SEQ ID NO: 25958 - DNA, 313 bp, Glycine max
  unsure (1)..(313): unsure at all n locations
  Clone ID: LIB3051-044-Q1-K1-D3
tcgnccacgcgttcgggcagcagcttgatgcggttcactttacctatgaagtgggtctggtggaaaagttccctcctgttcccttgttgaagtcttttctcaaggatgctaagaaagttgcggcttctattttggaagatcctaataatgcaggccgagctgcgtacctagctgcaaggaaagagcagtctgcactcagggctgtgattaaatgcattgaagaataccaacttgaggatgagttcccttcagaaaatctgaagaagcgacttgaccagttagagaaggtgaagaccgagaaaaggaaaccagt

SEQ ID NO: 25959 - DNA, 446 bp, Glycine max
  Clone ID: LIB3051-047-Q1-K1-F11
ccgatttgtaccggaagcttgttattgcttccgcttggaggaaacagatgccgaagctcgcgctttcgcttggtctcgctcagcaaatgcctgatatgattgaagagttgatcagcaaagggcagcagcttgatgcggttcactttacatatgaagtgggtcttgtggaaaagttccctcctgttcccttgttgaagtcttttctcaaggatgctaagaaagttgcggcttctattttggaagatcctaacaatgcaggccgagctgcgtacctagctgcaaggaaagagcagtctgcactcagggctgtgattaaatgcattgaagaatacaaacttgaggatgagttcccaccagagaatctgaagaagcgacttgaccagttgtgagaaggtgaagacggtgaagaccgagaaaagggaaaccggttgctgtcctgccaataa

SEQ ID NO: 25960 - DNA, 368 bp, Glycine max
  unsure (1)..(368): unsure at all n locations
  Clone ID: LIB3051-059-Q1-K2-D3
caacagctcccccgacggtgaggtcgacgacaccaccggcctgatgctcaaactcaagggcttgtgcctacgcatggacgcattcgggttcttcgccttcgtcagcgccaagaagaaggagctcgacggcctacgcgccgagatgcctgtggctctggcggagtgcgttgatccggcgaaattcgtgctggaggcgatctccgaggtgtttgcggtcgacaagagaggggacaaggccgggcacgacttgngctgggcctgcgtacttgtcctggagtcgctgattccggtcgtggtcgaccccgtcatcggaaaatcgaggctgttggtgactcctattgcgaaggagcaagccacggagatcgcag

SEQ ID NO: 25961 - DNA, 424 bp, Glycine max
  Clone ID: LIB3051-102-Q1-K1-F4
cccacgcgtccgtccacgcgtacgccttcgtcagcgccaagaagaaggagctggacgggctacgcgccgagatgccggtggcgctggcggagtgcgtcgatccggcgaaattcgtgctggaggcgatctcggaggtgtttccggtcgacaagagaggggagaaggccggccacgacttgggctgggcctgcgtccttgtcctggagtcgttaattccggtcgtcgtcgaccccgtcatcggaaaatcgaggttgttggttacccctaccgtgaaggagcatgccacggagatcgcggagacttggaagagcagcctggaggatcgtggcggcgtggaaaacctgaagacacctgacgtccacactttcttgcagcacgttgttaccttctggattgtcaagaacgatgacttcgatttgtaccg

SEQ ID NO: 25962 - DNA, 454 bp, Glycine max
  Clone ID: LIB3051-066-Q1-K1-A9
ggccgatgcgttggtgcagggctccattgttggctccgcgggcgagctgcccgataggtatatgcaagctgtcatcgccggcactgctgcttctggagtgcttgtttctgccctgaggatatttacaaaagctgtttacccacaagatgcctctggcctgcaaaagagtgcaaatctctacttctctgtatcaatcgtgattgtgttcttatgcatggttttctacaacatggtgcacaaacttcctgtgatgaagtactataaggaacttaaggttgaggcagtcactgcaaatgaagacaatggtcccctgactggacctgtctggaggtcaactgtatggaatattgtgcggagaatcaggtggtacgggtttggcattgtgctcatttatgttgtgactctggcaatatttcctggttacattacagaggatgttcactctcaaattctt

SEQ ID NO: 25963 - DNA, 422 bp, Glycine max
  Clone ID: LIB3051-003-Q1-E1-F11
ggggtcgtgttggagtgatcaagaacagagagaagcataagggaagctttgagactatccatgttcaggatgccactggccacgagtttgcaactcgtatgggcaatgtgttcaccattggcaatggaacaaaaccatggatatctcttcccaagggtaaaggtattaaactatcaatcattgacgaagctaggaaaaggattgccgcccaacaagcaactgctgcttaaatctttaggaaatgaatagactttgagtgtttggtagtttttatttaatggttttggtttctaatttattttgtcttgaaattttatccactgaatttcgtctcttaaatgctctatagaactttttattgcggcttctatgttcatgaatgaatctttccaaataaacaatccaataaacaaggcggccgc

SEQ ID NO: 25964 - DNA, 427 bp, Glycine max
  Clone ID: LIB3051-009-Q1-E1-G11
accagagaacttccgcctgctgtatgacaccaaaggccgattccgtcttcactcagtcatagatgacgaggctaagttcaagctttgcaaagttcgctcagtgcagtttgggcaaaaaggtatcccatacttgaacacctacgatggtcgcactatccgctacccagaccctctcatcagagctaatgacaccattaagttggatttggaggagaacaagattgtcgatttcatcaagtttgatgttgggaatgtagtcatggtgacaggtggaaggaataggggtcgtgttggagtgatcaagaacagagagaagcataagggaagctttgagactatccatgttcaggatgccactggccacgagtttgcaactcgtatgggcaatgtgttcaccattggcaagggaacaaaaccatggatatct

SEQ ID NO: 25965 - DNA, 157 bp, Glycine max
  Clone ID: LIB3051-022-Q1-K1-E8
aaatggcagttcaagctcttctaaggttaggtcagtacagtttggccagaaggggatcccatacctgaacacctatgatggtcgcaccatccgttacccagaccctctcatcatgtcctatgacactgataatctggatcttgaagaataataatat

SEQ ID NO: 25966 - DNA, 427 bp, Glycine max
  Clone ID: LIB3051-040-Q1-K1-H5
cccacgcgtccgtattcttcgtgtcttgttgtgtttttcatctgagatgtgtggaggagctatcatctctgatttcattccggcggcggcgatcgccgggtctcgccgcctgaccgccgattacctgtggccggatttgaagaagcggaagtctgacttggacgttgacttcgaggctgatttcagggattttaaagacgattctgatatcgacgacgacgacgacgatcaccaagtcaagccctttgctttcgccgcctcttctcgtctgtctacggcagcgaaatctgtggcattccaaggtcgggctgagatatctgcaaatagaaagaggaagaatcagtataggggaatccgtcaacgcccttggggaaaatgggcagctgagattcgggatccaagaaagggggttcgtgtctggcttgga

SEQ ID NO: 25967 - DNA, 429 bp, Glycine max
  unsure (1)..(429): unsure at all n locations
  Clone ID: LIB3051-041-Q1-K1-B5
gttaaccagtatgttaaccctgccccgttccctggaaacggagttcaagtctcacctgttactccatctgctgatgttactgcttacttcagctctgagcattcgagcaactcgtttgattattctgaccttggatggggtgaacaagtccccaagacccccgagatctcatccttgctttctgctgctcctttggagggtgctgctgatcaggttcagaagaccaacaactcgcaggatgtggtggctgcacaagatgattctgcaaaaaccctttccgaagagcttgcagacattgaatcccagctcaagttctttgagaccccttcttttcttgatgaagcctgngctgatgctacattggcgtctttgctcggcggagacgcaactcatgacgccgccggaaaccctatgaacctttggagcttc

SEQ ID NO: 25968 - DNA, 343 bp, Glycine max
  Clone ID: LIB3051-045-Q1-K1-A2
aatgaaagaaaatcttaacactgtgaaaccggaaaatgagccatattgacaatgatgatcacaatcttgaaggctactacagtccaatagatcatgtggaacaagaaccactggttaaccagtatgttaaaccctgccccgttccctgtaaacggattttaagtctcacctgttactccatctgctgatgttactgcttacttcagctctgaacattctagcaactcgtttgattattctgaccttggatggggtgaacaagtccccaatacccccgagatctcatccttgctttatgctgctcctttggaggttgctgctgatcaggttcagaaaaccaaca

SEQ ID NO: 25969 - DNA, 396 bp, Glycine max
  Clone ID: LIB3051-045-Q1-K1-A6
ggtgaatccagaggctcagccaatgaaggaaaatctgaacaccgtgaatccggaaatgggccagatgttcaattttggtcacaatctggagggctactacagcccaatagatcaggtggaacagaaaccactggttaaccagtatgttaaccctgccccgttccctggaaacggagttcaagtctcacctgttactccatctgctgatgttactgcttacttcagctctgagcattcgagcaactcgtttgattattctgaccttggatggggtgaacaagttcccaagacccccgagatctcatccttgctttctgctgctcctttggagggtgctgctgatcaagttcagaagaccaacaactcgcaagatgtggtggctgcacaagatgattc

SEQ ID NO: 25970 - DNA, 395 bp, Glycine max
  Clone ID: LIB3051-078-Q1-K1-D3
gtgtttttcatctgagatgtgtggaggagctatcatctctgatttcattccggcggcggcgagcgccgggtctcgacggctgaccggcgattacctgtggccggatttgaagaagcggaagtctgacttggacgttgacttcgaggctgatttcagggattttaaagacgattctgatatcgacgacgacgacgacgatcaccaagtcaagccctttgctttcgccgcctcttctcgtctgtctacggcagcgaaatctgtggcattccaaggtcgggctgagatatctgcaaatagaaagaggaagaatcagtatacgggaatccgtcaacgcccttggggaaaatgggcagctgagattcgggatccaagaaagggggttcgtgtctggcttg

SEQ ID NO: 25971 - DNA, 430 bp, Glycine max
  unsure (1)..(430): unsure at all n locations
  Clone ID: LIB3051-078-Q1-K1-F4
ctccgacttcattccagcgggtcccgccggcggggcgcagcgcgtgaccgccgacatgctgtggccgaatttgaggaagcggttctcgaagtcgctgctggacgatgatttcgaggcagggttcagagaattcgaggatgactcggaaatcgaggatgtcgatgatgaggacgatgaagaggaggaggagttgaagaagaagaagccctttgggttctctcgctccaacaacaaggctgcttctaagcctctctctcgtggagcaacaactgtgaaatctgtggaatcaaaggggcaagctgagaagtgtgccaagagaaagaggaagaaccagtatcgcggaatccgncagcgttcatggggaaagtgggctgctgagattcgcgacccaagaaagggggttcgggtttggcttggaactttcagcact

SEQ ID NO: 25972 - DNA, 402 bp, Glycine max
  unsure (1)..(402): unsure at all n locations
  Clone ID: LIB3051-018-Q1-E1-G5
agggatccttggccccaaggccaattgcatctccttcaaggactctgcatgccgttgctttggctacatggtctccaaaaagaagtacatctacaccattgatgatgactgctttgttgccactgatccatctggacacaagattaatgcacttaaacagcatatagaaaacctcctctgtccatccacacccttttttttcaacaccctctatgaacctttccgagaaggtgcagattttgttcgtggttaccctttcagtctccgggaaggtgtaccaactgcagtttctcatggtctttggctcaacatcccagactacgatgctcctacccagcttgtgaagcctcttgagaagaacactaggtatgtggatgctgtttttgacanntacaaaggcac

SEQ ID NO: 25973 - DNA, 409 bp, Glycine max
  Clone ID: LIB3051-028-Q1-K1-F9
ttctcaagggctgaacctccaacatccggtttcggcgtaatcggttgccccgccatcggccgcagggtttggggcgcaatttccttggcccccaaggccgccctttacgccgtcggcagccgttccctcgacaaggcgcgtgccttcgccgccgccaacggtttccccgccgccgccaaggtgcacggttcctacgaggcggtcctcgacgatcccgacgtcgacgccgtgtacgtaccgctccccactagcctccacgtgcgctgggccgtgctcgccgcgcagaagaagaagcacgtcttgctcgagaagcccgtcgcgctccacgcggcggagttcgacgagatcgtcgaggcgtgcgaatccaatggggtgcagctcatggacggtacgatgtggatgcaccacc

SEQ ID NO: 25974 - DNA, 428 bp, Glycine max
  unsure (1)..(428): unsure at all n locations
  Clone ID: LIB3051-020-Q1-E1-E3
aaatccttttcccttctcggtccaaaggggtgccctgagatcacattgaacaatggtgaaggctgtggccgttcttggcagcagtgagggtgtcactggaactattcacttcgttcaggagggaagtggtccaaccaccgtaactggatctcttgctggtcttaagcctggtctccatggtttccatgtccatgccttgggggacactaccaatggttgcctctcaactggatcacatttcaatcctaataacaaggagcatggtgcccctgaggatgagaatcgtcatgctggtgatcttgggaatgttaatgtcggtgatgatggtactgtcagcttcactattactgacagccagattcctctcactggaccanacaacatcatangaatggcggttgttgtccatgctgatcctgatgatcttg

SEQ ID NO: 25975 - DNA, 340 bp, Glycine max
  Clone ID: LIB3051-045-Q1-K1-F12
cacacgcgtacgctcctttactcttctatgtctaatgggtgccctgagatcacattgagcagtggtgaaggctgtggccgttcttggcagcagtgaaggtgtcactggaactattcactttgttcaggatggaagtggtccaaccaccgtaactggatctcttgctggtcttaagcctggtctccatggttttcatgttcatgccttgggggacactactaatggttgtctttcaactggatcacattacaatcctaataacaaggagcatggtgcccctgaagatgagaatcgtcatgctggtgatcttgagaatgttaatgtccgtgatgatggtact

SEQ ID NO: 25976 - DNA, 344 bp, Glycine max
  Clone ID: LIB3051-079-Q1-K1-E4
ctagtttataaaatgattggcaatctgtgatataatgttgtatgaacagagaccaggcgtcttttttttgtgtgtcatatggtattggaaaggatactgtataatgggatatccaattaattattatctgttgcaatctttcttgtgttacttccacagtcccacaacacatagggtcctaactcataagtgcccccattttaaaattttgggtcagcatctggtggtcctataggaactagaaatgtcattgtagcaacattattctcttggaaagaacatttttcattacagctataatggcgcataaaaaaatataataaaaagaaatatgaatacaaggg

SEQ ID NO: 25977 - DNA, 444 bp, Glycine max
  unsure (1)..(444): unsure at all n locations
  Clone ID: LIB3051-101-Q1-K1-B9
gtgtacttggcgaagctgtcggagcaggcggagcggtacgaggagatggtggagttcatgcagaaggtggtggtggggtcgacgccggcgtcggagctcacggtggaggagcgcaacctcctctcggtggcctacaagaacgtcatcggctcgctgcgtgccgcgtggcgcatcgtctcctccatcgagcagaaggaggagggccgcaagaacgacgaccacgtctccctcgtcaagcactacagatccaaggtcgagaacgagctcactcaggtctgcgccagcatcctcagcctcctcgactccaacctcgtaccctccgncttcgccagcgagtccaaggtcttctacttgaagatgaagggcgattaccaccgctatctcgccgagtttaaggttggggacgaaagaaaaaccgctactgaggataccatgttgtcttac

SEQ ID NO: 25978 - DNA, 396 bp, Glycine max
  Clone ID: LIB3051-024-Q1-K1-G11
cttttatcagctaaggccacctttggggagaaagaatggtatttcttcagtcctagagaccgaaagtacccaaatggtgcaaggccaaacagggcagctgcttcagggtattggaaggccactggcactgataagaccatagtgacatcattgcaaggaggagcacaagagagcgttggtgtgaagaaggctttggtgttttacaaaggaagacccccaaagggtgtcaagaccaattggatcatgcatgaatatcgccttgtagacaacaacaaacccatcaagctcaaagactcctccatgagagtaagtgtcacatgtccctactagcaataaggttttttagattacattttcatagtaattcttgatattgtcgaacttaggagaaattat

SEQ ID NO: 25979 - DNA, 447 bp, Glycine max
  Clone ID: LIB3051-087-Q1-K1-F9
agagcatcaaactcttcttcttcgatttccattgcgaagcgttactttttcttcttctgggtcttgattttcttcgctcttcgatcttcgtccggggactgctccgaataccaccaccaccactcgccgatggccacgatcggaggcttacacgactcccaaggctctcaaaacagcgtcgaaaccgaagccctcgctcgattcgccgtagacgaacacaacaagaagcagaattcgcttctggagtttgctagggtggttagggcacaggaacaggttgttgctggtaccctgcatcaccttactcttgaggctattgaggctggtgagaagaagctctatgaagccaaggtgtgggtgaaaccatggctgaatttcaaagaactccaagagttcaagcctgctggtgatgcaccatcgtttacctctgctgatcttggtgtcaaa

SEQ ID NO: 25980 - DNA, 411 bp, Glycine max
  Clone ID: LIB3051-001-Q1-E1-F12
ggaaaagcagaggagaattgccttctagaagcgttatctcgcagagatgggcactgtttctctgcttaggaagtttctgtgctggaatgctcttcactacaaggatatggactatacctgaaaacaacaaaggactagcacggccaacagcctcagaagctgaaaaattgagtttagtttcagaaggctgcaattccagaattttgcaagagatggaaatgaagcacgataaagacacttatggtgaagttttcaagagtcataattccatacaaacattggacaaggctatttcaaacttagagatggaattggctgctgcaagggcaactcaagagtctctacgaagtggtgctcctatttcagatgatataaggttgagtgaatcttcgggtaagagaaagtacctta

SEQ ID NO: 25981 - DNA, 325 bp, Glycine max
  Clone ID: LIB3051-003-Q1-E1-G8
gtcatcgtgtcgttcaccgataagatgtcgtattcaaggagatcaaggtattctcgttctccttctccatacaagcgatacagtaggtctgtgtccaggtctctcgcaaggacaagctccagaagccgttcaaggagtttatcaggagatgcagaagatccaggaaacaatttgtatgtgacaggattgtctcctaggatcaccaagagagaactggagaagcatttttctgctgacggaaaagtgatagatgtcgatctggtagttgatccttggacaagggaatcccgtgggtttggctttgtgacaatcgagactcttgagg

SEQ ID NO: 25982 - DNA, 357 bp, Glycine max
  Clone ID: LIB3051-006-Q1-K1-G9
gcagatctgagaccacctaccagattgctttgtctatcaaggacgaagtggaagaccttgaaaaggctggcatcactgttatccaaattgatgaagctgctttgagagagggtcttccactgaggaaatcagagcaagctcactacttggactgggctgtccatgccttcagaatcaccaatgttggtgtccaggataccacccaggtacactcttttggatcatcgcatatcactgaattataaattttttttgttcatcctcattttcacatatgtatgtaataatctaacttttcgtatagacagatccacactctcatgtgctacttcgacttcaaccgacttcatccattcc

SEQ ID NO: 25983 - DNA, 304 bp, Glycine max
  Clone ID: LIB3051-072-Q1-K1-B1
acgcccacgcatccagagtgaccaaccacgctgttcataaagctgctgctacattgaatgactgggatgatctccgtgcaacaaatgtcagtgccaaactggattctcaacataagaagctcaacctttcaatcctgccaaccaccactattggatccttccctcatactgtataactgatgatggtactccgtgaattcaatgctaacatgatctcctaggaatagtatgtaaagtcaattaatgaggaaattctcaaagttgtttagctctaataatagcttgatatttatgttcttgttca

SEQ ID NO: 25984 - DNA, 335 bp, Glycine max
  Clone ID: LIB3051-072-Q1-K1-B3
cccacgcgtccggagtgaccaacgaggctgttcagaaggctgctgctgcattgaagggttgagatcatcgccgtgcaacaaatgtcagtgccagactggattctcaacaaaagaagctcaaccttccaatcctgccaaccaccactattggatccttccctcagactgtagaactgaagagggtacgccgtgaattcaaggctaacaagatctccgaggaagagtatgtaaagtcaattaaggaggaaattcgcaaagttgttgagcttcaagaagagcttgatattgatgttcttgttcatggagaaccagagagaaatgatatggttgagtac

SEQ ID NO: 25985 - DNA, 216 bp, Glycine max
  Clone ID: LIB3051-072-Q1-K1-B5
actcccacgcttgctcagtgaccaacgaggctgttcacaatgctgctgctgcatttaaagattcgaatcgtctccattcaacaaatgtcagtgccatactggattctcaacaaaagaaactcaaccttccaatactgtcaaccaccactattgtatccttccctcagactctataactcatgaaggtactccccgaattcaaagctaacaagatct

SEQ ID NO: 25986 - DNA, 421 bp, Glycine max
  Clone ID: LIB3051-091-Q1-K1-C2
gatcatcgccgtgcaacaaatgtcagtgccagactggatgctcaacaaaagaagctcaaggttccggtccttccaaccaccactattggatccttccctcagactgtagaactgatgagggtacgccgtgagttcaaggctaacaagatctccgaggaagagtatgttaagtcaattaaggaggaaattcgcaaagttgttgaacttcaagaagagcttgatattgatgttcttgttcatggagaaccagagagaaatgatatggttgagtacttcggtgagcaattgtcaggctttgccttcactgttaatgggtgggtgcaatcctatggttcccgttgtgtgaaaccaccaatcatctatggtgatgtgaaagccgtccaagccaatgactgtcttctgtcatctctggctaaagctt

SEQ ID NO: 25987 - DNA, 393 bp, Glycine max
  unsure (1)..(393): unsure at all n locations
  Clone ID: LIB3051-050-Q1-K1-H7
cggacgcgtgggcggacgcgtgggctgacgcgtggggtacgatcaaaagcattgagattgttgagcctgccaagcccaaaccaccacctcaaccagaaaagcccaaggaaccagagaagccaaaagagccacagaagccgaaagagccagagaagccgaaagagccagagaaaccgaaggagccaccgaagcctaaggaacctgaaaaaccaaaggaaccagagaagcccaaagagcctgagaagcccaaggagccagagaagcccatagagcccgagaagcccaggaacccgagaagcccaaggagcccgagaagcccaagcctgaatgccctcctccggtgccggtttgtcccgcaccggtgccagtgtgtccgncacagccaacaccttc

SEQ ID NO: 25988 - DNA, 382 bp, Glycine max
  Clone ID: LIB3051-063-Q1-K1-C10
gttacttactcctcacactttctctatcgttttcatctctgtttcagatctgagctcgcgtatattccccagccatggccgaaaaggtcaccataatgaggctcaaggttgatcttcagtgccacaaatgctacaagaaggtcaagaagattctctgcaaattccctcaaatccgagaccaggtgtacgacgagaagaataacatcgtgaccatcgcggtggtttgctgtaaccctgagaagctcagggacaaaatttgctgcaaaggttgtggtacgatcaaaagcattgaaattgttgagccttccaagcccaaaccaccacctcaaccagaaaagcccatagaaccagagaagccaaaagagccacagaagccgaaaga

SEQ ID NO: 25989 - DNA, 440 bp, Glycine max
  Clone ID: LIB3051-053-Q1-K2-A5
cccacgcgtccggctcagacacgcacagatctgatctgatctgatctatctgaagccgaaaacgccgacggtgatgatgaagatggggtgttcacgttgctccttcttcctcttcctcatcctcttagtggcgctcttcccctcgtcgctctccgagatccgcttctccgagatccgaaacgacgatcgccgcatcatccccttcgatcagtttggattcacccacaagggtcgccttgagctcagcgtttccaaaatctcactctccaattccaatttggacctctcgaaggtcggcttctttctctgcaccctcgattcctggcttcatgtcctccagcaactcgaggacggtgagattcggtgcgcccttcaatccgatctggtcaagtccgtctattccttcaattctctaaacggcaaggactctttcagcacgc

SEQ ID NO: 25990 - DNA, 427 bp, Glycine max
  Clone ID: LIB3051-040-Q1-K1-E11
aaaacatagaacgaagaagaagaacagatcagaaaaatggcgtccaaagttccaaagaaggccaatctcctggatcaccactccatcaagcacatccttgacgagtctgtctccgaggtcgtaacgagtcgtgggtatgtggaagacgtgagattgagcaatgcgaggcttttcattggggcaatcatcatcgtcattgctttattcgctcaattctacaagaagaagttccccgaaaatagggattttctcatcgcttgcatcgccttgtatgtgatcttcaatgggttgttgcagctgatcatatacactaaggagaaaaatgccattctgtttacttatcctcctgttggatcctttactagtaccggtttggtggtttcctccaaattgcctagattttctgacatgtacacactcactatag

SEQ ID NO: 25991 - DNA, 427 bp, Glycine max
  Clone ID: LIB3051-104-Q1-K1-C8
taagggttattaagagagagaaagagatacatagttagagagagagcagagacaccgttcggtgctccgctgaattcggttgtggcccctgcgctccgctgcaattttacactcaaaaggacctcatgtctaacatagaggagaacaaagatctgggacagatggacgtggatgcatctgatgagtcagctaacatgccatcaccccaaaagcaggaggagtctgtaaagaaaaagtatggaggaatgctgcccaaaaagccaccactcatatctaaggaccatgaacgtgcttacttcgattctgcggattgggcacttggaaagcaaggcggagagaagcctaagggaccacttgaggctcttcggcctaaattacagccaacgcatcatcaaacacgttaccggaaatctccttatgctccttc

SEQ ID NO: 25992 - DNA, 409 bp, Glycine max
  Clone ID: LIB3051-079-Q1-K1-D5
tgtagttagaattttaaaacttagtagttatttactgtgtttcttttttgtacttttggtgagtgtcaggtacttgatagcctcacacacaacagactatcagaatccaatgttcttattcaacactgttgcagtgattgtgctggttgttgcaaagttcccccacatgcacaaggtcaggatatttggaatcaatgctgataagtgaaatgttgctgtggccatgacacttggttaccactccttacctgctcaagagcctcttgtacttttgttctggaaaaaaaggtcacacctttgtatagaaggcagaactggaaggatactcaagtaatgttttgttgccaactgctttttaagctgcttctaaaagtattattaaacaaagtaatatgttgagttaattctg

SEQ ID NO: 25993 - DNA, 451 bp, Glycine max
  unsure (1)..(451): unsure at all n locations
  Clone ID: LIB3051-082-Q1-K1-H7
cggacgcgtgggttttttcactggaagaaaggaactccatttgcggaggaccaggggatgtacaatagattgacttggtgggagcaggtagacaatggaaagcagcttactcggaacaggaagtttctcacagttgttcctttggtgctgtacttgatagcctcacacacaacagactatcagaatccaatgttcttattcaacactgttgcagtgattgtgctggttgttgcaaagttcccccacatgcacaaggtcaggatatttggaatcaatgctgataagtgaaatgttgctgtggccatgacacttggttaccactccttacctgctcaagagcctcttgtccttttgttctggaaaaaaaggtcacacctttgtatagaaggcagaactggaaggatactcaagtaatgttntgttgccaactgctttttaagctgcttctaaa

SEQ ID NO: 25994 - DNA, 311 bp, Glycine max
  Clone ID: LIB3051-006-Q1-K1-H2
cccacgcgtccggtgggacatgtgcacgactattcaaatctgaagtacaatttggtgatgcgggagccaaaagtggtggtgagttggagtctgctcaagcaaagaatcaggcactaagggatgctggagctgttgttcccacatcatatgaagcttttgaagtttcaattaaggaaacatttgataaattggttgaagatgggaagatcacaccaatcaaggaaatcacaccttcaccaatccctgaagaccttagtactgcaattaagagtggaaaagtccgtgctccaacttatattatttccaccatt

SEQ ID NO: 25995 - DNA, 457 bp, Glycine max
  Clone ID: LIB3051-028-Q1-K1-D7
cccacgcgtccgcccaactcgccctcgactcacatccttgtccgattccgcgaacgagtcgagtgaatcgggttggtaagatctattctgtttcttcgtcatggcaaccggacaactattctcgcgtactacacaggctttgttttacaactacaagcaacttcccatccagcggatgcttgattttgacttcctttgcggcagggaaacaccatcagttgctggaataattaaccctggttctgagggatttcaaaaacttttttttggtcaggaggaaattgccatcccagtgcatgctaccgttgaagcagcttgtgctgcacatcctactgccgatgtcttcatcaactttgcttcatttagaagtgctgcagcatcatccatggctgctttaaaacagccaacaattagagttgttgctattattgctgaaggagtacccgagtcagacact

SEQ ID NO: 25996 - DNA, 460 bp, Glycine max
  Clone ID: LIB3051-077-Q1-K1-D7
cccacgcgtccgcaactataatcaacttcccattcagcggatgcttgattttgacttcgtttggggcatggaaacaccatgagttgctggaataattaaccctggttctgagggatttcaaaacttttttttggtcaggaggaaattgccatcccagttcatgccaccattgaagcagcttgtgctgcacatcctactgctgatgtcttcatcaactttgcttcatttagaagtgctgcagcatcatccatggcagctttgaagcatcctacaattagagttgttgctattattgctgaaggagtacccgagtcagacactaagcaattgattgcatatgcccgatcaaacaataaggttgttattggtccatccactgttggaagcattcaagcaggtgcttttaaaattggtgacacagcttgaacaattgacaatataattcagtgcaagctctaca

SEQ ID NO: 25997 - DNA, 347 bp, Glycine max
  Clone ID: LIB3051-015-Q1-E1-A2
cacgcgtcagagagtctagaaacaacacaacacaacgcgaatggctacggcgctggagaagaaagcgaaggaggcattcttcgacgacgaattcggtctggccgtcgatctctactctgaagccatacgattggatccgaacgacgccaatctcttcgcggacagagcccaagcccatatcaaactcaacgctttcactgaagccgtttccgatgccaacaaatccatccaattaaacccttccttgcccaaggcctatcttcgtaaagccaccgcttgtatcaaactccaagaatatcacaccgccaaggtagcgcttcaaaacggtgccgcttttgcccaagacg

SEQ ID NO: 25998 - DNA, 461 bp, Glycine max
  Clone ID: LIB3051-085-Q1-K1-D5
cccacgcgtccgacacaacacaacgcgaatggctacggcgctggagaagaaagcgaaggaggcattcttcgacgacgaattcggtctggccgtcgatctctactctgaagccatacgattggatccgaacgacgccaatctcttcgcggacagagcccaagcccatatcaaactcaacgctttcactgaagccgtttccgatgccaacaaatccatccaattaaacccttccttgcccaaggcctatcttcgtaaagccaccgcttgtatcaaactccaagaatatcacaccgccaaggtagcgcttcaaaacggtgccgcttttgcccaagacgattcaagattcgccaacttgattcaacaatgtgatcgctgcattgcagaggaatcaagtggccttactagcaccttgtcttcccatttgagcaatagaaatcatgggatgactaaagaagaagctg

SEQ ID NO: 25999 - DNA, 354 bp, Glycine max
  Clone ID: LIB3051-007-Q1-E1-G2
cgtccgaccacacgtccgcccacgcgtccgcccacgcgtccggccttggccgacaggtccgggtaatctttgaaatttcatcgtgatggccggaccaatcttgcattcatcacttgtgtcttcgactgattctcaccctgctaaaaagacatcaacatcaagggcaagtaaaggaaaacttgcgcctgctggtggtggaaggctgggtaagattgatgaagaaaaagctttcagtggaaatccactgaaatcaacatctgaaaacactgagcctcgtagatccattcgcaggattcagccgacgtcaagactattagaaggattgcagagctcttgaattagctcaaagattcc

SEQ ID NO: 26000 - DNA, 444 bp, Glycine max
  Clone ID: LIB3051-088-Q1-K1-D9
gtgttctcttcttcacactgcagttgatctggtgaatgagaccaaattggaccaagagattaagtcttggcttgcatttgcagcacaaaaagttgttgaagtaaatgccttggccaaggcattgtctggacagaaggatgaggttttcttttctgctaatgctgctgccttggcttcaaggaagtcctccccaagggtgataaatgaggctgtccaaaaagccgctgctgctctgaagggctctgatcatcggagggccacaaatgttagtgccaggttggatgctcaacagaagaaattgaatctttctgttcttccaacaactacaattggatctttccctcaaactgccgatcttagaagagttcgtcgtgaattcaaggctaacaagatctccgaggaagattatatccgtttcattaaggaggaaatttacaatgttgt

SEQ ID NO: 26001 - DNA, 370 bp, Glycine max
  Clone ID: LIB3051-111-Q1-K1-G10
agaaattgaatctttctgttcttccaacaactacaattggatctttccctcaaactggcgatcgtagaagagttcgtcgtgaattcaaggctaacaagatctccgaggaagattatatccgtttcattaaggaggaaatttacaatgttgtaaagctccacgaagaacttgacattgatgtcttggtgcatggaaagcccgagaggaatgacatggttgagtactttggagagcaattatctggctttgcatttactgccaatgggtgggtgcaatcatatggatcccgctgtgtcaaaccttccatcatctatggtgatgtgagccgttccaagcccatgacaagtttctggtcttcaactgctcaaag

SEQ ID NO: 26002 - DNA, 406 bp, Glycine max
  Clone ID: LIB3051-014-Q1-E1-F12
tcgacccacgcgtacgattcactaatcactaccaattgctaaagatatttcactcactggtcacactactaatacatctttctggacatggcttcaactgtctcttacatgcttctacttctccttctagtgatggttgcctttgctggggacttacacaaagactttgacatcacatggggagatggccgctccatgatactaaaccatggagagttactcactctttcattggacagagcatctggctcaggttttcaatcaaagaatgagtatctctttgggaagattgacatgcagctcaagcttgtccctggaaactctgctggcaccgtcactgcctattatttatcttcaaaacgatcaacttgggatgaaatatactatgaatttcttggaaatctga

SEQ ID NO: 26003 - DNA, 436 bp, Glycine max
  unsure (1)..(436): unsure at all n locations
  Clone ID: LIB3051-037-Q1-K1-G4
gcatctgcagctatcttcaaaaggatcaacttgggatgaaatagactatgaatcacttggaaatctgagtggcgatccatacatccttgacacaaacgttgctagccaaggcgagggggacagggaacaacaattctatctatggtttgacccaactgctgatttacacacttactccatcatgtggaacccccaaaggattatattctcagttgatggcactcccattagagagttcaagaactcggaggctatcggggatcccttcccaaagaatcagccaatgaggatatattctagtttgtggaatgctgatgactgggcaacaagaggtggacttgtgaagactgattggacacatgctccgttcacagcttgctacagaaactttaatgctgacgctngcatatggtcttctggagcatcttcttgcgct

SEQ ID NO: 26004 - DNA, 384 bp, Glycine max
  Clone ID: LIB3051-044-Q1-K1-G11
cccacgcgtccgaattgctaaagatatttcactcactggtcacactactaatacagctttctggagatggcttcaactgtctcttacatgcttctacttccccttctagtgatggttgcctttgctggggacttaaacaaagactttgacatcacatggggagatggccgctccaagatactaaaccatggagagttactcactctttcattggacaaagcatctggctcaggttttcaatcaaagaatgagtatctctttgggaagattgacatgcagctcaagcttgtccctggaaactctgctggcaccgtcactgcctattatttatcttcaaaaggatcaacttgggatgaaatagactatgaatttcttggaaatctg

SEQ ID NO: 26005 - DNA, 468 bp, Glycine max
  Clone ID: LIB3051-090-Q1-K1-D5
cccacgcgtccgatcactaccaattgctaaagatatttcactcactggtcacactactaatacagctttctggagatggcttcaactgtctcttacatgcttctacttccccttctagtgatggttgcctttgctggggacttaaacaaagactttgacatcacatggggagatggccgctccaagatactaaaccatggagagttactcactctttcattggacaaagcatctggctcaggttttcaatcaaagaatgagtatctctttgggaagattgacatgcagctcaagcttgtccctggaaactctgctggcaccgtcactgcctattatttatcttcaaaaggatcaacttgggatgaaatagactatgaatttcttggaaatctgagtggtgatccatacatccttcacacaaacgttttcagccaaggcaagggggacagggaacaacaattctatcta

SEQ ID NO: 26006 - DNA, 413 bp, Glycine max
  unsure (1)..(413): unsure at all n locations
  Clone ID: LIB3051-092-Q1-K1-D5
ggaaaatctgccaaagacaatctttgtgatagttagtgaatcaaggatggaccttctaagggctgttataattgaacctcaaggcaccccataccatgatggtcttttctttttcgattgcctctttccttctacctaccctgcaggtccaccgaaagttcactaccattcaggtggcctaaggctaaatccaaatttatataattgtggaaaagtctgccttagtctcttgggcacttggcatggtagtaatagtgaaaattggataccagaaaaatcaaccatgctacaagtgttggtttcgatacaagctctaattctaaatgagaagcctntttttaatgagcctgngtatacgtcaacatatccttgtgctgangggcaaaagaagatctaangagtacaacgagagt

SEQ ID NO: 26007 - DNA, 338 bp, Glycine max
  Clone ID: LIB3051-015-Q1-E1-G2
cgtaagcccacacgtccgcccacgcgtccgggaatatgttcaacacaagatgatggatcaagctgcattctctagagagggggccgaaaaggaatatgttcaacacaagatgatggatcaagctgcacagctgtggagtttgatttctcaaagaggttatctttacgtctgtggtgatgccaacggtatggccagagatgttcatcgaactcttcataccattgtccagcagcaggaaaatgtggactcgacaaatgctgagagctatagtgaaaaaacttcaaatggatggacgttacctaaaggatgtgtggtgatttttctgatcattcctctgc

SEQ ID NO: 26008 - DNA, 425 bp, Glycine max
  unsure (1)..(425): unsure at all n locations
  Clone ID: LIB3051-043-Q1-K1-A3
ggactcttgaagtggaaatatgcttatctgaattcagttgattttcttttcgaggttgatggtgatcgtgagctactttttctcaatgagcggggaaagaagaaacttttggaagggaatagggttgaattcacagatggttcagatccctcactttattctggaaagataattgaatgttcttgggattttgacaaactggaatggaagtatatgcgaatcagaacagataaatcaactccgaatgagtttaatacttacaggaaggtgctgcgaagcataagagacaacatcaccgaggaagatttgttgaatgaaataagtgagataattcgccttcccatgtatgctgaccggatcagaatngatagtaaagcgaatcagcatgctaatgtcgcanggcgaaagtgatttggtggggttaa

SEQ ID NO: 26009 - DNA, 433 bp, Glycine max
  Clone ID: LIB3051-050-Q1-K1-B7
cccacgcgtccgcacaattgtttgatgagctggttgagtctaaagttcatataaaagtttcaaccctaaatgccatgcttgatgtttactgcttaaatggtttaccgcaggaagcagattcactgtttgaaagagcaattagtataaaaatacatcctgattcatcaacatttaaacttctttataaggcttacactaaagccaaccagaaggagcttcttgataaattgctgaagcatatggataaagatggtattatcccaaataagaggttcttcttggatgctttgggtgctgttgcgtctttaccagcaaattcagaatctgctaatgctgcaactgattcaaacacagcaaattcagaatctgctaatgctgcaactgattcaaacgcatcaaattcagaatctgctaatgctgcaactgattcaaa

SEQ ID NO: 26010 - DNA, 383 bp, Glycine max
  Clone ID: LIB3051-112-Q1-K1-G9
cccacgcgtccgcacaaagtcacaatggaccccctctctctcttctgcaccggagccctcgtcgccggcggcctctactggttcgtgtgcgttctgggccccgccgagcagaagggcaaacgcgccaccgatctttccggcggctccatctccgccgagaaagtccaagacaactacaaacagtactggtccttcttccgccgcccaaaggagatcgagaccgccgacaaagtccccgacttcgtcgacaccttctacaatctagtcacagacatctacgagtgggggtggggccagtccttccacttctccccctccatccccggcaagtcccaccgcgacgccacgcgccttcacgaggagatggccgtcgatctcatcga

SEQ ID NO: 26011 - DNA, 469 bp, Glycine max
  Clone ID: LIB3051-112-Q1-K1-D5
cggacgcgtgggttggaaagcaatgagggtgatcctgagttacttgtcttcattccattgacttcagatgtcaagattaagagcatatccatagttggtggagctgatggaacaagtccttccaagatgagagtgttcatcaatcgagaaggaattgacttttcagatgcgcaaagcatgcaggctattcaggaatgggatttggttgagaatatgcaaggagtattggaataccagacaagatattctaaatttcaaagcgtggcaaatattaccttgcactttcctgagaattttggtggtgacactactaaaatacactatattggctttaaaggcgaagccactcagttgaaaagggatgttgttgccactattgtttatgagcttatgccaaatccttctgaccacaagacacgtgctgaaagtggatggggtctttctcacatagaatgaaatagttacattt

SEQ ID NO: 26012 - DNA, 371 bp, Glycine max
  Clone ID: LIB3051-074-Q1-K1-H2
ggtcctgagttccagccacgcgtccgaccacgcgtccggacgaattggaacccaagaatgttgcgccgtcgtcgttgtaagattacgaaggaggatgagcatgatgttgttgttgagaaggtcgtacgtaacaagcgaaagtgcatcaccactgcgaagggactggaactttttggtgtcaagctcagtgatgcttgcaagaaactcgggaaaaagtttgctactggagcctctgttgtcaagggacctactgagaaagaacaaattgatgttcaaggggatatagcttatgatgttgtggagttcattacagatacatggcctgatgttcctgaaacatcaatgttatatatagaagatgggagaaaggt

SEQ ID NO: 26013 - DNA, 407 bp, Glycine max
  Clone ID: LIB3051-115-Q1-K1-D5
tacgatacgaagtttcctctatcttctcttctctgagggtagctttgattcattgaaggtttttccttcaccaactttccagaggaagaaagtgacttgatttctgggcctgctcgttttattactgagaaaccaaatacatgatactaaaaactcaaatggaagaaaagcagttagattttaatcagcctcttttatcggtaaggcgaatctcatcaacggcggcctctgaaaatgacaataaaagaaaagctgataaatcagtgcggaaacgacctcctcttccgttttacaaatcagagttaaaatcaggtccagtgactaaccctggaactgttccttttgtatgggagaagactcctggaagacctaagaatgaaagcaaactacaaacaagggctgtcgaa

SEQ ID NO: 26014 - DNA, 424 bp, Glycine max
  Clone ID: LIB3051-018-Q1-E1-G10
aggtcccggccgacccacacgtcagagaacctgtgctttttgaggatatactgtgccagattattgacatgattggacctgaggaagagagctatataactctgcgtgacctgaaaggtggtaaactctcaggaagtgttttcaatatcctgttcaatctgaataagttcatggcctttgaaactcgtgacccatttttgattcgtcaggaacgtgagaatcctacattgacagagtgggatcgctttgctcatagagaatatattatgctttctatggaagaagatgtagaggatgcctctaacggtagtgcagaagtttgggatgaatcactagaggctcccttctgacgtcatttattgtatgaaaagatattaacgccccagatcggatggactggccattgttcagagacacatgactc

SEQ ID NO: 26015 - DNA, 426 bp, Glycine max
  Clone ID: LIB3051-034-Q1-K1-C9
cccacgcgtccgctctaaaataaaaaaccctaacttctgaacctttcaccgcatcgcgaccgattccctatctccactaatcaaagaaaagaaaatgagtagacgctcgagcagaactgtctacgttgggaatctacccggtgatatccgtgaaagagaagttgaagatttgtttctgaagtacggacacataacacacatcgacctaaaggttcccccaagaccacctggttatgcatttgtagagtttgaagatgctcaagatgctgaggatgcaattcgtggtcgtgatggctatgattttgatggccaccggttacgggtggagcctgcccatggtgggcgtggtcattcatcctcaaaagatcggcacaatagtcacagcaatggccgaggtggacgtggggtatctaggcgctctgaata

SEQ ID NO: 26016 - DNA, 467 bp, Glycine max
  Clone ID: LIB3051-080-Q1-K1-E6
ctctcccgtgtcgtgtcgtgtcttcttctctaaaataaaaaaccctaacttctggacctttggccgcatcgccaccgattccctatctccactaatcaaagaaaagaaaatgagtagacgctcgagcagaactgtctacgttgggaatctacccggtgatatccgtgaaagagaagttgaagatctgtttctgaagtacggacacataacacacatcgacctaaaggttcccccaagaccacctgagtatgcatttgtagagtttgaagatgctcaagatgctgaggatgcaattcgtggtcgtgatggctatgattttgatggccaccggttactggtggagcctgcccatggtgggcgtggtcattcatcctcaaaagatcggcacaatagtcacagcaatggccgaagtggacgtggggtatctaggcgctctgaatatcgtggtctagtcactggattgccct

SEQ ID NO: 26017 - DNA, 421 bp, Glycine max
  Clone ID: LIB3051-086-Q1-K1-B12
caaaaaccctaaccaagaaagttttcaccgcatctccacctattctcaatctccacagatcgaggaaaagagaatgagtagacgctcgagcagaactgtctacgttgggaatctacctggtgatatccgtgaaagagaagttgaagatttgtttctgaagtatggacacataacacacattgacctaaaggttcccccaagaccacctggttatgcattagtagagtttgaagatgctcaagatgctgaggatgcaattcgtggtcgtgatggctatgattttgatgggcaccggttacgggtggagcctgcccatggtggacgtggtcattcatcctcaagagatcgatgcactagtcacagcaatggccgaggtggacgtggggtgtctaggcgctctgaatatcgtgttctagtctct

SEQ ID NO: 26018 - DNA, 339 bp, Glycine max
  Clone ID: LIB3051-066-Q1-K1-B7
gctagatctgaagagaacagatgttgagaaagagctgaaaagtgtgattcaacagaaggaagaaatattaaaactacaacaatatgaaaaaaaaaagttaaagaatgagaaacaaggcacacaggcatatgtgcaaagggagttagaaactcttaagttggctaaagagtcatttgctgcaaaaatggagttggagaagtcaagcctagctgaaaaagctcaaagtgagaggaaccaaatacttttggattttgagctgcaaaaaaaggaacttgaagctgatttgcagaatcagtttaagcagaaggaaaaagatttgtttgaaaggaagaagttttt

SEQ ID NO: 26019 - DNA, 387 bp, Glycine max
  unsure (1)..(387): unsure at all n locations
  Clone ID: LIB3051-013-Q1-E1-D3
agaatctggataaaaagcagaaagcttccaggggacagaataaagatgtccaagaaagtcgaggacaatccgtagtaggaaatactcaagatgctctagatgaagaagaggaagttaaacaggaaagagttattattacccttaggccattgaatatgcaggatttcaaagaggccaaaaatcaggttgctgcaagctttgcagctgaaggggctggaatgggtgagttgaaacagtggaacgatttgtacggagaaggcggttcaaggaagcagcagcagttgtcttacttcctgtgaattttactgaggatttcaatgaaactgtgtgggaacattttcgtggctacnacatttttcaatgatagtgtggggaaacattttccac

SEQ ID NO: 26020 - DNA, 458 bp, Glycine max
  Clone ID: LIB3051-066-Q1-K1-G9
tcaggtttttgtggataagagtgagctataatggctgccaggagaccgggtttaattgctttgtttgatgttgacgggactcttacagctcccaggaaggtggtcacaccggaaatgttgacattcatgcaagaactacgaaaggttgtaacggttggagttgttgggggttctgaccttataaagatatcagagcaacttggcagcacagttaccaatgagtatgattacgtattttctgagaatggtcttgtggctcacaaggaaggaaagctcattggaactcagagcttgaagtcattccttggtgaagaaaagctcaaggagtttattaactttacacttcattatattgctgatttggacatccccattaagaagggaacatttatggagttccgtaatgggatgctgaatgtgtcacctattggccgaaactgtagccaagaagaaagaga

SEQ ID NO: 26021 - DNA, 342 bp, Glycine max
  Clone ID: LIB3051-075-Q1-K1-B7
caattcttatatataaacccctttcgagatctgcttcaagctctgtccccttcttgcacttccgcgctcctctcaggtttttgtggataagagtgagctataatggctgccaggagaccgggtttaattgctttgtttgatgttgacgggactcttacagctcccaggaaggtggtcacaccggaaatgttgacattcatgcaagaactacgaaaggttgtaacggttggagttgttgggggttctgaccttataaagatatcagagcaacttggcagcacagttaccaatgagtatgattacgtattttctgagaatgggtctgtggctcacagggaagga

SEQ ID NO: 26022 - DNA, 431 bp, Glycine max
  Clone ID: LIB3051-062-Q1-K1-E4
tgatgatgttgatttagagagaattgcaaaagatactcatgggtatgttggtgctgagcttgctgccctttgcactgaagctgctttgcaatgcattagggagaagatggatgtaattgacttggaggatgagacaattgatgcagaagtactgaattccatggcagttacaaatgagcatttccagactgcccttggaacaagcaacccatcagctttacgtgaaactgttgttgaagtgcctaatgtcagctgggatgacattggaggcctcgaaaatgtcaagcgtgaactgcaagagactgtacaatatccagttgagcacccagaaaagtttgagaagtttggtatgtctccatcaaaaggagtactcttctatggtcctccgggatgtgggaaaactttgttagccaaagcaattgctaatgaat

SEQ ID NO: 26023 - DNA, 291 bp, Glycine max
  Clone ID: LIB3051-075-Q1-K1-F8
ggcagttacaaatgagcatttccagactgcccttggaacaagcaacccatcagcttgacgtgaaactgttgttgaagtgcctaatgtcagctgggaagacattggaggccttgaaaatgtcaagcgtgaactgcaagagactgtacaatatccagttgagcacccagaaaagtttgagaagtttggtatgtctccatctaaaggagtacttttctatggtcctccaagatgtgggaaaactttgttagccaaagcaattgctaatgaatgtcaagctaacttcatcagtgt

SEQ ID NO: 26024 - DNA, 422 bp, Glycine max
  Clone ID: LIB3051-018-Q1-E1-D3
agctaatagccaccgccacaacccttcgagtttcgaaaaccctaaccccacaaccccctctcacaaactcactctttttcattgtttgataattcgaacttcctccatctttcccgaagtttgctatcatggctgggttggcgccagaaggatcacaatttgatgctcgtcaatatgatgctaagatgaatgagttacttggaactgatgggcaagatttttttacttcttatgacgaagtttgtgaaagctttgatgctatgggattgcaggagaaccttctgaggggtatttatgcatatggttttgagaagccctctgcaattcaacaaagggggattgttcctttctgcaaggggcttgatgttattcagcaagcacaatctggaactggaaaaactgctaccttttgttctggagtt

SEQ ID NO: 26025 - DNA, 318 bp, Glycine max
  Clone ID: LIB3051-087-Q1-K1-A9
gtgagtcgataatttctatgggcttagcatcaacctgtaataataatatcctggaggtcatgtcacatagatgatgcgtatgacgctatgctttgagagacccacacatacgagtcatgtgtgttatgatttcatatcccttgacttgtctcttattgattggtatgcctaattaaggctataatatcaatgatgccaagtgagacgcccatgcatttggatttggttgttacagaccatgctttgtgagaaccactaatcaatgctaaattgaacatatttggatgttggtggttttataaatttacattgcgtctt

SEQ ID NO: 26026 - DNA, 437 bp, Glycine max
  unsure (1)..(437): unsure at all n locations
  Clone ID: LIB3051-025-Q1-K1-D3
attttgtcaagtatgcacatgatgaagaatctgcggaggatcangaagagactgngtggaaatatatccatggggatgtgtttaggttccccaagtttaagtctctgtttgcggctgcgcttggatctggcactcagttgtttacccttacggtgttcatattcatattggctcttgttggtgtgttttatccgtacaatcgaggggcactgtttactgcactggttgtcatatatgcacttacttcggggattgctggatacaccgcaacttcattctattgtcagttggaaggaacaaactgggttaagaatctgctggtgactggattccttttctggggaccctttgttctgacctttctgttttctaaacactgttgcaattgcttacaaagctactgctgccctcccatttgggacgattgtggttatagt

SEQ ID NO: 26027 - DNA, 424 bp, Glycine max
  unsure (1)..(424): unsure at all n locations
  Clone ID: LIB3051-094-Q1-K1-E5
cccacgcgtccgcaaacctcttcccaatgaggaacctctctttcttcttcttcttcttcttcaccttcttcgccgccgtcagatctgatccctcagatcaccgctacaaagaaggcgaccccgtccctctctacgccaacaaagttggccccttccacaaccctagcgaaacctaccgttacttcgaccttcccttttgtgaaccaggtgatttgaaagagaagaaggaggcgctcggggaggtgctgaatggggaccgtttggttagcgcgccatacaagctggagttccagcgcgacaaggagttggtttccgtgtgcgacaggaagctctccaaacaggacgtggctcggttcagatccgcggtgaggaaggactactacttccagatgtactacgacgaccttnctatttggggctttat

SEQ ID NO: 26028 - DNA, 420 bp, Glycine max
  Clone ID: LIB3051-094-Q1-K1-E11
cccacgcgtccgcaaacctcttcccaatgaggaacctctctttcttcttcttcttctggttcaccttcttcgccgccgtcagatctgatccctcagatcaccgctacaaagaaggcgaccccgtccctctctacgccaacaaagttggccccttccacaaccctagcgaaacctaccgttacttcgaccttcccttttgtgaaccaggtgatttgaaagagaagaaggaggcgctcggggaggtgctgaatggggaccgtttggttagcgcgccatacaagctggagttccagcgcgacaaggagttggtttccgtgtgcgacaggaagctctccaaacaggacgtggctcggttcagatccgcggtgaggaaggactactacttccagatgtactacgacgaccttcctatttggggct

SEQ ID NO: 26029 - DNA, 453 bp, Glycine max
  Clone ID: LIB3051-081-Q1-K1-B7
attgcaaaagaatatggagttaaaaggtatggttggcttgtttacatggataagaaggctaaggaggaagaaaaaaggcaaaaagagttgatcaaaggtgatcctgcaattaggaagctgagtcgtaaggaaagaaggaaggcttctcagattgaaagggagagagagagagaagccacacggatatctggaactcgtgtgctgcatcatgatccctaccggtagaaaatattgatattttcatccttcagattgagcgaagaatatatgatattgtgctccttctaacgtatgggattgctgattattcttccttgccactcataatgttgcactcaatatatatatatgcagggaaacaaggcaaagtcctacatatgaagcctattctcgatctagaaggtcaaggtctccgttgcggtcatactctccgtcgcattcaaggcgttattc

SEQ ID NO: 26030 - DNA, 448 bp, Glycine max
  unsure (1)..(448): unsure at all n locations
  Clone ID: LIB3051-092-Q1-K1-A1
aaagcagagaaggaccggagggagaagaaggagaagaaaagggaaaagaaagagaggaagagagagaagaaggagaagaaagagagaaggaaagcggagaaagaaaggaaacttaaagaaggagcaagtgcctcccctggcactgatgatggcaaaaagtttaagctcatcaacgaactaaaggaaaccaaagtagatggaaaattgcaaaagggtgaagacagtgagaatgaacaacatgagaggagtggaattacagaggaacttgacctacctgtcacttctgtggagccttgctgcctttctgactgtactcaaagcagtaagagaaaaaggagctccccagaatcaactcatgatcatggatctgctattaaaattcgacttccgttgaggaagcatagagaacctgaagaattganatccaaatcaaaatttcaaagcgggt

SEQ ID NO: 26031 - DNA, 465 bp, Glycine max
  unsure (1)..(465): unsure at all n locations
  Clone ID: LIB3051-083-Q1-K1-E7
ggcactcttaagacctattatgaaactatggtggagtctgatttgaagaagtacctggcggatatattgtcggttttggcactcacaatgtctgctgaaggagaacgagaaagcctcaagtacagattattgggttccgagggtgacattggttcctggggccacgagtatgttaggaatctagctggagaaattgctcaggaatacacaaaacgacagagtgaagaggcccccatagatgatctcatggaacttgtgcaacaaattgttgcttttcacatgaagcataatgcagaacctgaagctgttgatcttttgatggaggttgaagatctggatatgttgagtggacatgttgacaaaacaaattttaaaaggacttgcctatatctcaccagttctgcaagatacctnccaggaccagatgatatgctagttttggacattgcatattcaatttacaaa

SEQ ID NO: 26032 - DNA, 426 bp, Glycine max
  Clone ID: LIB3051-084-Q1-K1-B11
cccacgcgtccgcccacgcgtccgcccacgcgtccgcccacgcgtccgggttggtggggccacgagtatgttaggaatctagctggagaaattgctcaggaatacacaaaacgacagagtgaagaggcccccatagatgatctcatggaacttgtgcaacaaattgttgcttttcacatgaagcataatgcagaacctgaagctgttgatcttttgatggaggttgaagatctggatatgttgagtggacatgttgacaaaacaaattttaaaaggacttgcctatatctcaccagttctgcaagatacctcccaggaccagatgatatgctagttttggacattgcatattcaatttacaaacaatttgaagaatatccaaatgcactccaaattgcattgttcatggataattcgcagcatgtg

SEQ ID NO: 26033 - DNA, 421 bp, Glycine max
  Clone ID: LIB3051-014-Q1-E1-G4
accacgcgtcaaaggcaatggctatcaggttgatggatttggactctccattcttcaacactctgcacagaatcatggatctgacggaggacgccgagaagaacttgaacgctccgactcggacatacgtgcgcgacgccaaggcgatggctgcgactcctgctgacgtgaaggagtaccctaactcgtacgttttcgtgatcgacatgcctggcctgaaatctggggacattaaagtgcacgtggaggacgacaacgtgcttctgataagcggcgagaggaagagggaggaggaaaaagagaaagaagggggaaagtatttgaggatggagagaacgcttggcaagtttaatgaggaagtttactctccctgagaatgccaacaccgatgctatctctgctgtctgccaagacggtgtgc

SEQ ID NO: 26034 - DNA, 441 bp, Glycine max
  Clone ID: LIB3051-038-Q1-K1-D11
cacactagtatttctcataaaagggagattaccttggcagggttatcagggtgacaataaaagttttcttgtttgtaagaagaaaatggccacttccccggagttgatgtgctgctttgttcctgctccatttaagcagtttcttgaagctgttactaatatgagatttgatgaggagcccaattatgccaagcttatatcactttttgaaagcttgattgaaccatgcactccgttgagacctattagaatagatggagctttaaaggttggccaaaagcgaggaaggatgcttataaatctggaagaagatgagcaacctaagaagaaagtgcgattggggagtcctgctactcagtggatatcagtgtataatgctcgccgtcccatgaagcagagatatcactataatgttgcagacactaggctacggcagcatgt

SEQ ID NO: 26035 - DNA, 408 bp, Glycine max
  Clone ID: LIB3051-094-Q1-K1-B7
ctttgaatggattctaattcttcttctccaagtcccaacaaccacgcttccacaaccgaaatcaacggtttctttcatcccaagctgggttcccaacctgccaccagctcgcgatctcgtcttgccatggcttctcctgtgaactccgatcctaaggtcgtcaccggcacagccggttacatcctcgaagacgttccgcatttcaccgattacattcccaatctcccaacataccctaatcctttgcaagacaaccctgcttattcagttgttaagcaatattttgtgcatgttgatgacagcgttcctcaaaaggtcgttgttcacaaagatggtgcaagaggggtacattttaggcgtgccgggcctcgtcaaaaggtgtactttgaagctgatgaagttcaagct

SEQ ID NO: 26036 - DNA, 432 bp, Glycine max
  Clone ID: LIB3051-011-Q1-E1-A8
aggatttggcataatacattgatttgtttcttaaaaacaacactgcaatgtctgccatatttctgcttgttggaatgctatcgtccattacagttgcacaatccataggagtttgctatggagtgattggtgataatctaacaacaaggcaagaagttgtggacttaatataaacaaatggcattggtaaaaatgcgtatatactaccaagatgaagaagcactccaagcccttagaggttcaggcattgagttgattatggacgtggctaaggaaacccttcaatcattgacagactccaatgctgctacagattgggtcaataaatatgttacaccttactcgcaagacgtcaatttcaagtacatcgctgttggaaatgaaattcatcccaataccaatgaggcacaatatattctatctgccatgacc

SEQ ID NO: 26037 - DNA, 300 bp, Glycine max
  Clone ID: LIB3051-011-Q1-E1-F6
gacccaagcgtcaggaggcacaatatattctatctgccatgaccaacattcagaatgcaatttcatcagcaaatttacaaattaaggtgtcaacagctatagactctactttgattactaactcttaccctcccaatgatggcgttttcactagcgatgcggagccatacataaaacccataatcaacttcctagtgagcaatggggccccacttcttgccaacgtgtacccttactttgcttatgcaaatgatcaaagcattcctcttgcctatgctctttttaccaaccagggaacca

SEQ ID NO: 26038 - DNA, 434 bp, Glycine max
  Clone ID: LIB3051-013-Q1-E1-E2
gatatggcataatacattgatttgtttcttaaaaacaacactgcaatgtctgccatatttctgcttgttggaatgctatcgtccattacagttgcacaatccataggagtttgctatggagtgattggtgataatctaccatcaaggcaagaagttgtggacttatataaaacaaatggcattggtagaatgcgtatatactacccagatgaagaagcactccaagcccttagaggttcaggcattgagttgattatggacgtggctaaggaaacccttcaatcattgacagactccaatgctgctacagattgggtcaataaatatgttacaccttactcgcaagacgtcaatttcaagtacatcgctgttggaaatgaaattcatcccaataccaatgaggcacaatatattccatctgccatgaccaacat

SEQ ID NO: 26039 - DNA, 479 bp, Glycine max
  Clone ID: LIB3051-020-Q1-E1-G10
taccggtcttatcttcccgggccgccccacgcgcgtaccataagatttggcataatacattgatttgtttcttaaaaacaacactgcaatgtctgccatatttctgcttgttggaatgctatcgtccattacagttgcacaatccataggagtttgctatggagtgattggtgataatctaccatcaaggcaagaagttgtggacttatataaaacaaatggcattggtagaatgcgtatatactacccagatgaagaagcactccaagcccttagaggttcaggcattgagttgattatggacgtggctaaggaaacccttcaatcattgacagactccaatgctgctacagattgggtcaataaatatgttacaccttactcgcaagacgtcaatttcaagtacatcgctgttggaaatgaaattcatcccaataccaatgaggcacaatatattctagctgccatgaccaacattc

SEQ ID NO: 26040 - DNA, 323 bp, Glycine max
  Clone ID: LIB3051-020-Q1-E1-G12
tttggcataatacattgatttgtttcttaaaaacaacactgcaatgtctgccatatttctgcttgttggaatgctatcgtccattacagttgcacaatccataggagtttgctatggagtgattggtgataatctaccatcaaggcaagaggttgtggacttatataaaacaaatggcattggtagaatgcgtatatactacccagatgaagaagcacgtccaagcccttagaggttcaggcattgagttgattatggacgtggctaaggaaacccttcagtcattgacagactccagtgctgctacagattgggtcaataaa

SEQ ID NO: 26041 - DNA, 433 bp, Glycine max
  unsure (1)..(433): unsure at all n locations
  Clone ID: LIB3051-025-Q1-K1-E3
ggcatacataaaacccataatcaacttcctaatgagcaatggggccccacttcttgccaacgtgtacccttactttgcttatgcaaatgatcaaagcattcctcttgcctatgctctttttacccaacaaggaaacaacgacgttgggtaccaaaacctctttgatgctatgttggattcaatatatgctgctttggagaaagtgggagcgtccaatttgcagatagtggtttctgagagtgggtggccatctgaaggtggagctggagcctcaattgataatgcaggcacttactatgctaatttgattcgtcatgcctcgagtgggaatggaactccaaagaggcctggtgagtctatagagacttacttgttcgccatgtttgacgaanaccagaagcaaggtgctgatactgagcgtcattttggtctc

SEQ ID NO: 26042 - DNA, 447 bp, Glycine max
  Clone ID: LIB3051-025-Q1-K1-F11
gcataatacattgatttgtttcttaaaaacaacactgcaatgtctgccatatttctgcttgttggaatgctatcgtccattacagttgcacaatccataggagtttgctatggagtgattggtgataatctaccatcaaggcaagaagttgtggacttatataaaacaaatggcattggtagaatgcgtatatactacccagatgaagaagcactccaagcccttagaggttcaggcattgagttgattatggacgtggctaaggaaacccttcaatcattgacagactccaatgctgctacagattgggtcaataaatatgttacaccttactcgcaagacgtcaatttcaagtacatcgctgttggaaatgaaattcatcccaataccaatgaggcacaatatattctatctgccatgaccaacattcagaatgcaatttcatca

SEQ ID NO: 26043 - DNA, 412 bp, Glycine max
  Clone ID: LIB3051-027-Q1-K1-G3
cccacgcgtccgcccacgcgtccgcggactcgtgggtccacccaatgatgctgttttcagtagcgatgcagagccatatgtaaaacccataatagacttcctagtgagaaatgaggcgccacttcttgccaatgtgtacccttactttgcttatgcgaatgatcaacaaaacagtattcctcttgcctatgctctttttacccaacaaggaaacaacgacgctgggtaccaaaacctcttcgatgctatgttggattcaatatacgctgcagtggagaaagtgggagcatccaatttgcagatagtggtttctgagagtgggtggccatctgaaggtggtggaactggagcatcaatcgataatgcatgcacttacaatgctaatttgattagtcatgccttgggtgggagt

SEQ ID NO: 26044 - DNA, 401 bp, Glycine max
  Clone ID: LIB3051-043-Q1-K1-A2
gatttggcataatacattgatttgtttcttaaaaacaacactgcaatgtctgccatatttctgcttgttggaatgctatcgtccattacaggagtttgctatggagtgattggtgataatctaccatcaaggcaagaagttgtggacttatataaaacaaatggcattggtagaatgcgtatatactacccagatgaagaagcactccaagcccttagaggttcaggcattgagttgattatggacgtggctaaggaaacccttcaatcattgacagactccaatgctgctacagattgggtcaataaatatgttacaccttactcgcaagacgtcaatttcaagtacatcgctgttggaaatgaaattcatcccaataccaatgaggcacaatatattct

SEQ ID NO: 26045 - DNA, 401 bp, Glycine max
  Clone ID: LIB3051-043-Q1-K1-G9
cccacgcgtccgggcataatacattgatttgtttcttaaaaacaacactgcaatgtctgccatatttctgcttgttggaatgctatcgtccattacagttgcacaatccataggagtttgctatggagtgattggtgataatctaccatcaaggcaagaagttgtggacttatataaaacaaatggcattggtagaatgcgtatatactacccagatgaagaagcactccaagcccttagaggttcaggcattgagttgattatggacgtggctaaggaaacccttcaatcattgacagactccaatgctgctacagattgggtcaataaatatgttacaccttactcgcaagacgtcaatttcaagtacatcgctgttggaaatgaaattcatcccaata

SEQ ID NO: 26046 - DNA, 418 bp, Glycine max
  Clone ID: LIB3051-044-Q1-K1-G12
gcataatacattgatttgtttcttaaaaacaacactgcaatgtctgccatatttctgcttgttggaatgctatcgtccattacagttgcacaatccataggagtttgctatggagtgattggtgataatctaccatcaaggcaagaagttgtggacttatataaaacaaatggcattggtagaatgcgtatatactacccagatgaagaagcactccaagcccttagaggttcaggcattgagttgattatggacgtggctaaggaaacccttcaatcattgacagactccaatgctgctacagattgggtcaataaatatgttacaccttactcgcaagacgtcaatttcaagtacatcgctgttggaaatgaaattcatcccaataccaatgaggcacaatatattctatctgcca

SEQ ID NO: 26047 - DNA, 364 bp, Glycine max
  unsure (1)..(364): unsure at all n locations
  Clone ID: LIB3051-053-Q1-K2-D11
aaatgaaattcatcccaataccaatgaggcacaatatattctatctgccatgaccaacagtcagaatgcaatttcatcagcaaatttacaaattaaggtgtcaacagctatagactctactttgattactaactcttaccctcccaatgatggcgttttcactagcgatgcggagccatacataaaacccataatcaacttcctagtgagcaatggggccccacttcttgccaacgtgtacccttactttgcttatgcaaatgatcaaagcattcctcttgcctatgctncttttacccaacaaggaaacaacgacgttgggtaccaaaacctttttgatgctatgttggattcaatatatgct

SEQ ID NO: 26048 - DNA, 395 bp, Glycine max
  Clone ID: LIB3051-058-Q1-K2-C4
taagatttggcataatacattgatttgtttcttaaaaacaacactgcaatgtctgccatatttctgcttgttggaatgctatcgtccattacagttgcacaatccataggagtttgctatggagtgattggtgataatctaccatcaaggcaagaagttgtggacttatataaaacaaatggcattggtagaatgcgtatatactacccagatgaagaagcactccaagcccttagaggttcaggcattgagttgattatggacgtggctaaggaaacccttcaatcattgacagactccaatgctgctacagattgggtcaataaatatgttacaccttactcgcaagacgtcaatttcaagtacatcgctgttggaaatgaaattcattccaa

SEQ ID NO: 26049 - DNA, 471 bp, Glycine max
  Clone ID: LIB3051-068-Q1-K1-E5
attgatttgtttcttaaaaacaacactgcaatgtctgccatatttctgctggttggaatgctatcgtccattacagttgcacaatccataggagtttgctatggagtgattggtgataatctaccatcaaggcaagaagttgtggacttatataaaacaaatggcattggtagaatgcgtatatactacccagatgaagaagcactccaagcccttagaggttcaggcattgagttgattatggacgtggctaaggaaacccttcaatcattgacagactccaatgctgctacagattgggtcaataaatatgttacaccttactcgcaagacgtcaatttcaagtacatcgctgttggaaatgaaattcatcccaataccaatgaggcacaatatattctatctgccatgaccaacattcagaatgcaatttcatcagcaaatttacaaattaaggtgtcaacagctata

SEQ ID NO: 26050 - DNA, 311 bp, Glycine max
  Clone ID: LIB3051-079-Q1-K1-E5
tcgcttactagcaggacgtcaatttcaagtacatgtctgtcggaaatgaaatgcattccacgaccagtgaatcacagtataccctatgtgccatgaccaacattcagaatgcaattacatcaccatattcacaaatcaatgtgtcaacagctatagactctactttgattactaactcttacacttccaatgatagcattttcactatcgctgcggttccatacataaatcccatgaccaacttactagcgtgcattggagccacactacttgacaacgtgaacccttactatgcttatgcaaatgatcaa

SEQ ID NO: 26051 - DNA, 446 bp, Glycine max
  Clone ID: LIB3051-087-Q1-K1-E10
atttggtataatacattgatatgtttcttaaaaaaagcactgcaatgtcttccatattggtgctagttggaatgttatcgtccattacagttgcacaatccataggagtttgctatggagtactcggtaataatctaccatcaaggcaagaagttgtggacttgtataaaacaaatgggataggtagaatgcgtatatactatccagatgaagaagcactccaagcccttagaggttcaggcattgagttgattatggacgtggctaaggaaacccttcaatcaatgacagaccccaatgctgctacagattgggtcaataagtatgttacagcctactcgcaagacgtcaatttcaagtacatcgctgttggaaatgaaattcaccccaatacccatgaggcacagtacattctatctgccatgaccaacattcagaatgcaatt

SEQ ID NO: 26052 - DNA, 396 bp, Glycine max
  Clone ID: LIB3051-091-Q1-K1-H12
gtcaatttcaagtacatcgctgttggaaatgaaattcatcccaataccaatgaggcacaggatattctatctgccatgaccaacattcagaatgcaatttcatcagcaaatttacaaattaaggtgtcaacagctatagactctactttgattactaactcttaccctcccaatgatggcgttttcactagcgatgcggagccatacataaaacccataatcaacttcctagtgagcaatggggccccacttcttgccaacgtgtacccttactttgcttatgcaaatgatcaaagcattcctcttgcctatgctctttttacccaacaaggaaacaacgacgttgggtaccaaaacctctttgatgctatgttggattcaatatatgctgctttg

SEQ ID NO: 26053 - DNA, 349 bp, Glycine max
  Clone ID: LIB3051-097-Q1-K1-B10
aaacttcactgcaatgtctgccatattggtgcttgttggaatgctatcgtccattacagttgcacaatccataggagtttgctatggagtgattggtgataatctaccatcaaggcaagaagttgtggacttatataaaacaaatggcattggtagaatgcgtatatactacccagatgaagaagcactccaagcccttagaggttcaggcattgagttgattatggacgtggctaaggaaacccttcaatcattgacagactccaatgctgctacagattgggtcaataaatatgttacaccttacttgcaagacgtcaattttaagttcattgctggtggaaatgaa

SEQ ID NO: 26054 - DNA, 323 bp, Glycine max
  Clone ID: LIB3051-098-Q1-K1-H3
gcattgagttgattatggacgtggctaaggaaacgtttcaatcattgacagactccaatgctgctacagattgggtcaataaatatgttacaccatactcgcaagacgtaaatttcaagtacatcgctgttggaaatgatatttatcccaataccaatgaggcacaatatattctatctggcatgaccaacattcagaatgcaatttcatcatcaaatttacaaattaaggtgtcaacagcttatagactctacttttgattactaactcttaccctctcaatgatggcgttttcaatagcgatgcttatgccatacatttaa

SEQ ID NO: 26055 - DNA, 431 bp, Glycine max
  Clone ID: LIB3051-100-Q1-K1-C7
aatttcaagtttatctttgatggtttggttattcatcccaataccaatgatgcagaatggattctatcggccatgaccaacattcagaatgcaatttcatcagcaaatttacaaattaaggtgtcaacagctatagactctactttgattactaactcttaccctcccaatgatggcgttttcactagcgatgctgagccatacataaaacccataatcaacttcctagtgagcaatggggccccacttcttgccaacgtgtacccttactttgcttatgcaaatgatcaaagcattcctcttgcctatgctctttttacccaacatggaaacaactacgttgggtaccaaaacctctttgatgctatgttacattcaatatatgctgctttggagaaagtgggagcgttcaatttgcaaataatggtttc

SEQ ID NO: 26056 - DNA, 188 bp, Glycine max
  unsure (1)..(188): unsure at all n locations
  Clone ID: LIB3051-103-Q1-K1-D5
cttanaacacactgcatgtctggcatatttctgttggtggaatgctatcggccgttcaattgcacaatccataggagtttgctatggagtgattggtgataatctaccatcaaggcaagaagttgtggacttatataaaacaaatggcattggtagaatgcgtatatactacccacatgaagaagcac

SEQ ID NO: 26057 - DNA, 379 bp, Glycine max
  Clone ID: LIB3051-109-Q1-K1-A1
tggcataatacattgatttgtttcttaaaaacaacactgcaatgtctgccatatttctgcttgttggaatgctatcgtgcattacagttgcacaatccataggagtttgctatggagtgattggtgataatctaccatcaaggcaagaagttgtggacttatataaaacaaatggcattggtagaatgcgtatatactacccagatgaagaagcactccaagcccttagaggttcaggcattgagttgattatggacgtggctaaggaaacccttcaatcattgacagactccaatgctgctacagattgggtcaataaatatgttacaccttactcgcaagacgtcaatttcaagtacatcgcttgtggaaatgaaat

SEQ ID NO: 26058 - DNA, 382 bp, Glycine max
  unsure (1)..(382): unsure at all n locations
  Clone ID: LIB3051-109-Q1-K1-A7
tggcataatacattgatttgtttcttaaaaacaacactgcaatgtctgccatatttcggcttgttggaatgctatcgtgcattacagttgcacaatccataggagtttgctatggagtgattggtgataatctaccatcaaggcaagaagttgtggacttatataaaacaaatggcattggtagaatgcgtatatactacccagatgaagaagcactccaagcccttagaggttcaggcattgagttgattatggacgtggctaaggaaacccttcaatcattgacagactccaatgctgctacagattgggtcaataaatatgttacaccttactcgcaagacgtcaatttcaagtacatcgctgttngaaatgaaattca

SEQ ID NO: 26059 - DNA, 376 bp, Glycine max
  Clone ID: LIB3051-110-Q1-K1-E10
cggactcgtggggatttggcataatacattgatttgtttcttaaaaacaacactgcaatggctgccatatttctgcttgttggaatgctatcgtccattacagttgctcaatccataggagtttgctatggagtgattggtgataatctaccatcaaggcaagaagttgtggacttatataaaacaaatggcattggtagaatgcgtatatactacccagatgaagaagcactccaagcccttagaggttcaggcattgagttgattatggacgtggctaatgaaacccttcaatcattgacagactccaatgctgctacagattgggtcaataaatatgttacaccttactcgcaagacgtcaatttcaagtaca

SEQ ID NO: 26060 - DNA, 439 bp, Glycine max
  Clone ID: LIB3051-114-Q1-K1-C12
aatacattgatttgtttcttaaaaacttcactgcaatgtctgccatatttgggcttggtggaatgctatcgtccattacagttgcacaatccataggagtttgctatggagtgattggtgataatctaccatcaaggcaagaagttgtggacttatataaaacaaatggcattggtagaatgcgtatatactacccagatgaagaagcactccaagcccttagaggttcaggcattgagttgattatggacgtggctaacgaaacccttcaatcattgacagactccaatgctgctacagattgggtcaataaatatgttacaccttactcgcaagacgtcaatttcaagtacatcgctgttggaaatgaaattcatcccaataccaatgaggcacaatttattctatctgccatgaccaacattcagaatgcaatttc

SEQ ID NO: 26061 - DNA, 434 bp, Glycine max
  Clone ID: LIB3051-039-Q1-K1-D11
ctcatttttgcaatttccttagatttgcggttcttaagaaggatcattctttcatggcagttggtggtccatgggaacctgttgatgggggtgatccatctattgacaataactctttaatcaaaactgccctcagatatgcaaaggatgttattcaacttgacttgcagaattgtcaacattggaatccttctcttgagttacattatgatagaattggcaaagatggtttctttagccacaaggaaatcactgttctttatgttcctgatttgtctgactgcctcccttcgttggatgaatggcgtgacaagtggcttgcccacaagaaagctgtggctgaaaaagagcgtcaactttctttgaaaaaagagaaatcaagagataacaaggaagtatctaaagataaatcagataaaaggaaggattctact

SEQ ID NO: 26062 - DNA, 323 bp, Glycine max
  Clone ID: LIB3051-110-Q1-K1-A1
cccacgcgtccggtgcttcagttacgacgaggattcaattttttggcagttaaaggatgggctctcacctgaggctgatgttgtttatgtgggatctctcaaggctgatgttgatgcaaatgagcaagagaaagtttcccttcagttgctggaggaattcaattgcgtgcctacttttattccttcagacctctacaaacaattccatgatggtttctgcaagcaacaattgtggcccctattccattacatgttgcccatgtatccaggcaatcgccgctttgataggtcacagtggcaggcttatgtttctgctaacaaga

SEQ ID NO: 26063 - DNA, 440 bp, Glycine max
  Clone ID: LIB3051-110-Q1-K1-A3
cctcaggcgtccggtaacgcttccgaagcttcatttatgactaggattcaagttttaggcagttaaaggatggggtatgacctgaggctgatgttggttatgtaggatctctcaaggctgatgttgatgcaaatgagcaagagaaagcttcccttcagctgctggaggaattcaattgcatgcctacttttattccttcagacctctacaaacaattccatgatggagtctgcaagcaacaattgtggcccctattccattacatgttgcccatgtatacaggcaatcgccgatttgataggtcacagtggcatgcttatgctgctgctaacacgatatttgcagataaagtcatggaggtccttaatccataagatgattatgtatgggttcatgattatcatcctatgggccttccaacatttctgcgaaagcggtgt

SEQ ID NO: 26064 - DNA, 461 bp, Glycine max
  Clone ID: LIB3051-106-Q1-K1-B7
gtgctgatccctctagatcccttaatatcaaattccctaattctcaaaatctcatgtcgtcttctcctctttcaaatgttgaaccaaattctgttactaatgaacactctaacactgtttctgacttaaacagatatccaagtgaactgtccagtacctcttcttctcagtctcacactgtcagttctccttcttataatcatgttcttcccccacaaaatgtccatcctatgcaaaccagattcaagtttggaattcatcaatctaggttgcatccttcactgtttatggcacattgtgaacctaagacagttaaacaggctcttgctgacccttaatggtttgctgctatgaatcaagagtatgaggctcttcttaacaataaaacatgggatcttgttcctcttcccaaagacaaacaagttgtgggttgtaagtaggtcttcagaattaaggagaat

SEQ ID NO: 26065 - DNA, 456 bp, Glycine max
  Clone ID: LIB3051-106-Q1-K1-B8
tcgtagatgatacctgtacatcccttaatgtcaaattccctaattctcaaaaactggggtcgtcttctcctctttcaaatgttgaaccaacttctgttactaatgaacactctaacactgtttctgactaaaacagatatacaagtgaactatccagtacctcttcttctcacactcacactgtaacttctacttcttataatcatgttcttcccccacaaaatgtccatcctatgcataccagattcaagtttggaattcatcaatctaggctgcatccttcactgtttatggcacattgtgaacctaagacagttaaacaggctcttgctgacccttaatggtttgctgctatgaatcaacagtatgaggctcttcttaacaataaaacatggcatcttgatcctcttcccaaagacaaacaagttgtgggttgtaagtaggtcttcacaatta

SEQ ID NO: 26066 - DNA, 441 bp, Glycine max
  unsure (1)..(441): unsure at all n locations
  Clone ID: LIB3051-110-Q1-K1-B7
cccacgcgtccgcaccatgttaaccgcaatcctcagaagaacctgttccactctctgaaggcgcggtttccccgctgccttaatctccgcctccaccgtcggaaaccacttccggccaccctccgcggactttatttccagaaccttccactccaacactggccccttgaatttccgctcctcttcatgtcaccgcgcagaatacgccgtcgacgatttcccttacgaagaaggctccaaagggaacgccgacgactaaggcctcgagatcgcgaagctcggaatttctgaggatattgtctccgctttggccaagaaaggcatcaccaagctcttccccattcagagggctgtgttggaacctgctatgcaaggacgtgatatgattggtcgagctagaactggaactgggaagactctngcttttgggatacccatcat

SEQ ID NO: 26067 - DNA, 386 bp, Glycine max
  Clone ID: LIB3051-002-Q1-E1-F2
gaatatattacattaagaaagcccaaagaaagaagaagatggcgtccgagtgcaaaggtaagagctcatggcctgagttggttggagtggaaggaacggtggcggtggctacaattgagagggagaatcctttggtggatgctaacactgtgcttaaaggatccatcgtcaccgctgattttcgatgtgatagggttcgggtttgggtcaccaaacatggaattgtttatcaggctccaagaattggataagaagtgtttacactaaagcacttcatatatatgttatgagtcatgaatataatagtatttaaataaggagttattcttcaaattatggtaatttgattgaaaataaaaacattgactattaaaaaatttgttttt

SEQ ID NO: 26068 - DNA, 388 bp, Glycine max
  Clone ID: LIB3051-012-Q1-E1-B1
gacccgcccgtcagcattaagaaagcccaaagaaagaagaagatggcgtccgagtgcaaaggtaagagctcatggcctgagttggttggagtggaaggaacggtggcggtggctacaattgagagggagaatcctttggtggatgctaacactgtgcttaaaggatccatcgtcaccgctgattttcgatgtgatagggttcgggtttgggtcaccaaacatggaattgtttatcaggctccaagaattggataagaagtgtttacactaaagcacttcatatatatgttatgagtcatgaatatgatagtatttaaataaggagttattcgtccaattaggttaattgattgagaataagaacatgaggtataagaaattgtttttt

SEQ ID NO: 26069 - DNA, 304 bp, Glycine max
  Clone ID: LIB3051-026-Q1-K1-A4
catggcctgagttggttgcagtggaatgaactgtggcggtggctacaattgagagggagaatcctttggtggatgctaacactgtgcttaaaggatccatcgtcaccgctgattttcgatgtgatagggttcgggtttgggtcaccaaacatggaattgtttatcacgctccaagaattggataagaagtgtctacactaaagcacttcatatatatgtcatgagtcatgaatataatagtatttaaataaggagttattcttgcaattatgttatgtgattgaaaataaattatgtaatttga

SEQ ID NO: 26070 - DNA, 383 bp, Glycine max
  unsure (1)..(383): unsure at all n locations
  Clone ID: LIB3051-032-Q1-K1-E8
cattaagaaagcccaaagaaagaagaagatggcgtccgagtgcaaaggtaagagcgcatggcctgagttggttggagtggaaggaacggtggcggtggctacaattgagagggagaatcctttggtggatgctaacactgtgcttaaaggatccatcgtcaccgctgattttcgatgtgatagggttcgggtttgggtcaccaaacatggaattgtttatcaggctccaagaattggataagaagtgtttacactaaagcacttcatatatatgttatgagtcatgaatataatagtatttaaataaggagttattcttccaattatgttatttgattgaaaataaaaacatgactataagaaatttgntttttcttattttt

SEQ ID NO: 26071 - DNA, 351 bp, Glycine max
  Clone ID: LIB3051-038-Q1-K1-F11
gcccaaagaaagaagaagatggcgtccgtttgcaaaggtaagagctcatggcctgagttggttggagtggaaggaacggtggcggtggctacaattgagagggagaatcctttggtggatgctaacactgtgcttaaaggatccatcgtcaccgctgattttcgatgtgatagggttcgggtttgggtcaccaaacatggaattgtttatcaggctccaagaattggataagaagtgtttacactaaagcacttcatatatatgttatgagtcatgaatataatagtatttaaataaggagttattcttccaattatgttatttgattgaaaataaaaacatgactataag

SEQ ID NO: 26072 - DNA, 385 bp, Glycine max
  Clone ID: LIB3051-041-Q1-K1-E2
cccacgcgtccgctcatggcctgagttgtttggagttgaaggaacggtggcggtggctacaattgagagggagaatcctttggtggatgctaacactgtgcttaaaggatccatcgtcaccgctgattttcgatgtgatagggttcgggtttgggtcaccaaacatggaattgcttatcaagctccaagaattggataagaagtgtttacactaaagcacttcatatatatgttatgagtcatgaatataatagtatttaaataaggagttattcttccaattatgttatttgattggaaatgataacatgactataagaaatttgttatgtctgatatctaattatgttatgctctgcaaattaatatacaaattgtgtgattc

SEQ ID NO: 26073 - DNA, 410 bp, Glycine max
  Clone ID: LIB3051-043-Q1-K1-B11
agcgtccgatacattaagaaagcccaaagaaagaagaagatggcgtccgagtgcaaaggtaagagctcatggcctgagttggttggagtggaaggaacggtggcggtggctacaattgagagggagaatcctttggtggatgctaacactgtgcttaaaggatccatcgtcaccgctgattttcgatgtgatagggttcgggtttgggtcaccaaacatggaattgtttatcaggctccaagaattggataagaagtgtttacactaaagcacttcatatatatgttatgagtcatgaatataatagtatttaaataaggagttattcttccaattatgttatttgattgaaaataaaaacatgactataagaaatttggtttttcttatttttaattatgttatgcact

SEQ ID NO: 26074 - DNA, 420 bp, Glycine max
  Clone ID: LIB3051-046-Q1-K1-G5
attacattaagaaagcccaaagaaagaagaagatggcgtccgagtgcaaaggtaagagctcatggcctgagttggttggagtggaaggaacggtggcggtggctacaattgagagggagaatcctttggtggatgctaacactgtgcttaaaggatccatcgtcaccgctgattttcgatgtgatagggttcgggtttgggtcaccaaacatggaattgtttatcaggctccaagaattggataagaagtgtttacactaaagcacttcatatatatgttatgagtcatgaatataatagtatttaaataaggagttattcttccaattatgttatttgattgaaaataaaaacatgactataagaaatttgttttttcttaattttaaaaataagatagaaaaaggggcggccggttct

SEQ ID NO: 26075 - DNA, 409 bp, Glycine max
  unsure (1)..(409): unsure at all n locations
  Clone ID: LIB3051-048-Q1-K1-C1
gccacgcgttcgcccacgcgtccgcccacgcgtccgagaatatattacattaagaaagggcaaagaaagaagaagatggcgtccgagtgcaaaggtaagagctcatggcctgagttggttggagtggaaggaacggtggcggtggctacaattgagagggagaatcctttggtggatgctaacactgtgcttaaaggatccatcgtcaccgctgattttcgatgtgatagggttcgggtttgggtcaccaaacatggaattgtttatcaggctccaagaattggataagaagtgtttacactaaagcacttcatatatatgttatgagtcatgaatatattagtaattaaataaggagttattcttccaattatgttatttgattgaaaataaaaacatgactatanag

SEQ ID NO: 26076 - DNA, 422 bp, Glycine max
  unsure (1)..(422): unsure at all n locations
  Clone ID: LIB3051-065-Q1-K1-F5
cccacgcgtccgagaatatattacattaagatagcccaaagaaagaagaagatggcgtccgagtgcaaaggtaagagctcatggcctgagttggttggagtggaaggaacggtggcggtggctacaattgagagggagaatcctttggtggatgctaacactgtgcttaaaggatccatcgtcaccgctgattttcgatgtgatagggttcgggtttgggtcaccaaacatggaattgtttatcaggctccaagaattggataagaagtgtttacactaaagcacttcatatatatgttatgagtcatgaatataatagtatttaaataaggagttattcttccaattatgttatttgattgaaaataaaaacatgactataagaaatttngtttttcttatttttaattatgttatgcact

SEQ ID NO: 26077 - DNA, 365 bp, Glycine max
  Clone ID: LIB3051-068-Q1-K1-C3
gcctatcttacatcatgaaagtccatagaatgaagatgatggcgtccgagtgcaacggtgagagcttatgggctgcgtaggttgaagaggatggaacggtggatgtggctacaattgacagggagaatcctttgacggatgctaacactgtgcttaaaggatccatagtaaccgctgatttacgatgtgatagggttcgggtttgggtcaccaaacatggaattggttatcatgctccaagaattggataagaagtgagtacactatagcacttgatatatatgttatgagtcatgaatataatagtatttaaataacgagttattcttccaattatgttattagattgaaaattgtaacatgac

SEQ ID NO: 26078 - DNA, 340 bp, Glycine max
  unsure (1)..(340): unsure at all n locations
  Clone ID: LIB3051-084-Q1-K1-A5
gaagaagatggcgtccgagtgcaaaggtaagagctcatggcctgagttggttggagtggaaggaacggtggcggtggctacaattgagagggagaatcctttggtggatgctaacactgtgcttaaaggatccatcgtcaccgctgattttcgatgtgatagggttcgggtttgggtcaccaaacatggaattgtttatcaggctccaagaattggataagaagtgtttacactaaagcacttcatatatatgttatgagtcatgaatataatagtatntaaataaggagttattcttccaattatgttatttgattgaaaataaaaacatgactataag

SEQ ID NO: 26079 - DNA, 465 bp, Glycine max
  Clone ID: LIB3051-085-Q1-K1-B7
cccacgcgtccgcccacgcgtccgcggacgcgtgggagaatatattacattaagaaagcccaaagaaagaagaagatggcgtccgagtgcaaaggtaagagctcatggcctgagttggttggagtggaaggaacggtggcggtggctacaattgagagggagaatcctttggtggatgctaacactgtgcttaaaggatccatcgtcaccgctgattttcgatgtgatagggttcgggtttgggtcaccaaacatggaattgtttatcaggctccaagaattggataagaagtgtttacactaaagcacttcatatatatgttatgagtcatgaatataatagtatttaaataaggagttattcttccaattatgttatttgattgaaaataaaaacatgactataagaaatttgttttttcttatttttaattatgttatgcactgcaaataaatatacaaatt

SEQ ID NO: 26080 - DNA, 343 bp, Glycine max
  Clone ID: LIB3051-115-Q1-K1-A1
cccactcgtccggaatatattacattaagaaagcccaaagaaagaagaagatggcgtgcgagtgcaaaggtaagagctcatggcctgagttggttggagtggaaggaacggtggcggtggctacaattgagagggagaatcctttggtggatgctaacactgtgcttaaaggatccatcgtcaccgctgattttcgatgtgatagggttcgggtttgggtcaccaaacatggaattgtttatcaggctccaagaattggataagaagtgtttacactaaagcacttcatatatatgttatgagtcatgaatataatagtatttaaataaggagttattctttc

SEQ ID NO: 26081 - DNA, 398 bp, Glycine max
  Clone ID: LIB3051-116-Q1-K1-H4
ctcacgcgtccgggaaggaacggtggctgcggctacaattgagagggagaatcctttggtggatgctaacactgtgcttaaaggatccatcgttaccgctgattttcgatgtgatagggttcgggtttgggtcaccaaacatggaattgtttatcaggctccaagaattggataagaagtgtttacactaaagcacttcatatatatgttatgagtcatgaatatcatagtatttaaataaggagctattcttccaattatgttattcgattgaaaataaatacatgactataagaaatttgttgtttcttatgtgtaattatgttatgcactgcaaataaatatacaaattgtgtgtttcattatctttatgtacgcaataattaaaccatctatat

SEQ ID NO: 26082 - DNA, 429 bp, Glycine max
  Clone ID: LIB3051-006-Q1-E1-G11
tcactcacgagtctcacgcttttcacgatgggcttcattttcggagtggtggtcggaataattgtgggcctggccatcatagtgggcttcgtccgcggcgagaactcccgggccgcccaacgctcccagctcgccaccaccgttgccgccttcgctcggatgaccgtcgaagattccagaaagatcttgccgcctcagttctacccttcctgggtcgttttctcttccagccagaagttaacttggcttaactcgcatctcaccaagatctggccctatgttaacgaggctgcttctgagctcataaaagcgtcggtggaacctattctggaagaatatagacccgtggttttggcggctcttaaattttccaagtttactcttggtactgtagctccacagtttacaggcgtgtctataattgaggat

SEQ ID NO: 26083 - DNA, 368 bp, Glycine max
  Clone ID: LIB3051-006-Q1-K1-G11
tcactcacgagtctcacgcttttcacgatgggcttcattttcggagtggtggtcggaagaattgtgggcctggccatcatagtgggcttcgtccgcggcgagaactcccgggccgcccaacgctcccagctcgccaccaccgttgccgccttcgctcggatgaccgtcgaagattccagaaagatcttgccgcctcagttctacccttcctgggtcgttttctcttccagccagaagttaacttggcttaactcgcatctcaccaagatctggccctatgttaacgaggctgcttctgagctcataaaagcgtcggtggaacctattctggaagaatatagacccgtggttttggcggctcttaaatt

SEQ ID NO: 26084 - DNA, 435 bp, Glycine max
  unsure (1)..(435): unsure at all n locations
  Clone ID: LIB3051-047-Q1-K1-D11
ttggattcactcactcacgagtctcacgcttttcacgatgggcttcattttcggagtggtggtcggggataattgtgggcctggccatcatagtgggcttcgtccgcggcgagaactcccgggccgtccaacgctcccagctcgccaccaccgttgccgccttcgctcggatgaccgtcgaagattccagaaagatcttgccgcctcagttctacccttcctgggtcgttttctcttccagccagaagttaacttggcttaactcgcatctcaccaagatctggccctatgttaacgaggctgcttctgagctcataaaagcgtcggtggaacctattctggaagaatatagacccgtggttttggcggctcttaaattntccaagtttactcttggtactgtagctncacagtttacaggcgtgtctataattg

SEQ ID NO: 26085 - DNA, 430 bp, Glycine max
  unsure (1)..(430): unsure at all n locations
  Clone ID: LIB3051-019-Q1-K1-G12
gttttatctggttcatnttatatatgtttatcctcatttttgactcagtcgtatgcttgtgattaaagatgggatttgctgtctgggaaccaccacatggtcattacaaaatgcttaagtatccatggaagaattatgtgaaattaagtggggctctaaggcactgtgcgtttatggtcatggctatgcatgggtgcatactttctgaaatacaggccccagctgagaagagacaagttttccgcagtgagcttcagagggtaggttctgaaggagcaaaagtgttgcgtgaacttggaaacaaagttaaaaagatggataaactaggtcgtggagacttgctgtatgaagtgcactaggcagcaaaagaattgcaacagaagatcgattaaaaatcttaccttcttgtcaattcagagagctgggaaat

SEQ ID NO: 26086 - DNA, 310 bp, Glycine max
  Clone ID: LIB3051-115-Q1-K1-B11
taaaattcttacttaccaagcttctgatgacccaattcacagtggctacagatgggctgttgaatctacaagtaaagaagattcattgatgggatttgctgactgggaaccaccacatggtcattacaaaatgcttaagtatccatggaagaattatgtgaaattaagtggggctctaatgcactgtgcgtttatggtcatggctatgcatgggtgcatactttctgaaatacaggccccagctgagaagagacaagttttgcgcaatgagcttcagagggtaggttctgaacgaagttctagatcgcga

SEQ ID NO: 26087 - DNA, 429 bp, Glycine max
  Clone ID: LIB3051-117-Q1-K1-E7
cccacgcgtccgtgatcttgtcacaaaaaatttcatgggtgttgcaacatctttggaaggtgttgtcaatcactaccttcattgtgttgaatataagaaggtgccatctaaaattcttacttaccaagctgctgatgacccaatttacagtggctacagatcagctgttgaatctacaagtaaagaagattcattgatgggatttgctgtctgggaaccaccacatggtcattacaaaatgcttaagtatccatggaagaattatgtgaaattaagtggggctctaaagcactgtgcgtttatggtcatggctatgcatgggtgcatactttctgaaatacaggccccagctgagaagagacaagttttccgcagtgagcttcagagggtaagttctgaaggagcaaaaatgttgcgtgaacttggaaa

SEQ ID NO: 26088 - DNA, 342 bp, Glycine max
  Clone ID: LIB3051-002-Q1-E1-E2
acgcgaaccctccaacgccgccgccctccgccgcgccgcagtagtctggttccgcaacgacctccgcctcctcgacaacgagtgcctcaccgccgccaacaacgagtccctctccgtcctccccgtctactgcttcgaccccgccgactacggtaagtcggcctccggcttcgacaagaccggcccctaccgcgccgccttcctcatcgactctgtctccgacctccgccgtaacctccaggctcgcggctccgatctcgtcgttcgcgtttgggaacccgacgcggtgctggtggagctcgccaatgccgtccggggccgacgccgtgtacgccgcacgag

SEQ ID NO: 26089 - DNA, 436 bp, Glycine max
  Clone ID: LIB3051-003-Q1-E1-A9
ccgcgacccctccaacgccgccgccctccgccgcgccgcagtagtctggttccgcaacgacctccgcctcctcgacaacgagtgcctcaccgccgccaacaacgagtccctctccgtcctccccgtctactgcttcgaccccgccgactacggtaagtcggcctccggcttcgacaagaccggcccctaccgcgccgccttcctcatcgactctgtctccgacctccgccgtaacctccaggctcgcggctccgatctcgtcgttcgcgttgggaagcccgaggcggtgctggtggagctcgccaaggccgtcggggccgacgccgtgtacgcgcaccgagaggtctcgcacgacgaggcgaaggcggaggagagggtggaggcggccatgaaggaggagaatgtggaggtgaagtacttctggggaagcacgttg

SEQ ID NO: 26090 - DNA, 395 bp, Glycine max
  Clone ID: LIB3051-012-Q1-E1-C9
agcccacgcgtccggagattccttctttaatggacctaggccttaatccatctgcaacaatgtcacagaatggaaagtgcgttgctaatgcttctatggtaggaggggagactgaggcactgcagaagcttaaaaaatttgcagctgagtgtgcagctcagccacacaaggggtttaaggatggaacacagagtatatatggtgccaacttctcctgcaagatttctccgtggttggcaatgggatgcctttcccctcgcacaatgtatgaagaactgaagaagactgccggcagagtcatttctgcttcgtccaaccggaatgatggtggtaatggctcgtccagaactggaacaaattggttgatgtttgagttgctatggagggacttcttt

SEQ ID NO: 26091 - DNA, 431 bp, Glycine max
  unsure (1)..(431): unsure at all n locations
  Clone ID: LIB3051-053-Q1-K2-D3
caaaaataccagctagcaggaaaattgggtccatgaggctggatgactgggtcttgtgcaggatctataagaagaagagcatggtaaaagcattggagcacaaagaggcacacccagaagtccaaattgctaatcttgcgcctgcaaatcatgatgttgaacagaaaatgatgaaccttcctaggacttggtcccttacttaccttttggatatgaattacttgggtccaattttatctgatggctcttattgctcaaccttggattttcaaattaacaatggggattagacccttttgggaaatctcaaccggttgaaatgaaacattatgtaacaaaatcaaggaaagaccaaggtgaacaaaatagcaacattggacaagccatatatgtgaaacaaatgtatgatttgctaggataaaaccaatang

SEQ ID NO: 26092 - DNA, 438 bp, Glycine max
  Clone ID: LIB3051-004-Q1-E1-A9
gcgaccgtgaccctgaacgaaacaggggagcaatactacatttgctccgttggatcacactgttccgctggccagaaactggcaattaacgttaacagagcttcttctaccggtccttcccctgcacctcaacccagaggaagtggttctccaccaagggctagccctgtccccacacaagcaccacaagccagtagccccactcctccaccaaggtctgcaccagcacctgcttttggtccatcctctgaaccagctactttcattgttggggaaaccgctggctggattgttcctggcaacgcttccttttacacagcttgggcctctggcaaaaacttcacggctggagacgtccttgtgttcaactacccatcaattacacacaacgtaaaggaggttacaaaggccaacttcgatgcttgcagctcagcctct

SEQ ID NO: 26093 - DNA, 404 bp, Glycine max
  unsure (1)..(404): unsure at all n locations
  Clone ID: LIB3051-009-Q1-E1-C12
accacaagaagaaaaaaccgacacaaagatctagtcctagctagaatcaaacaggggcgatctcaccttcaagaacacatcgccatggcaaggaacttgcttcttgtgctttttgcagtagccaccctcctccatggctcagcagcccaaaccagacacatggtcggtgatgccacgggctggatcatccctgctggcggcgctgccacctacaccgcctgggcttccaacaaaaccttcaccgtaaacgacactctcgtgttcaacttcgccaccggccaacacaacgtggccaaggtaacgaaatcggctttcgacgcgtgcaacggcgggagcgccgttttcaccctgacctccggtcnagcgaccgtgaccctgaacgaaacaggggagcantactacat

SEQ ID NO: 26094 - DNA, 423 bp, Glycine max
  unsure (1)..(423): unsure at all n locations
  Clone ID: LIB3051-026-Q1-K1-F8
ggagaacaagaagaaaaaaccgacacaaagatctagtcctagctagaatcaaacaggggcgatctcaccttcaagaacacatcgccatggcaaggaacttgcttcttgtgctttttgcagtagccaccctcctccatggctcagcagcccaaaccagacacatggtcggtgatgccacgggctggatcatccctgctggcggcgctgccacctacaccgcctgggcttccaacaaaaccttcaccgtaaacgacactctcgtgttcaacttcgccaccggccaacacaacgtggccaaggtaacgaaatcggctttcgacgcgtgcaacggcgggagcgccgttttcaccctgacctccggtccagcgaccgtgaccctgaacgaaacaggggagcaatactacanttgctccgttggatcac

SEQ ID NO: 26095 - DNA, 412 bp, Glycine max
  Clone ID: LIB3051-030-Q1-K1-G10
ctccttcccctgctcctgaagcacatgcaccagcaccaaaagccactagccccatttctgcaccaaggtctacaccagcacctggcccttcctctggatcagttacttacactgttggagagactgcaggctggattgttcctggcaacgcttccttttacccagcttgggcctctgccaaaaacttcaaggttggagacatcctagttttcaactacccatcaaatgcacacaacgtagaggaggtgacaaaggccaactacgattcttgcagctcagcctctcctatcgccactttcaccactccaccggccagagtcccccttagcaaatccggtgaacattactacatctgtggaattccggggcactgtttgggaggacaaaagctttccatcaacgtcaccggcgg

SEQ ID NO: 26096 - DNA, 416 bp, Glycine max
  unsure (1)..(416): unsure at all n locations
  Clone ID: LIB3051-050-Q1-K1-C4
tttcactggaaggagaccaggaagataaaaccgacacaaaaatctagtcctagctaggaatcaaacaggggcgatctcaccttcaagaacacatcgccatggcaaggaacttgcttcttgtgctttttgcagtagccacccttctncatggctcagcagcccaaaccagacacatggtcggtgatgccacgggctggatcatccctgctggcggcgctgccacctacaccgcctgggcttccaacaaaaccttcaccgtaaacgacactctcgtgttcaacttcgccaccggccaacacaacgtggccaaggtaacgaaatcggctttcgacgcgtgcaacggcgggagcgccgttttcaccctgacctncggtccagcgaccgtgaccctgaacgaaacaggggagcaatactac

SEQ ID NO: 26097 - DNA, 425 bp, Glycine max
  Clone ID: LIB3051-006-Q1-K1-A5
gcgatttgcagatacttacaagatggagtgccctgcagcgattaaccgtctcgtggtttctggtgtgcctgccaccgtggagcatcgtgcaactgcggctgcctctgcttccacctctgccgctactgtggccgagtgtgttcagaattttattacttcaatggattccttgaaacttaacatggtggctgtggatcaggtgcacccattgctctcggacctttatgcttcgcttaataagttgacaatcctgccgcctgattttgaggggaaaaccaaaatgaaggaatggattgcaaggttatctaagatgggtgcagctgatgagttgacggaacaacaggctaggcaacttcactttgatcttgagtcttcttacaattcctttatggcagccctgcccaatgctggtccttgacttgatt

SEQ ID NO: 26098 - DNA, 412 bp, Glycine max
  Clone ID: LIB3051-010-Q1-E1-A5
accacgcgtccgcgttgctctgctttcaattttcggaaaagaagagattctgtacagagatgctctgaaacggtgctactacactctggagcaagggtataactcaatgccaattaacgttccgggaacactgttccacaaggcgatgaaggcaacgaacgagcttgcacaaatcgtggcccaaataatctggagcaggatgcataggaagatgattgattacaaggacttgttgggttcattcatggatgagaaatcagggctcaccgacgaccagatagcggataatgttattggcgtcattttcgcagctcgtgacaccaccgccagtgtgctgacgtggatcgtcaagtacctcggtgaaaaccccagtgtcctagaagctgttaatgaggagcaagagtgcatattg

SEQ ID NO: 26099 - DNA, 384 bp, Glycine max
  Clone ID: LIB3051-035-Q1-K1-A8
tgggaagatgcaaaaaagatgccaataacttcaagggtcattcaggagactctaagagttgcttcaattttgtcttttactttcagagaagcagtagaggatgttgaataccaagggtatcttattccaaaagggtggaaagtgctacctctatttaggaacatacaccacagtccagacaacttcaaggagccagaaaaatttgatcccccaagatttgaggctgctccaaagcccaacacttttatgccatttggcagtgggatccacatgtgtccagggaatgaattagccaagttgggagattttggtcctgctacatcatctgaccacaaaggtcaggtggtcttgtgtgggtgcaaagaatgggattcaatatgggcc

SEQ ID NO: 26100 - DNA, 418 bp, Glycine max
  unsure (1)..(418): unsure at all n locations
  Clone ID: LIB3051-117-Q1-K1-B12
ttctccttctaattctttgttacccttcacctattacaagccactcacactaacacaaaaacatggaactaagcaccatgttttgcttgggtgcttcgtttctcttcattgatctcttcagggcactcatcaaaccttattatgtctccaaacgccgtgacttgccactcccacctggctccatgggttggccttacataggagaaacctttcaaatgtattctcaagatccaaatgtcttctttgcctcaaaaataaaaaggtttggctctatgttcaagtcccacattctaggttgtccctgcgtgatgatttccagccccgaggctgcaaagtttgtgctcaacanagctcaactcttcaagccaacattcccagcaagcaaagagaggatgttgggaaaacaagctatcttctt

SEQ ID NO: 26101 - DNA, 408 bp, Glycine max
  Clone ID: LIB3051-058-Q1-K2-D3
gccttcttaccgaacatgacttgagctttccatggaagaagaacacgccgcaaaggcgccactgccggacgctttccttcagttcctggagaccaacgggctcgacccttccatttacactgctattgattccaccccacgatacattcggttgaaacccggtttcgaatcatgtattgaagaggttgaagcagaggtgaaatgcaaactcgaaaaattagagtggttaccgggattttactctcttccacctcacgttcaaattgctggttctagggcataccgagaagggaagatatatggaattgatgcagcttctggagctgcagttatggctttaaatatatcacctggggatcatgttctcgacctgtgtgctgctcctggtgccaaactttgtatgatttt

SEQ ID NO: 26102 - DNA, 377 bp, Glycine max
  unsure (1)..(377): unsure at all n locations
  Clone ID: LIB3051-012-Q1-E1-C1
cccacgcaatccgcggacgcgtgggttgagctgttggatgccttattcaaggaatgtttccatgttggagaaaaaatggtttctgaaggtataattacaagagaagacatagaagaagccaaatctggtaatgggagtagagtcattagtattggtttgccagcatattgcttagtccagggactcttgcgctctgcaaaattaaattccgttggtataatgattagtgatgaaactgaactaactatcacaaacagaccaagggagacattttttgactggttcgttaatcnccttttgatcattaaggagcanatcaaagctgaaaatctttctgcctcagaagaggactacctctgcaaattagttctcttggg

SEQ ID NO: 26103 - DNA, 387 bp, Glycine max
  Clone ID: LIB3051-062-Q1-K1-D11
aacaatttaattctagtttccactctccttatgttgcttcaactccacttcaccccggcaaaagccgccatcaaaggaggctactggtactccgaaagtggccttgcagtttccaacattaacccctctcatttcacccacctcttctgtgcatttgcccacctcgaccccaacaccaacaaagtcaccatttcctcgtcagactcatctcagttctcaaccttcactcaaaccctccaagcaaagaacccttcagtgaagacccttttgtccataggcggcggtttcggtccttctttggctgcaaatttctccagaatggcaagacaagccaacaccagaaaatcattcatagactcttcgatccaacaagccagatcgaacaac

SEQ ID NO: 26104 - DNA, 372 bp, Glycine max
  Clone ID: LIB3051-071-Q1-K1-D2
ctcgaagaacaatttaattctagtttccactctccttatgttgcttcaactccacttcaccggatgaaaagccgccatcaaaggaggctactggtactccgaaagtggccttgcagtttccaacattaacccctctcatttcacccacctcttctgtgcatttgcccacctcgaccccaacaccaacaaagtcaccatttcctcgtcagactcatctcagttctcaaccttcactcaaaccctccaagcaaagaacccttcagtgaagacccttttgtccataggcggcggtttcggtccttctttggctgcaaatttctccagaatggcaagacaagccaacaccagaaaatcattcatagactcttcgat

SEQ ID NO: 26105 - DNA, 312 bp, Glycine max
  Clone ID: LIB3051-087-Q1-K1-B12
gccaactcgaaaaccatttaaatcctagtttcaactctcctaatgtggcttcaactccaggtaacgcaatcaaaacccgccttcaaaggaggctactggtactccgaaagtggccttgcagtttccaacattaacccctctcatttcacccacctcttctgtgcatttgcccacctcgaccccaacaccaacaaagtcaccatttcctcgtcagactcatcttagttctcaaccttcactcaaaccctgcaagcaaagaaccctttagtgaagacccttttgtccataggcggcggtttctgtccttctttg

SEQ ID NO: 26106 - DNA, 430 bp, Glycine max
  Clone ID: LIB3051-091-Q1-K1-H5
cccacgcgtccgaaagaaaatggccaactcgaagaacaatttaattctagtttccactctgcttatgttgcttcaactccacttcaccccatcaaaagccgccatcaaaggaggctactggtactccgaaagtggccttgcagtttccaacattaacccctctcatttcacccacctcttctgtgcatttgcccacctcgaccccaacaccaacaaagtcaccatttcctcgtcagactcatctcagttctcaaccttcactcaaaccctccaagcaaagaacccttcagtgaagacccttttgtccataggcggcggtttcggtccttctttggctgcaaatttctccagaatggcaagacaagccatacccaccagaaaatcattcatagactcttcgatccaacaagccagatcgaacaacttcctc

SEQ ID NO: 26107 - DNA, 309 bp, Glycine max
  Clone ID: LIB3051-003-Q1-E1-A3
gggatgggggcattggcagcgtgcgtgaggtcaggatcacatctgggttacccgctggtgttagtgtggagaggttggacaagctcgatgatgagaagcatgtcttgaagtttagcatcattggtggtgatcacaggcgtgtcaagtatggttcaacgagtactttgcatgaggaggaagaggaataccgtgggaagacggtggcgatagagtcgtacgcggtggatgtcccggccgggactagcggcgacgatacgtgctcttttgctaatactatcatagcttgcaaccttaggtccttggctaaga

SEQ ID NO: 26108 - DNA, 423 bp, Glycine max
  unsure (1)..(423): unsure at all n locations
  Clone ID: LIB3051-019-Q1-E1-A9
accacgcgtccaaaaacagtcaacantagcttgctagctactcctgttgctgtgagaaccgttgatgtagatgctttgcaagcaagatttagagactccaacaataaaagccatgcttaacacctaccatgcctccaaactctcatcaaaccagtgtggttctagccttgtgcaaacaatagatgcacctttacctctcgtatggtccctcataaggcgctttgagtatccagaagggtacaagctctttgtgaagaagtgcaaccttcttgatggggatggtggcattggaagcgtgcgtgaggtcatgatcacatctgggttacccgctggtgttagtgtggagaggttggacaagctcgatgatgacaagcatgtcttgaagtttagcatcattggtggtgatcacagggttgtcaatta

SEQ ID NO: 26109 - DNA, 432 bp, Glycine max
  Clone ID: LIB3051-019-Q1-K1-A9
aaaacaatcaacaatagcttgctagctactcctgttgctgtgagaaccgttgatgtaggtgctttgcaagcaagatttagagactccaacaataaaagccatgcttaacacctaccatgcctccaaactctcatcaaaccagtgtggttctagccttgtgcaaacaatagatgcacctttacctctcgtatggtccctcataaggcgctttgagtatccacaagggtacaagctctttgtgaagaagtgcaaccttcttgatggggatggtggcattggaagcgtgcgtgaggtcatgatcacatctgggttacccgctggtgttagtgtggagaggttggacaagctcgatgatgacaagcatgtcttgaagtttagcatcattggtggtgatcacaggcttgtcaattatagttcaacgattactttgca

SEQ ID NO: 26110 - DNA, 415 bp, Glycine max
  Clone ID: LIB3051-033-Q1-K1-C12
caacaatagcttgctagctactcctgttgctgtgagaaccgttgatgtagatgctttgcgagcaagatttagagactccaacaataaaagccatgcttaacacctaccatgcctccaaactctcatcaaaccagtgtggttctagccttgtgcaaacaatagatgcacctttacctctcgtatggtccctcataaggcgctttgagtatccacaagggtacaagctctttgtgaagaagtgcaaccttcttgatggggatggtggcattggaagcgtgcgtgaagtcatgatcacatctgggttaccccctggtggtaagtgtgagaggtgggacaagctcgatgatgacaagcatgtcttgaagtttacatcattggtgggatcacaggcttgtcaatatagttcaacgattac

SEQ ID NO: 26111 - DNA, 429 bp, Glycine max
  Clone ID: LIB3051-035-Q1-K1-C12
aatcaacaatagcttgctagctactcctgttgctgtgagaaccgttgatgtagatgctttgcaagcaagatttagagactccaacaataaaagccatgcttaacacctaccatgcctccaaactctcatcaaaccagtgtggttctagccttgtgcaaacaatagatgcacctttacctctcgtatggtccctcataaggcgctttgagtatccacaagggtacaagctctttgtgaagaagtgcaaccttcttgatggggatggtggcattggaagcgtgcgtgaggtcatgatcacatctgggttacccgctggtgttagtgtggagaggttggacaagctcgatgatgacaagcatgtcttgaagtttagcatcattggtggtgatcacaggcttgtcaattatagttcaacgattactttgcatg

SEQ ID NO: 26112 - DNA, 425 bp, Glycine max
  unsure (1)..(425): unsure at all n locations
  Clone ID: LIB3051-040-Q1-K1-C12
acaaaacaaggtcattgagaaaccccaaaacaatcaacaatagcttgctagctactcctgttgctgtgagaaccgttgatgtagatgctttgcaagcaagatttagagactccaacaataaaagccatgcttaacacctaccatgcctccaaactctcatcaaaccagtgtggttctagccttgtgcaaacaatagatgcacctttacctctcgtatggtccctcataaggcgctttgagtatccacaagggtacaagctctttgtgaagaagtgcaaccttcttgatggggatggtggcattggaagcgtgcgtgaggtcatgatcacatctgggttacccgctggtgttagtgntgagaggttggacaagctcgatgatgacaagcatgtcttggagtttagcatcattggtggtgatcacag

SEQ ID NO: 26113 - DNA, 405 bp, Glycine max
  Clone ID: LIB3051-044-Q1-K1-F10
cggacgcgtgggcaacaatagcttgctagctactcctgttgctgtgagaaccgttgatgtagatgctttgcaagcaagatttagagactccaacaataaaagccatgcttaacacctaccatgcctccaaactctcatcaaaccagtgtggttctagccttgtgcaaacaatagatgcacctttacctctcgtatggtccctcataaggcgctttgagtatccacaagggtacaagctctttgtgaagaagtgcaaccttcttgatggggatggtggcattggaagcgtgcgtgaggtcatgatcacatctgggttacccgctggtgttagtgtggagaggttggacaagctcgatgatgacaagcatgtcttgaagtttagcatcattggtggtgatcacaggc

SEQ ID NO: 26114 - DNA, 411 bp, Glycine max
  Clone ID: LIB3051-047-Q1-K1-C6
cccacgcgtccgaaacaatcaacaatagcttgctagctactcctgttgctgtgagaaccgttgatgtagatgctttgcaagcaagatttagagactccaacaataaaagccatgcttaacacctaccatgcctccaaactctcatcaaaccagtgtggttctagccttgtgcaaacaatagatgcacctttacctctcgtatggtccctcataaggcgctttgagtatccacaagggtacaagctctttgtgaagaagtgcaaccttcttgatggggatggtggcattggaagcgtgcgtgaggtcatgatcacatctgggttacccgctggtgttagtgtggagaggttggacaagctcgatgatgacaagcatgtcttgaagtttagcatcattggtggtgatcacagg

SEQ ID NO: 26115 - DNA, 429 bp, Glycine max
  Clone ID: LIB3051-048-Q1-K1-C9
cttgctagctactcctgttgctgtgagaaccgttgatgtagatgctttgcaagcaagagttagagactccaacaataaaagccatgcttaacacctaccatgcctccaaactctcatcaaaccagtgtggttctagccttgtgcaaacaatagatgcacctttacctctcgtatggtccctcataaggcgctttgagtatccacaagggtacaagctctttgtgaagaagtgcaaccttcttgatggggatggtggcattggaagcgtgcgtgaggtcatgatcacatctgggttacccgctggtgttagtgtggaaaggttggacaagctcgatgatgacaagcatgtcttgaagtttagcatcattggtggtgatcacaggcttgtcaattatagttcaacgattactttgcatgaggaggaagagg

SEQ ID NO: 26116 - DNA, 439 bp, Glycine max
  Clone ID: LIB3051-062-Q1-K1-H2
aaaacaatcaacaatagcttgctagctactcctgttgctgtgagaaccgttgatgtagatgcgttgcaagcaagatttagagactccaacaataaaagccatgcttaacacctaccatgcctccaaactctcatcaaaccagtgtggttctagccttgtgcaaacaatagatgcacctttacctctcgtatggtccctcataaggcgctttgagtatccacaagggtacaagctctttgtgaagaagtgcaaccttcttgatggggatggtggcattggaagcgtgcgtgaggtcatgatcacatctgggttacccgctggtgttagtgtggagaggttggacaagctcgatgatgacaagcatgtcttgaagtttagcatcattggtggtgatcacaggcttgtcaattatagttcaacgattactttgcatgaagag

SEQ ID NO: 26117 - DNA, 460 bp, Glycine max
  Clone ID: LIB3051-102-Q1-K1-E11
aaacaatcaacaatagcttgctagctactcctgttgctgtgagaaccgttgatgtagatgctttgcaagcaagatttagagactccaacaataaaagccatgcttaacacctaccatgcctccaaactctcatcaaaccagtgtggttctagccttgtgcaaacaatagatgcacctttacctctcgtatggtccctcataaggcgctttgagtatccacaagggtacaagctctttgtgaagaagtgcaaccttcttgatggggatggtggcattggaagcgtgcgtgaggtcatgatcacatctgggttacccgctggtgttagtgtggagaggttggacaagctcgatgatgacaagcatgtcttgaagtttagcatcattggtggtgatcacaggcttgtcaattatagttcaacgattactttgcatgatgaggaagaggaatacggtgggaaga

SEQ ID NO: 26118 - DNA, 442 bp, Glycine max
  Clone ID: LIB3051-027-Q1-K1-C1
cccacgcgttcggaagtgaacaattacagcacaagcctgtgcctgttctttctctgcctaaagaagtcgttttctcttcgccaagaccggttagtgagcttgatgctgccgcaactaaacttcaaaaagtgtacaagagttaccgcactagaagaaaccttgcagattgtgctgttgtggtggaagagctctggtggaaggcattagactttgctgctcttaaacggagctctgtttcattctttgatgtggagaaacaagaaaccgccgtgtcacggtgggcaagagcaaggacaagagcagctaaggttggaaaaggtttgtccaaggatgataaggctcaaaaattagccctccaacattggctagaagctattgacccacgtcatcgctatggacacaatttgcacatgtattacgatatttggtttgagagccaagc

SEQ ID NO: 26119 - DNA, 436 bp, Glycine max
  Clone ID: LIB3051-065-Q1-K1-D5
gtgaacaacaattgcagcaccagcctgtccctgttctctctctgcctaaagaagtggttttgtcttcgccaagaccggttagtgagcttgatgctgcggctactaagcttcaaaaagtctacaagagttaccgcactagaagaaaccttgcagattgtgctgttgtggtggaagaactctggtggaaggcattagactttgcttctcttaaacggagctctgtttcattctttgatgtggagaaacacgaaaccgccgtgtcacggtggacaagagcaaagacaagagcagctaaggttggaaaaggtttgtctaaggatgataaggcacaaaaattggccttgcaacattggctcgaagctattgacccacgtcatcgctatgggcacaatttgcacatgtattacgatacttggtttgaaagccaaagcaccca

SEQ ID NO: 26120 - DNA, 413 bp, Glycine max
  Clone ID: LIB3051-029-Q1-K1-C1
cattcatttaaattacgatatcaagcagttgaaattatgagcccagaggaagaagcacgtcagatagtagcagcaatgaggattcaacatgcctttcgcaactatgagtcaaagaaaaagatggcagccgctgctcggattcagcttagattccgtacatggaagtaccgtagagaatttctcaatatgcggcgtcaggctattaaaattcaagctgctttcaggggctttcaagcacggaagcaatatcggaaaatcgtatggtctgttggggtgcttgagaaagtgatcctgcgttggcttttaaagagaaaaggcttccgtggtctccaggttaatcctgccgaggaggagacacaggaaagtgatacaattgcagaggaggatttctttcgcaccagccggaaacaagc

SEQ ID NO: 26121 - DNA, 270 bp, Glycine max
  Clone ID: LIB3051-030-Q1-K1-C9
tcgcccacgcgtacgcaagaacttagtaagtgaagaccaggagcagattgttgaggggataatgcaaaatattgagaaggatttaattcttcttggtgctactgcagttgaagacaaactacaagatggggttcctgaatgcattgacaagctagctcaagctgggattaagctatgggttttaactggtgataaaatggagacagcaattaatattggatttgcttgtagtttactcagacaaggtatgaaacaaattataattagctc

SEQ ID NO: 26122 - DNA, 422 bp, Glycine max
  Clone ID: LIB3051-031-Q1-K1-C9
agagaagtagggttcgaaaatggcagcagaatcatcagagggcgaagaagaaaccaagtgaagcggaggtaaccaattgctcatagttgacgatgacttaacggaaatgggaaagaaagccgcttggagcgtgagttcctgcaaacccggtaacggcgtttcctctctccgtgacgacaatctcgaaacttattggcaatccgacggagggcaaccccatttagttaacattcagtttcagaagaaagttagacttcaattaattgtgctgtacgtggatttcaagcttgacgagagttacacgccgagcaaagtttccatccgtgccggtgatggttttcacaacttgaaggagattaagaccgtggaactcgtgaagccaactggatgggtttatctttccttgtctggagttgatccta

SEQ ID NO: 26123 - DNA, 441 bp, Glycine max
  Clone ID: LIB3051-102-Q1-K1-F12
cccacgcgtccggttaacaaccaattgattggagcagaaattctttcactagctgaggaagatgtacctcctgaggatctcgtcttccacaagttctacacaaacaaaatgagtttgtcttctaaaccgaagaaaaagaaaaagaagtcagctgatgaggaagcagctgaggagttgtttgatgttgataatggtgaagttgatggtggggatgagagtgacaatgaagagattgagaatctgttggattccactgatccaactttgggaccagacagtgactatgattatgatgatttggatgaagtagccgatgaggaagatgaggacttgattggtgatgttagtgatgcagagattaattcggagatggatatagatataccctctgatattgatgaggaagagactgatgatgctccaattgatgatgacgacgac

SEQ ID NO: 26124 - DNA, 427 bp, Glycine max
  Clone ID: LIB3051-034-Q1-K1-C1
aaagaagagaaagcgtccttgccaagacgctgtggctcccaccacggaagacgacaactgctgcaccaaggccgccgccgcatcacacggtttcatatccgttatagggcggcggcgcgtgatggaggatgcagtgaaggtggttaccggtttggtggcggcggaacaacactgtggcggttacgatttcttcgcggtttacgacggccacggagggaccttggtggccaacgcttgccgcgacaggctgcacttgttgctggcggaggaagtagtgagggggaccgcagcagacaaagggctggattggtgccaggtgatgtgttcctgtttcatgaagatggacaagggagttggtgaggagaacgatgatggcggcggaaacaccatgggttcgacggcggcggtggtggtggtcggaaaggag

SEQ ID NO: 26125 - DNA, 373 bp, Glycine max
  Clone ID: LIB3051-037-Q1-K1-A9
aacaatgtccacgcttccgaagcaccaacccgaagcgaaaccccaagatcgccctgcggatcaaccagcttcggcgccctcggatgcaaaacccgaagatcttcatccgaaccagccaggttcggagtctcccgaagccaaagcagagggggaagaagaggatgaagaagaagaaggagagtgcgggttctgcctcttcatgaagggtggtgggtgcagagacgagttcatagggtgggaaaattgcgtccaggaggccgaaaacaacaacgaggacctcctcgagaagtgcgcccaggtcaccgccgctctcaagcgctgtatggacgcccactccgactactacgagcccatgctccgcgccgagaagctc

SEQ ID NO: 26126 - DNA, 360 bp, Glycine max
  Clone ID: LIB3051-022-Q1-K1-H3
tccgtatacccgcgtcgcacccacgcgtccgcagcagaatactacaggtctctaccacctgtgagcaagacctatggagtggcctgtttgatgaccacttctgcatattatctgcaactctatgatgcaaggaacatagcacttgattatggcccagtgtttaaaagccttcaagtttggaggcttatcacaaatttcttctttcttggctcattttcattaccatttgcagtccgtctgataatgatagcaaaatatggtgtttcattggaaagagggcccttagactagataactgcatattatgttgtgatgttcataagtggtgcatattttattctttttatttatattctgtat

SEQ ID NO: 26127 - DNA, 416 bp, Glycine max
  Clone ID: LIB3051-037-Q1-K1-G10
gggaccatggaggcaaattcaggtgccagcgaccgaatttcgagaatcgccggccacctccgcccccagagagaggatgatgtttgtttgaagcgtagcgattgccgtgcaaaaggtggggtctccggattcaaggtggccatattgggtgccgcaggaggcatagggcaacctctggcgatgttgatgaagatgaatccactcgtttcacttctccacctctacgatgttgttaacacccctggcgtcacttctgatataagtcacatggacaccggcgctgttgttcgaggatttttggggcagcagcagcttgaggatgcacttataggcatggacttggtgatcatccctgctggtgttcctcgtaaacctggaatgacaagagatgatctcttcaatataaatgctggaat

SEQ ID NO: 26128 - DNA, 368 bp, Glycine max
  Clone ID: LIB3051-043-Q1-K1-A5
ctttcccgtgaaaagggaccatggaggcaaattcaggtgccagcgaccgaatttggagaatcgccggccacctccgcccccagagagaggatgatgtttgtttgaagcgtagcgattgccgtgcaaaaggtggggtctccggattcaaggtggccatattgggtgccgcaggaggcatagggcaacctctggcgatgttgatgaagatgaatccactcgtttcacttctccacctctacgatgttgttaacacccctggcgtcacttctgatataagtcacatggacaccggcgctggtgttcgaagatttttggggcaacagcagcttgaggatgcacttataggcatggacttggtgatcatccct

SEQ ID NO: 26129 - DNA, 442 bp, Glycine max
  Clone ID: LIB3051-004-Q1-E1-C8
ctcggcacacaatacgccggggaaatgaagaagggtcttttcagtgtcatgcattatctcatgcctaagcgccaaatcctctccctacactccggatgcaatatgggcaaagatggggatgtggcactcttctttggactctcaggtactgggaagaccactctttccaccgatcacaataggtatttaatcggagatgatgaacactgttggggtgacaatggtgtctccaacattgaaggtggttgctatgccaaatgcattgacctctcacgggagaaagagccagatatttggaatgcaatcaggtttggcacagtgttggaaaatgtggtgtttgatgagcatgatcgagaagttgattactctgacaagtcagttacagaaaatactcgtgcagcttatcctatagagtacattccaaatgcaaagttaccttgtg

SEQ ID NO: 26130 - DNA, 436 bp, Glycine max
  Clone ID: LIB3051-045-Q1-K1-A5
atctacacaaagagaacccaagggcacctttgtttgttgttgggactagcattggagcgtaatattctgataaaatatcttggtgaggatggtgagaatattcctgtagctggagctgtggctgtttgctctccttgggaccttttgataggagacagatttataacccgtaggcatgtgcagaagttttatgataaagcacttgcaattggacttcaaggttatgcaaaattacatcagcctcatttttctcgccttgctaattgggaagggattgaaaagtcaatttccattcgagattttgatcatcatgccacccgcattgttgggaagtatgagactgttgacacgtactatagacgctgcagcagttctacttatgtgcaatctgtttcgattccacttctctgtattagtgctctggatgatccagtct

SEQ ID NO: 26131 - DNA, 400 bp, Glycine max
  Clone ID: LIB3051-043-Q1-K1-C9
cccacgcgtccgaatgaaatgtattatattggtgggaattctgagagtgtggaacaagatgtgatgcattcttataacatggcatttggtggtggtggatttgcaatcagttatgcattagcagctcaactagccaaaataatggatggttgtctaagtagatacttctatttttatggttctgatcaaagagtctgggcctgtattcatgaaattggggtgccccttaccagagaaaatggattccaccagtttgacataagaggaaatccatatggttttctagcagctcaccccttggtaccacttgtatcactccatcaccttgaccaattgagccccttctttcccaaccagactcaattacactcaaatgaaaagctcatcagtgcataccaca

SEQ ID NO: 26132 - DNA, 374 bp, Glycine max
  Clone ID: LIB3051-047-Q1-K1-A5
gaaaaaacaacaacaacaacaaaaaaaaacatcatcatcaaaaaaacttccgagagtttaatggcaacacgcgtgatccctccaagaatcctcaagaagctccgttacaacacaacaaccaagccactcaacgctgcccacccctcaatctctccagtcatcgccccaccgtcactcttcgagaggtcgccgtcccctgtcgcggatgctgtttcaacaacatccacgactatggagacggcgaatctcaacctcgacgacgcggagcggcttttcgcgtcagtatcgacggaaaagctgctccggtcgtccgcggttttgcatgcgacggcggtggggcccatggtagacctgggaatgtggttgatgaagtc

SEQ ID NO: 26133 - DNA, 427 bp, Glycine max
  Clone ID: LIB3051-025-Q1-K1-H2
cccacgcgtccgcccacgcgtccgatcaggtcatgccatggaagactatcttgttgctcaatttaagcaagttgacaacaaagagttgggtttatttgcaatatttgatggccactctggtcacagtgtacctgattacttgaagtctcatttgtttgataatatcttgaaagaggtaatgaggcctaacttctggacagaacctgctgaggctgttaagagagcatatagtataactgattctactattttagacaaatcaggtgaattgggtagagggggttcaactgcggttacagcaatattgatcaacttgttacaagctactagtgggcaatattggggattcccgggctgtcttatgtaagaaatggcgtaccaaacaactatcggtggatcatgaaccaagcatagaaagtgaagatat

SEQ ID NO: 26134 - DNA, 388 bp, Glycine max
  Clone ID: LIB3051-013-Q1-E1-H11
cgggtccggaatttttggatttgttaatttcaaccttcaattttttttaaaaaaccaaccaatccgcaaagtgcaaatttcaaatctttcacgtattgggttcttctcttttccctcttcgtctccgatcgatccaattctcttcccatggctacgatcggacacaacaatctcaatgccaaattggttcttctcggggacatgggtgctgggaaatccagcctcgttttgcgctttgtcaagggtcaatttctcgaatttcaggaatcaacaataggggcagcgttcttttcacagacgctggcagtaaatgatgcgacagtgaagtttgagatttgggacacagcaggacaagagaggtaccatagcttggctcccatgtattaca

SEQ ID NO: 26135 - DNA, 362 bp, Glycine max
  Clone ID: LIB3051-064-Q1-K1-A5
agagctcagtcggtttagaggcacaggaagaccacccttatccttttgcaggagcttcaaatgttaaagtgcgccttggggttgtttcagtagctggaagctccattacttggatggatcttctctgcgggggcacagaacagcaaaacaatgaggaggaatatttggcaagagtcaattggatgcatggaaacattctcactgctcagattttgaacaggcaccacactaaaataaagatcgttaagtttgatattagaacaggccaaaggaaaaatatattgttcgaagaaaacagcagttggatcaatatacatgactgtttcacacctcttgataaaggagttaccaaattttcgggt

SEQ ID NO: 26136 - DNA, 381 bp, Glycine max
  Clone ID: LIB3051-069-Q1-K1-A5
ggatgaggagcatcatgagccccataatcatctccatgttcaacccaaaatccacggtctggtccatactcatcaatatagatttttggacaaggcagcgatcatagatgaaattgatgccaagacgaagacaagagacccttggaggctatgttcagtgacacaagttgaggaagtgaagcttgtccttcgtttgattccaatatggctaagttgcttaatgttcactgctgtacaagctcaagtgcacacatttttcattaagcaaggtgccacaatggtacgtaccataggaccacatttccaagtcccaccagcatcggtacaaggcctagttggaggcacaatactctttgctgagccattctatgaccgtgtctt

SEQ ID NO: 26137 - DNA, 465 bp, Glycine max
  Clone ID: LIB3051-071-Q1-K1-A5
tgcgaagttgaagagttcgggagctaaggtttcaatgccagttgcttctaatgaagtgcccagaagttcaagccacattgaaaaggtaaaaagctcccgttctgttcagcaggagaaagaactactgccttccgttccttcaggaccctctttgggagattttgttctttggaaaggagagacaacaagcccatctcctcctccagcatggactaccgattctgctaggattcctaaaccaacatcattaagggacattttaaaggagcaggagaagaagtcctatgcagtactaccaaaccaactgcctacccctcaaaaatcacagcctgcccaagctgcacggaatagtggttcttcacgcccaatttcagcttcatctccatcaaaaactgcaccttctagccagataaactcccaagcttctctgtcaaaatacagaggggatgatgatttgttttgggg

SEQ ID NO: 26138 - DNA, 395 bp, Glycine max
  Clone ID: LIB3051-053-Q1-K2-A10
cttagatcggttgggaatcgatgattttgatatggaagaagaggtgagacccgatttcggttgcccctattgttatgaagactttgacatcgcgtctttgtgttctcatcttgaagatgaacattcttgtgaatcaagagtcacgatttgtcctatatgctccgataaagttgcacggaacatgttaagtcacataacgctgcaacatgggcatttattaaagttacagagaaggcgcaggttaagaagagttgctattccaaacagtcagacattgtcccttttgggtcgagatcttcgtgaggctcatctacaggtgcttcttggtggtggaacgtgatggtggataccggtcaaatagtgtagctgcagccgtatctaatgctggtgctact

SEQ ID NO: 26139 - DNA, 472 bp, Glycine max
  unsure (1)..(472): unsure at all n locations
  Clone ID: LIB3051-090-Q1-K1-A3
cgcgtncgattttgattcattagagagaaaatacaagaaagtgttcgacgaatctgttgaaagtggtgactggatttgattcattcacataaccaatttatcatctctccgatctttcaatggattctgacttctggacctcgcgtcttgctgccgctaaacgccaatacacgcttcagcatcaccatccaaattctcacttagatcggatgggaatcgatgattctgatgtggaagaagaggtgagacctgattttccttgcccgtattggtatgaagactttgacatcgcgtctttgtcttctcatcttgaagatgaacattctcgtgaatcaagagtcacgatttgtcctatatgctccgttaaagttgcacggtacatgttaaatcacataacgctgcaacatgggcattgatctaagttacagagaacgcgcaggttaagaagagtcgctattccaaacagtcagac

SEQ ID NO: 26140 - DNA, 436 bp, Glycine max
  Clone ID: LIB3051-075-Q1-K1-A5
agagaatagagtgagagaaagagattcatgaacaaaaccagagatgggaaggctatgggaactggaggaacaagcctgctctcagtggctgcaatggtggcatgcttgctgcctcctttgtattagtggttgagatattggagaatctggcatttctagccaatgcaagcaattcggtgctgtatctgaggcagtacatgcacatgtacgcttcaaaatctgccaacaatgtcacaaatttcatgggaacagtcttcctccttgcccttcttggacgtttcttatctgatgcttttttcaccacttatcacatctacctgataagtgcagtcattgaattcctggtatgcaccctatattaattttcatctctctctgtgtcactacttgcgaatataacacttaatttaaattctttcagcatattacataatat

SEQ ID NO: 26141 - DNA, 427 bp, Glycine max
  Clone ID: LIB3051-040-Q1-K1-B7
aaggcaactagggagaaggcagagaaagaaataggaaaggaagccaaagaattctacacaaaaatggttgaacaaaaaaatcaggtcatccctcttcttactccttacaggatggggaacttaaatctttcacacagaatcgttttggcgccactatttagagcaagatcttacaacaacgttgctcagccgcatgctattctatattactctcaaagagctaccaagggaggtcttctgattactgaagctactactatttcacccacttctaaataccatccaaacgcagttggtatatggtcaagagagcaaatcgaagcatggaaacccattgtggatgctgttcatgccaaaggtggtatattcttctgtcagattgttcatactggaagggcttacgatccagatcttaagcccgatggac

SEQ ID NO: 26142 - DNA, 448 bp, Glycine max
  Clone ID: LIB3051-086-Q1-K1-C4
gcggacaaaggcaactagggagaaggcagagaaagaaataggaaaggaagccaaagaattctacacggaaatggttgaacaaaaaaatcaggtcatccctcttcttactccttacaggatggggaacttaaatctttcacacagaatcgttttggcgccactatttagagcaagatcttacaacaacgttgctcagccgcatgctattctatattactctcaaagagctaccaagggaggtcttctgattactgaagctactactatttcacccacttctaaataccatccaaacgcagttggtatatggtcaagagagcaaatcgaagcatggaaacccattgtggatgctgttcatgccaaaggtggtatattcttctgtcagattgttcatactggaaaggcttacgatccagatcttaagcccgaggacaaaccttaatatcat

SEQ ID NO: 26143 - DNA, 438 bp, Glycine max
  Clone ID: LIB3051-105-Q1-K1-F10
tgctctccttcgagcgtcgcctgaaggataacatcgaagcgcgccttaaataccctagcgaaccggaccgcttggccgattccgaagtagaactccacgaagagcttcagaagctgaaggtcctcgccggcgcgccggagctctacccggacctcgtcaacctcaacgtggttccctccatcgtcgacctcctcaaccacgacaacaccgacatcgccatcgacgtcgtgcaattgctccaggacctcaccgacgaggacgttctcgacgacaacgacgactccgctagggttttggtcgacgcgcttgtcgacaacagcgcgctcgagctcctcgtgcagaacctgcaccgcttgaacgattccgatcccgacgagaacgccgccgtgtacggctccctcgccacggtggagaatatgatcgacgtgaagcccgcgg

SEQ ID NO: 26144 - DNA, 441 bp, Glycine max
  Clone ID: LIB3051-102-Q1-K1-C8
gcttcctctgccgccatcgacggcgcctgctgcggcggcgagcggcggagcgagcgggcgggcggcgcagcaggtgagtccctttctcggagctggagagactgaaccgcatcgggagcgggagcggcgggacggtgtacaaggtggtccaccgcacgagcgggcgcgtgtacgcgctgaaggtgatatacggtcaccacgaggagtcggtgcggcggcagatccaccgggaaatccagatcctccgtgacgtggacgatgcgaacgtggtgaagtgtcacgagatgtacgatcagaacagcgaaatccaggtgctgctggagttcatggacggaggttctctggaggggaaacacatcacgcaggagcagcagctggcagatctgtctcggcagattcttagggggctggcgtacctgcaccggcggcacatcgtccaca

SEQ ID NO: 26145 - DNA, 402 bp, Glycine max
  Clone ID: LIB3051-032-Q1-K1-A6
cgaaaatgtggaagagaacgggttttgaagaagaagcagttcaattgatcaactcggatttcagggacctaagtctagctgctaatagactcgcccatcatgccatcaaacttggtggcattggctttggagcctcttttttcggattgtttgctgccattgctgctatttatctgttgattttggatcgtacaaactggaaaacaaatattctcacagcactactcattccatacattttcttcagcttgccttcattaattttcgacgtcttcaggggagagcttggaaaatggattgctgcagttgctgttgtattacgccttttccttccaagacacttccctgattggctggaattgcctggtgctctgattcttcttatcgttgtagctccttctc

SEQ ID NO: 26146 - DNA, 432 bp, Glycine max
  Clone ID: LIB3051-103-Q1-K1-G2
cccacgcgtccgggaagagaacgggttttgaagaagaagcagttcaattgatcaactcagatttcagggacctaagtctagctgctaatagactcgcccatcatgccatcaaacttggtggcattggctttggagcctcttttttcggattgtttgctgccattgctgctatttatctgttgattttggatcgtacaaactggaaaacaaatattctcacagcactactcattccatacattttcttcagcttgccttcattaattttcgacgtcttcaggggagagcttggaaaatggattgctgcagttgctgttgtattacgccttttccttccaagacacttccctgattggctggaattgcctggtgctctgattcttcttatcgttgtagctccttctctaattgcaagcacctttagagacaaca

SEQ ID NO: 26147 - DNA, 364 bp, Glycine max
  Clone ID: LIB3051-008-Q1-E1-F3
atcaagggttgtgaaagcagagaagtgagatacactaagttatcctcataaatacactctaattaggtggcaagataagtgtctaaccttagtaacattgccacatattgtgttcattttggaattgtgccactaaaattctattcaattcatctatggctgcctcttcttatgctatgcaatcaatcctggcaaaccctttgatccgcatttccagcgggtctagggtgaaccaatttggcgttcctgctttgcacatgagaaggaatgttggcctgagagttaggtccatggctaaggaagaacaaccaagtgagcctgcaaccccagttacaccgccaccatcagtagaaccaagccacag

SEQ ID NO: 26148 - DNA, 407 bp, Glycine max
  Clone ID: LIB3051-058-Q1-K2-F7
caacaataggagatctcctaatcagtcatctccaagtagtcaagacagagcagggccatcagaattacaatcattttcagaatctctgaaatctaaactgaatgctgtatcaacaagatacaaggagtcaatttccaagagcacaagagggtggaaggagagatggttctctcggaacaacactatgtctgaccttggatctgaagttaggcgagaagttaatgcagggattgcaactgtgtcacgcatgatggaacgcctggagaccagcgacaataatagaagcaatagcaattctgcccccagtaatatagaggatggttcagttcaggaatataatggtcaaactttaacaccaggcaatgaaggggacggtcttttgagagacaattacccaaaagcttctt

SEQ ID NO: 26149 - DNA, 479 bp, Glycine max
  Clone ID: LIB3051-080-Q1-K1-A8
aaaacttctctctcacactcactttctctctctataactctttctcacccgctagggtttccggttcatcgcatcttgagtttgcaacctcgtcttgtgatttccatggagggtgctgggatggaagagaataatattattaatgatgatgataataataacaagtctgaggcgcatttgacttctgccgctgcttttgtggagggtggaattcaggacgcttgtgatgatgcttgcagtatatgccttgaagctttctgtgatagtgatccttccacggtgacgagctgcaagcatgagtttcatcttcagtgcattctcgaatggtgtcaaagaagctcccagtgccccatgtgttggcagcctatcagtctcaaagatccaacaagccaagaattacttgaagcagtggaaagagagcgaaactttaggttcaatccatctagaaatgccacaatatttcatcatccaacactggg

SEQ ID NO: 26150 - DNA, 428 bp, Glycine max
  Clone ID: LIB3051-016-Q1-E1-D3
acgcgtcaggcccgaaggctcccatggcatctatccagagcctcgtgcacttaccacttctgagatatctgaaatagtgcatcattatcgccaagcagctattaatgcaattcgagcaggttttgatggaatcgagattcatggagcacatgggtatctcattgatcaattcttaaaggatgcaatcaatgatagaacagatgaatacggtggaccactagaaaaccggtgcaggttcttaatggaggtagttgaagctgttgtctctgccattggagcggaaagagttgctatcagaatttcaccagcaattgatttcaatgacgcctttgactctgacccacttgggctaggcttagcagtgattgaaagactcaacaatttgcagaaacaagtgggcacaaaactcgcttatcttcatgttactc

SEQ ID NO: 26151 - DNA, 415 bp, Glycine max
  Clone ID: LIB3051-053-Q1-K2-F3
gagcgctcaatgggactccactggcagcacatgctgaatactacgctcagagatcaacaccgggtggatttctcatcactgaaggcaccttgatctctccaacttcttctgggtttcctcatgttcctggaatatactcagatgaacaggtagaggcatggagaaatgtagtggacgccgtgcatgccaacggcagctttatcttctgtcaactctggcatgttggccgtgcatcacatccagtgtatcagcctggtggggctctaccctcttcgtccaccagcaaacccatatcagacaagtggaaaattctcatgcccgatggctcccatggcatctatccagagcctcgtgcacttaccacttctgagatatctgaaatagtgcatcattatcgccaagcagctattaatgc

SEQ ID NO: 26152 - DNA, 449 bp, Glycine max
  unsure (1)..(449): unsure at all n locations
  Clone ID: LIB3051-060-Q1-K1-H3
accacgcgtgcggaaaaccggtgcaagttcttaatggaggtagctgaagctgttgtctaggccattggagcggagggagttgctatcagaatttcaccagcaattgatttcaatgacgcctttgactctgacccacttgggctaggcttagcagtgattgaaagactcaacaatttgcagaaacaagtgggcacaaaactcgcttatcttcatgttactcagcctcgattcacacttttggcgcaaaccgagtcagtgagtgaaaaggaggaagctcatttcatgcagaaatggagagaggcttatgagggaacattcatgtgtagtggagcttttactacggactcatgaatggaagctgtagctgaaggccatgctgatttggtatcctatggtcgtcttttcatctgcaatccagacttggttntaaagcttaagctcaatgcacc

SEQ ID NO: 26153 - DNA, 460 bp, Glycine max
  Clone ID: LIB3051-080-Q1-K1-C4
acgctgaatactacgctcagagatcaacaccgggtggatgtctcatgactgaaggcaccttgatgtgtccaacgtcttctgggtttcctcatgttcctggaatatactcagatgaacaggtagaggcatggagaaatgtagtggacgccgtgcatgccaacggtagctttatcttctgtcaactctggcatgttggccttgcatcacatccagtgtatcagcctggaggggctctaccctcttcgttcaccagcatacccatatcatacaagtgggaaattctcatgcccgatggctcccatggcgtctatacatagccttgttcacttaccacttctgagatatctgaaatagtgcataattatcgccaagcagctattaatgcaattcgagcaggttttgatggaatcgagattcattgagcacatgggtatctcatttggtcaattctttaaaggat

SEQ ID NO: 26154 - DNA, 277 bp, Glycine max
  Clone ID: LIB3051-058-Q1-K2-G3
tttgctgaaacacccaccgcgttagtcaataacatgtttgctcgtccggttcaattcgcgggttctctcttcttcttcctcttctgctcgaccctcatatctcttttcgccggaatcctctgctcttctctcgcatctaaaccttccaactcttctacgacgtcgtcttgttcttaccctctgctgctgcttcttcatcttcttctccttcttctccgtttcggcttcgccttcccaagccttccaccgtgttctctgcttcttcttctgcttcgtc

SEQ ID NO: 26155 - DNA, 436 bp, Glycine max
  Clone ID: LIB3051-020-Q1-E1-E5
aactttggtttcacgtatgagctgaagctttcaacgaggccagagaaatacctaggagatattgcaacttgggacaaagctgaaagtgctcttaaagaagctttagatgattttggcaagccttggcagttgaatgaaggggatggtgcattctacggaccaaagatagacatcagtgtatctgatgcattgagtaggaaattccagtgtgcaactttgcagcttgacttccagcttcctgatcgttttaagttggaattctcagctgaggatgaagccaaaattgagagacctgtaatgatacacagagccatcctaggatctgttgaacgcatgtttgccatacttttagagcactacaagggtaaatggcctttctggctcagtcctcgtcaagcgattgtatgccctgtgtctgaaaagtcacaatcttatg

SEQ ID NO: 26156 - DNA, 436 bp, Glycine max
  Clone ID: LIB3051-025-Q1-K1-E4
attagcatcaaaaccagtaatccggtgctgctagaggatgggaactagtgaatggcatatcgagcgaagatctagcttcggcactgaatcccccttagcaagagaggcaggaaatgtgcctgaaactgggtcactctctattgttgtgcttggcgcttctggggatcttgctaagaagaagacatttcctgcacttttccatctataccggcagggattcttaccagcagatgaagttcacatttttggctatgcaaggacaaaaatatctgatgatgaattgagaaaccggttgcgtggcttattctggtccaaaccaaagggccttttcccaactggtggaagatgtagaggagtttttacagctgatcaaatatgtaagtggctcttatgattctgaggatggatttcgcttgttggataaagagatttcaga

SEQ ID NO: 26157 - DNA, 428 bp, Glycine max
  Clone ID: LIB3051-107-Q1-K1-B5
aaacaacattcgcatcaaaaccacagtggttctagtaatccggcgctgctctaggatggggactagtgaatggcatatcgagcgaagatctagcttcggcactgaatcccccttagcaagacaggcacgaaatgttcctgaaactgggtcactctctattgccgagcttggcgcttctggggatctacgctaagaagaagacatttactgcacttctgcatctataccgtcagttgaatgaaggtgatggtgcattctatggaccatagatagacatcagtgtatctgatgcattgggtaggaaattccagtgtgcaactttgcagcttgacttccagcttactgatcgttttaagttggaattctcagctgaggatgaagccaaaattgacagacctgtaatgatacacagagccattctaagatct

SEQ ID NO: 26158 - DNA, 405 bp, Glycine max
  unsure (1)..(405): unsure at all n locations
  Clone ID: LIB3051-053-Q1-K2-B10
cgaagagaagaagatggaggttagtttatcctcaacatcatgtatacccttaagctcgaagttgaagcataagcatggccttttccactctcaaattcccattcccacagcttcaaccaaaaccagaagaacaaaacctttgtccatagttaacgcctccagacaaaccttgtcctccaactggctcgtttctccacacgatttttctgcatccaccgcttccccatggcttcccagattcgaagagctcgacgccaccaacatgcttctccgtcaaagaattatttttttgggttctcaggtggatgatatgactgcagattttatcattagtcagcttttggttttggatgctgaagactccaagaaagacattaagttatntataaattcacctggtgggtc

SEQ ID NO: 26159 - DNA, 467 bp, Glycine max
  Clone ID: LIB3051-068-Q1-K1-F8
aaagaagaggggggcgaagagaagaagatggaggttagtttatcctcaacgggatgtatgcgccttaagctcgaagttgaagcataagcatgatcttttccactctcaaattcccattcccacagcttcaaccaaaaccagaagaacaaaacctttgttgatggttaacgcctccagacaaaccttgtcctccaactggctcgtttctccacactatttttctgcatccaccgcttccccatggctgttcagattcgaagagctcgacgccaccaacatgcttctccgtcaaagaattattttattgggttctcaggtggatgatatgactgcagattgtatcattagtcagcttttgttattggatgctgaagactccaagactgacattaagttatttataaattaacctggtggttctggaactgctggaatgggaatttacgatgccatgaagttgtgcaagg

SEQ ID NO: 26160 - DNA, 318 bp, Glycine max
  Clone ID: LIB3051-028-Q1-K1-F11
accacgcgtacgaggaggggttcgggtgtgagagcgagaatcagaccatgaagaaagaggacacagcgacgctgatcagtgcctaaggttctgaatttgtggtctacagagaagctgctatggtttcacagaccatacataacatgcttacttatccaaggagtttcgctgagaaggcacacggtgatattacctatcctgaaatcagcaccaccattctggataagatttgccagtacttttattggcatgtacaattcgccagtgcgaaggatacggaatttaccattgaacctgaattaactctggagctaatga

SEQ ID NO: 26161 - DNA, 433 bp, Glycine max
  Clone ID: LIB3051-053-Q1-K2-F4
cttgtcaaccctttgagagttagaatggctgctgctattgaaatccccacaatagtgttgccaaactcctctgcccaacagaggatgccagtggttggaatgggatctgcccctgacttcacatgcaagaaagacacaaaggaggctatcattgaggccgtgaaacagggttacagacacttcgacactgctgctgcttatggctctgaacaggctctcggtgaagctctcaaggaagctatccatcttggcctcgtcttccgccaagacctctttgtcacttccaagctttgggtcaccgaaaatcatcctcatcttgtccttcctgctttgcgcaaatcacttaaaactcttcaactagagtacttggacctgtatctcatccactggcccctgagttctcaaccagggaagttctcattttcaattgaag

SEQ ID NO: 26162 - DNA, 456 bp, Glycine max
  Clone ID: LIB3051-086-Q1-K1-A12
caacaagttaatagcattccgcaaaatggctgccaccaccttagtctctgaagtcgctctcggctcctcctccggccagcggaagatgccgctgatgggcctcggcaccgcgccggaagcaaccagcgcggttaccacaaaagatgctgttcttgaggccatcaagcagggctacaggcactttgatgctgcttctgcttatggtgtggaacagtctgtgggagaagccatagctgaagcacttaagcaaggactaattgcatccagagatcaactcttcatcactaccaaattgtgggtcactgataaccatgcccatactattcttcctgccctgcagaaatctctcaggacacttcaactagaatacatagatctctttctgatccactggcccatggctactaagcctggaaaagttgtgtaccccattgaagtatcagagatagtggaatt

SEQ ID NO: 26163 - DNA, 415 bp, Glycine max
  Clone ID: LIB3051-112-Q1-K1-H10
ctcccctcctcctccggtcagcggaagatgccgctgatgggcctcggcaccgcgccggaagcaaccagcgcggttaccacaaaagatgctgttcttgaggccatcaagcagggctacaggcactttgatgctgcttctgcttatggtgtggaacagtctgtgggagaagccatagctgaagcacttaagcaaggactaattgcatccagagatcaactcttcatcactaccaaattgtgggtcactgataaccatgcccatactattcttcctgccctgcagaaatctctcaggacacttcaactagaatacatagatctctttctgatccactggcccattgctactaagcctggaaaagttgtgtaccccattgaagtatcagagatagtggaatttgacatgaaaggtgtgt

SEQ ID NO: 26164 - DNA, 413 bp, Glycine max
  Clone ID: LIB3051-017-Q1-E1-A12
acggacgcgtgggtttctctctcccttagtcaaagggattcatcgttcttcttcccaggttatttagaaaagcaaaatggtgaagatttgctgcattggtgctggatatgtggggggtcctactatggcagtcattgcacttaagtgcccatccattgaagtcgctgttgttgatatctctaaatcccgcattgcagcctggaacagcgaccagcttcctatctatgaacctggccttgatggtgttgtgaagcaatgccgtggcaagaacctcttcttcagcactgatgttgaaaagcatgtctttgaggctgacatagtgtttgtctctgtcaacaccccaaccaaaactcagggtcttggagctggcaaagcagcagatttgacatattgggagagtgcagctcgcatga

SEQ ID NO: 26165 - DNA, 436 bp, Glycine max
  unsure (1)..(436): unsure at all n locations
  Clone ID: LIB3051-002-Q1-E1-G7
gattcttggggtcaataacgagcagcgtggcatgcctgatttgaattctctaagggaggtgatgcaaaacccagagtttctacgcctgttttcctcacccgagacactgcagcaactcttgtcttttcagcaagctcttctgtctcagcttggtcagcaacaatcaacacaggaaccaggtcaaacaggtggaggcactggaccgatgaacaacttggggctggagatgttatcaagcatgtttggtggactcggagctggtagcctggctgttcctaacagatcanatgagccgccggagcaattgtatgccacccaactttctcagcttcaggagatggggtttcttgacacgcangagaacataaaggctcttattgctacatcanggaatgttcatgcagcagttgagccgcttttggggaactccggacag

SEQ ID NO: 26166 - DNA, 364 bp, Glycine max
  Clone ID: LIB3051-046-Q1-K1-D3
tacattcgatgcaggtgaagcttttgccatgatgatggcatcctatgttgctcttgcagagtccagcggagctttcattgctgtctatcggtatgcaagtgcatcaccattaccaccatctatgcttagtcgcggcatcggttggcagggagttggcattctattatcaggattgcttggaactggcaatggatcctctgtatctgtagaaaatgctggtcttttggctttaactcgtgttgacagtcgaagagtggtgcaaatatctgccggagttatgatgctcttttcaattctggggaaatttggagccgtttttgcatccatttcacctgcaaatgtggccggactgtactgcttgatc

SEQ ID NO: 26167 - DNA, 426 bp, Glycine max
  Clone ID: LIB3051-088-Q1-K1-D3
cccacgcgtccgcccacgcgtccggcgtaccgaaggcagtggcagcgacgatccggctcacggtgccggccggaggagctcggccggcgccaccggttggaccggcgctgggtcagtaccggctgaacctgatggcgttctgcaaggacttcaacgcccgcacccagaagtacaaggcggagacacccatggccgttacgataacggcgtacaaggacaacaccttcgagttcaccgttaagtcgccgccggtgtcgtggtacctgaagaaagccgccggcgtggaatccggtagcagccggcccggtcacgtgaccgcgtcctcgttgtccgtgcggcacgtgcacgagatcgcgaaggcgaaacagtccgatccgtaccttcagaacatgcctctcgagtccatttctaagtccatcattggaa

SEQ ID NO: 26168 - DNA, 376 bp, Glycine max
  Clone ID: LIB3051-015-Q1-E1-G4
acgcgtcagaagaaatgagaagattgcatgctatgtcactgtcagaggtgacaaggcaatgcaacttttggagagtggtttgaaggtgaaggaatatgaacttctcagaaggaacttcagtgatactggttgcttcggctttggtattcaggagcatattgatttgggaatcaagtaagttgaagaacccttggatttttatgctgttgtttttactttgcctgaggtaaacattttaggacttaagggaagctgattatttgatatgggttgtggtgtgcacaatgcatattcaaaattttggatatgacataacatatctcttctcctttaagctgcatttcagttttgacttgaaccaaatgttaactggttc

SEQ ID NO: 26169 - DNA, 456 bp, Glycine max
  Clone ID: LIB3051-049-Q1-K1-A11
tcgattcgcacttcttcttttcacactgccgctgcaacaatggctccagagaagaaactttggaacccaatgagggagataaaagtgcagaagctcgttctcaatatctctgttggcgagagtggagatcgtctcaccagagccgccaaggtgttggaacaacttagtggccaaaccccagtgttttccaaagcaaggtacactgttcgttcctttgggattagaagaaatgagaagattgcatgctatgtcactgtcagaggtgacaaggcaatgcaacttttggagagtggtttgaaggttaaggaatatgaacttctcagaaggaatttcagtgatactggttgcttcggctttggtattcaggagcatatcgatttgggaatcaagtatgatccttcaactggtatttatggaatggatttcttttgtgttctggagcgtcctggctatcgt

SEQ ID NO: 26170 - DNA, 308 bp, Glycine max
  Clone ID: LIB3051-020-Q1-E1-D9
aattcggggccgaccacgcgtcaacacgcttcttctttttctcttctctcatttttcagtttctccgtttcttattcgttagatctcatcttacactcgccatcaagttcgtctcgcgccaccgtctacgcagctccgatcacctcctttggttccctcactttctcgctctgcttcttctcagaaatatgccttctcagaaggttgaaacgggtcatcaagacacggtcgatgatgttgcgatggattactatggtaagatgctggccacggtttcatcagatcacactagtaagataattggggtc

SEQ ID NO: 26171 - DNA, 433 bp, Glycine max
  unsure (1)..(433): unsure at all n locations
  Clone ID: LIB3051-115-Q1-K1-B6
accctactcattctccatacctcaacgaagaggttaaagagacggcaacactttgctgggcgccttgaccgagcagagcttcgtcttggccctcgattttgccctaaagtactctcagtcacaacagacaccgtcgtcgtcgtcgtcgtcatcaatggcaccgaagcagaccaaggctgagaagaagatcgcttacgatgcgaagctgtgcgacctaatggaggagtacggccagatcctcgttgtgaactccgataacgtgggatcgaaccagcttcagaacattcgcaagggtctncgtggcgactccgtcgtcctcatggggaaagacaccatgatgaagcgctcagtcaggatgcacgctgagaaaaccggaaacaacgcctatctcaaccttattcccgctcttgttggcaatgtgggattgattttc

SEQ ID NO: 26172 - DNA, 473 bp, Glycine max
  Clone ID: LIB3051-068-Q1-K1-C2
accaagcatatctcatttgaatacattccttgtagtttatactgaaagatgggtttgaagatggcgttactgatcctaggcctttccctcatgctccttttggtctcctctgaggtggcatccacgaatacaaaagaggaggcaaatggagtggatgatgccaaatatcccggtggaagctatggagggggttacccaggtcatggcggtggcggttatcctggccatggcggtggcggttatcctggccatggcggtggtggtggctatcctggtcatggtggtggccaccctggtcatggtggcggctaccctggccgtggtggtggatactgtaggcatggctgttgcggtggccggacatacaacggaggttgcagaaggtgctgctataacgctggcgaagctgttgctgcacaaactcaagataagactcacgattaagacgatgcagttctacttaattagtactt

SEQ ID NO: 26173 - DNA, 367 bp, Glycine max
  Clone ID: LIB3051-005-Q1-E1-H12
tgggaagaaagttgatgataaggagtggtatgttggaaaagcccagaaaaaatctgagcgtgaacaagaactgaaaggacggtttgagcagagtataaaggaatctgctgacaaatatcaaggtgtgaacctgtatctcaagaacttggatgatactatcagtgatgaaaaacttaaggaaatgtttgctgaatatggtacaataacttcatgcaaggttatgcgagaccccactggaatcggtagaggatcaggatttgttgcattttcaactcctgaggaagcatctcgtgctctcggtgagatgaatggtaaaatgattgctggaaaacctctgtacgttgcccttgcacagagaaaagaagac

SEQ ID NO: 26174 - DNA, 333 bp, Glycine max
  Clone ID: LIB3051-006-Q1-E1-H12
ttggactaactccgactaggatgttggaacagcccagaaaaaatctgagcgtgaacaagaactgaaaggacggtttgagcagagtataaaggaatctgctgacaaatatcaaggtgtgaacctgtatctcaagaacttggatgatactatcagtgatgaacaacttaaagaaatgtttgctgaatatggtacaataacttcatgcaaggttatgcgagaccccactggaatcggtacaggatcaggatttgttgcattttcaactcctgaggaaccatctcgtgctctcggtgagatgaatggtagaatgattgctggaaaacctctgtacgt

SEQ ID NO: 26175 - DNA, 407 bp, Glycine max
  Clone ID: LIB3051-006-Q1-K1-H10
cttaatgggaagaaagttgatgataaggagtggtatgttggaaaagcccagaaaaaatgtgagcgtgaacaagaactgaaaggacggtttgagcagagtataaaggaatctgctgacaaatatcaaggtgtgaacctgtatctcaagaacttggatgatactatcagtgatgaaaaacttaaggaaatgtttgctgaatatggtacaataacttcatgcaaggttatgcgagaccccactggaatcggtagaggatcaagatttgttgcattttcaactcctgaggaagcatctcgtgctctcggtgagatgaatggtaaaatgattgctggaaaacctctgtacgttgcccttgcacagagaaaagaagacagaagagcaaggttacaggctcaattttcacagat

SEQ ID NO: 26176 - DNA, 423 bp, Glycine max
  unsure (1)..(423): unsure at all n locations
  Clone ID: LIB3051-036-Q1-K1-E10
cccacgcgtccgggacaacaatttttgtatgggcaaggacccccagccatgatgcctccacaagctggatttggataccagcagcaactagttcctggaatgagacctggtggtggtcccatgccaagcttctttgttcctatggttcagcaaggccaacaagggcagcgcccagggggccgccgaggaacaggtcctgtgcaacaaccccaacagccaatgccaatgatgcagcagcagatgcttccaagggggcgtgtctatcgttaccctcctggccgcaacatgcaagatgtcccacttcaaggtgtagctggtggaatgatgtcagtcccttatgacatgggtggtctgccaatccgcgatgctgtgggacagccaatgcccattcaagctttggccacggctcttgcanatgctccc

SEQ ID NO: 26177 - DNA, 467 bp, Glycine max
  Clone ID: LIB3051-083-Q1-K1-E2
agaggctgtacagaatgctatggacacgctctatggcatgtagatcgatgatcagcatgtctatgaatgccattatgtgcaaaagcactatacagagaatgctctcagtaggacaaaatcgagtaacgtacatgagaaaaacctatcacagtcaaccaccgatgaacgagatgatgaaaatgtatggagaatatggcaccattactagtgctagtataatgagggacgcagacggggaatcaaagtgtgctggctatgccaattttgaaaacccagatgatgctgccaaagctgttgaaggacttaatgggaagaaagttgatgatcaggagtggtatgttggaaaagcccagaaaaaatctgatcgtgaacatgaactgaaaggactggttgagcagagtataaaggaatctgctgacaaatatcaacgtgtgaacctgtatctcaagaacttggatgatactatc

SEQ ID NO: 26178 - DNA, 445 bp, Glycine max
  Clone ID: LIB3051-088-Q1-K1-C2
gatttggataccagcagcaactagttcctggaatgagacctggtggtggtcccatgccaagcttctttgttcctatggttcagcaaggccaacaagggcagcgcccagggggccgccgaggaacaggtcctgtgcaacaaccccaacagccaatgccaatgatgcagcagcagatgcttccaagggggcgtgtctatcgttaccctcctggccgcaacatgcaagatgtcccacttcaaggtgtagctggtggaatgatgtcagtcccttatgacatgggtggtctgccaatccgcgatgctgtgggacagccaatgcccattcaagctttggccacggctcttgcaaatgctccccctgaacagcagaggactatgctcggtgaagctttatacccgcttgtggatcagctggaacacgatgctgcagcaaaggttactggcat

SEQ ID NO: 26179 - DNA, 450 bp, Glycine max
  Clone ID: LIB3051-002-Q1-E1-G6
acaaaaagctcttttccttctaaatttgattccttagttcagcattctattattatatatggcttcttcaccttcctcagaaaacaaaaacctagagggagtagctggtggtgccggagagaaacccattccacttggtgagaacgttctgcagaagcatgctgcattctttgacttgaataaagatggtgtcatctacccatgggagacttttaaagggttgcgtgaaatcgggactggggttttgctgtccgttggaggtgctattttcatcaatgtgtttctcagtcaaagtactcgtcccggaaaagttccatctatactttttccaatttaaaattaaaaatatccaacgcggcaaacacggcagtgacactggagtctacgatactgaaggaaggtttgtaccttcaaaatttgaagaaattttaacaagcatgcacatacaca

SEQ ID NO: 26180 - DNA, 412 bp, Glycine max
  Clone ID: LIB3051-030-Q1-K1-G6
accacgcgtcccaaaaagctcttttccttctaaatttgattccttagttcagcattctgttattatatatggcttcttcaccttcctcagaaaacaaaaacctagagggagtagctggtggtgccggagagaaacccattccacttggtgagaacgttctgcagaagcatgctgcattctttgacttgaataaagatggtgtcatctacccatgggagacttttaaaggttgcgtgaaatcgggactggggttttgctgtccgttggaggtgctattttcatcaatgtgtttctcagtcagagtactcgtcccggaaagtttccatctatactttttccaattgaaattaaaaatatccaacgcggcaaacacggcagtgacactggagtctacgatactgaaaggaaggtt

SEQ ID NO: 26181 - DNA, 403 bp, Glycine max
  Clone ID: LIB3051-031-Q1-K1-G6
cttatagcttcatcccaaaaagctcttttccttctaaatttgattccttagttcagcggtctattattatatatggcttcttcaccttcctcagaaaacaaaaacctagagggagtagctggtggtgccggagagaaacccattccacttggtgagaacgttctgcagaagcatgctgcattctttgacttgaataaagatggtgtcatctacccatgggagacttttaaagggttgcgtgaaatcgggactggggttttgctgtccgttggaggtgctattttcatcaatgtgtttctcagtcagagtactcgtcccggaaagtttccatctatactttttccaattgaaattaaaaatatccaacgcggcaaacacggcagtgacactggagtctacgata

SEQ ID NO: 26182 - DNA, 438 bp, Glycine max
  Clone ID: LIB3051-034-Q1-K1-C12
atcttcttatagcttcatcccaaaaagctcttttccttctaaatttgattccttagttgagcattctattattatatatggcttcttcaccttcctcagaaaacaaaaacctagagggagtagctggtggtgccggagagaaacccattccacttggtgagaacgttctgcagaagcatgctgcattctttgacttgaataaagatggtgtcatctacccatgggagacttttaaagggttgcgtgaaatcgggactggggttttgctgtccgttggaggtgctattttcatcaatgtgtttctcagtcagagtactcgtcccggaaagtttccatctatactttttccaattgaaattaaaaatatccaacgcggcaaacacggcagtgacactggagtctacgatactgaaggaaggtttgtaccttcaaaatttg

SEQ ID NO: 26183 - DNA, 386 bp, Glycine max
  Clone ID: LIB3051-035-Q1-K1-C10
ccatgcctacccacgcgttatagctcataccaaaaagttcttctccttcaaaatttaattctataattgaacattcgattattatatatggcttctttaccttcctaagaatacaaaaacctattgggagtatcttctggtgcctgagagaaacccattccacttggtgagaacgttctgcagaagcatgctgcattctttgacttgaataaagattgtgtcatctacccattgtagacttttaaagggttgcatgaaatctgtactggggttttgctgtccgttggatgtgctattttcatcaatgtgtttctcaatcagagtactcgttccgtaaaagtttcatctatactttttccaattgaaattaaaaatatccaacgcgg

SEQ ID NO: 26184 - DNA, 345 bp, Glycine max
  Clone ID: LIB3051-045-Q1-K1-G2
cttttccttctaaatttgattccttagttcagcattctattattatatatggcttctggaccttggtcagaagacaaatacctagagggagtagctggtggtgccggagagaaacccattccacttggtgagaacgttctgcagaagcatgctgcattctttgacttgtataaagatggtgtcatctacccatgcgagacttttaaagggttgcgtgatatctggactggggttttgctgtccgttagaggtgctattatcatcaatgtgtctcttagtcagagtactccgtccggaaagtttgcatctatactttcttcaatggaaatttaaaatatccaacgc

SEQ ID NO: 26185 - DNA, 319 bp, Glycine max
  Clone ID: LIB3051-048-Q1-K1-D5
cttcttatagcttcatcccaaaaagctcttttccttctaaatttgattccttagttcagcattctattattatatatggcttcttcaccttcctcagaaaacaaaaacctagagggagtagctggtggtgccggagagaaacccattccacttggtgagaacgttctgcagaagcatgctgcattctttgacttgaataaagatggtgtcatctacccatgggagacttttaaagggaaagtttccatctatactttttccaattgaaattaaaaatatccaacgcggcaaacacggcagtgacactggagtctacgat

SEQ ID NO: 26186 - DNA, 451 bp, Glycine max
  Clone ID: LIB3051-082-Q1-K1-E11
cttcttatagcttcatcccaaaaagctcttttccttctaaatttgattccttagttcagcatgctattattatatatggcttcttcaccttcctcagaaaacaaaaacctagagggagtagctggtggtgccggagagaaacccattccacttggtgagaacgttctgcagaagcatgctgcattctttgacttgaataaagatggtgtcatctacccatgggagacttttaaagggttgcgtgaaatcgggactggggttttgctgtccgttggaggtgctattttcatcaatgtgtttctcagtcagagtactcgtcccggaaagtttccatctatactttttccaattgaaattaaaaatatccaacgcggcaaacacggcagtgacactggagtctacgatactgaaggaaggtttgtaccttcaaaatttgaagaaatttttaaca

SEQ ID NO: 26187 - DNA, 437 bp, Glycine max
  Clone ID: LIB3051-088-Q1-K1-F4
cccacgcgtccgcaaaaagctcttttccttctaaatttgattccttagttaagcatcggagtaatggtatatggcttcttaaccttcctcaaaaaacaaaaccctaaagggagtacctggtggtgccggaaagaaacccattccactgggtgagaacgtcctgcaaaaccatgctgcattcttggacttgattaaaaatggtgtcatctacccatggaagacttttaaagggaaagtttccatcaatactttttccaattgaaattaaaaatatccaacgcggcaaacacggcagtgacactggagtctacgatcctgaaggaaggtagttgttcaaatatttcttttttcataccttaattgcttccattttagtcatctaattaattttaaaacatttgggttccatattaattttcatggtcatggataaatct

SEQ ID NO: 26188 - DNA, 395 bp, Glycine max
  Clone ID: LIB3051-099-Q1-K1-H4
gttctattattatatatgtcgtgtttattttcctcagagagcagaaacctagagggagtagctggtggtgccggagagaaacccattccacttggtgagaacgttctgcagaagcatgctgcattctttgacttgaataaagatggtgtcatctacccatgggagacttttaaagggttgcgtgaaatcgggactggggttttgctgtccgttggaggtgctattttcatcaatgtgtttctcagtcagagtactcgttccggaaagtgtgcatctatacttttttcaattgaaatttaaaatatccaacgcggcatacactgcagtgacactggagtctacgattctgaaggaaggtttgtacctttaaaatttgaagaaatttttaacatgca

SEQ ID NO: 26189 - DNA, 442 bp, Glycine max
  Clone ID: LIB3051-100-Q1-K1-C6
gtccgcaatatgctcttttccttctaaatttgatttcttagttcagcattctattattatgtatgggttctttaccttggtgagaaaacaaaaacctagagggagtagctggtggtgccggagagaaacccattccacttggtgagaacgttctgcagaagcatgctgcattctttgacttgaataaagatggtgtcatctacccatgggagacttttaaagggttgcgtgaaatcgggactggggttttgctgtccgttggaggtgctattttcatcaatgtgtttctcagtcagagtactcgttccggaaagtttccatctatactttttccaattgaaattaaaaatatccaacgcggcaaacacgggaatgacactggagtctaccatacttaaagaaaggttgtacctttaaaaatttgagaaaattttaacaagca

SEQ ID NO: 26190 - DNA, 350 bp, Glycine max
  Clone ID: LIB3051-101-Q1-K1-A5
aaagctcttttccttctaaatttgattccttagttcagcattctattattatgtatggcttcttcaccttcctcagaaaacaaaaacctagagggagtagctggtggtgccggagagaaacccattccacttggtgagaacgttctgcagaagcgtgctgcattctttgacttgaataaagaaggtagcatctacccatgggagacttttaaagggttgcgtgaaattgggactggggttttgctgtccgttggaggtgctattttcatcaatgtgtttctcagtcagagtactcgtcccggaaagtttccatctatactttttccaattgaaattaaaaatattcaacg

SEQ ID NO: 26191 - DNA, 343 bp, Glycine max
  Clone ID: LIB3051-109-Q1-K1-B9
aaaaagctcttttccttctaaatttgattccttattcacattctatatgtattgggcttcttacctgtctcagaaaacaaaaacctaggggagtgctggtggtgccggagaaaacccattccacttggtgagaacgttctgagaagcatgctgcattctttgacttgaataaagatggtgtcatctacccatgggagacttttaaagggttgcgtgaaatcgggactggggttttgctgtccgttggaggtgctattttcatcaatgtgtttctcagtcagagtactcgtcccgtaactctctttatccccataaaaactctctttttttttttttttttaca

SEQ ID NO: 26192 - DNA, 389 bp, Glycine max
  Clone ID: LIB3051-077-Q1-K1-F6
ctttcctctccttttccttccaaaccctaatttttgctactgcttatttttattcatcgcggaggcgtgggtttacgggcagaaacatttggtatcccaatccctgactggggtaagaaccctaggaagatggctgaagctgttgatagggtgatagtacctgactttcagcctaagaaagatgtgaaaatagtgacagatgagaaggccaccagtctctctacagcttctatagatgatgcagcggttattaatgatctagtaatcaagttagagaggtgccgggcaaatctttcaccagtgttcaggatgaaaccaatccaatttgagaaggatgatgacacaaactaccatatggatgtgattgctgggcttgccaacatgaaggc

SEQ ID NO: 26193 - DNA, 441 bp, Glycine max
  unsure (1)..(441): unsure at all n locations
  Clone ID: LIB3051-096-Q1-K1-C10
cccacgcgtccgagtacctgactttcagcctaagaaagatgtgaaaatagtgacagatgagaaggccaccagtctctctacagcttctatagatgatgcagcggttattaatgatctagtaatcaagttagagaggtgccgggcaaatcttccaccagtgttcatgatgaaaccaattcaatttgagaaggatgatgacacaaactaccatatggatgtgattgctgggcttgccaacatgagggcccgcaattacagcattcctgaggttgacaagcttaaagccaagtttattgctggaccgatcattcctgcaattgcaacctcgactgccatggcgactggtcttgtctgcctggagctgtacaaagttttggatggagggcacaaagttgaagactacagaaacacatttgctaacttggcactgnctctcttttc

SEQ ID NO: 26194 - DNA, 443 bp, Glycine max
  Clone ID: LIB3051-004-Q1-E1-G6
gtgggttcttcttcttctattacaacaacgtcgtccaagaccatgaccatggccatggccacgatcctgctcctgttcacggtcttcgcggtttcatcggccctagacatgtcgataatctcgtacgacaacgcccacgccgccacgtcgcgcagcgacgaggagctgatgtccatgtacgagcagtggctagtaaagcacggcaaggtgtacaacgcgctcggagagaaggagaagaggttccagatcttcaaggacaacctgcgattcatcgacgaccacaactcccaagaggaccgaacctacaagctcggactgaaccggttcgcggatctcaccaacgaggagtacagggccaagtacttgggaaccaagatcgatcccaaccggaggctcggcaagaccccgagcaaccgatacgcgccacgtgtcggcgacaaact

SEQ ID NO: 26195 - DNA, 374 bp, Glycine max
  unsure (1)..(374): unsure at all n locations
  Clone ID: LIB3051-016-Q1-E1-D4
cgtcagggagatatggcacagcactagatcatggtgtcgtggctgttgggtatggtacagctaatggtcatgattattggatcgtaaggaattcatggggtcctagctggggagaagatggctacatcaggttagaaagaaatcttgctaacagcagatcaggcaagtgtggaattgcaattgagccatcttatccccttaagaatggtccaaatccacctaatcctggaccatcacccccttcacctgtgaagccaccaaatgtctgtgacaactactacagctgtgctgatagtgctacttgttgctgtactttccgntttcggaaatgcttgctttgagtggggttgctgtccccttgagggtgctacctg

SEQ ID NO: 26196 - DNA, 384 bp, Glycine max
  Clone ID: LIB3051-049-Q1-K1-C1
caagaattggtggattgtgatacaggatataacgaaggatgcaatggaggacttatggactatgcatttgagttcattatcaacaatggcggcattgattctgaagaggattacccttaccgtggtgttgatggtagatgtgacacatataggaaaaatgctaaggttgtttctattgatgactacgaagatgttcctgcctatgatgagttagctttgaaaaaggctgttgcaaatcagcccgtcagtgtagctattgaaagaaggggcagggaatttcaattatatgtatctggtgtattcactgggagatgtggcacagcactagatcatggtgtcgtggctgttgggtatggtacagctaatggtcatgattattggatc

SEQ ID NO: 26197 - DNA, 455 bp, Glycine max
  unsure (1)..(455): unsure at all n locations
  Clone ID: LIB3051-081-Q1-K1-F3
ttcggtcttgccgattccgaagggtcctggtttcccggcttaagttcaactttcggctccaggaaccgtcgatggggcccttaggctgttccttctctgtttctgacaaactgtataactcctatcaaacatgagcggtcgcttttctcgcacaatttatgtcggcaacctgccctctgatataagagagtcagaaattgaagatctattctacaagtatggccgtataatggatattgaattgaaggttcctccccgccctccatgttattgctttgttgagtttgataatgctcgagatgccgaagatgcaattcggggtcgagatggatacaactttgatggttgtcggttaagagtggagcttgctcatggtggtagagggccatcatcaagtgatcgacgtggatatggaggaggaggtggtaatggtggagcaggcggnggtcgttttg

SEQ ID NO: 26198 - DNA, 441 bp, Glycine max
  Clone ID: LIB3051-112-Q1-K1-H8
gcgctcggagagaaggcgaagaggttccagatcttcaaggacaacctgcgattcatcggggaccacatctgccaagaggaccgatcctacaagctcggactgaaccggttcgcggatctcaccatcgaggagtacagggccaagtactcgggaaccaagatcgatcccaaccggacgctcggtaagaccccgagcaaccgatacgcgccacgtgtcggcgacaaactacctgaatcggctgatcggacgaaggaaggtgctgatcctccaggcaaagaccaaagaggctgtgggatctgcttggcattctcagcaatcggggcaatggaagggatacatgagcatgtgacaggtgaacctgtttcggtatcagaacaagaattgggggattgcgatacaagatataacgaaagatgcaatggaggacttatggactatgca

SEQ ID NO: 26199 - DNA, 432 bp, Glycine max
  Clone ID: LIB3051-085-Q1-K1-F5
atcccatcatcatggcggccataacccgcctcgcgaagcgcgcgttcgtcgtcgcttccctggcgaggaggtgcctgagctcctccgtagtcaactgccacgcgccgccgcacgacgccacgtcgttccgcccgtttccgctgcgtgaagattcgagcaagcggtgcgtgcagtgggtgttcctcggctgccccggcgtcagaaaaagaacgtacgctagtcgcctctcgaacctgctcggcgttcctcacatcgccaccggcgatctcgttcgcgacgaactcaccttctttggcccactttcttcccagctatcagaaattgtaaaacagggtcaattggtgtcagatgaaattatcattagtttattgtcaaagagacttgttgccggggaagctaaaagcgatctgggatttattcttgaaggttttc

SEQ ID NO: 26200 - DNA, 439 bp, Glycine max
  unsure (1)..(439): unsure at all n locations
  Clone ID: LIB3051-116-Q1-K1-C11
gtgcctctcctctcgctgcgttttccaatggcggccataacccgcctcctaaatcgcacctcttccctctcttccgtggcgcgtggattctcatctcacgcatcgccgccgcgcaaggaggagaggaatgtccagtgggtgttcctgggttgccccggcgtcggaaaaggcacctacgccagtcgcctctgcaacctcctcggcgtccctcacatcgccaccggcgatctcgtccgccacgagctcgcctncaacggccccctttcttcccagctatcagaaattgttaatcaaggaaaattggtgtcagatgaaatcatcataagtttattgtcaaagaggctggctgatggggaagctaaaggagaatcgggatttattcttgatggttttncacgaacaataaagcaagcggaaatattggaaggggtaactgaca

SEQ ID NO: 26201 - DNA, 431 bp, Glycine max
  Clone ID: LIB3051-051-Q1-K1-D8
ctgaagatggcttcacgcaggctcgtatcttctctgattcgatcctcccttcgtagagctcaatcgaagccctcaatttccgcatcgacatcgaggctcacgtcatccaaccgtgcctcaccgcacggatacttgctgaaccgcgtcgccgagtacgccaccgccgcggctgctgctaccgctcctccctctcctcctcctccggggaagaaggagctcggcggcggcgggaagatcaccgatgaattcaccgggaagggcgcgatcgggcaggtctgccaggtcattggtgccgtcgtcgatgtcagattcgacgagggtttgcctccgatcatgaccgcgctggaggttctggatcactcgtcgaggcttgtgttggaggtggcgcagcatttgggtgaaggcgttgtccgaaccattgctatggatgc

SEQ ID NO: 26202 - DNA, 411 bp, Glycine max
  Clone ID: LIB3051-054-Q1-K2-D9
cccacgcgtccgcccacgcgtccggaaagaccatctttctcttttctgtatcaccgttggaagagactgagatgggttcaaaaaccaagacttttacctttgaagaggtggctaaacacaatcacaggaaggattgttggattatagtcaaagggaaggtgtatgatgtcaccccatttttggatgatcatccaggaggtgatgaagttttagtgactgcaacagagaaggatgccaccactgattttgaagatattggccacagtgattcagcaacacagatgatggaaaaatactttgtttggggaggtgacaccaacactcttccagcacaagttaccaaccacaaacagtgtacgccaaccaacacaagcaccacctgcctataacaatcaatcttcaggatttgtt

SEQ ID NO: 26203 - DNA, 438 bp, Glycine max
  unsure (1)..(438): unsure at all n locations
  Clone ID: LIB3051-013-Q1-E1-B1
aattagttcatgtacggtctcttgttcggtctcgccgacacgtgggcggccatgccggataacaaaatggtcggaaaggccatcagggatcccgagaagttgaaggtcatagcgtcgaacccgaggcgctacacgggcccacccagggtggggaccatgcgggagctgcttaaggtgacacagtatgtacaggataatttctccaaggtaacgacgccgtttttcactgctcacggaacttctgacggcgttacctgcccttcctcgtccaagctgctgtatgagaagggttccagtgaggataagacgttgaagctctacgatggaatgtatcactctttgattcagggagagcccgatgagtctgcgaatctcgtgttgggggacatgagagagtggattgatgagaaggttncgacgtatggacctaacaaaaat

SEQ ID NO: 26204 - DNA, 453 bp, Glycine max
  unsure (1)..(453): unsure at all n locations
  Clone ID: LIB3051-075-Q1-K1-D1
tggaaaaagaaaaaggaagaaggaatgagtgcaacagtgactctaactctaaacctatgccgttgttccatcgtcgcttcttgtccacattatagccacaaaccaaaccctaatttcaatgccttttttagcttctctttgtctctgtctctgtctcaccacagacgcatcgttatctacaagaaaccattcccctctagacggacgtggctttatggatatatgaatagagatcgagattatgaattggagaatgggttagccttattcggttctgatgaagaactagcaacacaaattccaactcaggcccagtcacttgttgaaggatcaggctccattcgcatagcggagttcaagcctgttcctgatgttgattatcttcaggagttattggccattcaacagcaaggacctanagctattggcttttttggaactcggaacatggga

SEQ ID NO: 26205 - DNA, 401 bp, Glycine max
  Clone ID: LIB3051-027-Q1-K1-A3
acgcacaaattaacacggctagccgtggagacttaagtcctgacgaattgaaggagcgacaggccaaggcaatgcaggatccagaaattcagaacatccttcaagaccctgttatgagacaggtattgattgatttccaggaaaatcccaaggctgcacaggaacacacgaagaatccaatggtgatgaataagatccaaaagctggtcagtgctggaattgtccagatgaagtaagtttgtggcaggtggcagttcgtgtgaaaaagcaatcaagcaatcgataatgatgtctcagtgtgactattttgacatttaaatagatgtgactgggaaaaaagttgggaaattttgagttgctttacctttgtttggtttagtgaattcatataatttacgaat

SEQ ID NO: 26206 - DNA, 392 bp, Glycine max
  Clone ID: LIB3051-046-Q1-K1-A10
gaaattcagaacatccttcaagaccctgttatgagacaggtattgattgatttccaggagaatcccaaggctgcacaggaacacacgaagaatccaatggtgatgaataagatccaaaagctggtcagtgctggaattgtccagatgaagtaagtttgtggcaggtggcagttcgtgtgaaaaagcaatcaagcaatcgataatgatgtctcagtgtgactattttgacatttaaatagatgtgactgggaaaaaagttgggaaattttgagttgtttttacctttgttatgttttagtgaattcatataatttacgaatatcaggtgcagtccatttatatttcaatggcttattgtggtgacatgacttccttttaatttaaaatcggta

SEQ ID NO: 26207 - DNA, 434 bp, Glycine max
  unsure (1)..(434): unsure at all n locations
  Clone ID: LIB3051-103-Q1-K1-E1
cccacgcgtccggaaacttaatgaagctgaaaaggcgaagaaagaactagaacagcaggaagtggtttgatccaaagttggctgatgatgagagagaaaaaggaaatgaattcttcaagcagcagaagtatcctgatgctgtgaagcattacacagagtctatacgaagaaatccaaaagatcctagggcttatagtaacagagcagcatgctacactaaattgggggcaatgcctgaagggttaaaggatgcagagaagtgcattgaacttgatccaacctttgtaaagggttatacccggaaaggtgcagtccagtatttcatgaaggaatacgacaaggctttggagacatatagggaggggttgaaatatgactctaacaaccaggagttgcttgaaggcatcagaacatgcatacaacanattaacaag

SEQ ID NO: 26208 - DNA, 291 bp, Glycine max
  Clone ID: LIB3051-113-Q1-K1-G3
gggaccactgttgttggacgggaaggagtacaccgtgcccatggccaccactggggggtgtctcgttgcgagcaccaacagagggtgcaaagctatccacgtctccggtggggcctcctcggtgttgctcagagatggcatgaccagagcacccgttgttcggttaccctccgctcagcgcgccgcgcagttgaagttcttcttggaggatcctctcaacttcgattcgcttgctgtcgttttcaataagtcaagcagaattgccaagttgcagaacattcagtgtgctat

SEQ ID NO: 26209 - DNA, 229 bp, Glycine max
  Clone ID: LIB3051-022-Q1-K1-G8
attccgtgttttcagctcctgtaacctctccttctccgccgccgttgctatctgggccgtgaccttccatccctcaacgccccacagatcttcaatttgattgcttgggtcaacaatttctgtcattctcaatcatggcaactagacttcagtttgaaaataattgtgaagttggagtcttctctaaactcaccaatgcttactgtttggttgctattggatgttctga

SEQ ID NO: 26210 - DNA, 289 bp, Glycine max
  Clone ID: LIB3051-009-Q1-E1-F10
aattcgccggccgacccacgcgaccagtttccttggttcaagacactgcaaatacagcacttcttctgccattgaagaagaacccgttaaaccatcagtgcaagtagaacacacccaactcttaattgatggaaaatttgtagatgctgcttctggtaaaacttttccaactttagatcctaggacaggtgaagtaattgctcatgttgctgagggtcactctgaggatgttgatcgagcagttgcagctgcacgaaaagcatttgatcatggaccatggcctaagatg

SEQ ID NO: 26211 - DNA, 416 bp, Glycine max
  Clone ID: LIB3051-043-Q1-K1-C1
aacagctgagcagacaccgttatctgctttatatgcagcaaaactatttcatgaggctggacttcctgctggtgttttaaatgtagtatctggctttggtccaactgctggtgctgctcttgctagccacatggaagttgacaagcttgcttttactggttccactgatactgggaaagttgtccttgaactggcagctaaaagcaatcttaagcctgttactttggaacttggtgggaaatccccctttattgtgtgtgaagatgctgatgtagatcaggctgttgagctagcccattttgctttattctttaatcaaggacaatgttgctgtgctgggtctcgaacatttgtacatgaaagtgtatacgatgagtttgttgagaaagcaaggctcgtgctttgaaccgtgtgtt

SEQ ID NO: 26212 - DNA, 365 bp, Glycine max
  unsure (1)..(365): unsure at all n locations
  Clone ID: LIB3051-051-Q1-K1-E11
gttttgctgcatataaagcagataacggtgtctgctcagctgttttgagaacaatggtgttgccacaggccaatgccggtccaaccttccaggcaaacatgagaagagggaagttccaaggaatgatctgaccggcaacaccaattggttcatgtaatgtttgcacatgatatggtccatcagctggaactgttagaccatggatcttatctgcccaaccagcatagtatcgaatcaggcgaacaagcattggaacttcaatcttagcagcttggttcataaggctntccattatcccaagtctcaagtgctgcaagctcatcattatgcttctcaagcagatcagctgcgcgcaacaagatcct

SEQ ID NO: 26213 - DNA, 387 bp, Glycine max
  Clone ID: LIB3051-097-Q1-K1-H3
gcgtccgctggatgatgtgattcatagagtaaataatacactctatggccttgcagcaggggtgttcgcaaagaacattaacacagctaatactttgactagagcattgagagctggaacagtgtgggtgaactgctttgatacatttgatgcagcaattccctttggagggtacaaaatgagtggtcaaggaagagaaaaaggagaatacagtctcaagaattacttgcaagtgaaggctgttgttacatcctagaagaacccagctttggctttgaacatcattagctttagaattatttgatgaaaagattaataaataggctccaattattaaaatcattaaattggggtattccattcaaagtttctgataatgattaaaat

SEQ ID NO: 26214 - DNA, 442 bp, Glycine max
  Clone ID: LIB3051-105-Q1-K1-E7
cccacgcgtccggtggagctactcttgaaactggaggagatagatttggcaactcaggctgctatattcagcctactgtcttctcaaatgttaaggatgacatgctgattgcaaaggaagagatctttggtccagtgcaaaccatattaaaattcaaggaccttgatgatgtgattcaaagagcaaataacacacactatggccttgcagcaggggtgttcacaaaaaacattaacacagctaacactttgactagagcattgcgagttggaacagtgtggattaactgctttgatacatttgatgcagcaattccctttggagggtacaaaatgagtggccaaggaagagaaaaaggagaatacagtctcaagaactacttgcaagtgaaggctgttgttacatccttgaagaaccctgcttggctttgaacatcattagc

SEQ ID NO: 26215 - DNA, 434 bp, Glycine max
  unsure (1)..(434): unsure at all n locations
  Clone ID: LIB3051-008-Q1-E1-A3
aattctcgggtcaagcgtcggatcacgcgtccggaggctatcangcangagcttaaggaattgcacccgaatgaccccaaaattgttgtcctcaaacatggattgtggaaagtaaagggaattattcangtttctagatctatangtgacgtatatatgaaacatgcgcagtttaaccgcgaacccattaatgcaaaattcagactccccgaaccaatggacatgcctttcttgtctgctaatccaactattctttctcatactctccaaccaaatgattccttccttatatttgcatcagatggtttatgggagcacttgagtaatgatcaagcagtggatattgttcacagcagtccacgcgcgggtagtgccaagagacttgtcaaggctgccctacacgaagcagcaagaaagcgtgaaatgcgatattc

SEQ ID NO: 26216 - DNA, 287 bp, Glycine max
  Clone ID: LIB3051-003-Q1-E1-B6
cccacgcgtccggtactagtacgtagtacattgaggtcggtgcaaattaaactaattaaaaccatatatatgtaatgagatacccttaattattctgagtaatcagcaccgactttatgatccactgtttcaattgaaactgagttggtatttaggtgatttgtcaggcctgaagagaccaaagtgtcgttcgatttcaggaccatccttctcgttttcatcaaacatggcaaagaggtaagtcgcgatgggtgcactaggcctcttgggggttccacctttggcat

SEQ ID NO: 26217 - DNA, 422 bp, Glycine max
  unsure (1)..(422): unsure at all n locations
  Clone ID: LIB3051-061-Q1-K1-G1
gcgggccgcgtncgaacaagtacgtgaaagcatactcacaaaacgtgaaattcaagtacattgcagttggtgacgaaattcaccctggtgactctttagcagggtctgtacttccagcacttgaaaacattcagaaagcaatttctgccgccaatttacaaggccaaatgaaggtgtcaacagcaatagacaccactttacttggcaactcttacccaccaaaagatggcgttttcagcagtagtgcaagttcatacataagaccaattgtaaactttttagcaagaaatggagccccacttctcgcaaacgtgtacccttacttcgcctatgttaacaaccaacaaagcattggtcttgactatgccttgtttactaaacatggtaacaacgaggttgggtaccaaaacctgtttgatgca

SEQ ID NO: 26218 - DNA, 437 bp, Glycine max
  Clone ID: LIB3051-063-Q1-K1-D3
cccacgcgttcgcccacgcgtccgtccacgcgtccgctttttagcaagaaatggagcccgagttctcgcaaacgtgtacccttacttcgcctatgttaacaaccaacaaagcattggtcttgactatgccttgtttactaaacatggtaacaacgaggttgggtaccaaaacctgtttgatgcattgttggattctctatacgctgctcttgagaaagtaggggcaccaaatgtgaaggttgttgtgtctgagagtggttggccatctgaaggtggagttggagcaactgttcaaaacgcaggaacctattaccgcaatttgattaatcatgccaaaggtggaacccccaagaggcctagtggacccatagagacttacctctttgccatgtttgatgaaaaccagaaggatggtcctgaaatcgaacgacactttg

SEQ ID NO: 26219 - DNA, 355 bp, Glycine max
  Clone ID: LIB3051-067-Q1-K1-B4
cgtccgtccacgcgtccgcttgactatgccttgtttactaaacatggtaacaactaggttgtgtaccagaacgtgtttgatgcatagttggattctctatacgctgctcttgagaaagtaggggcaccaaatgtgaaggttattgtgtctgacagtggttgtccatctgaaagtggagtacggagcaactgttcaaaacgcaggaacctattaccgcaatttgattaatcatgccaaaggtggtacccacaagaggcctagtggacccatatagacttacctatttgccatgtttgatgaacaccagaaggatggtactgaaatcgatcgacactttggtctcttcaagcctgac

SEQ ID NO: 26220 - DNA, 454 bp, Glycine max
  unsure (1)..(454): unsure at all n locations
  Clone ID: LIB3051-070-Q1-K1-G2
gagtttagttcataatagtagttggatcttctgcataatcatattcaatatgattttctgaagaggcaacaccgccatgtctgccatattgctgcttcttggaatattatcttccactggagtagaatttacgggggcacaatctgttggtgtgtgttatggaggaaatggaaacaatctaccaacaaagcaagcagtggtggatctttacaaatcaaacagaataggcaaaatccgtttatactatccagacgaaggagtccttcaagccctcagaggttcaaacatagaggtgatcctcggtgtccctaatgaccaacttcaatctctcaccaacgctggagctgccacaaattgngtcaacaagtacgtgaaagcatactcacaaaacgtgaaattcaagtacattgcagttggtaacgaaattcaccctggtgactctttagcagggtct

SEQ ID NO: 26221 - DNA, 437 bp, Glycine max
  Clone ID: LIB3051-110-Q1-K1-A4
gttgaagagtttagttcataatagtagttggatcttctgcataatcatattcaatatgatggtctcaagaggcaacaccgccatgtctgccatattgctgcttcttggaatattatcttccactggagtagaatttacgggggcacaatctgttggtgtgtgttatggaggaaatggaaacaatctaccaacaaagcaagcagtggtggatctttacaaatcaaacagaataggcaaaatccgtttatactatccagacgaaggagtccttcaagccctcagaggttcaaacatagaggtgatcctcggtgtccctaatgaccaacttcaatctctcaccaacgctggagctgccacaaattgagtcaacaagtacgtgaaagcatactcacataacgtgaaattcaagtacattgcaagttgtaacgaaattcacc

SEQ ID NO: 26222 - DNA, 445 bp, Glycine max
  Clone ID: LIB3051-066-Q1-K1-D3
cccacgcgtccgcccacgcgtccggtctatagttttggtgtggttcttcttgagcttcttactggcagaaaacctgttgaccataccatgcctagaggacagcagagtcttgtcacatgggctactccaagattaagtgaagataaagtgaaacagtgcgttgacccaaaactgaagggagaatacccccctaaaggggttgctaagcttgcagctgttgcggcgctgtgcgtgcagtatgaagctgagtttaggccaaatatgagcattgttgttaaagcactccaaccacttctgaagtctcccgttcctgctgctccaaaaagttgaaccaattaaaatcgctaaaatgcctgcatcgcttgaccagttcgattcagtattttcaaaatttaatcaattcctgcggtttaaccattcctccataattttttaaaaattttgg

SEQ ID NO: 26223 - DNA, 427 bp, Glycine max
  Clone ID: LIB3051-115-Q1-K1-A4
cccacgcgtccggtttcaacaggtgtttgtgagggtggctgtgctgctattgtggattcaggaacatctttgcttgctggtccaactcctgttgtggctgaaatcaaccatgccattggagctgaaggagttctcagtgtagaatgtaaggaagtcgtttctcaatatggagagttgatatgggatctcttggtatcaggggtgaaaccagatgacatatgttcacaagttggtttatgttcttccaaaaggcatcaatctaagagtgctggaattgaaatggtgactgaaaaggaacaggaagagttggcagcgagagatactcctttgtgttcttcttgtcagatgctagttctatggatccagaatcaactaatacataatgcatcgaatgacagagtattcaactatgtgaatcaactgtgtg

SEQ ID NO: 26224 - DNA, 418 bp, Glycine max
  Clone ID: LIB3051-072-Q1-K1-D11
ctggccactcccatgggcggtggagtgaactcgctgaacgtgcagctgaggaaggagctcgagctgtacgcctcgctcgtgaactgcttcaacctccctggcctccccacgcgccacgacaacgttgacatcgtcgtcatcagggagaacaccgagggcgagtactccggcctcgaacacgaggtcgtccccggcgtggtcgaaagcctcaaggtaataacaaagttctgctcagagcgcattgctaaatatgcttttgagtatgcttacctaaataacagaaagaaagtgactgctgtgcacaaagcaaacattatgaaacttgcagatggtttattcttggaatcttgtcgagaggttgccacaaggtatcctgggatcaagtacaatgaaattattgtagacaactgctgcatgc

SEQ ID NO: 26225 - DNA, 425 bp, Glycine max
  Clone ID: LIB3051-062-Q1-K1-H5
caactactactcacactcactgcagatctcaatccatggctaccattgttagcatcagaggcccgccagatctttgacagtcgtggcaatccaaccgtcgaggtggatttgacatgctccgatggtacttttgctagagctgctgttccaagtggtgcatccactgggatttatgaggcccttgaattgagagatggaggatctgactaccttggaaagggtgtatcaaaggctgttgacaatgtgaacaccattattgcccctgctttggttggcaaggacccaactcagcagactgctattgacaacttaatggttcaacaacttgatggaactgttaacgaatggggttggtgcaagcaaaagcttggagcaaatgccatattggcagtgtctcttgcagtctgcaaagctggtgctgctgt

SEQ ID NO: 26226 - DNA, 414 bp, Glycine max
  Clone ID: LIB3051-079-Q1-K1-D3
aacaccctatgccgagtgcattctatgcagtttttgatgggcatggagggcctgatgcggccgcctttgtgaagaacaatgctatgagattattatttgaggatgctgatatgctgcaatcttatgatgctgatgcactttttctgaagaagttggaagattctcatcggagggcatttttgggcgcagaccttgccttggctgatgagcaaagtgttagtagttcctgtggaacaacggcgttgaccgcccttgtacttggaaggcatttgatggttgctaatgctggtgactgtcgagctgttctttgtaggcgaggagttgccgttgatatgtcccaagatcacaggccaagttatttaccagaacgaaggatagtggaggaattaagtggtttcattgatgatgggtatc

SEQ ID NO: 26227 - DNA, 475 bp, Glycine max
  Clone ID: LIB3051-080-Q1-K1-D11
gagagcccgtggctcttaaaattcttgacaaggagaaggtgctaaagcacaagatggctgaggagatcaggagagaagtagctacaatgaaactaatcaagcatccaaatgttgttcgattgtatgaggtcatgggaagcaagaccaaaatatatattgttttggagtttgtaactgggggggaactctttgacaaaattgtaaaccatggaaggatgagtgaaaatgaagcacgtagatatttccagcagcttataaatgctgttgattattgccatagcaggggtgtctaccacagagacctgaagccagaaaatttgctattagatacttatgggaaccttaaagtttctgattttggtttgagtgccctctcccagcaagttagggatgatggacttcttcatactacatgtggcactccaaattatgttgctcctgaggtccttaacgatagaggctatgatggggcaac

SEQ ID NO: 26228 - DNA, 423 bp, Glycine max
  Clone ID: LIB3051-010-Q1-E1-H2
acgcgtccgaccacacgtccgctccgacacggtggacttccaccacttcctggcgcagcgccgcgccaacgatctccgtctcttctccttctccgacctgaaatccgccacgcgcgccttcagccgcgccctcctcgtcggcgagggaggcttcggctccgtctaccgcggcttcctcgaccaaaacgacgtcgcgatcaagcagctgaaccgcaacggccaccaagggcacaaggagtggatcaacgaggtgaacctgttaggtgtcatgaagcaccctaatttggtgaagttggttgggtactgtgccgaagacgatgagagagggattcagaggcttttggtttacgagtttatgccgaataagagcttggaggatcatctccttgcaagagtgccatcgacgataatcccttggggaac

SEQ ID NO: 26229 - DNA, 441 bp, Glycine max
  Clone ID: LIB3051-036-Q1-K1-A8
gaaacgatgaaggaactatgggcacaaatggggtcactaatggccactattgtgttcatgtacacaatctttgagcgcttcttccctccacacttgcgtgaaaaacttcaagcctatactcataaactcaccaaccatttcaacccttacatccaaataagcttccctgagttctcaggggaacgactgaagaagagtgaagcatacacagccatccaaacctacctgagtgcatactcatcccagagagccaaaaggctcaaagctgaagttgtgaatgatagccaaacccctcttgtccttaacatggatgacaacgaagagattactgacgagtttcatggcatcaaactatggtggagtgcaaacaaagtaagcaacaatccacaaagatacaaccctttttcttattacggttcctcagacgagaaaaggttctac

SEQ ID NO: 26230 - DNA, 406 bp, Glycine max
  Clone ID: LIB3051-051-Q1-K1-G5
aaacgatgaaggaactatgggcacaaatggggtcactaatggccactattgtgttcatgtacacaatctttgagcgcttcttccctccacacttgcgtgaaaaacttcaagcctatactcaaaaactcaccaaccatttcaacccttacatccaaataagcttccctgagttctcaggggaacgactgaagaagagtgaagcatacacagccatccaaacctacctgagtgcaaactcatcccagagagccaaaaggctcaaagctgaagttgtgaatgatagccaaacccctcttgtcctcagcatggatgacaacgaagagataactgacgagtttcatggcatcaaactatggtggagtgcaaacaaagtaagcaacaatccacaaagatacaacctttttct

SEQ ID NO: 26231 - DNA, 342 bp, Glycine max
  Clone ID: LIB3051-082-Q1-K1-D3
gttgcaagcaatcaaagtggagccacattgtgtttgagcaccctgccacttttgaaacagtcgctgtggatcggagaaagaaggaggatatacttaaagaccttgtgaagtttaagaagggaaaggattattatgcaaagataggtaaagcttggaagcgtggctatcttttgtacggtccttcggggactggtaagtctaccatgattgctgctattgctaatttcatgaactatgatgtgtatgatcttgagttaaccgcggttaatgacaacactgagcttaagaagctgttgattgaaactccgagtgagtctatcacggtgattgaagacattgatt

SEQ ID NO: 26232 - DNA, 408 bp, Glycine max
  Clone ID: LIB3051-084-Q1-K1-D3
cacaagataagaaaaaagaaaaaatgtttgcagggaaaggggctgtttggttctccagagcggtggcgttggcagcaatcgcggtggtagcttgcgttgggcttacacaggcccaacccgaggccaggttcaagtgcaacagcgcgaacatccccacgtgtcgcgcgctcataagctactctcacccgaacaccaccaccctcggcgacatccaaaagctcttcaacgtgaaacacatcctcgacatcgtgggagcgaacaacctcccaagcaacgccacaaaaacatacgcggtgggccccaacgaggttgtgaaggtccctttcccgtgcaggtgcagcaacaacacgggactctcggaccgggtttcgctgtacaggatcaagaatggggacacgctgtactaca

SEQ ID NO: 26233 - DNA, 412 bp, Glycine max
  Clone ID: LIB3051-087-Q1-K1-D3
aaaattgaaaaaaaaagacgggaaaatagaatggacgcagatagtgattgagaattgggggttgcgatggatgggagaaacggaagcggaagcaggaggagtggggaagcaggaggaatggggaaggcgataatcgcgttggtaattgggagtcttgtgtactatcactgtgcctaccgcaattctacccttgtctctcttttttccgatgtcttcatcgtccttctctgctccctcgccattctcggtcttctattccgacaaatgggcatccaggttcctgttgatccccttgagtggcaaatatctcatgagagtgcgaacgcgatcgtggcatggttggccaatacgattggtggcgccgagtcaatgttcaaggtggctgctactgggcacgacaagaggctgtttc

SEQ ID NO: 26234 - DNA, 421 bp, Glycine max
  Clone ID: LIB3051-093-Q1-K1-G8
tcgcagagattacaatccgcggttaatgccaaggactctgaatcttcaaattccaataaaatgatttggctgcattttggggttaacagtggtgcgacaaggtttgctatagagaaacaagctgtcaacgaggctaattttcgatgccctgatgaaatgggatggaagccccataaagtccccatagttccttcggatggtggaatttcacgaacaagggagactacacttcctgttgtggagatcaccaaagccttgacagagaatggatatgaagttatggtatcagatgatgcaggcaggtttgtgtgcaattatgtttactatcattcccttcgctttgccgagcataacgggatcaaatcccttttcgtgcacgtgccactctttgtgacaataaatgaagagactcaaatgcaat

SEQ ID NO: 26235 - DNA, 414 bp, Glycine max
  Clone ID: LIB3051-059-Q1-K2-C1
caagcattaagcatgcctggactttggtacgtgcatcatgacttttaagaagttacatgaatattttgactgaggacttcttgcttaaggtttcttatttactcttctatgttgcttttagagaatctagagtaagcattgtccatctttaatgcaggtagatgcagtggtctacttggtagatgcatatgacaaggaacgatttgcagagtctaaaaaagagttagatgctctgctctctgatgagtctttgactactgtccctttccttatccttggaaacaagatagatattccatatgctgcctcagaagaagagttgcgttaccatttgggcctgaccaattttaccacaggcaagggaaatgtaaatttgtcagactctaaagtccgtcctatggaggttttcatgtg

SEQ ID NO: 26236 - DNA, 372 bp, Glycine max
  Clone ID: LIB3051-062-Q1-K1-C9
cccacgcgtccgggaaaatggagaggatcagatgttgcaattaaaagaataaagaagagctgctgcgctggtcgatcttcagaacaagaaagattgaccatagagttctggcgggaagctgacatactttccaagcttcaccatccaaatgtggtggcattttatggtgtagttcaggatggaccaggagcaacattagcgactgttaccgagttcatggtggatggttctcttaggaatgttttgcttcgtaaggataggtatcttgatcgccgcaagaggctgataattgccatggatgctgctttcggaatggaatatttacactcaaaaaatattgtgcattttgacttgaaatgtgacaatttgctc

SEQ ID NO: 26237 - DNA, 432 bp, Glycine max
  Clone ID: LIB3051-103-Q1-K1-D3
gtgctttggttgtagttcccacccgcgaccttgctttgcaggttaagcgcgtcttcggcgcgcttgcatcgccgctgggtctccgtattggcttggctgctggtcaatcttcgcttcgccacgagctttctagcctcatttatctacctggagaagacgatggtccagatcctgggtttttgtctccgttgtggttccaaagcaaggtcgacatattggtagcgacccctggaaggctagtggaccatgtcaacaagttgtcattgaagcatcttcgttatctcgtggttgacgaagcagatcgattgctacgtgaggactaccagtcctggttacctactgtgcttaaattaactcagtctaggctggcaaagatagttttatctgctacgttaactcgggacccaggaagacttgctcaacttaatttgc

SEQ ID NO: 26238 - DNA, 454 bp, Glycine max
  Clone ID: LIB3051-066-Q1-K1-C9
cccacgcgtccggtggaatttgatttctcagggaggttatctttatgtttgtggtgatgctaggggcatggcccgagatgttcatcggactcttcataccattgtccagcagcaggaaaatgtggactcttcaaaggcagaggctatagttaaaaaactccagatggatggacgttatcttagagatgtctggtaaattttctgattattcatctttctgggttgtgccttccttgctatttggtctgttaagttcaagattggttgaaggatatttgatactcttctatcacggagttttgggacaccaatgatggaggctgaaatttccttgagaaagcaaatcgttttcgtggacatttgtgtggttttcttatatttttcgccgccttgatattctctcttgtcatgatatttgaactaggattatttttagggggactgatagatagct

SEQ ID NO: 26239 - DNA, 372 bp, Glycine max
  Clone ID: LIB3051-073-Q1-K1-C1
gcgcagattagtggcataattgcagccaatgtatgtgtgaatccttttgattatagtgacagtgttacttcaacaactcacaagagtcttcgaggtccaaggggaggcataattttttatcggaaaggtacaaagccttggaacagagggattcttctaagtcagggacatgaaagtgatcaatatgactttgaagaaaagataaattttgctgtttttccatcgatgcaaggggggccacactatatccacattgctgcgcttgctatagctttaaaacatgtggctactcctgagtataaggcatacatgcatcatgtgaagtagtatgcccaagctttatcatgtgctttactgagtagaaaatgccgt

SEQ ID NO: 26240 - DNA, 408 bp, Glycine max
  unsure (1)..(408): unsure at all n locations
  Clone ID: LIB3051-078-Q1-K1-C9
gcaagatttgccagaaggatgcattgcaaaaatactgtcatacaccactcctgtggatggatgcaggctctccttagtttgcaaagcctttcgttctgcagctgaatcagacactgtgtgggattgttttctcctttccgatttcacctctatcattcctatttcctctacctctaagaaggatctctatttcactctctcagaccatcccaccatcatccaccagggtagaaaaagtgttcaattggacaaaaggaccggaaagaagtgttgcatgctttccgctagaaatctgaccattatatggggtgatactgttcaacattgggagtggacaagcctgccagagtccatgttccaaagagttgctatgcttcangctgtgtgctggtttgacattagtgggag

SEQ ID NO: 26241 - DNA, 441 bp, Glycine max
  Clone ID: LIB3051-116-Q1-K1-D11
aggggcggtgaaagctatggttgtggctttggggaatgaaggagttgctgaggaagcagctggtgccttggccttgattgttcggcagcctgttggcgccatggcggtggtgagggaggaagcagcagtagccggattgataggaatgatgcgttgtggaacgccgagaggtaaagagaatgcagttgcagcattgttggagctgtgcaggagtggaggtgcagctgcaactgaaagagtggttagggcgccggctttggttggattgcttcaaaccttgctctttacaggtacaaagagggcaagaagaaaggcagcttcactagctagagtgtttcagagatgtgaaaatgcatctctccattatggtggattaggtgtacgttattcatttgctagcgattcagcttcaaccagaaatactacaacctttgtgagtga

SEQ ID NO: 26242 - DNA, 435 bp, Glycine max
  Clone ID: LIB3051-048-Q1-K1-C10
gttctgaactttctgaattcttcactttgatcatcatcttcttcaattccagcaagggggtcacagcaaggcgaatcatcggacccgaaatcggggaagaaggacttctcgaccgcgattctggaacgtaaaaagtcgccgaaccggcttgttgtggatgaggctgtcaacgacgacaactccgtagtgaccatgcacccccaaaccatggaaaagcttcagcttttccgaggggacactatccttatcaagggtaagaaacgaaaggatactatttgcatagctcttgctgatgagaactgtgaggagccaaagatcaggatgaacaaagttgtgaggtcgaatttgcgggttcggcttggagatgttgtgtctgtgcaccagtgcccggatgttaagtatgggaaacgtgtgcacattcttcctattgatgat

SEQ ID NO: 26243 - DNA, 459 bp, Glycine max
  Clone ID: LIB3051-081-Q1-K1-C1
cccacgcgtccgctttctttgttgcgttgtgaattctgctctttgatcatcatcatcttctggttcttcaagggaagcaagcatgtctcagcaaggcgaatcatcggacccgaaatcggggaagaaggacttctcaaccgcgattctggaacgcaaaaagtcgccgaaccggcttgtcgtggatgaggctgtcaacgacgacaactccgtggtcaccatgcatccccaaaccatggaaaagcttcagcttttccgaggggacactatcctcatcaagggtaagaaacggaaggataccatttgcatagctcttgctgatgagaactgtgaagagccgaagatcaggatgaataaagttgtgaggtcaaatttgcgggttcggcttggaaatgttgtgtctgtgcaccagtgcccggatgttaaatatgggaaacgtgtgcacattctgcctattgatga

SEQ ID NO: 26244 - DNA, 435 bp, Glycine max
  Clone ID: LIB3051-004-Q1-E1-D11
acaaattacaactgaagatcaagatttccactacaaagttaattatactaccaatttctcactcaaaacttagggaaaatgattgagatacttctgaatttgcagctgttagctcctttcttccttttcttcatctttccagtgtttttcttcttctttctcacgtcctcatgtcctactaaaagaagcatcactatcccaaaaccatacccactgattggtcactacttagacctcaaaggcatcggcaaccgccgtatccagtggctatccgacatcgtcaaaatctcaccggctaccacgttcaccctccaccgccccttaggccgccgccaagtcatcaccggcaaccccgccaccgttgcgcacattctcaagacccgtttctccaactaccaaaagggctacaccttcattcacaccctctccgatttc

SEQ ID NO: 26245 - DNA, 390 bp, Glycine max
  Clone ID: LIB3051-094-Q1-K1-A7
gccacgcgtgcgccagaatccaagggggttcctgctagtgtacagatatttgcttgtggaaatgcgtctcaaagtcaacctgttgctcgacgtatttttttccgatgttcaaccacccaacttaaatggaatcatggctcaactgggcttctagtggtggtgcagtcagatgttgacaaaactaatcagagttactatggagaatcaaagttatgctatctgaccacggatgggatgcatgaaggacttgtgcctcttcggaaagatgggcccattcatgatgctcagtggtcatattctggcttggaatttgctgttgtatatggatttatgcctgctaaagcaactctgttcgacaagaagtgcaatcctctactagagcttggaact

SEQ ID NO: 26246 - DNA, 466 bp, Glycine max
  Clone ID: LIB3051-060-Q1-K1-A2
tcgaccgcacgcgtccgatacatttgattatgctcgccactttctttcttgctgcagtagaatgctaggtctggacggtgaatctaagcgaggagatatagggcttgattactttggccgcactatatttattaaaattttgcctgtaagcattcacatgggtaggcttgaatctgtgttaaatctttcttctacatctgctaaactaaaagaggttcatgaagagtttaaggataagaaagtaattcttggtattgatgacatggatatttttaagggcattagtctgaaacttctagctgtggagcatctgctgcagcagaatccagatttgcagggcaaagttgtcctagttcaaattggaaatcctgcaaggggctctgtgaaggatgttcaggaagcatagaacgaaacatatttaattgcccagagaatcaacgatacatatagctcagataattatcag

SEQ ID NO: 26247 - DNA, 420 bp, Glycine max
  Clone ID: LIB3051-018-Q1-E1-D11
aacgtcaggcttttcatctctcttcaatgttctctccactggatcgaggccttttctcaccttggagtggtttaaagcatctgggtatctcagctaaaccaaaacctcttcttcacatagatagaaagggagggtgtaagggtaaagtggtatatgcttctctctttggggttggagctcctgaggctttggtaattggggtcgttgctttgttggtttttggccctaaaggtcttgctgaggttgctcgaaatctgggaaaaacattgcgtgcatttcaacccaccattagagagcttcaggatgtttcaagggaatttaagagtacacttgagcgggagattggtcttgatgacaatttaagtcctacccagaacacatacaattccaatgtacgtaataccacaccaacttcatcat

SEQ ID NO: 26248 - DNA, 436 bp, Glycine max
  Clone ID: LIB3051-011-Q1-E1-B4
acgcgtcaacccaagcgtccgctcacgcgtccgggcaattgggaacaaagacacagttagtcgtgctcttcgagcagcttataatagcgcagagcgtgctaaagattacgtgtactctggaatcctgaagcagcagaagttgctgtgccaggttcccgaacagctgggatttcttctggagcagttcctgtaggacctcaatgatctcccttaaatatgtttccacaggagacgaattctaacactggtgctggacttggatagctagacttccttagagataagccccagtttcaagcattgcgttcaatggtgcaatccaatccacaaattctacagcctgtgcattaggaacttggtatgcagaatcctggtcttttaagaccgagtcaggaacatcatggggagtttctgcagttgatccatgaacctgttg

SEQ ID NO: 26249 - DNA, 443 bp, Glycine max
  Clone ID: LIB3051-034-Q1-K1-E5
aatttgaaagaaatcttataaaaagaagggacaaacattatgagaaggctcctatatgtagagagagagggaggtagtagcaaatatctagcacacagtatatgtaattattgaataaagtagtgataattgactttgcattgcagcagaaaatatggaattctacatgtccagagcatgtgttggaaaatctgaatggttgcacggaagattgtaacacagaacaggagcaagaagctattggttttaaagtgaagaatgcaatgctgtatccgcgtgaagtggagaaaggactatggccagaagattattctttttctgatcatgctagactcacaactgtgtttttaccaacaaggatgagatgttctgcctcacaaaactgaatgtacttcatggcactaatagtcttagcccacagaaaaatattcaattttgggacc

SEQ ID NO: 26250 - DNA, 431 bp, Glycine max
  Clone ID: LIB3051-104-Q1-K1-A2
gaattcgctcagatttgaaaatgtgggttaagggtgctcttcttctccttgcagcactttgtgtttgtcacttagccggagcttctcttaatcgtagcagtttttcaccagatttcttctttggaacagcttcttcagcttaccagtatgaaggtgcagcacgtgaatgtggcaatggacctagtatatgggacaccttcactcatagccacccagatagaatagcagaccacagtaatggggatgttgccattgattcataccaccgctacaaggaagatgtggccatgatgaatgatattggattcaatgcctacaggttctccatctcttggccaaggatactacctcgtggaaacctgcatggaggagttaaccaataaggcatcacatattacaacaatctcataaatgaactgatagcaaatgga

SEQ ID NO: 26251 - DNA, 183 bp, Glycine max
  Clone ID: LIB3051-012-Q1-E1-B4
cgggaaagagcgcgtgagagtggcgcgcgtgtggaagacgacgcaggggcagcacttcgttgtggagtggcgcgtgggcatcactctcttctcagactgcgttaactcgtatctccgcgatgacaactctgacatcgttgctactgataccattaaaaacacagtgtatgcaaaagcaaagga

SEQ ID NO: 26252 - DNA, 435 bp, Glycine max
  Clone ID: LIB3051-020-Q1-E1-D7
agaaaccttaaaaaacaagtagtgttccgaaaagatggctcagcaggaagtggtagaagggttcaagttcgaacagaggcacgggaaagagcgcgtgagagtggcgcgcgtgtggaagacgaggcaggggcagcacttcgttgtggagtggcgcgtgggcatcactctcttctcagactgcgtcaactcgtatctccgcgatgacaactctgacatcgttgctactgataccatgaaaaacacagtgtatgcaaaagcaaaggaatgctcagacatactctctgctgaggactttgctattttgcttgctaagcactttgtatcattttacaagaaggttactggtgctattgtgaatattgtggaaaaaccatgggagcgtgtcattgtggatggtcaacctcatgaacatggtttcaaacttgggtctgagaa

SEQ ID NO: 26253 - DNA, 405 bp, Glycine max
  Clone ID: LIB3051-043-Q1-K1-G6
cagaaaccttaaaaacaacaacgtaggagtgttcggaaaagatggctaagcaggaagtggtggaagggttcaagttcgagcagaggcacgggaaagaacgcgtgagagtggcgcgcgtgtggaagacgaggcaggggcagcacttcattgtggagtggcgcgtggggatcactctcttttcggattgcgtcaactcgtacctccgcgatgacaactctgacatcgttgctactgataccatgaaaaacaccgtgtatgcaaaagcaaaggaatgctctgacatactttctgccgaggagtttgctattctgcttgctaagcactttgtatcattttaccagaaggttactggtgctattgtgaatattgtggaaaaaccatgggagcgtgtcactgtggatgggc

SEQ ID NO: 26254 - DNA, 368 bp, Glycine max
  Clone ID: LIB3051-043-Q1-K1-G7
cagaaaccttaaaaacaacaacgtatgagtgttcggaaaagatggctaagcgggaagtggtggaagggtgcaagttcgagcagaggcacgggaaagaacgcgtgagagtggcgcgcgtgtggaagacgaggcaggggcagcacttcattgtggagtggcgcgtggggatcactctcttttcggattgcgtcaactcgtacctacgcgatgacaactctgacatcgttgctactgataccatgaaaaacaccgtgtatgcaaaagctaaggaatgctctgacatactttctgccgaggagtttgctattctgcttgctaagcactgtgtatcattttaccagaaggttactggtgctattgtgaatatt

SEQ ID NO: 26255 - DNA, 420 bp, Glycine max
  Clone ID: LIB3051-059-Q1-K2-G9
tggtttcaaacttgggtctgagaagcatacaacagaggcaatagtacaaaagtctggttcacttcagttgacttctggtattgaaggattgtcagtgttgaagacaacccagtctggttttgtgaatttcataagagacaagtacacagcacttcctgatacccgtgaaaggattctggcaacagaagtaaccgcactgtggaggtattcgtatgaatcacagtatagcctccctcagaagccattttactttacagaaaagtatcaggaagtgaaaaaagttctggctgacactttttttggcccaccaaatgggggagtctatagcccatctgttcaaaacacactctacctgatggcaaaggccacactgaacagatttcctgacatagcttatgtcagtctaaagatgccaaatct

SEQ ID NO: 26256 - DNA, 189 bp, Glycine max
  Clone ID: LIB3051-078-Q1-K1-C2
aattccggtcgacgacgcgttcgtttgctattctgcttgctaagcactttgtatcattttaccagaaggttactggtgctgggcgaaatattgtcgaaaaaccatgggagcgtgtcactggggatggtcaacctcatgaacatggtttcaaacttgggtctgagaagcatacaacagaggcgatagttc

SEQ ID NO: 26257 - DNA, 316 bp, Glycine max
  Clone ID: LIB3051-001-Q1-E1-A8
aggccaaattaggattaggattagggctaccaataccaataccaataccaattctattctatggcttgctcaagcgcccaaatacacggtctcggaaccccttcctcccgaaccctatttttaggtcagaggctaaataccaaggccgcctttatcaagctcaagtccacacctagaagactccgccctctcagagtggttaatgagaaagtcgtcggtatcgatttgggaaccaccaactccgccgtggctgccatggaaggcggcaagcccactatcatcaccaacgccgagggccagagaaccacgccctccg

SEQ ID NO: 26258 - DNA, 390 bp, Glycine max
  Clone ID: LIB3051-012-Q1-E1-A9
ctcacgcgtcagcaagcaggtctcttacagagtcatcagagacgacaacggcaacgtcaaactcgactgccccgccattggcaaacagttcgctgccgaagaaatttctgcccaggttctgaggaagcttgttgatgatgcttccaagtttttgaacgataaggttaccaaggccgttgttacggtgcctgcttacttcaatgactcccaaaggactgccaccaaggatgctggtcggattgctggtctagaggttcttcgtattatcaatgaaccaaccgctgcatccttagcctatggctttgaaaagaaaaacaacgaaactatccttgtttttgaccttggaggcggtacctttgatgtctccgtgctcgaggttggcgatggagt

SEQ ID NO: 26259 - DNA, 418 bp, Glycine max
  Clone ID: LIB3051-033-Q1-K1-B12
cccacgcgtccgggctcttaggaagcttgtggatgatgcttacaagtttttgaacgacgaggttaccaaggctgttgttactgtgcctgcttacttcaatgactcccaaaggactgacaccaaggatgccgatcctattgctggtcttgaagttcttagtattatcaatgaaccaacctctgcatccttgtcctatggcttcgaaaagaaaaacaatgaaacaatccttgtttatgaccttggaagcctcacctttgatgtctctgtgctcgatgttggtgatgagagtgtttgaagtcctctctacttctggtgacacccacttgggtggtgatgactttgataagagaattgatgattggctggctttcaacttcaagagagatgaaggcatatacctttatgaagacaaacaagc

SEQ ID NO: 26260 - DNA, 434 bp, Glycine max
  Clone ID: LIB3051-105-Q1-K1-A5
catcaccaacgccgagggccagagaaccacgccctccgtcgtggcctacaccaagaatggggacaggctcgttggccaaatcgccaagcgtcaggccgtcgtcaaccccgagaacactttcttctccgtcaagaggttcatcggccgcaagatgtctgaggtcgacgaagagtccaagcaggtctcttacagagtcatcagagacgacaacggcaacgtcaaactcgactgccccgccattggcaaacagttcgctgccgaggaaatttctgcccaggttctgaggaagcttgttgatgatgcttccaagtttttgaacgataaggttaccaaggccgttgttacggtgcctgcttacttcaatgactcccaaaggactgccaccaaggatgctggtcggattgctggtctagaggttcttcggaatatcaatg

SEQ ID NO: 26261 - DNA, 476 bp, Glycine max
  unsure (1)..(476): unsure at all n locations
  Clone ID: LIB3051-083-Q1-K1-F5
gtctgagcatcggttaacccaactgcacaggtagtctccaaataatggagcctcatgatgagactggatgccaggctcctgaacgccccattctttgcattaataattgtggcttctttggaagagcagctaccatgaacatgtgttccaagtgttacaaggacatgctgttgaagcaggagcaggacaaatttgcagcatcatccgttgaaaacattgtgaatggcagttccaatggcaatggaaagcaggctgtggctactggtgctgttgctgtacaagttgaagctgtggaggtcaagattgtctgtgctcagagttctgtggattcgtcctccggtgatagtttggagatgaaagccaagactggtcccagtagatgtgctacatgccgganacgtgttggtttaactggtttcagctgcaaatgtggcaacctcttctgtgcaatgcatcgctattctgataaacatgat

SEQ ID NO: 26262 - DNA, 436 bp, Glycine max
  Clone ID: LIB3051-026-Q1-K1-D7
cccacgcgtccgaagcaacaggttttggaagctaaggaatcttctcctgttcctccaaaactagatctggatgagatgctaaagcaactggcaagggaggtcgatctagaatactctgaggcagttaaagccacgggcttgacagacagtttgttgaaactaagggaggaagtttcgaaagcaaatgcagataatcaaattgttgatccattgctggagggtaagatagaaaagctaagggtggagtttgaacagcaattgcgtgcagcttccaattatggtaggctgcagaataagcttaactatctgagcgaattatgtaaagtaaagcttctgtcagatggaaagaagggcaatgaagctgtcacatttaagcaagagttgaagaaaaaaattgatgatgccttgagtgatccaaaaataagggagacatttg

SEQ ID NO: 26263 - DNA, 260 bp, Glycine max
  Clone ID: LIB3051-036-Q1-K1-H4
tgaagatggatttctgaaggcttttaaggttgcaaattttgaatatgttgatgaggctgaagctgcagcagaggggtcatcgccaccgagtttcaaaaagtcactgtctcatacctatgatagaacaatcacttttgcacttctaaacggcagcatcagacatatcttcagactctcaccactagacttgaggaaatgagagtcaaaaggcgttattcagaacagtggatgcaccatcgcttactcccacaagatcttaa

SEQ ID NO: 26264 - DNA, 387 bp, Glycine max
  Clone ID: LIB3051-031-Q1-K1-D7
ctctgtcagaaccaaatagtacctttcacatcatcaaaactcatgctccaaatgggggggttacacctttgaattcattttttcacacatggacaagatcgacgtgcctacgttcttcgtgtgccctatttcattagagctcatgaaggaccccgtgacggtctccaccggcatcacctacgaccgcgacagcatcgagaagtggctcttcgccgaggtgaagaacgacacgtgtcccgtcacgatgcatactctccattccggacctcactccgaaccacacgctcctcaaactcatccaagcctggtgcaccttcaacgcctcctacggcgtccagagaatccccacaccaaaaccaccggtcgacaaaaccctcatcgagaaac

SEQ ID NO: 26265 - DNA, 443 bp, Glycine max
  unsure (1)..(443): unsure at all n locations
  Clone ID: LIB3051-049-Q1-K1-H9
ccaaatcaaatctctcacaagtcaaaactcaagctccatatttcttttttctctttacacgtctgaattcatttcttctcacatggacgagatcgacgtgcctcctttcttcgtatgccctatctcattagagctcatgaaggaccccgtgaccgtctccaccggcatcacctacgaccgccacagcatcgagaagtggctcttcgccgccgtgccgaagaacaacacgtgtcccgtcacgaagcagcccctcctcccggacctcactccgaaccacacgctccgcaggctcatccaagcctggtgcaccgtcaacgcttctcacggcgttcagagaatccccacgccaaaaccttccgtcgacaaaaccctcatcgagaagctcctncgggacgccttggcttccgattccccgagccttcaacttcggtcccttcgaaccc

SEQ ID NO: 26266 - DNA, 452 bp, Glycine max
  Clone ID: LIB3051-047-Q1-K1-A6
gcaacaggggcttccccacaccatcctctcccaacaagagccccctgcttaaattgtgcactccttctttatcccattctttcctcagattcgcgccaccattggaaaaaaaaaggtttccggtgttggggagcctagggttagggtttctgagagatatgggatgttccatgcattcgtgagccttatcgcacgcggttggaagctgtttgggcacggtgatgacgtcggtaatgtcgccgccgccaccggaagagaatgcaaggaggacctcctctggtttcgcgacatcggaaagttcgctgccggcgatttctccatggccgtcgtccaggccaactaggtcctcgaggtctagagctagatcgagtccggcggcttcagcaccttcatcggcgtctacgacggccacggcggccccgattgctcccgctatgtctgtgataacttgg

SEQ ID NO: 26267 - DNA, 399 bp, Glycine max
  Clone ID: LIB3051-037-Q1-K1-D11
gggtgcttgcatgataatttgtgttggtgcactcatgcctgccatttcagtgcgttcatctggtgaaggcctgaaaattgaagcaaagattacaaataaaagtatggtgtctcttatttcttgtgttctactgattggactctttgttatgcaacaccgtggctcctacaaggttgcattcgtgtttccccccataatcatcctatggctactgactattttcatgattggtatttacaatgtcatcaagtggaatccaagagtatatcaggctctatctccatattatatatacaagttctttaggcttacaggaaaagatggttggactaatcttggacgagtatttctgtgcgttacaggaactgaagctatgtatgcagaccttgggtactacag

SEQ ID NO: 26268 - DNA, 427 bp, Glycine max
  Clone ID: LIB3051-040-Q1-K1-D11
cccacgcgtccgagaattcttcattttgctattattggaggtggtccaactggagtggagtttgcagcctcactacatgactatgtcactgaggatttggtcaacatatatcctgggataaaagatctagttaaaattacccttctggaggctggagatcatattttgagcatgtttgataaaagaattactgcttttgctgaagagaagttcggaagagatggtatggatgtgaaaactggatccatggttgtgaaggtatccgagaaagaaatttctactaaagaaatgaaaaatggaggagcaattactacaattccatatggaatggctgtctggtcaactggtattggcactcgtccatttataagagattctatgtcacaaattggtcagactaacagacgtgccatagctactgatgaat

SEQ ID NO: 26269 - DNA, 403 bp, Glycine max
  Clone ID: LIB3051-068-Q1-K1-E12
cccacgcgtccgcacgaaaccttgcagtaacaaaaaatgcggagtttcactttctttggacgagtttctagagctttccgcgatcatgggtccaacttcaagcttgtactcctctgcaccaccgtaagtggtggagggattgtagcttacggagaggctgctgccgcatctgaagcagcggcggcggcgacggagaagaaaaaggtggtggtgctgggaactgggtgggctggcacgagtttcttgaggaacctggacaaccccaaatatgaggttcatgtggtctcccctcgcaattactttgcattcactcctttgctgcctagtgttacctgtggcaccgtggaagctcgcagcattgtcgaacccgtccgcaatattttcaggaagaaaaagatggaca

SEQ ID NO: 26270 - DNA, 437 bp, Glycine max
  Clone ID: LIB3051-003-Q1-E1-C5
caagatcggaaagccccacaccgttccctgcaaggttaccggaaagtgtggctccgtcaccgtccgcatggtccccgcccctcgtgggtccggaatcgtcgccgctagggtccccaagaaggtcttgcagttcgctggaatcgatgacgtcttcacttcctccaggggttccaccaaaaccctcggaaatttcgtcaaggctacttttgactgtttgctgaaaacctacggttttctaacacctgaattctggaaggagactcggttctccaaatcaccattccaagagtacactgatctattggcaaagccaacagggaaggcccttatcctcgaggaggaaacggtggaggcttgagtgagcagaagcagcagcagttttggtggtatccggatgattgtgcctcgtcgtaagcatgctaggacccagtaattag

SEQ ID NO: 26271 - DNA, 392 bp, Glycine max
  Clone ID: LIB3051-050-Q1-K1-E2
caacaacatggccgaacgtggaggctgagaccgtgccggtttcggtcgcggctttggcggtcgtggacgcggcggcgacaggggacgagggcggcgcagggcaggagggcgccgcgacgaggaggagaagtgggtcccagtgacgaagctggggcgcctggtgaaggaggggaaaattcggagcctggagcagatctacctacactcgctcccaatcaaggagcaccaaatcattgacaccctcgtggggcccaccctgaaggacgaggtgatgaagatcatgcccgtccagaagcagacccgcgccggtcagcgaacccgcttcaaggccttcgtggtggtcggcgacaacaacggccacgtcggtctcggagtgaagtgcagcaaggaag

SEQ ID NO: 26272 - DNA, 439 bp, Glycine max
  Clone ID: LIB3051-025-Q1-K1-F5
ctaaaatcccctccgaagaaacccgattcggaacccgttcaacccgattccgcatccacccccaatcccaccacgcgcggcgtcaaagaggatttttccgagctcaccaaatccttttcccgccagctctggggagtcgcctccttcctcgccccgccgcccgatccccaatccgaaaagcccgtcgccgattccaatcccaatcccactgacgacgacgaagaggaagatatcatcgccaggaatccgaaacgatttcgcggagattagtggcaagttcaagagcgggatctccaaaatttctggtaataagacggtatccgaattcactaagatagcttcgagtttccttcagcctggatccgaggaggaatacgatctccaaggtgtcctcggagttaccgaaggatgtggttgccttcgccagaagcgtagcttt

SEQ ID NO: 26273 - DNA, 397 bp, Glycine max
  Clone ID: LIB3051-023-Q1-K1-C5
caaatatgtattctgagctgcgggaggaggctcgtgatcatgcacgcttgcggaatgcatattttgagcaggcgcgacaagcctaccttattggcaacaaggcccttgcaaaggagctaagtgttaaggggcaactgcacaacatgcatatgaaagcagctcatggaaaagctcaagaatctatttaccgccagaggaatcccgttgctccagagaatggaagagggcaccagagaatgatagacctacacggtctgcacgtaagtgaagcgattcacgtgctgaaacacgaactgagtgtgctaagaagcacggccagagccgctgagcagcgtttgcaggtatacatctgtgttggcactggtcaccatactcggggctcccgcactcccgcaag

SEQ ID NO: 26274 - DNA, 384 bp, Glycine max
  Clone ID: LIB3051-110-Q1-K1-G8
ggattctggtcctattagtttagtagtaaatgcttgcgcaagcagggatcttcgagataatgttgttggggtttgttttgtggcccatgatataactgctcagaagaatgtcatggacaaatttacgcgtattgaaggtgattacaaggcaattgtacagaaccgcaatccattaatccctcctatatttggcacagatgaatttggctggtgttgtgagtggaatccagctatgacgaagttaactggatggaagcgagaggaggtgatggataaaatgcttttgggagagctttttggcacccatatggctgcttgtcgcctaaagaatcaagacgcttttgttaatttgggtgttgtacttaataaagccatgactggttt

SEQ ID NO: 26275 - DNA, 358 bp, Glycine max
  Clone ID: LIB3051-074-Q1-K1-G12
cccacgcgtccgcccacgcgtccgcccacgcgttcgcacaaacatggacgcatcaaaactcaagcaattgaagcatttcatcgaacagtgcaagtccaacccttccctcctcgctgatccttcactctccttcttccgcgactatcttcaaagtctcggcgcgaaacttcctgagtctgcttattccgaatcgacgggcgtggagagggatgaggacatagaggatcttacggaggagcacgagaaggtagaagaagaagaagaagaagaggacgatgtaattattgaatccgatgttgagcttgagggtgaaacctgtgagcctgatgatgatcctccacagaagatgggagacccc

SEQ ID NO: 26276 - DNA, 399 bp, Glycine max
  Clone ID: LIB3051-053-Q1-K2-A11
gttcttcatgttcgaattcggcggaactttgcatttgtgcagtttgagacacaagaagatgctaccaaagctatagagtgtacaaatatgagtaagatcctggacagggtggtgtctgtggagtatgctctgagggatgatggtgagaggggggacaattatgacagtcctagaagaggtggttatgagagatcacccagtccttatcacaggcgaccaagtcctgactatggtcgtccacgcagccctgtctatgataggtacaatggtggtggaccagacaggcggaggagtcctgattatggcaggcacagaagtcctgattatgggaggcgcaggagttctgattatggaaggcgcaagagtcctgattatgggaaacccaggagttctgaatat

SEQ ID NO: 26277 - DNA, 441 bp, Glycine max
  Clone ID: LIB3051-063-Q1-K1-C7
ctaggggtgaacgtggacgtcatcgtgatggatcgaaggcaaaccagaagccaacaaagaccctttttgtgattaactttgacccaatccgtactagagttcgtgatatagaaaaacactttgaaccttatgggaatgttcttcatgttcgaattcggcggaactttgcatttgtgcagtttgagacacaagaagatgctaccaaagctatagagtgtacaaatatgagtaagatcctggacagggtggtgtctgtggagtatgctctgagggatgatggtgagaggggggacaattatgacagtcctagaagaggtggttatgagagatcacccagtccttatcacaggcgaccaagtcctgactatggtcgtccacgcagccctgtctatgataggtacaatggtggtggaccagacaggcggaggagtcctgattatg

SEQ ID NO: 26278 - DNA, 391 bp, Glycine max
  Clone ID: LIB3051-037-Q1-K1-C9
atccatcaccctttctttcattctgttgggaaatggaagtcacactttcagcgtgcaagtccattagctcgccttctgttcccgtcgcagctttatttgcggggaaagcaggaactaagagttcgcaatgcagttttttagctggagcaaacaaagtgaggtttcctaggcaagtcggtcaagttagccacgttcgcaaacagcgccaaacgcgtcactgtggtgctctccacgcgacttgcagcggtgacaagatcctgatcgcgaatagaggcgagattgcggttcgcgttattcgaaccgctcatgaattggggattccgtgtgtggctgtgtactccaccattgataaggacgcccttcatgtcaaactggctgatgaagctgtatg

SEQ ID NO: 26279 - DNA, 459 bp, Glycine max
  unsure (1)..(459): unsure at all n locations
  Clone ID: LIB3051-110-Q1-K1-F5
cccacgcgtccgcaatttcgcacctccctcgtttccatcgacatccgcatcaaaagaccttctctttctcttgccatcatttcattccccatacgctccatccatcaccctttctttcattctgttgggaaatggaagtcacactttcagcgtgcaagtccattagctcgccttctgttcccgtcgcagctttatttgcggggaaagcaggaactaagagttcgcaatgcagttttttagctggagcaaacaaagtgaggtttcctaggcaagtcggtcaagttagccacgttcgcaaacagcgccaaacgcgtcactgcggtgctctccacgcgacttgcagcggtgacaagatcctgatcgcgaatagaggcgagaatgcggttcgcgttattcgaaccgctcatngaatggngattccgtgtgtggctgtgtactccaccattgataaggacgccc

SEQ ID NO: 26280 - DNA, 415 bp, Glycine max
  Clone ID: LIB3051-002-Q1-E1-G5
caagaataatacgaaacccacatcatgagcacactttgtatggcggaaaatatgaaggaggtggaagttgaagatggatatgtcttgaaagaagagatccatctcacggtgctaaaaacctctctgttcttcgcgggcgatggcttcagcgtctacgattgcaaaggtcaactcgtgttcagagttgactcttatggacccgacactcgcgacatagacgaactcgttctcatggatcctaacggacgttgcctcctcaccgttcgtcgaaagcggccgagtttgcatcaacggtgggaaggtttcaaaggggagagaatggacggtgataaacccatcttcaacgtgaggagagcgtccattataggacggtcgcgtgcgagtttgacggtggagatgtacgattaccccggtg

SEQ ID NO: 26281 - DNA, 436 bp, Glycine max
  Clone ID: LIB3051-025-Q1-K1-G11
gtggatatcatctttgtagatattttttctccccacgtttgcgatagagataacccacccatgcatgcttccatttccatgtaccccacattatgaattattaattaattggtgccataaattgcatatcgtggatgcaagaataatacgaaacccacatcatgagcacactttgtatggcggaaaatatgaaggaagtggaagttgaagatggatatgtcttgaaagaagagatccatctcacggtgctaaaaacctctctgttcttcgcgggcgatggcttcagcgtctacgattgcaaaggtcaactcgtgttcagagttgactcttatggacccgacactcgcgacatagacgaactcgttctcatggatcctaacggacgttgcctgctcaccgttcgtcgaaagcggtcgagtttgcatcaacggtggga

SEQ ID NO: 26282 - DNA, 372 bp, Glycine max
  Clone ID: LIB3051-054-Q1-K2-C1
ccgtccggattcccggtcgaccccgcgttcgcatgagcacactttgtatggcggaaaatatgaaggaggtggaagttgaagatggatatgtgttgaaagaagagatccatctcacggtgctaaaaacctctctgttcttcgcgggcgatggcttcagcgtctacgattgcaaaggtcaactcgtgttcaaagttgactcttatggacccgacactcgcgacatagacgaactcgttctcatggatcctaacggacgttgccttctcaccgttcgtcgaaagcggccgagtttgcatcaacggtgggaaagtttcaaaggggatagaatggacagggataaacccatcttcagcgtgaggagagcgtcgatca

SEQ ID NO: 26283 - DNA, 393 bp, Glycine max
  Clone ID: LIB3051-116-Q1-K1-C1
gcacactttgtatggcggaaaatatgaaggaggtggaagttgaagatggatatgtcttgaaagaagagatccatctcacggtgctaaaaacctctctgttcttcgcgggcgatggcttcagcgtctacgattgcaaaggtcaactcgtgttcagagttgactcttatggacccgacactcgcgacatagacgaactcgttctcatggatcctaacggacgttgcctcctcaccgttcgtcgaaagcggccgagtttgcatcaacggtgggaaggtttcaaaggggagagaatggacggtgataaacccatcttcagcgtgaggagagcgtcgatcataggacggtcgcgtgcgagtttgacggtggagatgtacgataaccccggtgaggagt

SEQ ID NO: 26284 - DNA, 387 bp, Glycine max
  Clone ID: LIB3051-012-Q1-E1-D10
agtcacagttgcagcaaacggagggcaagatttctacgacgtgagcaacgtggatggcttcaacgtgcccatgtccgtaaccccacaaggtgggagtggcgattgcaaaacctcaagttgccctaagaacattaactctgtgtgccctgcggagcttcaagtcaaagggtccgatggcaacgtcatcgcttgcaagagtgcttgcgaagcttttaaggaagatagatattgctgcactggacctaacaacaccgcagaaacatgtccacctacgaactactctcagattttcgaggagcagtgtcccgatgcttattcctacgcttacgatgataagagcagcactttcacttgctccaacaggcctgattatgccatcacattctg

SEQ ID NO: 26285 - DNA, 420 bp, Glycine max
  Clone ID: LIB3051-025-Q1-K1-H6
tgcaaaacgaaaattatacatatccaacaatgacgaccacccgtgttgctctctgccttttatttgcattcctcttctacgcggctgaaggagccaaggttagtttcaataacaagtgcacatacacggtatggccaggaaccctaaccggtgaccaaaagccccaattatcaacaactggtttcgagttgggtccaggagcatccaactctgtggaccttccatctccatggtccggtcggttctgggcccgaacaggatgctccaacaacaacggaaggttcagctgcgccaccgccgattgcgcctccggtcaagtcgcatgcaacggtgccggtgcaatcccgccagctactttggtagaaatcacagttgcagcaaacggagggcaagatttctacgacgtgagcaacgtggatg

SEQ ID NO: 26286 - DNA, 422 bp, Glycine max
  unsure (1)..(422): unsure at all n locations
  Clone ID: LIB3051-033-Q1-K1-F9
gaacaggatgctccaacaacaacggaaggttcagctgcgccaccgccgattgcgcctcgggtcaagtcgcatgcaacggtgccggtgcaatcccgccagctactttggtagaaatcacagttgcagcaaacggagggcaagatttctacgacgtgagcaacgtggatggcttcaacgtgcccatgtccgtaaccccacaaggtgggagtggcgattgcaaaacctcaagttgccctaagaacattaactctgtgtgccctgcggagcttcaagtcaaagggtccgatggcaacgtcatcgcttgcaagagtgcttgcgaggcttttaaggaagatagatattgctgcactggacctaacaacaccgcataaacatgtncacctacgaactactctcagaatttcgaggagcagtgtcccgat

SEQ ID NO: 26287 - DNA, 465 bp, Glycine max
  unsure (1)..(465): unsure at all n locations
  Clone ID: LIB3051-037-Q1-K1-G8
cgaatttccgggtcggaccaagccgtccgtgcaaaacgggaggtatccaccattgactaccacccgtgttgctatctgcctttgctttgcattgctttactacgcggctgaaggagccaaggttagtttcaataacaagtgctcatacacggtatggccaggaaccctaaccggtgaccaaaagccccaattatcaacaactggtttcgagttgggtccaggagcatccaactctgtggaccttccatctccatggtccggtcggttctgggcccgaacaggatgctccaacaacaacggaaggttcagctgcgccaccgccgattgcgcctncggtcaagtcgcatgcaacggtgccggtgcaatcccgccagctactttggtagaaatcacagttgcagcaaacggagggcaagatttctacgacgtgagccaacgtgatggcttcaacgtgcccatgtccgt

SEQ ID NO: 26288 - DNA, 408 bp, Glycine max
  Clone ID: LIB3051-041-Q1-K1-G5
cccacgcgtccggaagtatccaacaatgtctaccacccgtgttgctatctgtctttgctgtgcattcctttactacgcggctgaaggagccaaggttagtttcaataacaagtgctcatacacggtatggccaggaaccctaaccggtgaccaaaagccccaattatcaacaactggtttcgagttgggtccaggagcatccaactctgtggaccttacatctccatggtccggtcggttctgggcccgaacaggatgctccaacaacaacggaaggttcagctgcgccaccgacgattgcgcctccagtcaagtcgcatgcaacggtgccggtgcaatcccgtcagctacttgggtagaaatcacagttgcagcaaacggatggcaagattactacgacgtgagcaa

SEQ ID NO: 26289 - DNA, 422 bp, Glycine max
  Clone ID: LIB3051-053-Q1-K2-A3
cccacgcgtccgcaaaacgagaagtatccaacaatgactaccacccgtgttgctatctgtctttgctttgcattcctttactacgcggctgaaggagccaaggttagtttcaataacaagtgctcatacacggtatggccaggaaccctaaccggtgaccaaaagccccaattatcaacaactggtttcgagttgggtccaggagcatccaactctgtggaccttccatctccatggtccggtcggttctgggcccgaacaggatgctccaacaacaacggaaggttcagctgcgccaccgccgattgcgcctccggtcaagtcgcatgcaacggtgccggtgcaatcccgccagctactttggtagaaatcacagttgcagcaaacggagggcaagatttctacgacgtgagcaacgtgga

SEQ ID NO: 26290 - DNA, 359 bp, Glycine max
  unsure (1)..(359): unsure at all n locations
  Clone ID: LIB3051-053-Q1-K2-C10
cccacgcgtccgccaacaatgactaccacccgtgttgctatctgtctttgctttgcattcctttactacgcggctgaaggagccaaggttagtttcaataacaagtgctcatacacggtatggccaggaaccctaaccggtgaccaaaagccccaattatcaacaactggtttcgagttgggtccaggagcatccaactctgtggaccttccatctccatggtccggtcggttctgggcccgaacaggatgctccaacaacaacggaaggttcagctgcgccaccgncgattgcgcctncggtcaagtcgcatgcaacggtgccggtgcaatcccgccagctactttggtagaaattac

SEQ ID NO: 26291 - DNA, 438 bp, Glycine max
  Clone ID: LIB3051-060-Q1-K1-G12
acggaagtatccaacaatgactaccacccgtggtgctatctgtctttgctttgcattcctttactgcgcggctgaaggagccaaggttagtttcaataacaagtgctcatacacggtatggccaggaaccctaaccggtgaccaaaagccccaattatcaacaactggtttcgagttgggtccaggagcatccaactctgtggaccttccatctccatggtccggtcggttctgggcccgaacaggatgctccaacaacaacggaaggttcagctgcgccaccgccgattgcgccttcggtcaagtcgcatgcaacggtgccggtgcaatcccggcagctactttggtagaaatcacagttgcagcaaacggagggcaagatttctacgacgtgagcaacgtggatggctttaacgtgcccatgtccggaaccccaca

SEQ ID NO: 26292 - DNA, 299 bp, Glycine max
  Clone ID: LIB3051-066-Q1-K1-F1
cccacgcgtccgtgcaaaacgagaagtatccaacaatgactaccacccgtgttgctatctgtggttggtttgcattcctttactacgcggctgaaggagccaaggttagtttcaataacaagtgctcatacacggtatggccaggaaccctaaccggtgaccaaaagccccaattatcaacaactggtttcgagttgggtccaggagcatccaactctgtggaccttccatctccatggtccggtcggttctgggcccgaacaggatgctccaacaacaacggaaggttcagctgcgcc

SEQ ID NO: 26293 - DNA, 397 bp, Glycine max
  Clone ID: LIB3051-068-Q1-K1-H12
cccacgcgtccggcaaaacgaaaaggatacatatccaacaatgacgaccacccgtgttgggctctgccttttatttgcattcctcttctacgcagctgaaggagccaaggttagtttcaataacaagtgcacatacacggtatggccaggaaccctaaccggtgaccaaaagccccaattatcaacaactggtttcgagttgggtccaggagcatccaactctgtggaccttccatctccatggtccggtcggttctgggcccgaacaggatgctccaacaacaacggaaggttcagctgcgccaccgccgattgcgcctacggtcaagtcgcatgcaacggtgccggtgcaatcccgccagctactttggtagaaatcacagctgcagcaaacgga

SEQ ID NO: 26294 - DNA, 442 bp, Glycine max
  Clone ID: LIB3051-069-Q1-K1-F12
gcaaaacgagaagtatccaacaatgactaccacccgtgttgctatctgtctttgcttggcatgcctttactacgcggctgaaggagccaaggttagtttcaataacaagtgctcatacacggtatggccaggaaccctaaccggtgaccaaaagccccaattatcaacaactggtttcgagttgggtccaggagcatccaactctgtggaccttccatctccatggtccggtcggttctgggcccgaacaggatgctccaacaacaacggaaggttcagctgcgccaccgccgattgcgcctccggtcaagtcgcatgcaacggtgccggtgcaatcccgccagctactttggtagaaatcacagttgcagcaaacggagggcaagatttctacgacgtgagcaacgtggatggcttcaacgtgcccatgtgcgtaacccca

SEQ ID NO: 26295 - DNA, 467 bp, Glycine max
  Clone ID: LIB3051-077-Q1-K1-C7
cggacgcgtgggtgcaaaacgagaagtatccaacaatgactaccacccgtgttgctatctgtggttgctttgcattcctttactacgcggctgaaggagccaaggttagtttcaataacaagtgctcatacacggtatggccaggaaccctaaccggtgaccaaaagccccaattatcaacaactggtttcgagttgggtccaggagcatccaactctgtggaccttccatctccatggtccggtcggttctgggcccgaacaggatgctccaacaacaacggaaggttcagctgcgccaccgccgattgcgcctccggtcaagtcgcatgcaacggtgccggtgcaatcccgccagctactttggtagaaatcacagttgcagcaaacggagggcaagatttctacgacgtgagcaacgtggatggcttcaacgtgcccatgtccgtaaccccacaaggtgggagt

SEQ ID NO: 26296 - DNA, 353 bp, Glycine max
  unsure (1)..(353): unsure at all n locations
  Clone ID: LIB3051-079-Q1-K1-A8
tcgactaccacccgtgttgctatctgtctttgctttgcattcctttactacgcggctgaaggagccgaggttagtttcaataacaagtgctcatacacggtatggccaggaaccctaaccggtgaccaaaagccccaattatcaacaactggtttcgagttgggtccaggagcatccaactctgtggaccttccatctccatggtccggtcggttctgggcccgaacaggatgctccaacaacaacggaaggttcagctgcgccaccgtcgattgcgcctccggtcaagtcgcatgcaacggtgccggtgcaatcccgncagctactttggtagaaatcacagttgcagcaaa

SEQ ID NO: 26297 - DNA, 449 bp, Glycine max
  Clone ID: LIB3051-090-Q1-K1-F8
cccacgcgtccgcgagaagtatccaacaatgactaccacccgtgttgctatctgtctttgctgtgcattcctttactacgcggctgatggagccaaggttagtttcaataacaagtgctcatacacggtatggccaggaaccctaaccggtgaccaaaagccccaattatcaacaactggtttcgagttgggtccaggagcatccaactctgtggaccttccatctccatggtccggtcggttctgggcccgaacaggatgctccaacaacaacggaaggttcagctgcgccaccggcgattgcgcctacggtcaagtcgcatgcaacggtgccggtgcaatcccgacagctactttggtagaaatcacagttgcagcaaacggagggcaagatttctacgacgtgagcaacgtggatggcttcaacgtgcccatgtccgtaaccccac

SEQ ID NO: 26298 - DNA, 455 bp, Glycine max
  unsure (1)..(455): unsure at all n locations
  Clone ID: LIB3051-107-Q1-K1-A11
gctcgaccgacgcgtccgcaatgactaccacccgtgttgctatctgtctttgctttgcattcctttactacgcggctgaaggagccaaggttagtttcaataacaagtgctcatacacggtatggccaggaaccctaaccggtgaccaaaagccccaattatcaacaactggtttcgagttgggtccaggagcatccaactctgtggaccttccatctccatggtccggtcggttctgggcccgaacaggatgctccaacaacaacggaaggttcagctgcgccaccgtcgattgcgcctncggtcaagtcgcatgcaacggtgccggtgcaatcccgccagctactttggtagaaatcacagttgcagcaaacggatggcaagatttctacgacgtgagcaacgtggatggctttaacgtgcccatgtccgtaaccccacaatgtgngagtggc

SEQ ID NO: 26299 - DNA, 453 bp, Glycine max
  Clone ID: LIB3051-108-Q1-K1-C8
cccacgcgtacgcccacgcgtccgctgcaaaacgagaagtatccaacaatgactacgacgcgtgttgctatctgtctttgctttgcattcctttactacgcggctgaaggagccaaggttagtttcaataacaagtgctcatacacggtatggccaggaaccctaaccggtgaccaaaagccccaattatcaacaactggtttcgagttgggtccaggagcatccaactctgtggaccttccatctccatggtccggtcggttctgggcccgaacaggatgctccaacaacaacggaaggttcagctgcgccaccgccgattgcgcctccggtcaagtcgcatgcaacggtgccggtgcaatcccgccagctactttggtagaaatcacagttgcagcaaacggagggcaagatttctacgacgtgagcaacgtggatggcttcaacgtgccc

SEQ ID NO: 26300 - DNA, 444 bp, Glycine max
  Clone ID: LIB3051-114-Q1-K1-C6
tgcaaaacgagaagtatccaacaattactatcacccgtgttgctatctgtctttgcgttggattcctttactacgcggctgaaggagccaaggttagtttcaataacaagtgctcatacacggtatggccaggaaccctaaccggtgaccaaaagccccaattatcaacaactggtttcgagttgggtccaggagcatccaactctgtggaccttccatctccatggtccggtcggttctgggcccgaacaggatgctccaacaacaacggaaggttcagctgcgccaccgccgattgcgcctacggtcaagtcgcatgcaacggtgccggtgcaatcccgtcagctactttggtagaaatcacagttgcagcaaacggagggcaagatttctacgacgtgagcaacgtggatggcttcaacgtgcccatgttcgtaaccccac

SEQ ID NO: 26301 - DNA, 406 bp, Glycine max
  unsure (1)..(406): unsure at all n locations
  Clone ID: LIB3051-058-Q1-K2-A11
cggacgcgtggggcccaacagacccaccatgaagtccttatgagcttgattcttgggttgctgcgctcctggaatgaccctctctatcacctagtcaccgaggtgcggggtatgaaaggagccccagatgctatcctatcgagggccatagagattgaggaagaaaacaaacgacttctggaaggcatggagatgatatttggccaggttattcctggagccaaagagactgagccctaccctgtgtggtcaggactcccgtccctgcaaactaaggatgaagatgcacgttattccgctttttaatacctgctccactgcctgcgcagggattcaagcaagattgacacttaccttaagctcctgaatngcagaatcatctacaacaacaactgctaaacccaca

SEQ ID NO: 26302 - DNA, 418 bp, Glycine max
  unsure (1)..(418): unsure at all n locations
  Clone ID: LIB3051-058-Q1-K2-D9
gtcaaatctactcttgtgccagggtgtggtctccacccccgtctgtcccaatgggcgctggcaactgccaggtatcccttcgagacctgtttgaccgggcagtcatggtgtcccactacatccatgacctctcctcggaaatgttcaacgaatttgataaacggtatgcccagggcaaagggttcattaccatggccctcaacagctgccatacctcctcccttcctacccctgaagataaagaacaagcccaacagacccaccatgaagtccttatgagcttgattcttgggttgctgcgctcctggaatgaccctctctatcacctagtcaccgaggtgcggngtatgaaaggagccccagatgctatcctatcgagggccatagagattgaggaagaaaacaaacgacttctgga

SEQ ID NO: 26303 - DNA, 419 bp, Glycine max
  Clone ID: LIB3051-020-Q1-E1-A3
ttgctagtggtactgtcttagctttgattctctgttctctgttttgttctgtttcgcgtattgtcttcatacaggaacttgaacaatgaagaatgcaaagggcaagggagcagcaagggcctcaaaagaatcactgaagcccgttgatgaccggttggaaagcggaaggcttccggtaagcctgggagaagtagtgcaccaaagaaggagaagaaggccaagaaagaccccaacaagcctaaaagaccacccagtgctttctttgtgttccttgaggagttcaggaagacctttaaggctgagaatcctaatgtgaaggctgtatcagttgttgggaaagctggatgagagaaatggaaatccttgtccagtgctgagaaagctccatatgaagccaaggctgcgaaaaggaaagctga

SEQ ID NO: 26304 - DNA, 420 bp, Glycine max
  Clone ID: LIB3051-014-Q1-E1-D10
aatgtccggctcgacccacgacgtacgcccacgcgtccgcccacgcgtccgcccacgcgtccgctttatataacctaattgcaaagatgaataccaagcccgttttcttcttgtgcttcctctgtgcactgcttctcatctctgttgtggcaactgagccatccaaagatgagacacaagcagaagaaccaaagacacagccagatgcctggggaagaggtggaagtggggggcatgatggaagctggggacacggtggagactgggggcatggcggaggaggacacggtggaggacatggcggaggaggacacggtggaggacatggcggaggatgcagatgctgcggtcgaaagggctgcaaatgttgctgaagtaaaaatcacaaatatatgaactgaacacactcatatacttgag

SEQ ID NO: 26305 - DNA, 400 bp, Glycine max
  Clone ID: LIB3051-015-Q1-E1-E4
acgcgtcagaactaattgcaaagatgaataccaagccctttttctccttgtgcttactctgcgcactgcttctcatctgtgttgtggcaactgagccatccaaagatgcgacacaagaagaaccaaagacacggccagatgcctggagaagtggtggaagtggaggacatggtggaagtgggggacatggtggaagcgggggacacggtggaggctggggacatggtggaggctggggacatggcggtggacatggcggaggatgcaaatgctgcggtcgaaagggctgcaaatgttgctgaagtaaaaaaacacaaacatgaactgaagacacacatacgtgtgtactccatgtaataagtatagtatgtagaattaagaaataaaagcatggaatcta

SEQ ID NO: 26306 - DNA, 431 bp, Glycine max
  Clone ID: LIB3051-025-Q1-K1-F1
atctttatataacctaattgcaaagatgaataccaagcccgttttcttcttgtgcttcctctgtgcactgcttctcatctctgttgtggcaactgagccatccaaagatgagacacaagaagaaccaaagacacagccagatgcctggggaagaggtggaagtggggggcatgatggaagctggggacacggtggagactgggggcatggcggaggaggacacggtggaggacatggcggaggaggacacggtggaggacatggcggaggatgcagatgctgcggtcgaaagggctgcaaatgttgctgaagtaaaaatcacacatatatgaactgaacacactcttataacttgaatggactccatgtaataactagtatatatgtaagaaatcagaaattaaagcatggactctattcgtgcttgggct

SEQ ID NO: 26307 - DNA, 419 bp, Glycine max
  Clone ID: LIB3051-026-Q1-K1-G2
aattaaactaattgcaaagatgaataccaagccctttttctccttgggcttactctgggcactgcttctcatctgtgttgtggcaactgagccatccaaagatgcgacacaagcagaagaaccaaagacacggccagatgcctggagaagtggtggaagtggaagacatggtggaagtgggggacatggtggaagcgggggacacggtggaggctggggacatggtggaggctggggacatggcggtggacatggcggaggatgcaaatgctgcggtcgaaagggctgcaaatgttgctgaagtaaaaaaacacaaacatgaactgaagacacacatacgtgtgtactccatgtaataagtatagtatgtagaattaagaaataaaagcatggaatctatatccgtgctagggctgtca

SEQ ID NO: 26308 - DNA, 398 bp, Glycine max
  Clone ID: LIB3051-030-Q1-K1-D11
attgcaaagatgaataccaagcccgttttcttcttgtgcttcctatgtgcactgcttctgatcgctgttgtggcaactgagccatccaaagatgagacacaagaagaaccaaagacacagccagatgcctggggaagaggtggaagtggggggcatgatggaagctggggacacggtggagactgggggcatggcggaagaagacacggtggaggacatggcggaggatgacacggtggaggacatggcggaagatgcagatgctgcggtcgaaagggctgcaaatgttgctgaagtaaaaatcacgaatatatgaactgaacacactcatatacttgagtgtactccatgtaataactagtatatatgtaagaaataagaaataaaagcatggactc

SEQ ID NO: 26309 - DNA, 348 bp, Glycine max
  Clone ID: LIB3051-046-Q1-K1-H3
actaattgcaaagatgaataccaagccctttttctccttgtgcttactctgcgcactgcttctcatctgtgttgtggcaactgagccatccaaagatgcgacacaagcagaagaaccaaagacacggccagatgcctggagaagtggtggaagtggaggacatggtggaagtgggggacatggtggaagcgggggacacggtggaggctggggacatggtggaggctggggacatggcggtggacatggcggaggatgcaaatgctgcggtcgaaagggctgcaaatgttgctgaagtaaaaaaacacaaacatgaactgaagacacacatacgtgtgtactccatgg

SEQ ID NO: 26310 - DNA, 395 bp, Glycine max
  Clone ID: LIB3051-050-Q1-K1-E8
taaactaattgcaaagatgaataccaagccctttttctccttgtgcttactctgcgcactgcttctcatctgtgttgtggcaactgagccatccaaagatgcgacacaagaagaaccaaagacacggccagatgcctggagaagtggtggaagtggaggacatggtggaagtgggggacatggtggaagcgggggacacggtggaggctggggacatggtggaggctggggacatggcggtggacatggcggaagatgcaaatgctgcggtcgaaagggctgcaaatgttgctgaagtaaaaaaacacaaacatgaactgaagacacacatacgtgtgtactccatgtaataagtatagtatgtagaattaagaaataaaagcatggaatctata

SEQ ID NO: 26311 - DNA, 375 bp, Glycine max
  Clone ID: LIB3051-051-Q1-K1-B5
caaagatgaaaccaagcccgttttcttcttgtgcttcctctgtgcactgcttctcatctctgttgtggcaactgagccatccaaagatgagacacaagcagaagaaccaaagacacagccagatgcctggggaagaggtggaagtggggggcatgatggaagctggggacacggtggagactgggggcatggcggaggaggacacggtggaggacatggcggaggaggacacggtggaggacatggcggaggatgcagatgctgcggtcgaaagggctgcaaatgttgctgaagtaaaaatcacaaatatatgaactgaacacactcatatacttgagtgtactccatgtaataactaggatatatgtaagaaat

SEQ ID NO: 26312 - DNA, 363 bp, Glycine max
  Clone ID: LIB3051-051-Q1-K1-D12
ataccaagcccgttttcttcttgtgcttcctctgtgcactgcttctcatctctgttgtggcaactgagccatccaaagatgagacacaagcagaagaaccaaagacacagccagatgcctggggaagaggtggaagtggggggcatgatggaagctggggacacggtggagactgggggcatggcggaggaggacacggtggaggacatggcggaggaggacacggtggaggacatggcggaggatgcagatgctgcggtcgaaagggctgcaaatgttgctgaagtaaaaatcacaaatatatgaactgaacacactcatatacttgagtgtactccatgtaataactagtatatatgtaag

SEQ ID NO: 26313 - DNA, 446 bp, Glycine max
  unsure (1)..(446): unsure at all n locations
  Clone ID: LIB3051-053-Q1-K2-G3
aagatgaataccaagcccgttttcttcttgtgcttcctctgtgcactgcttctcatctgggttgtggcaactgagccatccaaagatgagacacaagcagaagaaccaaagacacagccagatgcctggggaagaggtggaagtggggggcatgatggaagctggggacacggtggagactgggggcatggcggaggaggacacggtggaggacatggcggaagaggacacggtggaggacatggcggaggatgcagatgctgcggtcgaaagggctgcaaatgttgctgaagtaaaaatcacaaatatatgaactgaacacactcatatacttgagtgtactccatgtaataactagtatatatgtaagaaataagaaataaaagcatggactctatccgtgcttgggctggcataggttgaatgttttncgncaaccatgcatg

SEQ ID NO: 26314 - DNA, 348 bp, Glycine max
  Clone ID: LIB3051-054-Q1-K2-B3
cccacgcgtccgcccacgcgtccgataccaagccctttttctccttgtgcttactctgcgcactgcttctcatctgtgttgtggcaactgagccatccaaagatgcgacacaagcagaagaaccaaagacacggccagatgcctggagaagtggtggaagtggaggacatggtggaagtgggggacatggtggaagcgggggacacggtggaggctggggacatggtggaggctggggacatggcggtggacatggcggaggatgcaaatgctgcggtcgaaagggctgcgaatgttgctgaagttaaaaaacacatacatgaactgaagacacacatacgtgtggac

SEQ ID NO: 26315 - DNA, 412 bp, Glycine max
  Clone ID: LIB3051-054-Q1-K2-H10
aactcatcttatataattaaactaattgcaaagatgaataccaagccctttttcggcttgtgcttactctgcgcactgcttctcatctgtgttgtggcaactgagccatccaaagatgcgacacaagcagaagaaccaaagacacggccagatgcctggagaagtggtggaagtggaggacatggtggaagtgggggacatggtggaagcgggggacacggtggaagctggggacatggtggaggctggggacatggcggtggacatggcggaggatgcaaatgctgcggtcgaaagggctgcaaatgttgctgaagtaaaaaaacacaaacatgaactgaagacacacatacgtgtgtactccatgtaataagtatagtatgtagaattaaggaaataaaagcatggaatc

SEQ ID NO: 26316 - DNA, 417 bp, Glycine max
  unsure (1)..(417): unsure at all n locations
  Clone ID: LIB3051-061-Q1-K1-F5
cgggtcgagcacgcgtncgcaaaatgaataccaagcccgttttcttcttgtgcttcctctgtgcactgcttctcatgtctgttgtggcaactgagccatccaaagatgagacacaagcagaagaaccaaagacacagccagatgcctggggaaaaagtggaagtggggggcatgatggaagctggggacacggtggagactgggggcatggcggaggaggacacggtggaagacatggcggaggaggacacggtggaggacatggcggaggatgcagatgctgcggtcgaaagggctgcaaatgttgctgaagtaaaaatcacaaatatatgaactgaacacactcatatacttgagtgtactccatgtaataactagtatatatgtaagaaataagaaataaaagcatggactcta

SEQ ID NO: 26317 - DNA, 407 bp, Glycine max
  Clone ID: LIB3051-062-Q1-K1-G11
aacctaattgcaaagatgaataccaagcccgttttcttcttgtgcttcctctgtgcactgcttctcatctctgttgtggcaactgagccatccaaagatgagacacaagcagaagaaccaaagacacagccagatgcctggggaagaggtggaagtggggggcatgatggaagctggggacacggtggagactgggggcatggcggaggaggacacggtggaggacatggcggaggaggacacggtggaggacatggcggaggatgcagatgctgcggtcgaaagggctgcaaatgttgctgaagtaaaaatcacaaatatatgaactgaacacactcatatacttgagtgtactccatgtaataactagtatatatgtaagaaattagaaattaaagcatggactc

SEQ ID NO: 26318 - DNA, 432 bp, Glycine max
  Clone ID: LIB3051-062-Q1-K1-H6
ctcatctttatataacctaattgcaaagatgaataccaagcccgttttcttgttgtgcttcctctgtgcactgcttctcatctctgttgtggcaactgagccatccaaagatgagacacaagcagaagaaccaaagacacagccagatgcctggggaagaggtggaagtggggggcatgatggaagctggggacacggtggagactgggggcatggcggaggaggacacggtggaggacatggcggaggaggacacggtggaggacatggcggaggatgcagatgctgcggtcgaaagggctgcaaatgttgctgaagtaaaaatcacaaatatatgaactgaacacactcatatacttgagtgtactccatgtaataactagtatatatgtaagaaataagaaataaaagcatggactctatccgtgcttg

SEQ ID NO: 26319 - DNA, 476 bp, Glycine max
  Clone ID: LIB3051-071-Q1-K1-A2
taattgcaaagatgaataccaagcccgtgttcttcttgtgcttcctctgtgcactgcttctcatctctgttgtggcaactgagccatccaaagatgagacacaagaagaaccaaagacacagccagatgcctggggaagaggtggaagtggggggcatgatggaagctggggacacggtggagactgggggcatggcggaggaggacacggtggaggacatggcggaggaggacacggtggaggacatggcggaggatgcagatgctgcggtcgaaagggctgcaaatgttgctgaagtaaaaatcacaaatatatgaactgaacacactcatatacttgagtgtactccatgtaataactagtatatatgtaagaaataagaaataaaagcatggactctatccgtgcttgggctggcataggttgaatgttttccggcaaccatgcatgtagttgacacatctttttactatac

SEQ ID NO: 26320 - DNA, 410 bp, Glycine max
  Clone ID: LIB3051-072-Q1-K1-C5
ctttatataacctaattgcaaagatgaataccaagcccgttttcttcttgtgcttcgtctgtgcactgcttctcatctctgttgtggcaactgagccatccaaagatgagacacaagaagaaccaaagacacagccagatgcctggggaagaggtggaagtggggggcatgatggaagctggggacacggtggagactgggggcatggcggaagaggacacggtggaggacatggcggaagaggacacggtggaggacatggcggaggatgcagatgctgcggtcgaaagggctgcaaatgttgctgaagtaaaaatcacaaatatatgaactgaacacactcatatacttgagtgtactccatgtaataactagtatatatgtaagaaataagaaattaaagcatggac

SEQ ID NO: 26321 - DNA, 474 bp, Glycine max
  Clone ID: LIB3051-077-Q1-K1-D3
gcaaagatgaataccaagcccgttttcttcttgtgcttcctctgtgcactgcttctcatctcggttggggcaactgagccatccaaagatgagacacaagcagaagaaccaaagacacagccagatgcctggggaagaggtggaagtggggggcatgatggaagctggggacacggtggagactgggggcatggcggacgaggacacggtggaggacatggcggaggaggacacggtggaagacatggcggaggatgcagatgctgcggtcgaaagggctgcaaatgttgctgaagtaaaaatcacaaatatatgaactgaacacactcatatacttgagtgtactccatgtaataactagtatatatgtaagaaataagaaataaaagcatggactctatccgtgcttgggctggcataggttgaatggttttcgccaaccatgcatgtagttgacacatctttttactatac

SEQ ID NO: 26322 - DNA, 436 bp, Glycine max
  Clone ID: LIB3051-079-Q1-K1-A3
ctttatataacctaattgcaaagatgaataccaagcccgttttcttcttgtgcttcctgtgtgcactgcttctcatctctgttgtggcaactgagccatccaaagatgagacacaagcagaagaaccaaagacacagccagatgcctggggaagaggtggaagtggggggcatgatggaagctggggacacggtggagactgggggcatggcggaggaggacacggtggaggacatggcggaggaggacacggtggaggacatggcggaggatgcagatgctgcggtcgaaagggctgcaaatgttgctgaagtaaaaatcacaaatatatgaactgaacacactcatatacttgagtgtactccatgtaataactagtatatatgtaagaaataagaaataaaagcatggactctatccgtgcttgggctggcat

SEQ ID NO: 26323 - DNA, 460 bp, Glycine max
  Clone ID: LIB3051-081-Q1-K1-H3
ctaattgcaaagatgaataccaagccctttttctccttgtgcttactctgcgcactgcttctgatctgtgttgtggcaactgagccatccaaagatgcgacacaagcagaagaaccaaagacacggccagatgcctggagaagtggtggaagtggaggacatggtggaagtgggggacatggtggaagcgggggacacggtggaggctggggacatggtggaggctggggacatggcggtggacatggcggaggatgcaaatgctgcggtcgaaagggctgcaaatgttgctgaagtaaaaaaaacacaaacatgaactgaagacacacatacgtgtgtactccatgtaataagtatagtatgtagaattaagaaataaaagcatggaatctatatccgtgctagggctgtcataggttgaccggttttccatcaaccatgcatgtagtttgacacatca

SEQ ID NO: 26324 - DNA, 462 bp, Glycine max
  Clone ID: LIB3051-086-Q1-K1-H3
atcttatataattaaactaattgcaaagatgaataccaagccctttttctccttgtgcttactgtgcgcactgcttctcatctgtgttgtggcaactgagccatccaaagatgcgacacaagcagaagaaccaaagacacggccagatgcctggagaagtggtggaagtggaggacatggtggaagtgggggacatggtggaagcgggggacacggtggaggctggggacatggtggaagctggggacatggcggtggacatggcggaagatgcaaatgctgcggtcgaaagggctgcaaatgttgctgaagtaaaaaaacacaaacatgaactgaagacacacatacgtgtgtactccatgtaataagtatagtatgtagaattaagaaataaaagcatggaatctatatccgtgctagggctgtcataggttgaccggttttccatcaaccatgcatgta

SEQ ID NO: 26325 - DNA, 444 bp, Glycine max
  Clone ID: LIB3051-086-Q1-K1-H7
cccacgcgtccgctcatcttatataattaaactaattgcaaagatgaataccaagccctttttgtccttgtgcttactctgcgcactgcttctcatctgtgttgtggcaactgagccatccaaagatgcgacacaagcagaagaaccaaagacacggccagatgcctggagaagtggtggaagtggaggacatggtggaagtgggggacatggtggaagcgggggacacggtggaggctggggacatggtggaggctggggacatggcggtggacatggcggaggatgcaaatgctgcggtcgaaagggctgcaaatgttgctgaagtaaaaaaacacaaacatgaactgaagacacacatacgtgtgtactccatgtaataagtatagtatgtagaattaagaaataaaagcatggaatctatatccgtgctagggctgtcat

SEQ ID NO: 26326 - DNA, 427 bp, Glycine max
  Clone ID: LIB3051-088-Q1-K1-C12
cccacgcgtccgcgaaagggctgcaaatgttgctgaagtaaaaatcacaaatagatgaactgaacacactcatatacttgagtgtactccatgtaataactagtatatatgtaagaaataagaaataaaagcatggactctatccgtgcttgggctggcataggttgaatgttttccgccaaccatgcatgtagttgacacatctttttactatacagcatatatatttctaaaaaaaaaaaaaaaaaaaaaaaaaaaaaaaaaaaaaaaaaaaaaaaaaaaaaaaaaaaaaaaaaaaaaaaaaaaaaaaaaaaaaaaaagggttaaaaaaaaaaaaaaaaaaaaaaaaaaaggggggcccgtttaaagggaccaaagttaactacccgtgcattgcaacttataacttttcatatggggcccccaa

SEQ ID NO: 26327 - DNA, 432 bp, Glycine max
  Clone ID: LIB3051-091-Q1-K1-D7
ctttatataacctaattgcaaagatgaataccaagcccgttttcttcttgtgcttcctgtgtgcactgcttctcatctctgttgtggcaactgagccatccaaagatgagacacaagaagaaccaaagacacagccagatgcctggggaagaggtggaagtggggggcatgatggaagctggggacacggtggagactgggggcatggcggaggaggacacggtggaggacatggcggaggaggacacggtggaggacatggcggaggatgcagatgctgcggtcgaaagggctgcaaatgttgctgaagtaaaaatcacaaatatatgaactgaacacactcatatacttgagtgtactccatgtaataaaactagtatatatgtaagaaataagaaataaaagcatggactctatccgtgcttgggctgg

SEQ ID NO: 26328 - DNA, 389 bp, Glycine max
  Clone ID: LIB3051-101-Q1-K1-F5
cccacgcgtccgtctttatataacctaattgcaaagatgaataccaagcccgtgttctggttgtgcttcctctgtgcactgcttctcatctctgttgtggcaactgagccatccaaagatgagacacaagcagaagaaccaaagacacagccagatgcctggggaagaggtggaagtggggggcatgatggaagctggggacacggtggagactgggggcatggctgaggaggacacggtggaagacatggcggaggaggacacggtggaagacatggcggaggatgcagatgctgcggtcgaaagggctgcaaatgttgctgaagtaaaaatcacaaatatatgaactgaacacactcatatacttgagtgtactccatgtaataact

SEQ ID NO: 26329 - DNA, 341 bp, Glycine max
  Clone ID: LIB3051-113-Q1-K1-G4
aattaaactaattgcaaagatgaataccaagccctttttctccttgtgcttactctgcgcactgcttctcatctgtgttgtggcaactgagccatccaaagatgcgacacaagcagaagaaccaaagacacggccagatgcctggagaagtggtggaagtggaggacatggtggaagtgggggacatggtggaagcgggggacacggtggaagctggggacatggtggaagctggggacatggcggtggacatggcggaagatgcaaatgctgcggtcgaaagggctgcaaatgttgctgaaagtaaaaaacacaaacatgaactgaagacacacatacgt

SEQ ID NO: 26330 - DNA, 403 bp, Glycine max
  Clone ID: LIB3051-115-Q1-K1-G10
cttatataattaaactaattgcaaagatgaataccaagccctttttctccttgtgcttactctgcgcactgcttctcatctgtgttgtggcaactgagccatccaaagatgcgacacaagcagaagaaccaaagacacggccagatgcctggagaagtggtggaagtggaggacatggtggaagtgggggacatggtggaagcggtggacacggtggaggctggggacatggtggaggctggggacatggcggtggacatggcggaggatgcaaatgctgcggtcgaaagggctgcaaatgttgctgaagtaaaaaaacacaaacatgaactgaagacacacatacgtgtgtactccatgtaataagtatagtatgtagaattaagaaataaagcatggaatc

SEQ ID NO: 26331 - DNA, 420 bp, Glycine max
  unsure (1)..(420): unsure at all n locations
  Clone ID: LIB3051-117-Q1-K1-F10
aattaaactaattgcaaagatgaataccaagccctttttctccttgtgcttactctgcgcactgcttctcatctgtgttgtggcaactgagccatccaaagatgcgacacaagcagaagaaccaaagacacggccagatgcctggagaagtggtggaagtggaggacatggtggaagtgggggacatggtggaagcgggggacacggtggaggctggggacatggtggaggctggggacatggcggtggacatggcggaggatgcaaatgctgcggtcgaaagggctgcaaatgttgctgaagtaaaaaaacacaaacatgaactgaagacacacatacgtgtgtactccatgtaataagtatagtatgtagaattaagaaataaaagcatggaatctatatncgtgctagggctgtcat

SEQ ID NO: 26332 - DNA, 446 bp, Glycine max
  Clone ID: LIB3051-064-Q1-K1-A11
agcagctatcagaaatatccacaacacagctgagaagttcattttcaaaatggccggtggggtggttcctgtggatgcatcaccgattggaaatggcttcgttggcaagataacgctctcagttatcatcacttgcatcgttgctgcatccagtggactccttttcggatatgacctcggaatttcaggaggtgtcacaacaatggtaccatttctggaaaaattcttcccagatatattgagaaaagttgctggtactgaagtgaacatgtactgtgtgtatgatagtcaagtgttgacattgttcacatcttctctataccttgctgggttagtgtcatctctcgcagctagtcgagtcacagcagcatggggtcggcgaaacaccatcttaattggtggcgttacatttcttattggtggtgcccttaatggaagtgctgaaa

SEQ ID NO: 26333 - DNA, 436 bp, Glycine max
  Clone ID: LIB3051-066-Q1-K1-A11
ctccgattctccttgtaaacagcggtgccaggttcgatctttgcgttcttcatgtttttttttgcacgttttatcgatctgctaacttgacatttgatccaacgcaagttcgttgcttttttgattgaaaatcagattttgagataccctttgtgttcccaattaatgggttttttctggtgattgtatgggtgttaatttagaagttgatataggatgggggcaatgatgtcgagattctggttcatgttattccctgcaaaagagtataagattgttgttgttggattggataacgctggaaaaaccactaccctttataaattgcatctgggtgaggttgtaactaccaaccctactgttggtagcaacgtcgaagagctcgtctacaagaatatacgatttgaggtctgggatcttggtggacaagaaagat

SEQ ID NO: 26334 - DNA, 341 bp, Glycine max
  Clone ID: LIB3051-097-Q1-K1-A8
acccacgcgtccggtgccatctatcttacttccttttcacatttcttagctgaagaaattgacaatcctgagtaccaaatgttgaggtgtagagtcaactatcatgctttaagatttaagccacatatcgtgaagttaagtcaatcaatagttgaaaagctacgcgaacaaggtcccttcatgtccatacatcttcggtttgagatggacatgttgtcatttgctggatgcttcgatatatttacacctgaggagcaaaagattttgaagaagtaccgaaaagaaaattttgcacctaaaaagacttgtctattatgaaagaaaggcttttgggaaaatgc

SEQ ID NO: 26335 - DNA, 329 bp, Glycine max
  Clone ID: LIB3051-054-Q1-K2-B7
attgtaccaggcaccaccttgcaaggagagtaccaacttactaatggttatggtgctaagagagctcctcaaatcatgagggatcactggagtacatacataactgaagatgatttcagattcatgtcagaaaatggcttaaatgcagtgagaatacctgtgggatgggggatagctaaaggtccaaacccttctaaagctttagttggacggacatttgcagcattggacaatgctttcatttgggcacaaaaccatgggatgaaagtgatcatagacttgcatgcagctgaaggttcacaaaatggcaatgaccacaatggcacaag

SEQ ID NO: 26336 - DNA, 428 bp, Glycine max
  Clone ID: LIB3051-064-Q1-K1-F6
cccacgcgtccgtactgatcctttgttgcttgaaaggactctatatccatgcatcggatggcaacttcatcccatccagaacagaacagaacagaactggtggttgcattgaatcggaggggtaagtgggaagacgtgtcttgttttgtagctttcccttccctctctcttttccccgccgcatgtgccggattagacgcgaactgcttccataattcacctactgcaatcaaccatcacaagatttcccactgattggatggaagaagcatgtgaatttcgaagttgggctgaattgattcctgatgccctgggggtaatcttcaccaatctttctcttcaggagagggtaacagtgatccccagggtgtgcaaatcatgggctaatgcagtaactggaccttactgctggcaagagatagacatca

SEQ ID NO: 26337 - DNA, 412 bp, Glycine max
  unsure (1)..(412): unsure at all n locations
  Clone ID: LIB3051-088-Q1-K1-A3
gaaagttgccctacttgtatggcaccccaagaggaacacggggttatctcctcatgcctgaactgcttcctagctggtggggtcctgtatcggttcgagtatgccgttacccctgccctcttccttgcaaaagcccgcggtggaacatgtactcttgcagtctctgatagtgatgatatcgtcatccatcgagcaaaatacctgctcgaaaatggctttgggtgctataatgttttcaagaaaaactgtgaagactttgctatctattgcaaaaccgggctcctagaaatcggacaaagtggccaagcagtttccatcatagggggacctcttgctgctgctctatcctcgcccctccgtatggttactactaacgtttatggaatggcaacgacngcnggtggagtctact

SEQ ID NO: 26338 - DNA, 342 bp, Glycine max
  Clone ID: LIB3051-117-Q1-K1-C7
gacagagcagcactcacattcacaacgaaggtttcctattcatcagacatggtgaaggcggtcagagttcacgaactcggtggccctcaagttctgaagtgggaggatgtggaaattggagatccaaaagaaggcgaggtccgtgtgaggaacaaagccattggggttaatttcattgatgtctactttcgcaaaggagtttacaaagccccttcttttcccttcactccaggtatggaagctgttggggttgtgacagctgtgggtgctggactcactggtaagcaagttggagatcttgtagcttatgcaggtcaaccaatggggtcatatgctgaagag

SEQ ID NO: 26339 - DNA, 402 bp, Glycine max
  Clone ID: LIB3051-001-Q1-E1-C5
agatacctactttcagctcctaagagcacgcatcactgttgcacttcttactcgttctccctcttttttttcttcttcttcttcttcgctaaaccccccctttatttttcctatctcactaacatcgatgggagacgagaataagaccaagtcccctgcttccggcgtgtggtccaccatcaagcctttcgtcaatggcggagcctccggcatgctcgccacctgcgtcattcaacccatcgatatgatcaaggtgaggattcaacttgggcaaggatcagctgcgcaggtcacttccaccatgcttaagaatgagggtgttgctgccttctataagggtctatctgctggattactcaggcaggctacatacaccactgcccgtcttggatcatttaaaat

SEQ ID NO: 26340 - DNA, 439 bp, Glycine max
  unsure (1)..(439): unsure at all n locations
  Clone ID: LIB3051-072-Q1-K1-H2
aacacaacaatgggagacgagaagaagggcaagccttgctgcttccggcgtgtggtccaccagcaagcctttcgtcaatggtggagcctccggcatgctcgccacctgcgtcattcaacccatcgatatgatcaaggtgaggattcaacttgggcaaggatcagctgcgcaagtcacttccaccatgcttaagaatgaaggttttgctgccttctataagggtctatctgctggattactcaggcaggctacatacaccactgcccgtcttgggtcatttaaaatcttgacggccaaagctattgaggctaatgatgggaagcccctgccactgtatcagaaagctctatgtgggctgactgctggtgctatcggagcaactgttggtagtccagcagatttggcactcattcggatgcangctgatgcaacattacct

SEQ ID NO: 26341 - DNA, 484 bp, Glycine max
  Clone ID: LIB3051-080-Q1-K1-E1
atactataggtctcgcccaatacctactctccgctcccaagagcacgcaccaccactattgcgcttcttcgtcgttctccctctttttcttcttcttcgctaaacccttttttctatctcactaacacaacaatgggagacgagaagaagggcaagcctgctgcttccggcgtgtggtccaccatcaagcctttcgtcaatggtggagcctccggcatgctcgccacctgcgtcattcaacccatcgatatgatcaaggtgaggattcaacttgggcaaggatcagctgcgcaggtcacttccaccatgcttaagaatgagggttttgctgccttctataaaggtctatctgctggattactcaggcaggctacatacaccaactgccgtcttgggtcatttaaaatcttgacggcccaagctattgaagctaatgatgggaagcccctgccactgtatcagaaaagctctatgtgggctgact

SEQ ID NO: 26342 - DNA, 431 bp, Glycine max
  Clone ID: LIB3051-117-Q1-K1-D11
ttcagctcctaagagcacgcatcactgttgcacttcttactcgttctccctctgtttgttcttcttcttcttcttcgctaaaccccccctttatttttcctatctcactaacatcgatgggagacgagaataagaccaagtcccctgcttccggcgtgtggtccaccatcaagcctttcgtcaatggcggagcctccggcatgctcgccacctgcgtcattcaacccatcgatatgatcaaggtgaggattcaacttgggcaaggatcagctgcgcaggtcacttccaccatgcttaagaatgagggtgttgctgccttctataagggtctatctgctggattactcaggcaggctacatacaccactgcccgtcttggatcatttaaaatcttgacggccaaagctattgaggctaatgatgggaagccc

SEQ ID NO: 26343 - DNA, 418 bp, Glycine max
  Clone ID: LIB3051-080-Q1-K1-B8
tgagaggtcaacacaaggcctattgaacaatttcacatacacagctgcatagaagctgcatcgaacactttcatcagtggattcaattgtatcagtctcatctccattgcacattaatgctactattcaatcctctggtcatgttatcagccacaccgaggtctatgaaagtgagttcttaaacaacttcaggtaagctgcggtggttcacattctaggaaacacaattgtcagggcaaggagggattcaagattccacaagaaaatagctgatgattatatatatgcatttcttatgaagatatgcatggaaaatagtgtgatcttcaatgttcctcatgagagtctattaaatgttggtcatgttttctatgtatagcctctactcctcttctcttggtaatacttgcgtgaacat

SEQ ID NO: 26344 - DNA, 436 bp, Glycine max
  Clone ID: LIB3051-003-Q1-E1-C11
tggaggtggtgcacatgttggtgttcttcttcaggggaaaaaagttagagatgacaatagaacacttgtgcagactggtatatcttgcaatgaaaatttggataccctgagtttcatgttggagcccacttcactacaagcttctccaactgtttgtgttggtgatccttcttctcaatgtgaaacatcccagcctaccaggtccacagaaattcctgtcttagattcaggaattactgataccttgcacgactcacccttgctgacatatccgggcaacctaattgaaagtaaccatgagtctacttcttcacttgcggacactacacttgacaaactaacacctgattccagagcgatagttgttgttccagctaccacagaaacattagctgtggttcctgtgagtcagaaaaccaagcgctctgagtttgta

SEQ ID NO: 26345 - DNA, 447 bp, Glycine max
  Clone ID: LIB3051-084-Q1-K1-F10
aagaaatctccatttcataggaaatcttttcccagtgcttccttttccaggagtggggatggtattaagggaggttttagagatgatgacgaaaactttttaaggtgcaaaaagttttgcacgaagccaaaggcttttaggtctccacgacgcattgcacaccgaagaatcaggaatttgatgtcttccaaatactggaagacagctccaaagttgaaggactctgaactttctagatctgatctaggagtacctcgttatcataagaggaagacttgttacggttttgaaagatctcagcacaatgccattgttaaaaagaggaaattcgttgaccgggtttcaggagtaacttctgatggaggattcagtagtgagagtgtgtccaattcaccacagaaagggatggatggagacaagcctagctcatctgcaaaattgcatgta

SEQ ID NO: 26346 - DNA, 340 bp, Glycine max
  Clone ID: LIB3051-038-Q1-K1-H4
tgcagatgttgctactgtcaattccactgatggaaacaatcctactaaggtggtttctgtgcctaaattcctcttcatatgtggatcaaatgttgtccaaaaaggccttgctagtggtgtcacaggtatggctggtcttggcagaactaaagtttctcttgcttctcaatttgcctcagctttcagctttcatagaaaatttgccatttgcttgagttcttctactatgacaaatggtgtaatgttctttggtgatggcccttacaattttggttatttgaactcggatctctccaaggttctaactttcacccctctcatttcaaaccctgttagcact

SEQ ID NO: 26347 - DNA, 434 bp, Glycine max
  Clone ID: LIB3051-041-Q1-K1-H1
cccacgcgtccgaaataaaaataccacttatggaatacataatactaaagtggattatgtgcctagatacctcttcatatgtggatcaaatgttgtccaatcacggccttggttctggtgtcacctgtatggctggtcttcgcagaactaaactctgtcctgcttctcaatctgcctcagctttgagctttcatagaaaatccgccatttgctcgagttcttctactatgacaaatggcgtaatgttctttgctgatggcccttacaattttggtcatttgaactctgatctctccaaggttctaactgtcacccctctcattatccaccctgttagcactgcttcaagttatttgcaaggggagccctcagtggaatactctattgctgtgaaatctattaaagtctcagactacaatgtaacattgaacaca

SEQ ID NO: 26348 - DNA, 400 bp, Glycine max
  Clone ID: LIB3051-061-Q1-K1-B11
cttggagaccacaatttacaaagctgtgtctgaggcctttgtaaaagcagtaggagcgcctacagttgcacctgtggctccatttgggacttgctttgcaaccaaagacattcagtctacaagaatgggccctgctgtgcctgacataaatctagtgctgcagaatgaagtggtgtggagcatcattggtgcgaattcaatggtgtatactaatgatgtaatttgcttgggttttgtggatgctggatcagacccaagtacggcccaagttggatttgtggtgggttattctcaaccaattacttcaatcacaattggagcacatcagttggagaacaacatgctacaatttgacttggctacctcaaggcttggcttccgctccctcttcttggagcac

SEQ ID NO: 26349 - DNA, 369 bp, Glycine max
  Clone ID: LIB3051-074-Q1-K1-D6
cggccttgctagtggtgtcacaggtattgctgttcttggcagaactaaagtttccctggcttcgcgatcactctcaacttgcaactgtcttagaaaattccccatttgcttgagttctttcactatgacaaatggtgtcatgttctttcgtgatgggccttataaatctggttatttggactctgatctcttcaaagttgtcactttcacgcctctcattacaaatactgttaacactgctccaagttattttcaaggggaaccctcagtagaatacttcattggggtgaaatccattagagtctctgaccaaaatgtaccattgaacacaacccttttggctataaatagcaatggcattggtgggac

SEQ ID NO: 26350 - DNA, 429 bp, Glycine max
  unsure (1)..(429): unsure at all n locations
  Clone ID: LIB3051-091-Q1-K1-D8
cttctcaattttcctcagctttcagctttcttagaaaattcgccatttgcttgagttcttgcactatgacaaatggtgtcatgttctttggtgatggcccttataattttggttatttgaactctgatctctccaaggttctcactttcacgcctctcattacaaatcctgttagcactgctccaagttatttccaaggggaaccctcagtagaatacttcattggggtgaaatccattagagtctctgacaaaaatgtaccattgaacacaacccttttgtctatagatagaaatggcattggtgggactaagattagtactgttaatccatacactgtcttggagaccacaatttacaaagcnttgttgtctgaggcctttgtaaaagcagtaggagcccctacagttgcacctgtggctccatttg

SEQ ID NO: 26351 - DNA, 425 bp, Glycine max
  Clone ID: LIB3051-103-Q1-K1-B8
tcgctaagtctcctcttcatatgcggtagcaaatgttgtacaaaacggcccttgctaggggtggcacaggtatggctggtcttggcagaactaaagtttcccttccttctcaattttcctcagctttcagctttcttagaaaattcgccatttgcttgagttcttccactatgacaaatggtgtcatgttctttggtgatggcccttataattttggttatttgaactctgatctctccaaggttctcactttcacgcctctcattacaaatcctgttagcactgctccaagttatttccaaggggaaccctcagtagaatacttcattggggtgaaatccattagagtctctgacaaaaatgtaccattgaacacaacccttttgtctatagatagaaatggcattggtgggactaagattagt

SEQ ID NO: 26352 - DNA, 439 bp, Glycine max
  Clone ID: LIB3051-105-Q1-K1-E2
ctttcacgcctctattacaaatcctgttagcactgctccaagttatttccaaggggaacggtcagtagaatacttcattggggtgaaatccattagagtctctgacaaaaatgtaccattgaacacaacccttttgtctatagatagaaatggcattggtgggactaagattagtactgttaatccatacactgtcttggagaccacaatttacaaagctgtgtctgaggcctttgtaaaagcagtaggagcccctacagttgcacctgtggctccatttgggacttgctttgcaaccaaagacattcagtctacaagaatgggccctgctgtgcctgacataaatctagtgctgcagaatgaagtggtgtggagcatcattggtgcgaattcaatggtgtatactaatgatgtaatttgcttgggttttgtggatgct

SEQ ID NO: 26353 - DNA, 381 bp, Glycine max
  Clone ID: LIB3051-111-Q1-K1-D9
cgctgctgtgcctgacataaatctagttctgcataatgaagtggtgtggagcatcatgggtgcgagattcaatggtgtatactaatgatgtaatttgcttgggttttgtggatgctggatcagacccaagtacggcccaagttggatttgtggtgggttattctcaaccaattacttcaatcacaattggagcacatcagttggagaacaacatgctacaatttgacttggctacctcaaggcttggcttccgctccctcttcttggagcacgccaactgtgccaactttaactttacctcttctgcttagaatttgattattctactataatcaaaatttgcattgtaattaagatccatgtgtgtagacaaagttatta

SEQ ID NO: 26354 - DNA, 439 bp, Glycine max
  Clone ID: LIB3051-096-Q1-K1-F9
cccaacgcgtccggcacccatcaatggcaggcgtttctctcaagtgcggtgactgcggtgctcggctgagaaccgtagaagaagcgcaagagcacgctgaactcacctcccactccaacttctccgaatccaccgaaccggttctcaacctcatctgcaccgcttgctccaaaccctgccgatccaaaaccgagagtgatttgcacacgaaaagaaccggccataccgagttcgttgacaagacttccgaggccgttaaaccgattagtttggaggctccgaaggtggatgcaactgcttcatcggaaaacccttccgctgctgcatccactgaccaaaatgaagaaatggttgctcctgaagtggacaaaaagctgcttgaggaacttgaatccatggggttttcaacggcacgggcaacgcgggcgcttcattactc

SEQ ID NO: 26355 - DNA, 469 bp, Glycine max
  Clone ID: LIB3051-091-Q1-K1-A11
accacgcgttcggccgtattttctgctggtatatgaaggtggagaagagagcaggggaaggataatggtgacggaccaggatatatctaaaggggtggcgtctctactgcgtcactctggcccatactccataactacggttaacagtgtcgatcatcatcttgaggcctaactatggttagacctctatcacatggccatgttcatcagagaccagatcgaccatcttctacggactctatcacaagcattagatcctaactcttctacacttcacaaagactattttgcccctcacccccaaccgcactttccgaccacccactttccttcccattttgccctccatgacgagatcaactttcagcagcacccccgcgctcctacaccgtgcaaagttgagacctttcctcctcaaaatgctcacactgttgccccttctcaagtgcccaaagaaagtgttcaaact

SEQ ID NO: 26356 - DNA, 463 bp, Glycine max
  Clone ID: LIB3051-102-Q1-K1-B9
cccacgcgttcggccgtattttctgttggtatatgaaggtggtgaagagagaagaggaaggagaatggtgacggaccaggatatagcgaaaggggtggcgtctctactgcgtcactctgacccaaactccataactacggttaacggtgtcgatcagcatctggaggccaaactagggttagacctctctcacaaggccagtttcatcagataccagatcgaccatcttataccgtcaaaagcccaagcctttggtcctcaaccttcttcaattcacaaagactattttgccccttaaccccaaccggaatttccgaccacccactttacttaccattttgccctacatgacgagatcaacttacagcaacacccccgagcttctccaccgtgcaaagttgaaacctttccttctcaaaatgctcacacttgtgcccctactaagtgcccaaagaaagtgttc

SEQ ID NO: 26357 - DNA, 347 bp, Glycine max
  Clone ID: LIB3051-048-Q1-K1-C4
aagcaaccacttgatcggtctcttaaacttcctaacattcctgctgtcgattccgatcctacgaggcggaatatggctgaccagcagggcgaacaacaccgactgcctcaagttcctgcaatggccgctcatcatcatcggcgtcagcatcatggtcgcgtccctggcgggattcgacggcgcgtgttaccgcaacaccttactcatgcggctctacctcgtcgtcatgttcctggtcattgccgttctgatcgggttcatcatattcgcctacgttgtcaccgacaaggagtacggtcggagggtgatgaaccgtgcttacttggagtattatctcgaagactatt

SEQ ID NO: 26358 - DNA, 424 bp, Glycine max
  Clone ID: LIB3051-016-Q1-E1-A1
agagcagattgaaaagatgcgagaagttgttgaacttcccatgcttcatccagagaaatttgtcaagcttgggattgatcctccaaagggtgttctttgttatggccccccaggaactgggaaaacacttttagccagggctgtggctaataggactgatgcttgttttataagggttattggaagtgagctagttcagaaatatgttggtgagggggctaggatggttcgtgaactatttcagatggctcgttcaaagaaggcatgcattgtgttttttgatgaagttgatgcaattggaggtgcacgatttgatgatggcgttggtggtgacaatgaggttcagcgcaccatgcttgaaattgtgaatcagcttgatgggtttgatgctcggggaaacatcaaagttttgatggcaactaat

SEQ ID NO: 26359 - DNA, 406 bp, Glycine max
  Clone ID: LIB3051-039-Q1-K1-C5
gaactttgcaactttgagcagaaaatctcacagtcgaaggaagaaataatcaccaatggcaattgaacacgaagacgatctcaaagacgagaagaaccctcgacccctcgacgaggatgacatcgccctcctcaaaacctacggtttgggaccttattccacaagcataaaaaaggcggagaaggaaatcaaagatatggccaagaaagtgaatgacttatgtggtatcaaggagtctgatactggattagcagcaccaagccagtgggatcttgtttctgataagcaaatgatgcaggaagagcagcctcttcaggtggcacgatgcacaaagatcataaatccaaactctgaagatgccaaatatgttatcaatgtgaagcagatagcaaaagttgtgttgggc

SEQ ID NO: 26360 - DNA, 419 bp, Glycine max
  Clone ID: LIB3051-102-Q1-K1-F7
atggggtctgcgtccatttgtactactcaggaggttcgtgctgtggggcgtggtcaggcgagctgctgtttacaaggtctcgtccattgcttataaaagtggtgttcctgtgattgctgatggtggcatctcaaactctggtcatattgttaaggctttgtcattgggagcgtcaactgatatgatgggaagcttcttagctggtagtcttgaggctactggggcttatgtgtatcacaatggtcaacgtgtgaaaaagtacacatgaatgggttccctagaagccatgactaatgggagcgatgcaaggcacttgggtgatacagcagagctaaaaattgctcatggagttgtaggagctgctaaagataagggctctgtctagaatttcataccatacaccttgcaagcagacacgc

SEQ ID NO: 26361 - DNA, 448 bp, Glycine max
  Clone ID: LIB3051-026-Q1-K1-G6
aaaagccatccgaatttcccaattgtggcataggaatgccctcttgttctctatttcaccacacaaattcccaattctaacttggtttttttttgtctctcacacactcctttcaatctccaattaattacttttcttcaatttgaagcgtgtctgaagttggttgaagcattgtgttattgttctggttttggtctccgaggtttgtgtcggattccgatgtattatgtaaaagaagctgcgcatgtcgaccccatgttcgtagctgataacaccaaccccaaggattattacaaagtgctggaggttgaatatgatgcaaccgatgaaaatatcaaattaaattaccgaagactcgcgctgaaatggcatcctgacaagcacggaagagatagtgctgttactgcaaaatttcaagagataaatgaagcttacaatgtattaagtg

SEQ ID NO: 26362 - DNA, 404 bp, Glycine max
  Clone ID: LIB3051-016-Q1-E1-A5
agcttgcttcttgcttctattacttgcttctttcttcaccatgtcacttgctgggaaaatcaccactgaaattggggttcatgcaaccgctgcaaagtggttcaacctctttgcaacacaacttcatcatgttcaaaaccttactgatagagtacatggaaccaagctgcatcaaggtgaagactggcatcacaacgagacagtcaaacactggacttataccatagatggtaaggctacaacatgtctggagagtattgaatccattgatgaacagaacaaaacaatcacctacaagctcttcagtggagacattgatcataagtataagaaatttaagttcacctttcaagccattgataaggatcaaggcggtgcttttattaaatggacggttgaatatg

SEQ ID NO: 26363 - DNA, 369 bp, Glycine max
  Clone ID: LIB3051-032-Q1-K1-B8
cttcgggtggccggagcattctcgtccgcgattaaaggggctgcactttcccgatctttagggaaaagctcttacaacagagccctcattcgttctgctattgagctaaaccaaggtagagttgaaggccttcaaatcgagtaccttgatatttcgcctttgccccttctcaacaccgatcttgaggtgaatgggacctaccccccacaagttgaagactttctccagaagattctcgcagctgatagtatcctctttgcttcccctgagtacaattactctgtcgcaagtgctttaaagaatgcacttgactgggcatcaagggcaccaaatgtttgggctggtaaacctgctgccatagtgagtgct

SEQ ID NO: 26364 - DNA, 446 bp, Glycine max
  Clone ID: LIB3051-081-Q1-K1-C4
cccacgcgtccgcataactagaaggtaggaaatcatggcaccggtgcccgaagcatcctcgtgcgtgattaaggtggctgcactttccggatctttaaggaaaggctcttacaacagagccctcattcgttctgctattgagctaagccaaggtagagttgaaggccttcaaatcgagtacgttgatatttcgcctttgccccttctcaacaccgatcttgaggtgaatgggacctaccccccacaagttgaagcctttcgccagaagattctcgcagctgatagtatcctctttgcttcccctgagtacaattactctgtcgcaagtcctttaaagaatgcacttgactgggcatcaagggcaccaaatgtttgggctggtaaacctgctgccatagtgagtgctggaagaggctttggtggtggaagatcacaatatcatctac

SEQ ID NO: 26365 - DNA, 429 bp, Glycine max
  Clone ID: LIB3051-083-Q1-K1-B2
gttttacttctccatgctgcccaggctgctgcccttgaccttggacttgttccacaatctgagaaaagccttgagtctgcaaaatttgtatatttgatgggtgctgatgatgtaaacttagacaagatcccagatgatgcttttgttgtttatcaaggtcaccatggtgacaagagtgtttatcgagcaaattttattttgccagcagcagcattcagtgagaaggaaggaacctatgaaaataccgacggatgcacgcaacaaacattgcctgcagttccaacagttggtgactccagagatgattggaagataattcgagctctatctgaggtggcaggagtgcctttgccctatgatacaattggggccgttcgtgcccgaatcagtactgtagccccaaaccttgtgaacatggatgagagagaa

SEQ ID NO: 26366 - DNA, 363 bp, Glycine max
  unsure (1)..(363): unsure at all n locations
  Clone ID: LIB3051-109-Q1-K1-G4
cccacgcgtntcgccacgcgtncggttcttcacatgatcttcataactcttaatgtgtgtatgatttgcatccggggcgatcacatanagattcagtggagaagaaacaaagaatttccttatggttggtggtatggtgttgtaggccacttggagttatgcgatgggaatgaaaattactgccgttgtcatagtagtgacacagtggtgctagagttcaatcagtacactcctgactcgcgttggaggaagacaactattagtagaaaagatcatagagaggaaggaaatgaagcagatggtttttatggaggaatcagaaagattaagagtgagactgagatttccattttgaaaagcatt

SEQ ID NO: 26367 - DNA, 381 bp, Glycine max
  Clone ID: LIB3051-102-Q1-K1-A1
tgttctttttttttgccctatctaattagggttcccgcgatttcaaaccttaatttcttggattactctctctttccatctcatgcgttcttgctctcaacaacaatcacccaccgccatcgaagtcttcgttcttttcttcttcttcactctccttttttctctcgttcgagggttctttcgtggggaaccctgcagatttcaccactcgtgcacatgtccaaagttctcggcttttccggagttgacgatttttgcccgatgggatcaatatatgccaaccccaaggaagcaagtttcttcttgcctcttggccctcaagttgatgtatactttccttctcggaagagatcgcgtgtcaacactccattcgttttcgat

SEQ ID NO: 26368 - DNA, 368 bp, Glycine max
  Clone ID: LIB3051-037-Q1-K1-A8
ctcaaggagcccatcggagttgttgcattaattactccatggaactatcctctattgatggctacatggaaagttgctcctgctctagctgctggttgtacagcaatattgaagccatctgaattggcatctgtgacctgtttggagctggctgaaatatgcagagaagttggccttcctccaggggtattaaacattgttactggattaggcaatgaagctggtgctcctttgtcatctcatcctgacgtagacaagatttcctttactggaagctctgcaactggaagcaagattatgacagctgcaacacaacttaccaaacccggttcttttaaacctggtggaaaaaggccaatcattggttt

SEQ ID NO: 26369 - DNA, 440 bp, Glycine max
  Clone ID: LIB3051-041-Q1-K1-A9
caataacatagcatagagtgagaagtgagaagagaaaaatggcaatctccatacccagtagacaacttttcatagatggagagtggaaagtccctcttctcaacaatcggtttccgatcatcaaccccgctactgaagacatcatagggcatattccagccgctactaaggaagatgttgaccttgcggtggatgctgctaaaagagccttttcccataacaaaggcaaagattggtcttcagctcctggctctgttcgtgctcgctatcttcgagccatcgcttcaaagataacagagaaaaaggatgaactaggaaagcttgaagcaattgattgtggaaaaccactagatgaagcactggcagacctggatgatgttattggttgttttaactactatgccgagcttgcagaaggattggacgcaaagcaaaatgct

SEQ ID NO: 26370 - DNA, 401 bp, Glycine max
  Clone ID: LIB3051-063-Q1-K1-E10
tccacgcgtccgcaaaatttcagatccctttgaagaaggttgtaggctagggcctatggttagtgaaggacagtataaaaaagtgttgaattgtatctcaactgctaagagtgagggtgcaacaattctgattggagggtctcgcccagagcatttgaaaaaggggtactttgttgaaccaaccatcataactgatgtgactacctcgatgcaaatttggacagaagaagtttttggacctgtgctatgtgtgaaaacattcagtaccgaagaagaagctattgaactagcaaatgacacacactacggcttaaggtctgctgtaatgtcaaaagatctagaaagatgcgagcgcatatcaaaggctattcaagctggaattggatggataaattgtgctc

SEQ ID NO: 26371 - DNA, 408 bp, Glycine max
  Clone ID: LIB3051-094-Q1-K1-C6
atcttgggttgcttctttacaaagggtcagatatgcagggcaccatctggcttaatggtgcttgaaaggttagcaccagaatttgtgaatagacttgtgcaatgggccaaaaacatcaaaatttcatatccctttgaagaaggttgtaggctaggtcctattgttagtgaaggacagtataaaaaagtgttgaattgtatctcaactgctaagagtgagggtgcaacaattttgattggagggtctcgcccagagcatttgaaaaaggggtactttgttgaaccaaccatcataactgatgtgactacctcgatgcaaatttggagagaagaaagttttggacctgtgctatgtgtgaaaacattcagtaccgaagaaaaagctttttgactagcaaatgacacacac

SEQ ID NO: 26372 - DNA, 445 bp, Glycine max
  Clone ID: LIB3051-108-Q1-K1-B8
gaaatatgcagagaagttggccttcctccaggggtattaaacattgttactggattagggaatgaagctggtgctcctttgtcatctcatcctgacgtagacaagatttcctttactggaagctctgcaactggaagcaggattatgacagctgcagcacagctaacgaagcctgtttctctagagcttggtggaaaaagcccaatcattgtttttgaggatgttgaccttgataagactgctgaatggaccatctttggctgcttctttacaaatggtcagatatgcattgcatcatctcgccttattgtgcatgaaagtatatcaacagaatttgtgaatagacttgtgcaatgggccaaaaacatcagaatttcagatccctttgaagaaggttgtatgctaggtcctattgttagtgaaggacagtataaaaaagtgttga

SEQ ID NO: 26373 - DNA, 442 bp, Glycine max
  Clone ID: LIB3051-104-Q1-K1-D7
ctcacgctttctactattcttgcaatttccataaacatttacataaaagtatggagcactggatctatggccataggagaacctacaccgtctacgacgccgacaacggacttcaatcaatacggaaatgtttcaacggaaaaccatcgccaagcactcgtcgaaacctactactcggcaagtgtacctctgctacaagagtcacctgtcctgtccccctcgcatctaggcctccgactcctatcccttccccaagcgcgtcgccgacaccttcaaagcccgcaagaacgacttgcccctcaagacgaaaatcaccgtgtgcgaggtgcgtgaggaggctggcttcctcgacggtgacgtgttgattttccccgacatgatcaaatacaggggtttggaggaatcaaatgttgatagctttttcgaagatgttttggtgaat

SEQ ID NO: 26374 - DNA, 400 bp, Glycine max
  Clone ID: LIB3051-003-Q1-E1-E7
tgaagctagcttgaagcgtcttgatgttgaatacattgatctctattatcagcacagagtggacacatctgtacctatagaggaaacagtgggtgaacttaagaaattggtcgaagagggtaaagtcaaatatattggattatctgaagccagcccagatacaataaggagagcacacgcaattcatcccatcacagctgtgcaaatagagtggtctttgtggactcgtgacattgaagaagagatagtccctctctgcagggaacttggtattggaattgtaccatatagtcctcttggtcgtggcttttttggcggcaaaggagttgtggaaaatgtgccgacaaatagctccctgaaagcacatccacgctttcagcgccagaacttagacaagaac

SEQ ID NO: 26375 - DNA, 429 bp, Glycine max
  Clone ID: LIB3051-004-Q1-E1-A7
accacgcgtccgcccacgcgtccagcccagattcaaccagttaaacttggaacccaaggctttgaggtttcaaaattgggattcggatgtatgggccttactggagcgtacaatgaccctctccaagaacaggatggcatatctgttatcaagtatgcgttcagtaagggaatcacattttttgatactgcggatgtttatggagccaatgctaatgaacttttggttggaaaggctttgaagcagctgcccagagaaaagattcagatagccacaaaatttggtattgcttcacgaggttttcctgatatgaagattaagggttcgcctgaatatgtgcgatcatgctgtgaagctagcttgaagcgtcttgatgttgaatacattgatctctattatcagcacagagtggacacatctgtacctata

SEQ ID NO: 26376 - DNA, 436 bp, Glycine max
  Clone ID: LIB3051-004-Q1-E1-F7
aacatctgcaagcatttcagcttgataaccatcggtttgaggtactattaaatacataacgtgcgcttattttgataattgatacaattaatctcattctaggtttcaaaattgggattcggatgtatgggccttactggagcgtacaatgaccctctccaagaacaggatggcatatctgttatcaagtatgcgttcagtaagggaatcacattttttgatactgcggatgtttatggagccaatgctaatgaacttttggttggaaaggctttgaagcagctgcccagagaaaagattcagatagccacaaaatttggtattgcttcacgaggttttcctgatatgaagatcaagggttcgcctgaatatgtgcgatcatgctgtgaagctagcttgaagcgtcttgatgttgaatacattgatctctattatc

SEQ ID NO: 26377 - DNA, 336 bp, Glycine max
  Clone ID: LIB3051-031-Q1-K1-G4
tcgacgcacgcgtccggtcatcatgaattgagggtaacaaggctggcaaaggctaatatcaggatgctatttagatatcaataatgtagcccttcttgatgttggacttcctagatatttggttggttaaaatttttaatttagactgtaatactattttatatgcaacagataattatgagcagtttcgaaggcaaaaaaaaaaaaaaaaaaaaaaaaaaaaaaaaaaaaaaaaaaaaaaaaaaaaaaaaagaaggaagaattaaaggataaaaaaattaataactctattaagggacgtaatatttttggtatagagttatggatattcattca

SEQ ID NO: 26378 - DNA, 384 bp, Glycine max
  Clone ID: LIB3051-042-Q1-K1-E3
aaatgactcaagcccagattcaaccagttaaacttggaacccaaggctttgaggtttgaaaattgggattcggatgtatgggccttactggagcgtacaatgaccctctccaagaacaggatggcatatctgttatcaagtatgcgttcagtaagggaatcacattttttgatactgcggatgtttatggagccaatgctaatgaacttttggttggaaaggctttgaagcagctgcccagagaaaagattcagatagccacaaaatttggtattgcttcacgaggttttcctgatatgaaaatcaagggttcgcctgaatatgtgcgatcatgctgtgaagctagcttgaagcgtcttgatgttgaatacattgatctctatt

SEQ ID NO: 26379 - DNA, 415 bp, Glycine max
  Clone ID: LIB3051-063-Q1-K1-F9
ctcaagcccagattcaaccagtttcaaaattgggattcggatgtatgggccttactggagcgtacaatgaccctctccaagaacaggatggcatatctgttatcaagtatgcgttcagtaagggaatcacattttttgatactgcggatgtttatggagccaatgctaatgaacttttggttggaaaggctttgaagcagctgcccagagaaaagattcagatagccacaaaatttggtattgcttcacgaggttttcctgatatgaagatcaagggttcgcctgaatatgtgcgatcatgctgtgaagctagcttgaagcgtcttgatgttgaatacatcgatctctattatcagcacagagtggacacatctgtacctatagaggaaacagtgggtgaacttaagaaattggt

SEQ ID NO: 26380 - DNA, 418 bp, Glycine max
  Clone ID: LIB3051-080-Q1-K1-F2
ccagattcaaccagttaaacttggaacccaaggctttgaggtttcaaaattgggattcggatggatgggccttactggagcgtacaatgaccctctccaagaacaggatggcatatctgttatcaagtatgcgttcagtaagggaatcacattttttgatactgcggatgtttatggagccaatgctaatgaacttttggttggaaaggctttgaagcagctgcccagagaaaagattcagatagccacaaaatttggtattgcttcacgaggttttcctgatatgaagatcaagggttcgcctgaatatgtgcgatcatgctgtgaagctagcttgaagcgtcttgatgttgaatacattgatctctattatcagcacagagtggacacatctgtacctatagaggagacagtgggt

SEQ ID NO: 26381 - DNA, 285 bp, Glycine max
  Clone ID: LIB3051-088-Q1-K1-H5
cccagattcaaccagttaaacttggaacccaaggctttgaggtttcaaaattgggattcggatgtatgggccttactggagcgtacaatgaccctctccaagaacaggatggcatatctgttatcaagtatgcgttcagtaagggaatcacattttttgatactgcggatgtttatggagccaatgctaatgaacttttggttggaaaggctttgaagcagcttgccagagaaaagattcagatagccacaaaatttggtattgcttcacgaggttttcctgata

SEQ ID NO: 26382 - DNA, 436 bp, Glycine max
  Clone ID: LIB3051-102-Q1-K1-E5
gtcttgatgttgaatacattgatctctattatcagcacagagtggacacatctgtgcctgtagaggaaacagtgggtgaacttaagaaattggtcgaagagggtaaagtcaaatatattggattatctgaagccagcccagatacaataaggagagcacacgcaattcatcccatcacagctgtgcaaatagagtggtctttgtggactcgtgacattgaagaagagatagtccctctctgcagggaacttggtattggaattgtaccatatagtcctcttggtcgtggcttttttggcggcaaaggagttgtggaaaatgtgcctacaaatagctccctgaaagcacatccacgctttcaagccgagaacttagacaagaacaagaatatatatgaacgaattgaaggccttgctaagaagcatcaggccactcc

SEQ ID NO: 26383 - DNA, 439 bp, Glycine max
  Clone ID: LIB3051-102-Q1-K1-E6
aaaatgactcaagcccagattcaaccagttaaacttggaacccaaggctttgaggggtcgaaattgggattcggatgtatgggccttactggagcgtacaatgaccctctccaagaacaggatggcatatctgttatcaagtatgcgttcagtaagggaatcacattttttgatactgcggatgtttatggagccaatgctaatgaacttttggttggaaaggctttgaagcagctgcccagagaaaagattcagatagccacaaaatttggtattgcttcacgaggttttcctgatatgaagatcaagggttcgcctgaatatgtgcgatcatgctgtgaagctagcttgaagcgtcttgatgttgaatacattgatctctattatcagcacagagtggacacatctgtacctatagaggaaacagtgggtgaactta

SEQ ID NO: 26384 - DNA, 455 bp, Glycine max
  Clone ID: LIB3051-106-Q1-K1-C6
caaaatgactcaagcccagattcaaccagttaaacttggaacccaaggctttgaggtttgaaaattgggattcggatgtatgggccttactggagcgtacaatgaccctctccaagaacaggatggcatatctgttatcaagtatgcgttcagtaagggaatcacattttttgatactgcggatgtttatggagccaatgctaatgaacttttggttggaaaggctttgaagcagctgcccagagaaaagattcagatagccacaaaatttggtattgcttcacgaggttttcctgatatgaagatcaagggttcgcctgaatatgtgcgatcatgctgtgaagctagcttgaagcgtcttgatgttgaatacattgatctctattatcagcacagagtggacacatctgtacctatagaggaaacagtgggtgaacttaagaaattggtcgaag

SEQ ID NO: 26385 - DNA, 409 bp, Glycine max
  unsure (1)..(409): unsure at all n locations
  Clone ID: LIB3051-114-Q1-K1-C2
gggtgaacttaagaaattggtcgaagagggtaaagtcaaatatattggattatctgaagcgagcccagatacaataaggagagcacacgcaattcatcccatcacagctgtgcaaatagagtggtctttgtggactcgtgacattgaagaagagatagtccctctctgcagggaacttggtattggaattgtaccatatagtcctcttggtcgtggcttttttggcggcaaaggagttgtggaaaatgtgcctacaaatagctccctgaaagcacatncacgctttcaagccgagaacttagacaagaacaagaatatatatgaacgaattgaatgccttgctaagaagcatcangccactcctgcccagttggcaataacatgggtacttcaacaaggcgaggatgtt

SEQ ID NO: 26386 - DNA, 440 bp, Glycine max
  unsure (1)..(440): unsure at all n locations
  Clone ID: LIB3051-116-Q1-K1-D8
caaaggagttgtggaaaatgtgcctacaaatagctccctgaaagcacatccacgctttcaagccgagaacttagacaagaacaagaatatatatgaacgaattgaaggccttgctaagaagcatcaggccactcctgcccagttggcattagcatgggtacttcagcaaggcgaggatgttgtacctatccctggaacaactaagattaagaacctggatcaaaacataggtgccttagcagtgaaactgtcagaaaaagacctgagagaaatttctgaggcggttcccattggtgatgtagcaggtggtagatactacaatggattggatcacttttcatggaagtatgctaacacacctncaaaagattcaaaaatctcaacctgacgcacccaaccaaccctttggttagggaatctaccaagtcatcatgaattga

SEQ ID NO: 26387 - DNA, 389 bp, Glycine max
  Clone ID: LIB3051-098-Q1-K1-A9
gattaatcagggaaatagccaccgagtgtggagtggactttgatgaggatcctgctgctgtggttgtggatcattcggcatatgcagtctctgctactgaaggagatcatacattgattgctagtgatgattttatcaagtctgacgtcatatttggaagcaaaaaaattgaggctccagtacttttccaggggattgggcattcactaaatcctaccaatagcctggtgttgaaagttctttttgcatctccttcagccttttctgctaacccaaaatctaaagtgacaagtcctccatcactcactggaacttcaatctcattagtttcaattatacaggcaagatataatgcccggatattgatctctggcttaatgagcttgttc

SEQ ID NO: 26388 - DNA, 418 bp, Glycine max
  unsure (1)..(418): unsure at all n locations
  Clone ID: LIB3051-004-Q1-E1-B12
cccacgcgtccgtaattggaagcagagaattaccataccagagattaaaatgcacccttggttcctaaagaatttgccactagaatttatggacgagggcgaaggggtgttgcagaatgatgatcatgtgaatgaagagtcatctgaaatcactcaaagcattgaagaaatactggccatagttcaagaggctaggaaaccgggtgagggcccaaaagttggtgagcaatttgttgggggcagcatggacctcgatgatattgatgcggatgctgacatcgatgacattgagacaagcggtgattttgtctgtgcattgtgaatgatgatgcttgcactttgcacactatttctccctcaaaagcagtttaagataagatgttgttccttgacgagatagatanggaagaatcaaaca

SEQ ID NO: 26389 - DNA, 439 bp, Glycine max
  Clone ID: LIB3051-054-Q1-K2-B11
cccacgcgtccggatctttcttcagtcatctgttttgcactcccagccaaaatcaacggtaggaacccctgcctatattgcaccagaggttttgtcaagaagagaatatgatgggaaggtcgcggatgtttggtcttgtggggtgaccttatatgtgatgttggttggagcatatccttttgaagacccagaagacccaagaaacttcagaaaaacacttcagcgaattcttagtgtccactattcaattccagactatgtacgaatcagtaaagagtgtaggcaccttttgtctagaatatttgtggccaacccggaaaagagaattaccataccagagattaaaatgcacccttggttcctaaagaatttgccactagaatttatggacgagggcgaaagggtgttgcagaatgatgatcatgtgaatgaagagtca

SEQ ID NO: 26390 - DNA, 342 bp, Glycine max
  unsure (1)..(342): unsure at all n locations
  Clone ID: LIB3051-067-Q1-K1-G8
caacgaggccttcgatttcaatgtcgcgctctccgatcacgagaagtacgtccgccgcgagcgcgagaaggaggccggccacggtgccgccgccgccgtcgaggagtcgcagatcgacattcaccccgccgtcaatcacaggctcaaggaaggggaaaccattaggattaatgtgaagcacatatcaactagtggaactggcatgctttcagctgctggcctaaccggtgggcatgctgcaacaccaaagccaaaaaccgtgagtcttgctcccccaccaagtggagctgggaaaatcaggtctnctcttccaccnccaccaaatgatcccgttgctgttcg

SEQ ID NO: 26391 - DNA, 345 bp, Glycine max
  Clone ID: LIB3051-113-Q1-K1-H5
ggatatctctctattacatgatcgatcattcatagcatagtgtgaaatttgagcgagacgctaagaagaagaagaagaagaagaagaagaagaagatgctcgagaagatgggggtgaacacgaaagccgaggccgccagggctcgtaagagcgcggcggatacggagcggaaggagaaggagagtcgagagaaggaggaccagtactggctagaggcggaaggttcaaagtcacgcgccgcgaagaagaaggaggaagaggccgaaaagagggcggaagcagccgcgcggaaagcggatgcgcgacggttggcggagcatgaggagaaggagctggagaagtcga

SEQ ID NO: 26392 - DNA, 406 bp, Glycine max
  Clone ID: LIB3051-105-Q1-K1-D6
gcattttgcagaaaatggaagaattatggggagcttgacaggaataccaactgataaaattgctgacaaattttggttggtcttccaagcacttggtgacattgcctttgcctatccatactccattctccttcttgagatccaggacactctagagtctccttcaccagaaaatcaaacaatgaaaaaggcttccatggttgcaatcttcattacaacattcttctacctgtgctgtggatgctttggatatgcagcttttggaaatgatacaccaggaaacctcttgacagggtttggattttttgagcctttctggctcattgaccttgctaatgcttgcatcattcttcacttggtgggaagatatcaagtactattaatggtacctatcaaaattaacttt

SEQ ID NO: 26393 - DNA, 384 bp, Glycine max
  Clone ID: LIB3051-050-Q1-K1-F5
cccacgcgtccgcccacgcgtccgcggggaatttttgtagaaacccttacaacgtgactggggtttgtaaccgaagctcgtgccctttggctaatagtcgctatgccaccattcgcgacgacaatggagtgttttacctttacatgaaaactattgaaagagctcatatgccgaaagatttgtgggaaagagtaaagcttcctaggaattacgagaaggcacttgaaatcatagataaacatctgatgtattggcccaaacttcttatacacaagataaagcaacgtttgaccaaaatgacacagatgcggatacgtatgaggaaacttgctttgaagacaagggagaaaataatgacaactccaaggaaagagaaaaagagag

SEQ ID NO: 26394 - DNA, 423 bp, Glycine max
  Clone ID: LIB3051-032-Q1-K1-F11
cccacgcgtccggtgcttgaaaaaatctgcaacttttccaattcctaatacaatgttgccttcaagcccatctgataaggaggctgatacttcagtcacaggaccactcaatgagcattctgctcatcaaacttactcactctcagtatctccgcctgctcctctgaagcttatatctgccatgaaaggtagccgtgagaaacatgggggatcacaggtgaaattgaatgtgaaatgggcctctgatgtgtatgatcctatacctacattattatcacacactgttagaagcaacaagaagcagcagaaatccaggaagaagaagcctgaaaagaagaatggaaagaagggtcaaaagggaaattcatctcgagggggcagcaacaaagattagcaggttcgcaagctaggtgggacttctgg

SEQ ID NO: 26395 - DNA, 429 bp, Glycine max
  Clone ID: LIB3051-035-Q1-K1-F10
gtatgatcctatacctacattattatcacacactgttagaagcaacaagaagcagcagaaatccaggaagaagaagcctgaaaagaagaatggaaagaagggtcaaaagggaaattcatctcgagggggcagcaacaaagataagcaggttcgcaagctaggtgggacttctggtttgtgctacaagtcaatggattcttgtgataaagtgcttggagcttctactgaattagatgctcttgaagttcgaagccaggattcatactgtggaactagcttcctgaaaaaatcagttactgaagtgcactactcggttgcagaagcactatgagtgaaatactctgaatgtcttttcctatttccttgaatgtacataaataagcgatattttgctgttggcttatttggtggaaaaattaaaagaaaaag

SEQ ID NO: 26396 - DNA, 430 bp, Glycine max
  Clone ID: LIB3051-026-Q1-K1-G5
ttcttaggttaaaagttggaactgagtgattacccaactaatgttatgatcagttggaagcgttggcaagaaagaatacgtaatagtggtgttgtttgttcattttggtcaaagaaatagtatctgggtacccaggatattgtagttgtaagatgggttatctcaattcagttttgtcatcttcaagccaggttcatgttgcagatgatgcaattgtgagcggcgggggtctaagtcacaatggaaaattcagctacgggtatgctagctctcctggcaagagatcttcaatggaagatttttatgagacaagaattgatggtgttgaaggtgaaattgttggccttttcggagtttttgatggtcatggtggtgctcgtgctgctgagtatgtcaagaaaaacctgtttagtaatttgatcagtcaccc

SEQ ID NO: 26397 - DNA, 449 bp, Glycine max
  Clone ID: LIB3051-086-Q1-K1-G7
gcaataactgatgcatataatcataccgattctgagttgctgaaatcagaaaatggccataatggagatgctggatcaactgcttccactgctattttagttggtgaccgcttgcttgttgcaaatgttggggattccagagctgttatatgcagggttggtaatgccattgctgtttctcgagatcacaagcctgaccaaactgatgagaggcaaaggattgaagaagcaggaggctttgttatgtgggctggaacttggagagttggaggtgttcttgctgtttctcgtgcgtttggtgatagactcctgaagcagtatgttgttgctgatccagaaattcaggaagaaaaaattgacagctcccttgagtttcttattctggccagtgacgggctatgggatgttgtcacaaatgaggaagctgttgctatgattaaatcaattga

SEQ ID NO: 26398 - DNA, 435 bp, Glycine max
  Clone ID: LIB3051-065-Q1-K1-H12
cccacgcgtccggagtgccctagttccaggaggcattcgcattggggcaccagcaatgagaacaagaggacttggtgagaaagaattttcactcattgctgatttcattcatgagggtgtgcaaataagtcttgaagccaaaagtttggtctcaggaacgaagctccaagattttttgaagtttgtaacatcttctgaatttcctttgggagagaaggtatcagagttgcgtaggaaagttgaagctcttactactcagtatccaatacccggagtctaagtgtacccgcataatgaatacttaaaactaagacgctgttaaaaaattttgtacaataatcatgcttcgatgtgtgttgctaataatatgttgtaacattttatggcaaatgcagcagcagctttatgattatcccatttataattggaagcaaa

SEQ ID NO: 26399 - DNA, 376 bp, Glycine max
  Clone ID: LIB3051-075-Q1-K1-F5
caaaatcagccatggtttcaaatggtaggatgctgtgttcaagcttgattacagcacgtccgtgatcctccctctccagaactactccatcctacttctgctcatttccttctcgtagaatcatcttcacgccaagaattggatcatctccggccccggcccaggcccaggcccagcccaaggaagccaagctctggggtggcaggttcgaggagggcgtaaccgacgttgtggagaggttcaccgagtcgatctccttcgacaagaagctctacaaacaagacatcacgggaagcagagcacacgcttcaatgctcgctcaccagggtttgataagcgagattgacagagactctattcttcaaggattggatga

SEQ ID NO: 26400 - DNA, 342 bp, Glycine max
  Clone ID: LIB3051-113-Q1-K1-F2
caagatggttctgctagagaagctctgggatgacgttgttgctggccctcaacgtgagcggggccttggcaagctcagaaaactcaccaccctcaaaactattgatgaaggagacagtagcaagctgcagaagacgttgtcgatgccgtcgacaccgacaaccccgatgactgccacgactacaacgacaccgggatccgctcgtaaagctgacaacttttggaggagcgtcttccatcctgggagcaacatacgcacagataccaactgtgctcaaatgattgacaaacccctttgcaacgcttccaatggctacgactggctttacagtggggataccag

SEQ ID NO: 26401 - DNA, 418 bp, Glycine max
  unsure (1)..(418): unsure at all n locations
  Clone ID: LIB3051-044-Q1-K1-D7
ggaggcacaccatttttgcgcgcaccagaacgaggagatgaggcagtgccttatgtacgacagccccgagaagaaagccaggctcatagggctggaatacatcatctccgaaaacctttacttgacactccccgaccaggagaagcgtctgtggcactctcacttgtacgaggtcaagagtggcctcttcttcatgcctaaggttcctgctctcattcagcgcccagacatggagactgtctgcaccacttatggcaaagtctttcatttctggcaggtcgataagggtcactctcttccatttgggatacctcagctcatgatggctctcactagagatggccagatctatgatcacctnctccaaagtcagcagagcgcatggggatagactatgaggaagaaagaaaagcgagag

SEQ ID NO: 26402 - DNA, 318 bp, Glycine max
  Clone ID: LIB3051-048-Q1-K1-D7
cagtagttgagtctagttgtttcccttaaagccatggaatattctccattgtccattgggattaccttctttgtgttcttgctcttgcattggctagttaaaacttacaagcaaaaatcgagtcacaagttgccccctggcccatggaggttacccatcattggtaacctccatcagctagcattagcagcttcacttcctgatcaagctctccaaaaacttgtccgcaaatatggacctctcatgcaccttcaactaggtgaaatttcaacactttgtgtgtccttccccaagatggctatggagatgatgaaaacc

SEQ ID NO: 26403 - DNA, 445 bp, Glycine max
  Clone ID: LIB3051-096-Q1-K1-E12
ggattctcagcaaacaatgaactcctgagaccagtagttgagtctagttgtttcccttaaagccatggaatattctccattgtccattgttattaccttctttgtgttcttgctcttgcattggctagttaaaacttacaagcaaaaatcgagtcacaagttgccccctggcccatggaggttacccatcattggtaacctccatcagctagcattagcagcttcacttcctgatcaagctctccaaaaacttgtccgcaaatatggacctctcatgcaccttcaactaggtgaaatttcaacacttgttgtgtcctcccccaagatggctatggagatgatgaaaacccatgatgttcattttgtgcagaggccccaacttctggctccacaatttatggtctatggggcaacagatattgcttttgctccatacagtgattat

SEQ ID NO: 26404 - DNA, 364 bp, Glycine max
  Clone ID: LIB3051-029-Q1-K1-H3
ctcggcacctcgaactcaacacactcttcgaaactctggatctgttcttctgcttctaagagacaacattctcttcttgaatctcaatctctcggaaactaaaccctaagaacagacaaagatggtttacaccatctcgggaattcgatttccggttcttccttcgctgcacaactcccgcttccgtggcgatcgcagaactgcgtctcttcccgtttttctcagaaacaactccttctctcgtaaaacccttgctctaaaatcttcccatgattctgattccttgtcttctgcgattgccaaatctgataaagtacttattcctcaagatcaagataactctgcatccttgacagatcaactt

SEQ ID NO: 26405 - DNA, 385 bp, Glycine max
  Clone ID: LIB3051-051-Q1-K1-D10
aacacactcttcgaaactctggatctgttcttctgcttctaagagacaacatgctcgtcttgaatctcaatctctcggaaactaaaccctaagaacagacaaagatggtttacaccatctcgggaattcgatttccggttcttccttcgctgcacaactcccgcttccgtggcgatcgcagaactgcgtctcttcccgtttttctcagaaacaactccttctctcgtaaaacccttgctctaaaatcttcccatgattctgattccttgtcttctgcgattgccaaatctgataaagtacttattcctcaagatcaagataactctgcatccttgacagatcaacttgaaactcctgatataacctcagaggatacacagaactt

SEQ ID NO: 26406 - DNA, 323 bp, Glycine max
  Clone ID: LIB3051-051-Q1-K1-D11
aacacactataaaaaactaaagagaatatgaaaaaaagataataaaaaacaacatgataggaaagaatataaatatgtaggggactaaaccctaagaacagacaaggatggtttacaccatctagggaattcgatttccggatcttccttcgctgcacaacttccgcttacgtggcgatcgcagaactgcgtgtcttcccggggatctcagaaacaactccttctctagtaaaacccttgctctacaattttcccatgattctgattgcttgtcttctgcgattgccaaatctgatagagtacttattcctcaagatcaagat

SEQ ID NO: 26407 - DNA, 426 bp, Glycine max
  Clone ID: LIB3051-039-Q1-K1-H12
cttgactcgtttattttaaatctaattaggtttttcttgaggtttaagttataatatcagcaactatggatgataagcaagaaaatttgttaacgttgtccttgcctagccaattggtatcaattgatgaggaactatggcggatggctgaagacagggtgcaagagatactatggacaattgaaccaaatgttttatctgaagtgaacagaaaggatgttattgactatgttcagaggctgattaaaggttactatggagcaaaggtcttgccattcggttctgttccactaaaaacctatcttcctgatggagatgttgatttgacaactctcattcatgaagatgcagaggaggatttggcacaagcaatatgcaatatacttaaaagtggagatgactctgaataccaagtaaaagacatac

SEQ ID NO: 26408 - DNA, 431 bp, Glycine max
  unsure (1)..(431): unsure at all n locations
  Clone ID: LIB3051-091-Q1-K1-F5
cttttcttttccgctcccgtaggaatcgaagatttataattccaatcatatatagtaatggtaacatcgtagtataatctgattcatcaacagcgcttgtcggaaacagagtcggtttagtttgttagttagttgtttaatgaacgcaattcggtcccgttggttgacgagaatggcagaagacattgggaaaagcaacctcgaatcctcttctgcttcaacaacttcccgaggcttctggccttctgtcttacgttggatcccctcttccaccgatcacatcatcaatgctgaaaaacgccttctctctcttgtcaagactccgtatgctcaagaacaggtcaatataggttccggtccacncatgatttccaaagttagatggttccgttcatctagcaatgaaccacggtttattaacacggttacat

SEQ ID NO: 26409 - DNA, 423 bp, Glycine max
  unsure (1)..(423): unsure at all n locations
  Clone ID: LIB3051-004-Q1-E1-F12
atttttgtgtgctcttggattggttgttagaatggagggtcagagtaagggtagttttaatgtgatggaagggagtgagggcaaaggaagggagtttgtggtggaaaagtctgcatcatcaatagtgggaacttgtgatttggttctaaggattttggcctttttactaacccttgtggctgctgtagttattgggacagataagcaaactgccattgttccaatcaagcttgtggattctatgccaactttgtacgttcctgttgcagctaagtggcattacttgtctgcctttgtctattatgtgggggcaaatgcaatagcatgtgcatatgcaatactgtctctcttgctcactcttgcaaatangcgtaaaggcaaaggaacgatggaaacattgatcactgtgctggacacagtaat

SEQ ID NO: 26410 - DNA, 423 bp, Glycine max
  Clone ID: LIB3051-017-Q1-E1-G11
ccacgcgtcaggtttatgtgtgctcttggattggttgttagaatggacggtcagagtaagggtagttttaatgtgatggaatggagtgagggcaaacgaatggagtttgtggtggaaaagtctgcatcatcaatagtgggaacttgtgatttggttctaaggattttggcctttttactaacccttgtggctgctgtagttattgggacagataagcaaactgccattgttccaatcaagcttgtggattctatgccaactttgtacgttcctgttgcagctaagtggcattacttgtctgcctttgtctattatgtgggggcaaatgcaatagcatgtgcatatgcaatactgtctctcttgctcactcttgcaaataggcgtaaatgcacaggaacgattgagacattgatcactgtgctg

SEQ ID NO: 26411 - DNA, 450 bp, Glycine max
  unsure (1)..(450): unsure at all n locations
  Clone ID: LIB3051-035-Q1-K1-G8
gtttctctcacattacaatgtagtcagtctattgggcttagggtgccaccataatactattaattctcacacataacatataaaataaagttgtggataattaaccacattaaatttattgattcagtgattaaagactcctaggcaccttaagttgtctgtttaagtctcaaaacaggaggaactatcagcagcaagaggaatgctattgatccaagcagtgatatgaaaagggaagcagccacttggtcacaaaatttcccaaactcattgcacactttgttccaatgcacatgtgagtttccttgcaagccaaggagaccaaccgtcatggcggctacgttgccgggagagagcaaagctaccattactgtgtccaacacagtgatcaatgtctncatcgttcctttgcctttacgcctatttgcaagagtgagcaagagagacagt

SEQ ID NO: 26412 - DNA, 374 bp, Glycine max
  Clone ID: LIB3051-058-Q1-K2-C8
cccacgcgtccggtttttgtgtgctcttggattggttgttagaatggacggtcagagtaagggtagttttaatgtgatggaagggagtgagggcaaaggaagggagtttgtggtggaaaagtctgcatcatcaatagtgggaacttgtgatttggttctaaggattttggcctttttactaacccttgtggctgctgtagttattgggacagataagcaaactgccattgttccaatcaagcttgaggattctatgccaactttgtacgttcctgttgcagctaagtggcattacttgtctgcctttgtctattatgtgggggcaaatgcaatagcatgtgcatatgcaatactgtctctcttgctcactcttg

SEQ ID NO: 26413 - DNA, 424 bp, Glycine max
  Clone ID: LIB3051-079-Q1-K1-D2
cccacgcgtccgattagctattatgtgggggcaaatgcaatagcatgtgcatatgcagtgactgtctctcttgctcactcttgcaaataggcgtaaaggcaaaggaacgatggagacattgatcactgtgctggacacagtaatggtagctttgctcttctccggcaacggagccgccatggcggttggtctccttggcttgcaaggaaactcacatgtgcattggaacaaagtgtgcaatgagtttgggaaattttgtgaccaagtggctgcttcccttttcatatcactgcttggatcaatagcattcctcttgctgctgatagttcctactgttttgagacttaaacagacaacttaaggtgcctaggagtctttaatcactgaatcaataaatttaatggggctaattattcacaacttt

SEQ ID NO: 26414 - DNA, 441 bp, Glycine max
  Clone ID: LIB3051-093-Q1-K1-F5
gagtttttgtgtgctcttggattggttgttagaatggagggtcagagtaagggtagttggaatgtgatggaagggagtgagggcaaaggaagggagtttgtggtggaaaagtctgcatcatcaatagtgggaacttgtgatttggttctaaggattttggcctttttactaacccttgtggctgctgtagttattgggacagataagcaaactgccattgatccaatcaagcttgaggattctatgccaactttgtacgttcctgttgcagctaagtggcattacttgtctgcctttgtctattatgtggaggcaaatgcaatagcatgtgcatatgcaatactgtctctcttgctcactcttgcaaataggcgtaaaggcaaaggaacgatggatacattgatcactgtgctggacacagttatggtagccttgctcttc

SEQ ID NO: 26415 - DNA, 413 bp, Glycine max
  unsure (1)..(413): unsure at all n locations
  Clone ID: LIB3051-093-Q1-K1-F9
cccacgcgtccgacaagttctctgagttgttttgtgagatagcacatagcatagcaaggaaggagtattacaaccgaaaccctgaagaaaaaaagagtagaggaagaaaaaacacctgcaccaccaacgatgggtgtggattactacaagatcttgcaggttgataggagcgccaaagacgacgacttgaagaaagcttataggaaacttgctatgaaatggcaccctgataagaaccccaacaacaagaaagaagctgaagctaagtttaagcagatttccgaagcatacgaggtacttagtgatccccaaaagagagcaatctatgatcaatatggagaagaaggtctgaagggtcaggttcctnctnctgatgctggtggtgctggaactggaactatcttcttcttcac

SEQ ID NO: 26416 - DNA, 437 bp, Glycine max
  Clone ID: LIB3051-102-Q1-K1-G5
acaatttctctgagttgttttgtgagataatagcacatagcataacaagggaaggagtattaacaaccgcaaacctgaagagaaaaagagcagcagaagaagaaacaccaacgatgggtgtggattactacaagatcttgcaggttgataggagcgccaaagacgatgacttgaagaaggcttataggaaacttgctatgaaatggcaccctgataagaaccccaacaacaagaaagaagctgaagctaagtttaagcaaatttccgaagcatatgaggtacttagtgatcctcaaaagaaagctatctatgatcaatatggggaagagggtctgaagggtcaagttcctcctcctgatgctggtggtgctggaactggaactactttcttctccacaggagatatgccgggatcgtttcggttcaatccgaggaat

SEQ ID NO: 26417 - DNA, 308 bp, Glycine max
  Clone ID: LIB3051-002-Q1-E1-H2
cgtctgggcacgatgtcacagaacaacaaaaggatgttggaaggaaaagctatggtgaaagaaacagacatgtcacccaagatgcagatccatgccatggcctctgcttctcaggctcttgatctctacgatgtttatgattgcatctctattgctgcccatatcaagaaggaatttgatagtgtgtatgggaatgggtggcaatgtgtggtgggatccaattttgggtgctatttcacccattcatcatggactttcatctattttgctctggagacccttaagttttcttatctttaagggaacat

SEQ ID NO: 26418 - DNA, 421 bp, Glycine max
  Clone ID: LIB3051-094-Q1-K1-D8
agctgctgggcttgtacttggtgtcataggacttgtactgctcgagttacctgccctatcatttgatgaaagcaacttctcactatggggaagtggtgagtggtggatgctacttgcagctcagagtatggcaattggcacggtcatggtccggtgggtctccaagtactctgaccctgtcatggctactggatggcatatggttattggtggtctcccacttgtgctattcgcagttcttaacaatgaccccgcagtgagtttgagtctcaaagagtacagttcgactgatatattggcactcctgtacacatccatttttagaagcgcagtcagctatggtgtgttcttttatagtgcaactaaaggtagcttgaccaagctcagttcacttacgtttatgaccccaatgtttgcttca

SEQ ID NO: 26419 - DNA, 429 bp, Glycine max
  Clone ID: LIB3051-102-Q1-K1-F5
ctttgtagtgcattggaatggaagatcagggtcagcagcagcagcagcagcatcaagtgggggcaaagagtccaaggcaaggcaccgagaggagtgaagcggttcggtcaaggtggactccaaagccagaacaaatcctcatactcgagtccatcttcaacagtggcatggttaaccctccaaaggacgaaaccgtcagaataaggaagcttctcgagaaattcggcgccgtcggcgacgccaacgtcttctactggttccagaaccgccgctccagatcccgccgccgccagcgccagatgatgcaacagcaggctactgccaccgccaccgccaccgtcaccacctttgatcaccctcagcctcagactcagactcttgttaatgttggtggtgcaattccacatgatcaccacaccttgggaaacc

SEQ ID NO: 26420 - DNA, 481 bp, Glycine max
  Clone ID: LIB3051-083-Q1-K1-A8
aattgattgccgaatttgtggtgatccacattcagttctccgttttgcttttgttgagtttgcagatgagtatggtgcaaggactgctctaaatcttgggggtaccgtgcttggatactatccggtcagggttcttccttcaaaaactgccattcttccggtgaatcctacattcctccctaggtcggatgatgagcgtgaaatgtgtgcccggactatctattgtacaaatattgataaaaaggtttctcaagctgaagtgaagaatttttttgaatcagcttgtggcgaggttatgcgccttaggcttttaggggaccaagtgcattcaactcgaattgcttttgtggaatttgcaatggtaagtcttgactatactagttgccattaattggctgcactacactttcatagtttatgagaataactgcatcatgaacaacttattcaacctatgttgattattttatggattctatgt

SEQ ID NO: 26421 - DNA, 426 bp, Glycine max
  Clone ID: LIB3051-050-Q1-K1-D7
caactctgcttcccctggcaaccttcttcttagttctctccgcttcttatctccagattgctggggcgaaagcacaaccgttgactagtctcaagcttaactctccgatccttcaggagtctattgctaaagagatcaatgaaaatcctgaggcaggatgggaggctgctataaatcctcatttctccaattatacagttgaacaatttaagcgccttcttggagtcaaaccaacgcctaagaaggaactgagaagtacacctgctatatctcacccaaagtcattgaaattgccaaagaattttgatgcaaggacagcttggtctcagtgtagcactattggaagaattctagatcagggtcactgtggttcttgttgggcatttggtgctgttgaatcattgtcagatcgcttttgcattcatt

SEQ ID NO: 26422 - DNA, 397 bp, Glycine max
  Clone ID: LIB3051-053-Q1-K2-C5
caaccgttgactagtctaaagcttaactctccgatccttcaggagtctattgctatagggatcaatgaaaatgctgaagcaggatgtgaggctgatataaatactcatttctccaattatacagttgaacaatttaagcgccttattggagtcaaaccaactcctagaaatgaactgaatagtacacctgctatatgtcacccaaagtgattgaaattgccaatgaattgagacgctaggtcagcttgatctcactgttgcactattgaaagaattctagatcacggtcactgagattcttgtagggcatttgatgctagcgaatcattgtcagatcgctcttgcattcattatgatgtaaatatgtgtctctattgtaatgaccttcttggatgct

SEQ ID NO: 26423 - DNA, 374 bp, Glycine max
  Clone ID: LIB3051-079-Q1-K1-B10
gctgcaactcatctgcttcccctagcaactcttcttcttacttctctccgcttcttatcggcagattgctggggcggaagcacaaccgttgactagtctcaaacttaactctcatattcttcaggagtctactgctaaagagattaatgaaaatcccgaggcaggatgggaggctgctataaatcctcgtttctccaattatacagttgaacaatttaagcgccttcttggagtcaaaccaatgcctaagaaggaacttagaagtacacctgctatatctcacccaaagacgttgaaattgccaaagaattttgatgcgaagacagcttggtcgcaatgtagcactattggaaaaattctagatcatggtcact

SEQ ID NO: 26424 - DNA, 395 bp, Glycine max
  Clone ID: LIB3051-069-Q1-K1-D7
acgcgaccattttgaagcgtatcatgctttgtcacacagtgtaagagaccggttgattgaacgcgggcgtgatactcatgtgtacgtcaagagaacaaaacctaagcgcctctacttcctttcgcttgagtttcttatgggtcgttccttgtcaaatagtgtcatcaatcttggcatccaggatcaatatgcagaagccctaagccaacttggatttgagtttgaagttgtggcagagcaagaaggagatgccgccttaggaaatggtggccttgctcgtctatcagcatgccaaatggattctttagcaacattggattatcctgcatggggttatgggctgcgatatgaatatgggctgtttcgtcagatcatagtggatggctttcaacatg

SEQ ID NO: 26425 - DNA, 449 bp, Glycine max
  Clone ID: LIB3051-038-Q1-K1-B3
cccacgcgtccggcagaactttggttcccaacctccattgcctccgcttctacctcgctaccatgatcattcctgagaagaaccgcaaggagatctgcaaatacctcttccaagagggagtttgctttgcgaagaaggacttcaatttggcgaagcaccctgagattgacgtgccgaatctgcaggtgattaagctgatgcagagtttcaagtctcgcgagtatgttagggagacttttgcttggatgcactattactggttccctaccaacgatgggaatcgagtttcttaagaacttaccctaaacctcctttcgaaaatgggcctggtaccttgaaagaacaggccaagccaacttgcaggcccttttgccggccattccgtgatcgccctaggggtccaccacgctttgaaggggagcgtaagtttggtggtgatcgtgatggat

SEQ ID NO: 26426 - DNA, 349 bp, Glycine max
  Clone ID: LIB3051-092-Q1-K1-D8
atggaattgagttccttaggacttacctcatccttccatccgaaattgtccgtgccactgtcaagaagcaggccaagcccgccggaagaccattcggtggcccacccggtgatcgccccaggggcccacctcgctttgacggagagaggagattcggcggtgaccgtgatggataccgtggaggtccacgcggacctggcggtgatttcggtgacaagggtggagctcctgctgactacaggccttcttttgggggtggtactggcggaaggcctggcttcggtcgtggttccggcggttatggagcaccgactagttcaaacattccttcttaaatataaaataatat

SEQ ID NO: 26427 - DNA, 378 bp, Glycine max
  Clone ID: LIB3051-041-Q1-K1-C5
gggaaaaccattgtggatttgttcgcttttgaattcaaaggtcgaccttatgagtattaggtaagtgcagcgaaatgtggaaggattcaagtggatggtgagatggtaccggtgtcatacatagttaaatcatctcaaaagataagccatttcttacacaggcatgaaccacctgtgatggcttgtgaggttcctgttcttcaaaaagatattgatgcgctaactgtttgtaagccagcatatgtcccttaggtgcacccatgtagtcaatatcggaagaacactgttgttggcattcttcaagctagagcatgggctgacccctttatttcctggtcattagactggatcgccttgtctcaggacttcttaatttgg

SEQ ID NO: 26428 - DNA, 425 bp, Glycine max
  unsure (1)..(425): unsure at all n locations
  Clone ID: LIB3051-079-Q1-K1-D11
caactgcatctcgtatatgtgggcctcttcttgattggattgaaacttgggagatggtgtcaagggtcaaatacttaggcacaatgctgtttctacataacttccagaaggctgttaggtggtttcttgcctttacacataccatgcgatcatttttttcctttcttgttcaacctcttgtagagtcattggtggagatttttggatttcttctcccaagcttcaagtttttgtttgaattagctgaaagcatcttttctgtcatttggctcgtagtggatacttcttttgatatagtgggaaatgtactggagctgctcttttcaccattttggtttgtcctcaatgttgcttggagcattgctactngtattcctatatccttattttgggttctctgggaattcctatatgctcctgttcgt

SEQ ID NO: 26429 - DNA, 455 bp, Glycine max
  Clone ID: LIB3051-112-Q1-K1-A4
gtctcaagggccaactcatgatgagattgattttgaattcttgggaaacgtgagcggtgaggcttgcattctccacacaaacgtgtttaccaaaagccaagggaacagagagcaacagttctatctctggttcgaccccaccagaaactttcacacttacttcatcatctggaagccttaacacatcatattcttggtcgataacattcccataagggtgttcaagaatgctgagactattggcgttcctttcccgaagaaccaacccatgagaatctattctagcttgtggaacgctgatgactgggccaccaaaggtggtttggtgaaaactgattggtcaaaagcaccctttacagcatactaccgcaatttcaaagccacagagttctccacctcttcttccaattccttctctgatgctgcatggcagagcaacgagcttgatgcctatg

SEQ ID NO: 26430 - DNA, 442 bp, Glycine max
  Clone ID: LIB3051-063-Q1-K1-B7
ctccattttccctctgtcttccccccgtcctctacacaaaaatatattattaggatggagaaggtgaattttgtgaagaatggagagcttagattgcctccggggttccgtttccacccgactgatgaggagctggttctgcaatacttgaagcgcaaggtcttctcctgccctttgccagcctctatcattcctgagcttcatgtttgcaagtctgatccttgggatttgccaggttcctttctattttccattcacacccatcatcccctttctctttctctaatttcaattccatgcccccatttttaggtgatttggagcaagagagatacttctttagcaccaaagtggccaaatatcccaacggaaatcgctccaacagagccacaaattcgggttattggaaggcaactggcttggacaaacaaattgttacttc

SEQ ID NO: 26431 - DNA, 451 bp, Glycine max
  Clone ID: LIB3051-047-Q1-K1-C5
gaaaactcagcgtgtgattgaaatttgaagagtgtgaagatggcgatggaagtggagcagaatcagaatcatcaattagggtttcccttctggaaaccgctccgtcgcaggttcggacccgaatctcctttcttcgctcatggcaacctcgaacgggaacttctcgccaaacagcttgctttggaattaacagaagagaaacaacagcttgagaaatggatgcaagaggaagaaggaagggaagtcttttgtcccattgtgggttgtggtgcacgcttgacctcaatggaggactttgaaaatcactataatgcaaggcatactgcatcctgttctgtgtgctccagagtttacccgacatcttggttgctcagcatacatgtatctgaagtgcatgattcttttcttcaagcaaaagttgcacgtggctatgatatgtacgaatgcttgg

SEQ ID NO: 26432 - DNA, 413 bp, Glycine max
  Clone ID: LIB3051-006-Q1-K1-F11
agcaaagatgctgctggacaagttcgtggttctccaaatgaatttgctggaataggctccacatgagcccttctttggctggctagaaggtttgcaattctatctgggcctaccattcctattattggcgagggtgatgaagaggcaaatgataggtatgtagaacaattagttgcaagtgcagaggctgctgtggaggaagttatccagcgtggggtaagctttatttttactgtatggagaatatgaagtttttagtcagaaatatgatgactcgtgatattttgggttgtcacttgtcacatctaggtggctgatccgaagaaaatagctgttggtggacattcctatggtgcgttcatgactgcttacctgctggcacacgcaccttatttttttgttgtggaattgct

SEQ ID NO: 26433 - DNA, 426 bp, Glycine max
  Clone ID: LIB3051-115-Q1-K1-G11
gaacaattagttgcatgtgcagaggctgctgtggaggaagttatccatcgtggggcggctgatccgaagaaaatagctgctggtggacattcctatggcgcgttcatgactgctaacctgctggcacacgcacctcatcttctttggcgtggaattgctcgttctggtgcttacaacagaacacttactcactttggttttcagaatgacgacagaactctttgggacgccactaatacttatgtcgagatgagtccttttatgtcggctaataaaactaagaagcccatcttgcttattcacggtgaagaggacaataatccaagaacattaaccatgcaatcagacaggtctttcaacgctctaaatggtcatggtgctctttgtcggctggtgattatgcctcacgagagtcatggttacact

SEQ ID NO: 26434 - DNA, 438 bp, Glycine max
  Clone ID: LIB3051-010-Q1-E1-F3
acccaataaagggtttgctggggcttctgagagggctggtccgagggataggccggtcgagtttgagaatgaagaggctgatccgtttggtttggatcagttcttgactgaggtgaagaagggtaagaaggccatggagaaagtgggtggtggagggactatgagggcaagtgctggatcatctatgcgggatggtaacgagggaggttcaggtaggactcgcattggatttgaaagagggcattaggtaccacaatatttaatgttgcctgacctatttctagtgcgtaatgttgactgttgaatatccaccgtaatggcttaggttgctatgtctgaaaatgggtggttagaacaatgtgcttgtgttagcattttggtttttctccaaccccctgccctgccgccctgcttaagtggtgaaataaactgtttttg

SEQ ID NO: 26435 - DNA, 429 bp, Glycine max
  Clone ID: LIB3051-059-Q1-K2-C5
cgctccatctctccactcttatctcgttccctttcacaactcaaacaattcccaaaatcccacccttgtgccctgtggtcctcctccttctccttctgcctccacacactccgcaagtccacttcccctattcgcgcctcttcttctttttctccctccatggctgcttcttctccgctaaacgacgccgtcgaaggcaatcctcttctgcagaacttcgacttcccacccttcgatgtcgtcgagcccaaacacgtgcgacccggcattcgcgccctcctcggcaagctggaaagtgaattggaggagctcgaacggaacgtggaaccgtcgtggccaaagttggtggaaccgttggagaagatcgttgaccggttatctgtagtttggggcatgatcaatcatctaaagtctgttaaggatagttcg

SEQ ID NO: 26436 - DNA, 347 bp, Glycine max
  Clone ID: LIB3051-053-Q1-K2-D10
cccacgcgtctcgccacgcgttcggcggtaccagtattgatgtacattataatcaataggagaattagtataaaaagtcatggccaagattaacaaatttggtgaacattaattattcctgaagcactaatgaagccttaccctttccatacaaggacactgaccaagagaaggcagaaagaaagacagcacgagatccggtgcaaaatgagttggcaaccacacaagaaagaggcaaaagatgaaccaagcggagctggacaagcatgcggcgcgttagcataacacggtggccaaacaagacgtcaccacggctgtgcacatgggacatgggcaccacatcaccg

SEQ ID NO: 26437 - DNA, 404 bp, Glycine max
  Clone ID: LIB3051-059-Q1-K2-C9
cccacgcgtccgagacgcgcaaacattgcaaggctgagagaactgcatacactgacgggccatgttgagtctgtgtttagactgaagggccttgacattgacacaatacagcaagcatacactatctagaataatgttgagtttcatgcatgaatcgtttatgtttaatgtatgtataatgccgttagaagagtgtgatcatagagcagcaaaaaatatatactttataaatgtttgttcaaagcagttttggtggacttttgtagacatgaaactattggtgcatttaaatgttaaagagttccatttatgcttccaaaaaaaaaaaaagtataaaagtacacatgaaaaacaatacaatgattatgaggttagtaaaataagctgtattctgtggtattatt

SEQ ID NO: 26438 - DNA, 429 bp, Glycine max
  Clone ID: LIB3051-093-Q1-K1-D11
ctcactttatttgaatttctaatccgtgaggttgttgcgcttcagaaatggctaccggggctgctgtgccaactacgttttctaccctcaagacatgggattccagtttggggtttgcaaaaaacatagattttgtgagagtttccgatatgaagagcatgaaatcttctgcgaggaaaagggtgtcaattatcaggaactcaaatcctggccaagatattgctgaacttcaacctgcatccccaggaagccctcttttggttcctaggcaaaagtattgtgaatcattgcacaaacccatcatgagaaaaacaagcacagtaatggttggtaacgtggctattggtagcgagcatcctataagaattcagaccatgactacaactgacactaaggatgttgcttggacagttgaacaagtgatgagaa

SEQ ID NO: 26439 - DNA, 385 bp, Glycine max
  Clone ID: LIB3051-094-Q1-K1-C8
gtaattttcttgggaattgggtcctcctctactttggttatacctcatccccggatcttgggccagagcaagtccaaattatggccaacgcaattgatatattagaatcaaaacagaatctcaagattctaccagtatttgtttccattgatcctcaacgtgatactccctcacaacttcgtgcttaccttaaagagtttgattcaagaatcataggattaactggacctgttgcagctattaggcagatggctcaagaatatcgtgtttactttaaaaaggtagaagaggatggcaatgattatcttgttgactgttcccacaacatgtatttgctgaatcctaaattggaggttacgagatgctttggagtcgagtatagtgc

SEQ ID NO: 26440 - DNA, 446 bp, Glycine max
  unsure (1)..(446): unsure at all n locations
  Clone ID: LIB3051-027-Q1-K1-F3
taaaagcaaggctagaacacttgcaagttcgaaagagccatttttatttatcagtcaccgaaacaactatggatacaatcaagtccttcaagggctacggcaaagttgacgagttggagcagcaagcctatcagaagaagacacgtaagcgcctcataataatcacagtctcttcaatcgttctaattgcggtgatcatcgccgctatcgcaggggttgtcatacacaagcgcaacacctcatcatctccctcatccgactcgcccccgcaaactgagttaaccccggccgcgtcactcaanagcggttgcgacgtgactcagtaccctaactcgtgcttctccgcaatctcctcgttaccggattccaacactactgatnccggagctctcttcaagctctctctccgcgtcgccattgacgaaatatcaaagctttgagctttc

SEQ ID NO: 26441 - DNA, 376 bp, Glycine max
  Clone ID: LIB3051-019-Q1-E1-A4
accaagcgtccgggtggctgctcttggctatgataatggattctattgccctggaagatgctcacaagaatatgggaattgtactgctggcaactcatgcactgaaccttacattgttgcccacaatttgatattgtcgcatgcagcagctgttcaaagataccgagcgaagtaccaagaaaagcaaaatggaacgattgggatcctcttggattttgtttggtatgagcctcttacaagattaaaggctgacaattttgcagctcaaagagccagagactttcatattggatggttcattcatccccttgtttatggagagtaccaaaaatcattcaacatattgtttggaatagactcccaaattcactagtga

SEQ ID NO: 26442 - DNA, 229 bp, Glycine max
  Clone ID: LIB3051-038-Q1-K1-D2
ttgtcttggcttttattatgggttctttggcccctggagaatcctcaaaggattttgggaatggtccagttggcacctaaggccctgagccttacatggttgcccacaatttgatattgtcacatgcagctgctgttcaaagataccgagagaagtatcaagaaaagcaaaagggaaggattgggatcctcttggattttgtttggtatgagcctcttaccagatcaaa

SEQ ID NO: 26443 - DNA, 223 bp, Glycine max
  unsure (1)..(223): unsure at all n locations
  Clone ID: LIB3051-053-Q1-K2-H12
ggaaggattgggatcctcttggattttgtttggtatgagcctcttacaagatcaaaggccgacaanttagcagctcanagagccagagactttcatgttggatggttcattcatccccttgtttatggagagtatccaacaaccattcaaaatattgttgggaatagactccccaaattcactagtgaagaagttaaaatcgtgaagggttcaatagattttg

SEQ ID NO: 26444 - DNA, 316 bp, Glycine max
  Clone ID: LIB3051-073-Q1-K1-G10
gcccacgcgtccgagaagtttctgtttatcatttccatcgctacaaagaacatatagatctcgtggccagtttgaattgtgatgcctaccggttctcaatctcgtggtccagaatttttccaaatggaactggccaagtaaattgtaaaggtgtagcatactacaatatgctgatcaattacttgctagataaaggtattactccatatgcaaatctctaccattatgatcttcctttagcacttgaagagaggtacaacggattattgatccctcaagttgtgaatgattttgcaaattatgcataattttgttt

SEQ ID NO: 26445 - DNA, 428 bp, Glycine max
  Clone ID: LIB3051-091-Q1-K1-G8
caaaaacataaacaaagtaagagttcactcaatctcactgtgttgtgagttgtgtgtgagcaccaaccaacaatggtgtctctgactccgttatgtttctttattaccttgttgatcgctggtgcatactcagcggcggagccccaaacggtgcgttttgacaccggtgggttgagcagagacacctttcccaaaggattcttattcggaacggccacgtctgcgtaccaagtggagggtatggcccacaaagacggtcgcggcccaagcatttgggacgtcttcatcaaaaaacccgggattgtcgcaaataatggcacgggagaagtttctgttgatcagtaccatcgctacaaagaagatatagggatctcatggccagcctgaattttgatgcctaccggttctcaatctcgtggtccagaatt

SEQ ID NO: 26446 - DNA, 422 bp, Glycine max
  Clone ID: LIB3051-096-Q1-K1-A7
cggacgcgtgggcggacgcgtgggcggacgcgtgggcggacgcgtgggcaaaaacaaaaacaaagtaagagttcactcaatctcactgtgttgtgagttgtgtgtgagcaccaaccaacaatggtgtctctgactccgttatgtttctttattaccttgttgatcgctggtgcagacgcagcggcggagccccaaacggtgcgttttgacaccggggggttgagcagagacacctttcccaaaggattcttattcggaacggccacgtctgcgtaccaagtggagggtatggcccacaaagacggtcgcggcccaagcatttgggacgtcttcatcaaaaaacccgggattgtcgcaaataatggcacgggagaagtttctgttgatcagtaccatcgctacaaagaagatatagatctcat

SEQ ID NO: 26447 - DNA, 432 bp, Glycine max
  Clone ID: LIB3051-101-Q1-K1-A6
cccacgcgtccgcccacgcgtccgaaacaaagtaagagttcactcaatctcacgtgtgttgtgagttgtgtgtgagcaccaaccaacaatggtgtctctgactccgttatgtttctttattaccttgttgatcgctggtgcagacgcagcggcggagccccaaacggtgcgttttgacaccgtggggttgagcagagacacctttcccaaaggattcttattcggaacggccacgtctgcgtaccaagtggagggtatggcccacaaagacggtcgcggcccaagcatttgggacgtcttcatcaaaaaacccgggattgtcgcaaataatggcacgggagaagtttctgttgatcagtaccatctgtacaaagaagatatagatctcatggtcagcctgaattttgatgcctaccggttgtcaatctcgtg

SEQ ID NO: 26448 - DNA, 431 bp, Glycine max
  Clone ID: LIB3051-108-Q1-K1-H11
aacaaagtaagagttcactcaatctcactgtgttgtgagttgtgtgtgagcaccaaccaacaatggtgtctctgactccgttatgtttctttattaccttgttgatcgctggtgcagacgcagcggcggagccccaaacggtgcgttttgacaccggggggttgagcagagacacctttcccaaaggattcttattcggaacggccacgtctgcgtaccaagtggagggtatggcccacaaagacggtcgcggcccaagcatttgggacgtcttcatcaaaaaacccgggattgtcgcaaataatggcacgggagaagtttctgttgatcagtaccatcgctacaaagaagatatagatctcatggccagcctgaattttgatgcctaccggttctcaatctcgtggtccagaaattttccaaatggaact

SEQ ID NO: 26449 - DNA, 392 bp, Glycine max
  Clone ID: LIB3051-111-Q1-K1-B10
cccacgcgtccgcgctttctttaaccattattgattaaaatattttctatacatttcgataactgtctcttttggtttggtttatatgaacattgaagatgcaaagaacggagtgcctattggtccaagggcttattcttattggctttacaacgtaccatggggcatgtacaaatcattgatgtacataaaggaacgttatggaaacccaactgtgttcttatccgaaaatggcatggatgatccgggtaacgtgactcttcccaagggtttgcatgacaccacaaggataaactattacaaaggctatttgactcaactaaagaaggcagttgatgatggagctaatgtggttggatactttgcatggtcattgctggataactttgaat

SEQ ID NO: 26450 - DNA, 367 bp, Glycine max
  Clone ID: LIB3051-111-Q1-K1-B12
cccacgcgtgcgcgctttctttaaccattatggtttaaaatattttctatacatttcgataactggtctcttttggattggcttatctgaacattgaacatgcaaagaacggagtgcctattgctccaagggcttattcttattggctatacaacgtaccatggggcatgtacaaatcattgatgtacataaaggaacgttatggaaacccaactgagatcttatccgaaaatggcatggatgatccgtataacgtgactcttaccaagggtttgcatgacaccacaaggataaactattacaaaggctatttgactcaactaaactaggcaattgatgattgagctaatgttggttggatactttg

SEQ ID NO: 26451 - DNA, 399 bp, Glycine max
  Clone ID: LIB3051-111-Q1-K1-C12
gtttaatgaacctcgtgtggtggctgctcttggctatgataatggtttctttgcccgtggaaggtgctcaaaagaatatgggaattgtacagctggcaactcaggcactgagccttacattgttgcccacaatttgatattgtcacatgcagctgctgttcaaagataccgagagaagtatcaagaaaagcaaaagggaaggattgggatcctcttggattttgtttggtatgagcctcttacaagatcaaaggccgacaatttagcagctcaaagagccagagactttcatgttggatggttcattcatccccttgtttatggagagtatccaacaaccattcaaaatattgttgggaatagactccccaaattcactagtgaagaagttaaaatcgt

SEQ ID NO: 26452 - DNA, 382 bp, Glycine max
  Clone ID: LIB3051-059-Q1-K2-H8
cacgcgtccggacggttacaacctccccatgatcgtggagccacagggcggaaccggcgccggaaactgcaccgccacggggtgcgtggtggatttaaacacgccgtgcccggcggagctgatggtgatgagcagcggagagggcgtggcgtgcaaaagcgcgtgcgaagctttcgacgatccacagtactgctgtagtggcgcttacgcgacgcctgacacatgcaaacccagttcatactcgcagttctttaagagcgcgtgcccacgcgcttatagttacgcttatgacgatggctccagcaccttcacttgcgccacagcggattataccatcactttctgcccacaaccattcactagttcgattaaatcgggaaat

SEQ ID NO: 26453 - DNA, 441 bp, Glycine max
  Clone ID: LIB3051-077-Q1-K1-C2
cgttatcgtctcttcctcaaactctgaaccttccgtgcagcgcagagctttgctggcatacccgccgtgacgaaattaaccgctctacgtaacagcacacagcgatttccccaaatcatcgaaaccctaactcgcgattcccaatcgaaaccctaactcgggatggcgattttgctgggcgaaattcttcaatcgctggagctgtggctgaagctgatcaagaacccgcagccgcagccctacgtaaaccctaatctggaccccgttttgctggtgcccggtgtcggtggctcgatgctgcacgccgttgacgaaaccgactgaagccatgaacgcgtctgggttcgcttcctcaacgccgagtacacgctgaagaccaagctttggtcgcgttacgatccttgcaccggtaggacctagctttcgttttacgaaattaaa

SEQ ID NO: 26454 - DNA, 364 bp, Glycine max
  Clone ID: LIB3051-093-Q1-K1-H4
atcgtctcttcctcaaactctgaacctttcgtgcagcgcagagctttgctggcataccgaccgtgacgaaattaacgtctctacgtaacagcacacagcgatttccccaaatcatcgaaaccctaactcgcgattcccaatcgaaaccctaactcgggatggcgattttgctgggcgaaattcttcaatcgctggagctgtggctgaagctgatcaagaacccgcagccgcagccctacgtaaaccctaatctggaccccgttttgctggtgcccggtgtcggtggctcgatgctgcacgccgttgacgaaaccgacggaagccatgaacgcgtctgggttcgctttctcaacgccgagtacac

SEQ ID NO: 26455 - DNA, 386 bp, Glycine max
  Clone ID: LIB3051-111-Q1-K1-A11
ctctttctctctctctctatcttcaatttcgagaagtagctccagtattatatggcggccttcagagcattctggaacagtccagttggtcccaaaacaactcacttttggggacctattgccaactggggatttgtagcagctggattggctgacctgaacaaacctccagaaatgatctctggcaacatgacaggagcaatgtgtgtctattcagcattgttcatgagatttgcatggatggttcagccacgcaactatctactttttgcttgccatgcctcaaatgagactgttcaactctatcatttttcccgatgggcaaaggcacaggggcttctgtcggaaaagaaggaagaagcttcatcccagtgatttgatgatgc

SEQ ID NO: 26456 - DNA, 436 bp, Glycine max
  Clone ID: LIB3051-116-Q1-K1-A11
ggaaaatgaacacacattggaaaaaattaagttagagaaagataaggagccgccaaagcctgagtataaagaaatacagcacaccgatcaaaaccatacagagaaacctgaagataagattactgtcgaaaatctagaaaatagagcacaaggaggggctgagccaatggagatctcccagagccccatgtcgtcgcctgatgatactccatgtggttatgtaaaacttttgaaaggtcatacatcagaggtttttgcttgtgcatggaatccatcagctccacttcttgcatctgggtctggagattcaacagctcgaatttggaaaattgctgatggagcttgtgactctagtgtgcaaaatgaaccagtaaatgttgtggtgctgcagcacttcaaagaaagcaccaatgaaaaaagcacggatgtgacaaca

SEQ ID NO: 26457 - DNA, 440 bp, Glycine max
  Clone ID: LIB3051-087-Q1-K1-C5
caagctactagaacaccgtttgctttgctctcccttcattttgcaaaacctctgggtatcgaactctgcagccatgggaagtttggaagttgaatcaacaaatggtcacacctcaagtcctcacaaaaaaactgaaaaatcggagagagagaggagaattgatgagtggcttccaattacttctaaaaggaatggaaaatggtggtattcagctttccacaatgttactgccatggttggagctggtgttctcggtcttccctatgccatgtcagagcttggatggggtccaggtgtaactatacttatcctctcatggatcatcaccctgtacacactatggcaaatggttgagatgcatgaaatggttccaggaaaacggtttgatagataccacgaactgggccagtatgcctttggtgaaaagctaggcctttata

SEQ ID NO: 26458 - DNA, 442 bp, Glycine max
  unsure (1)..(442): unsure at all n locations
  Clone ID: LIB3051-111-Q1-K1-E7
gaaaatactataatatatatcattgtctgtcttttgttttgaaccattttctgcctataagtactcatacattcgacgtttttcaaaggtgagagccaccctttttctcttacaagctactagaacaccgtttgctttgctctcccttcattttgcaaaacctctgggtatctaactctgcagccatgggaagtttggaagttgaatcaacaaatggtcacacctcaagtcctcacaaaaaaactgaaaaatcggagagagagaggagaattgatgagtggcttccaattacttctaaaaggaatggaaaatggtggtattcagctttccacaatgttactgccatggttggagctggtgttctcggtcttccctatgccatgtcagagcttggatggngtccaggtgtaactatacttatcctctcatggatcatcaccct

SEQ ID NO: 26459 - DNA, 446 bp, Glycine max
  Clone ID: LIB3051-061-Q1-K1-E5
ccgggcaaaacacgattctctgatttcattttttctcactacaaaaccacactcactctcctcctctcgcctctttccttgtttctttcgcgcattctcctaaattcctccaaaaaccctaacactctctcattctcagtttttctcaatcttatgattaatggaagaccacgcgcatgctgcactacctcccggttaccggttctacccttccgaagaggttctcgtcggttactacttaaccaagaagaacgagaaccgggaggagggtttctacggttctgatttgatcagagaacttgacctctacgatcacgatcccttcgaattaccggacgctgctgcttgcttttcgtacggttacaaagggaggaagaagcattggttctgttacgctaaagagaccaaacgcagaaacagaagaaaggtgaaaagcgggttctggc

SEQ ID NO: 26460 - DNA, 437 bp, Glycine max
  Clone ID: LIB3051-003-Q1-E1-A11
ggcaatgcaaatggcagcgaatatggttgtcttggagcgtgcttgtgattttttctttcgccatgctgcacaactttcaggtgttcccttgagaatggtggagagaagcagaaggcagttccctcttagaaaagcccgtgatgctgcagaagacatgctctctgggctactcaaagccaaggttgatggattcatgacattgatcgaaaatgtaaattggatgtgtgacgaggcacctcagagtggaaatgaatatgtaaacgaggtcataatttatttggaaattttggtttcaactgctcaacagatattgccatctcaagtccttaagagagttttacaggaggtttttgctcacatatcggagaagatagttgggactttagttagtgattctgttaagaggtttaatgtgaatgctattaatggaattgaag

SEQ ID NO: 26461 - DNA, 332 bp, Glycine max
  Clone ID: LIB3051-093-Q1-K1-C5
accatgttgggcaagtggagtcaacttatagatcacgggacaagccatatgggcattggggatgctgatagaaatgctgtatcactaacaacaactgtaaacaatcattatggagccgggtttaactctacttctactggtatcttgggcaacaatgagatggatgacttctctacttccactgatatatcccctgataaactaccttcagattcagcaaattttattgaaccaaacagaagaccattgtcttccatgactcctcttatcatcacaaaggatgaccagttagttgcggtacttggatggagctgtggaatgaacattattgc

SEQ ID NO: 26462 - DNA, 441 bp, Glycine max
  Clone ID: LIB3051-009-Q1-E1-A11
atccactggaatgattggtctagtttcatccaattccaaggacaagaagaagacacagccggtcaagcaatctgatacaaagagaacgagaagagataggggagagctggaggatataatgttcaagctatttgaaagacagcctaattgggccttgaaacagctcgttcaagagacagatcagcctgcacaattcttgaaagagattctgaacgaactttgtgtttacaataaaagaggtgccaatcaaggaacttacgagctgatgcctgagtacaagaaatctgttgaagatacgagcgccgaataagtgctatgttctttacattatactcttaactctaccgaggcacagaccctccataaatatacgctgatggaagaaagaatcttgggacatcaaacaagatgcaaactttgtatctgaaccgtgaagaatac

SEQ ID NO: 26463 - DNA, 357 bp, Glycine max
  unsure (1)..(357): unsure at all n locations
  Clone ID: LIB3051-013-Q1-E1-E1
aaccaagcgtccgcccacgcgtccggaaagggagtccaangaagcatttagagatagccataagaaggtaagagacagccatgatggtctcatcatttaccgcaacatggcgcttttcttctcgggtggagacaggaaagagttgaagctacgagtaacaggaaggatatggaaagaacagcaaaaccctgaaggtggagtgtgcatacccaacctgtgtagctaggttgattgcatattctcttgattgctatttcttgctgtagataatttgagaagtgttaatctttgactggtgaatggttatggggatatttcaacttccaaacanaataaaaaaactgagttcctaacaaa

SEQ ID NO: 26464 - DNA, 429 bp, Glycine max
  Clone ID: LIB3051-096-Q1-K1-C5
cccacgcgtccgcccacgcgtccgcaacaacacttgaaagttgaaacagaaaaacaccaatccctcatcgtactgttccgttatcaattctcgtgtttaaggacacaatttgcttgatacattttcaagttttcatctccatgttttgattttgaagaataaggagtatgcaattgactactacagatatggttttactataagtggcctgtatatggttttgggtcttgcaagtgtaagcagtatggaggatattcaattggatatcagttgggacgatgctgtctgtcccatatgcttggattttcctcataacagtgttctccttcggtgttcattttatgataaaggatgtcgtgcttttgtttgtgacacaaatcaattgcactctaattgtttggatcgctttaaaaattcatgtggcatgcc

SEQ ID NO: 26465 - DNA, 375 bp, Glycine max
  Clone ID: LIB3051-013-Q1-E1-A7
gctccaatacaatcatcaaaatgtgcccttccgcctcccatttccgaccggcattccacgtcctcgacgccgaccacgacggcaaaatcagccacgacgacctccgcgccttctacgccggagtcggcggagaaggagacgacgtgatcggggcaatgatgacgctggccgacaccaacaaggacgggttcgtggagtacgaggagttcgagcgcgtggtcgcggcggagagaaaacccgtggggtgtggggccatggaggacgtgttcagggtcatggacaaggacggcgacggcaagctcagccaccgcgacctgaagacttacatggcctgggctggcttttcggccaccgacgacgacatcaacgccatga

SEQ ID NO: 26466 - DNA, 262 bp, Glycine max
  unsure (1)..(262): unsure at all n locations
  Clone ID: LIB3051-049-Q1-K1-B9
ccaatacaatcatcaaaatgtgcccttccgcctcccatttccgaccggcattccacgtcgtcgacgccgaccacgacggcaaaatcagccacgacgacctccgcgccttctacgccggagtcggcggagaaggagacgacgtgatcggngcaatgatgacgctggccgacaccaacaaggacgggttcgtggagtacgaggaggtcgagcgcgtggtcgcggcggaaagaaaacccgtggggtgtggggccatggaggacgt

SEQ ID NO: 26467 - DNA, 414 bp, Glycine max
  unsure (1)..(414): unsure at all n locations
  Clone ID: LIB3051-109-Q1-K1-F2
gctgttcctacaatcattccaaatgtgcccttccggtcgcaccctcctcccttcctcggtctcggatttccgaccggcattggacgtcctcgatgccgaccgcgacggcaaaatcagccgcgacgacctccgcgccttctacgccggagtcggcggcggaggagatgacgtgatcggggcaatgatgacagtggctgacaccaataaggacgggttcgtggagtacgaggagttcgagcgcgtggtctcggcggagagaaagcccgtggggtactgtggggccatggaggacgtgttcaaggtcatggacaaggacggcgacngcaagctcaaccaccatgatctgaagacttacatggcctgcgcttgttttncggccaccgacaacgacatcaacgccatgatccgattcgg

SEQ ID NO: 26468 - DNA, 340 bp, Glycine max
  unsure (1)..(340): unsure at all n locations
  Clone ID: LIB3051-109-Q1-K1-F8
ggcggatcctgcaatcattccaaatgtgcccttcctgtcgcaccctcctcccttcctcggtctccgatttcctaccggcattggacgtcctcnatgccnaccgcgacggcaaaatcagccgcgacgacctccgcgccttctacgccggagtcggcggcggaggagatgacttgatcggggcaatgatgacagtggctgacaccaataaggacgggttcgtggagtacgaggagttcgagcgcgtggtctcggcggagagaaagcccgtggggtactgtggggccatggaagacgtgttcaaggtcatggacaaggacggccactgcaagctcaaccacca

SEQ ID NO: 26469 - DNA, 421 bp, Glycine max
  Clone ID: LIB3051-103-Q1-K1-C5
cccacgcgtccgcccacgcgtccgggaaaagaaggagatgcaactccttttacagatgttactgtggacaatatcagtaaagctctacacaaatgtgggtaccaaatgcgtggttttgagactatgtacaatggtcatacagggagacgtctaagtgcaatgattttccttggccctacatattaccaaagactgaagcatatggttgacgacaagatccattctcgtggaaggggtcctgtgcagatcctcactaggcaacctgctgagggacgctcacgagatggaggtctccgatttggagagatggaacgagattgcatgatagctcatggagctgctcacttcttaaaggaaaggttgtttgatcaaagtgatgcatacagggtccatgtatgtgagcgttgtgggttgatagcta

SEQ ID NO: 26470 - DNA, 433 bp, Glycine max
  unsure (1)..(433): unsure at all n locations
  Clone ID: LIB3051-025-Q1-K1-E9
ctgaccttcctcaaactgaagaaattagagatgttttggacacatttcatgtcatagcagaactaccaccagacaactttggagcctatatcatatcaatggcaactgcaccatctgatgtgcttgcagttgagcttctacaacgtgaatgtcacatcaagcatcccttaagagttgtgccattgtttgagaagctagctgatctagaggctgctcctgctgctctggcacggttggtctcgatagactggtacagaaataggatcaatgggaagcaagaagtgatgattggatactcagattcagggaaagatgctgggaggttctctgcagcatggcagctatataaggctcangaggaacttataaatgttgccaagaaatttggtgttaagctaaccatgttccatggtcgcggtggaactgttggaag

SEQ ID NO: 26471 - DNA, 284 bp, Glycine max
  Clone ID: LIB3051-061-Q1-K1-G6
tgcatacgatcatgaacacaagctgagtcaaaaaggtagcaccaacgtcaaagaggaagaggtttctgtggagagggagttccagcaccttctggtgccatcatggaggaaccaattgacagagagagcctttgtggtcagctttgcactcagcatactcttcagcttcattgtgatgaagctcaacctcaccactggtattattccttcactcaatgtctctgctggccttatggggttcttctttgtgaagacatggaccaagttcttggaaaaatctaaca

SEQ ID NO: 26472 - DNA, 457 bp, Glycine max
  Clone ID: LIB3051-106-Q1-K1-C5
cccacgcgtccgctcggtttccttactaattactttaacccaataatccaatagctacgtacaaagttgaacaataccaccatcatagcgcatcatcatcagaattccaaggggaattgttgatgtggtggtgagaatgatgtatggggagtagaactaccaggagggttgttagtgttgaagatgacaagggagctgaaagaggaatgccgagcttcaattctgagttacccaattccaattcatgctatacagaggggaacacaattgattcttttcgtgtttctgactttggagcatttgatcagtcatatcacatagaggatgctgttgacctcagtggaaacccagtttacaattcactaaaggtaatagccaaacaatttctccgggttctgttcacattagtagccttggtcaggtgagtttttctagttattttcatccaatgaacttc

SEQ ID NO: 26473 - DNA, 424 bp, Glycine max
  Clone ID: LIB3051-107-Q1-K1-C5
ccttatgcacatcttcatgcttgttttgttacatatttattatttatatacttatatatggatgatccatagaaataatataaaaaattatgtgatcaataattttatttaccattttttccctttctctttgtgcatgttatccctcactggatccacaacagaaggttgtgttaaaggttatgactatgactgatgacaaaacaaagcaaaaggctatagaagcagctgcagatatctatggggttgattcaattgttgctgatgtgaaggagcagaagttgactgtgattggtcaaatggacacagtgaaaatagtgaagaagctgaagaaagtaggaaaagtggatatagtatcagttggacctgccaaagaagagaagaaggaagaaaagaaagaggagaaaaaggaagaaaaaaaaga

SEQ ID NO: 26474 - DNA, 355 bp, Glycine max
  Clone ID: LIB3051-108-Q1-K1-C9
catgcattgaatatattccacaaggggaaatccagtagaagagatacatcaaaattggaagatcaagctgtaaaatctgagaagcaaatagaggagggaactgctatgaaaccagaagcaaagtctgaaaatgccgctcctgtaaaaaaggctgaagcagaaacattaagttcagtgggaaagacagatggtgaaaaatcagttcctgcacccaaagccgctgaagttcctcctgataatgagtttgagaagcgaataaggcccgaggtaatactagcaaatgagattgatgtcacattctctgatattggtgccttagatgagaccaaagaatcccttcaagatctagtaatgc

SEQ ID NO: 26475 - DNA, 384 bp, Glycine max
  Clone ID: LIB3051-110-Q1-K1-C5
cccacgcgtccgcccacgcgtccgccgggaaaaccgtttacggccctatttctccaaccggccaccgacctgtctacaaggcaaatggtctgcaagcctattttgtcaccttgattacttattttgctctctggtggtttgggatattcaaccctacgattgtttatcatcatttgggagaaatttattcagctctcatcttcggcagctttctcttctgtgttttcttgtacatcaagggtcatttggcaccgtcttctacagattctggctcatctggaaacttaatcattgatttttactgggggatggaactttatccacgcattggaaaacattttgacataaaagtcttcacaaactgcagatttggaatgatgtcat

SEQ ID NO: 26476 - DNA, 406 bp, Glycine max
  Clone ID: LIB3051-031-Q1-K1-G3
ttcacttgcaaaatggttgccttctctttccgaaggcctggttttcctttgccatggttatggtatggaatgcagtggcttcatgagagaatgtggtgtacggctagcgtgtgccaaatatgctgtgttcggtatggattatgaagggcatggacgttctgaaggtgctcgttgttacataaaaaaatttgataacatcgttaacgattgttatgactttttcaagtcagtcagcggtatggatccaaataatttaaattctcaactctattgaaacctgagatattttggcaaaactttatggctcataattcatttgcatatttcagagcttgcagagtataaggcaaaggctagattcttgtatggagagtccatgggaggagcagtgagccttcttttacat

SEQ ID NO: 26477 - DNA, 340 bp, Glycine max
  Clone ID: LIB3051-042-Q1-K1-D3
agaaaatggtaaggtaaggtaagatcgatagcagaaaaggaaaaaatgacgatggacgatgatagcgccatatatgtagggggtcttccctacgactccaccgaagaaaccattcgcaccgtcttcaatttgtatggcgctatccttgatgttaagataatcaacgacccacgcaccaggggcaagtgctattgttttgttactttcacaaatcctaggtctgcaattgatgccatcaacgacatgaatggcagaaccattgactgccgtgtggttaaagttaacggggtgaggactcgtgggggcaggtcaaattttggccgagaacgttattactatc

SEQ ID NO: 26478 - DNA, 426 bp, Glycine max
  unsure (1)..(426): unsure at all n locations
  Clone ID: LIB3051-114-Q1-K1-C9
caatatcaagactctagattcccgcatttacagttttcaagtggacaaaaagatgccggtctcgttgttcaaagagaaaattgcaaatgaaattggtgttccagttaatcagcaacggctgatatttagaggaaaagtcttaaaggatgagcacgctctttctgagtattatgttgagaatgggcatacattgcatttagttgaaagacaaccaaatcagtcgcaggcttctggtacgagttctggtgagtcaactggtacaagtggtaaccgaggaaatgatgtaggctcaggggctcctcgtaatcatgttgggcaaatttcacacagtgttgttcttggaacatttaatgtgggcgaacaaggtgaatgaattgttcatgatctcactcnggttattgggcatgttttaaactctattggaaa

SEQ ID NO: 26479 - DNA, 347 bp, Glycine max
  Clone ID: LIB3051-016-Q1-E1-B4
acgcgtcaacgcgtgatcaacccttacggctccgcagcttacaactttgtcaccatgggcgcttacagaggtggcctcgacacgttcgctatcataggcatcgcttcgaagcctcttcatgtctacgccaaacccacctacgagtgcgcgtggttctcactcgccggcgacaagaaaaaactttccaccaccgtcggttacaagatcctccccgactggggctacggccgcgtctacaccgtagttatcgtgaactgcacattcccgattcccgtaaacgccgacaactcaggcgggaagctcgtcctctttgcctccacctccggccgcggtggtggataacgtac

SEQ ID NO: 26480 - DNA, 437 bp, Glycine max
  unsure (1)..(437): unsure at all n locations
  Clone ID: LIB3051-115-Q1-K1-C5
ctaaatagtgaattctttaccacagagccttatgcttgtgaaccatcaagtttgccagggtatcctcccagcaaagaattggatgtaaaactgagagatgaagaagcaagaaggcaaaaggctctaaatgggaaagctagtgcagttgatggtgcaaaaaaagtcagagtacgtgagcgtgaacgtggtcgggctgttccagcccctgaagccaacgcagagatccaaacaaacttagataggtggagagttgtgacccatgcaaatgcaaaaagcaagagtgagaaatttccacctcctcatcaagatggagctgttggatacccacaagatgcatcaaataaaggacctgtttcatttggcgccccagacacttncttctcttcagggatatttaattcaaaaccttctggacatgttangaatcatgctgctgc

SEQ ID NO: 26481 - DNA, 151 bp, Glycine max
  Clone ID: LIB3051-030-Q1-K1-E11
attcccgcacaagcatacctagcatatgggctgtgggtgatgtcacaaaccgaatgaatgtaactccggtggccttgatggaagcatcgtactttgctaaaactggatttggtgggcaaacaatcaagccagactacagtaatattcccta

SEQ ID NO: 26482 - DNA, 431 bp, Glycine max
  Clone ID: LIB3051-091-Q1-K1-E3
aattactgctattacgagacgacgcagatttagttcggattgttcgattgcgatggctaggaaagatgcttatcgatggtgaagctgaattggctcaaggtggtggagaagaagtgtcgaattttgacttcgacttgtttattattggggctggaagtggtggcgttcgtgccgctagattttcatccaattttggagctaaggtggggatttgtgagcttccatttcatccaattagttcagaaacaattggaggagtcggtggaacgtgtgttattcgtggttgtgttcccaaaaagattttggtctatggagcatcttttggaggtgatcttgaggatgccaggaattatgggtgggagttgagttgagaaaaagttgacttcaattggaagaagctcttgcaaaagaagacagatgaaataaacaga

SEQ ID NO: 26483 - DNA, 325 bp, Glycine max
  Clone ID: LIB3051-106-Q1-K1-D1
gctattacgagacgacgcagatttagttcggattgttcgattgcgatggctaggaagatgcttatcgatggtgaagctgaattggctcaaggtggtggagaagaagtgtcgaattttgacttcgacttgtttattattggggctggaagtggtggcgttcgtgccgctagattttcatccaattttggagctaaggtggggatttgtgagcttccatttcatccaattagttcagaaacaattggaggagtcggtggaacgtgtgttattcgtggttgtgttcccaaaaagattttggtctatggagcatctttgggaggtgatc

SEQ ID NO: 26484 - DNA, 393 bp, Glycine max
  Clone ID: LIB3051-004-Q1-E1-C3
cgcagaccgaggcgtttccagttcgaaagggaaatgaaagtgtctttgttggtgaagggtaggtgagagaaacgaaaggggtgtgtgttgggttgaataggtatagataggatcaatgagcaacaacaacgcaggaaaggtggtgtgtgtgacgggtgcttctggtttcatagcttcatggatcgtcaaattccttctccaacgtggttacactgtcagggccaccgttcgctacccaagtaatctgaaaaaggtagatcacttggttaaacttgagggcgcaaaagagaggttgcagctgtttaaggcaaatctgttggaagaaggttcctttgactctgttgtggaaggctgtcatggtgtttttcatactgcttcacctgtccgttttgt

SEQ ID NO: 26485 - DNA, 272 bp, Glycine max
  unsure (1)..(272): unsure at all n locations
  Clone ID: LIB3051-025-Q1-K1-G10
ccaaaaaaccctaattattattattaaacatgaggccgattctgatgaaaggccacgagaggccactgacgttcctcaagtacaacagggacggcgatctncttttcttctgcgccaaggaccacaaccncaccgtctggttcgccgacaacggcgaacgcctcggcacctaccgcggccacaacggcgccgtttggtgctgcgacgtctcaagagattcgggtcggctcataacgggaagtgcggatcagaccgncaagctatggaacgtg

SEQ ID NO: 26486 - DNA, 403 bp, Glycine max
  Clone ID: LIB3051-016-Q1-E1-E12
aagcaacaatggtgccgcaacccattttgcatctaacccttttgtcattaataatctctctgaccactctttccttggtcgatgccgccgatcccacatttggcttcacccctcttggattatctagtagctcaaacttgcaaatccaaaagccttacgacgttgcagtcaacgagcgctacagcttttcaaatggagtgcacagattttgggtatactccacggacaagcctcatatgcaaggcagcaatacgaagccacgaactgagattcgtatcgctggatacgattatacatccggtgtgtggcaatttcaagggtttttttacgtgcctagtggcacaagcggggtgtgcatccagcaagtgtttggtggagtaacttctgccacaacctcgcagac

SEQ ID NO: 26487 - DNA, 380 bp, Glycine max
  Clone ID: LIB3051-017-Q1-E1-F7
agagccttactacgttgcagtcaacgagcgctacagcttttcaaatggagtgcacagattttgggtatactccacggacaagcctcatatgcaaggcagcaatacgaagccacgaactgagattcgtatcgctggatacgattatacatccggtgtgtggcaatttcaagggtttttttacgtgcctagtggcacaagcggggtgtgcatccagcaagtgtttggtggagtaacttctgccacaacctcgcagactagggtctatggtggttctctcactcattaccaatcacctagtctggaaccaatcatctataataggtggattcggtttaacgtgatccatgatgtgggtgccaacaatgtgaagatttttccta

SEQ ID NO: 26488 - DNA, 450 bp, Glycine max
  Clone ID: LIB3051-026-Q1-K1-G4
tcgggtgccgcaacccattttgcatctaacccttttgtcattaataatctctctgaccactgtttccttggtcgatgccgccgatcccacatttggcttcacccctcttggattatctagtagctcaaacttgcaaatccaaaagccttacgacgttgcagtcaacgagcgctacagcttttcaaatggagtgcacagattttgggtatactccacggacaagcctcatatgcaaggcagcaatacgaagccacgaactgagattcgtatcgctggatacgattatacatccggtgtgtggcaatttcaagggtttttttacgtgcctagtggcacaagcggggtgtgcatccagcaagtgtttggtggagtaacttctgccacaacctcgcagactagggtctatggtggttctctcactcattaccaatcacctactctggaaccaaa

SEQ ID NO: 26489 - DNA, 351 bp, Glycine max
  Clone ID: LIB3051-033-Q1-K1-E11
cttggaactgcaacaatggtgccgcaacccattttgcatctaacccttttgtcaggaatggtctctctgaccactctttccttggtcgatgccgccgatcccacatttggcttcacccctcttggattatctagtagctcaaacttgcaaatccaaaagccttacgacgttgcagtcaacgagcgctacagcttttcaaatggagtgcacagattttgggtatactccacggacaagcctcatatgcaaggcagcaatacgaagccacgaactgagattcgtatcgctggatacgattatacatccggtgtgtggcaatttcaagggtttatttacgtgcctagtggcaca

SEQ ID NO: 26490 - DNA, 367 bp, Glycine max
  Clone ID: LIB3051-039-Q1-K1-A7
cttcttggaactgcaacaatggtgccgcaacccattttgcatctaacccttttgtcattaataatctctctggaccactctttccttggtcgatgccgccgatcccacatttggcttcacccctcttggattatctagtagctcaaacttgcaaatccaaaagccttacgacgttgcagtcaacgagcgctacagcttttcaaatggagtgcacagattttgggtatactccacggacaagcctcatatgcaaggcagcaatacgaagccacgaactgagattcgtatcgctggatacgattatacattcggtgtgtggcaatttcaaaggtttttttacgtgcctagtggcacaaagcgggtgtgc

SEQ ID NO: 26491 - DNA, 359 bp, Glycine max
  unsure (1)..(359): unsure at all n locations
  Clone ID: LIB3051-046-Q1-K1-C1
gaactgcaacaatggtgccgcaacccattttgcatctaacccttttgtcattaataatgtctctgagcactctttccttggtcgatgccgccgatcccacatttggcttcacccctcttggattatctagtagctcaaacttgcaaatccaaaagccttacgacgttgcagtcaacgagcgctacagcttttcaaatggagtgcacagattttgggtatactccacggacaagcctcatatgcaaggcagcaatacgaagccacgaactgagattcgtatcgctggatacgattatacatncggtgtgtggcaatttcaagggtttttttacgtgcctagtggcacaagcggggtgtgc

SEQ ID NO: 26492 - DNA, 336 bp, Glycine max
  Clone ID: LIB3051-051-Q1-K1-A12
cttggaactgcaacaatggtgccgcaacccattttgcatctaacccttttggcattgataatctctctgaccactctttccttggtcgatgccggcgatcccacatttggcttcacccctcttggattatctagtagctcaaacttgcaaatccaaaagccttacgacgttgcagtcaacgagcgctacagcttttcaaatggagtgcacagattttgggtatactccacggacaagcctcatatgcaaggcagcaataccaaagccacgaactgagattcgtatcgctggatacgattatacattcggtgtgtggcaatttcaagggttttttta

SEQ ID NO: 26493 - DNA, 429 bp, Glycine max
  Clone ID: LIB3051-064-Q1-K1-B4
cttttgtcattaataatctctctgaccactctttccttggtcgatgccgccgatcccacgtttggctgcacccctcttggattatctagtagctcaaacttgcaaatccaaaagccttacgacgttgcagtcaacgagcgctacagcttttcaaatggagtgcacagattttgggtatactccacggacaagcctcatatgcaaggcagcaatacgaagccacgaactgagattcgtatcgctggatacgattatacatccggtgtgtggcaatttcaagggtttttttacgtgcctagtggcacaagcggggtgtgcatccagcaagtgtttggtggagtaacttctgccacaacctcgcagactagggtctatggtggttctctcactcattaccaatcacctactctggaaccaaacatctataat

SEQ ID NO: 26494 - DNA, 291 bp, Glycine max
  Clone ID: LIB3051-072-Q1-K1-D10
tggaactgcaacaatggtgccgcaacccattttgcatctaacccttttgtcattaataatcgctctgaccactctttccttggtcgatgccgccgatcccacatttggcttcacccctcttggattatctagtagctcaaacttgcaaatccaaaagccttacgacgttgcagtcaacgagcgctacagcttttcaaatggagtgcacagattttgggtatactccacggacaagcctcatatgcaaggcagcaatacgaagccacgaactgagattcgtatcgctggata

SEQ ID NO: 26495 - DNA, 452 bp, Glycine max
  Clone ID: LIB3051-077-Q1-K1-B11
gcaacccattttgcatctaacccttttgtcattaataatctctctgaccactctttccttgggggatgccgccgatcccacatttggcttcacccctcttggattatctagtagctcaaacttgcaaatccaaaagccttacgacgttgcagtcaacgagcgctacagcttttcaaatggagtgcacagattttgggtatactccacggacaagcctcatatgcaaggcagcaatacgaagccacgaactgagattcgtatcgctggatacgattatacatccggtgtgtggcaatttcaagggtttttttacgtgcctagtggcacaagcggggtgtgcatccagcaagtgtttggtggagtaacttctgccacaacctcgcagactagggtctatggtggttctctcactcattaccaatcacctactctggaaccaaacatctataata

SEQ ID NO: 26496 - DNA, 383 bp, Glycine max
  Clone ID: LIB3051-109-Q1-K1-F1
tttgcaactgcaacaatggtgccgcaacccattttgcatctaacccttttgtcattggggatcggtctgaccactctgtccttggtcgatgccgccgatcccacatttggcttcacccctcttggattatctagtagctcaaacttgcaaatccaaaagccttacgacgttgcagtcaacgagcgctacagcttttcaaatggagtgcacagattttgggtatactccacggacaagcctcatatgcaaggcagcaatacgaagccacgaactgagattcgtatcgctggatacgattatacatacggtgtgtggcaatttcaaaggtttttttacgtgcctagtggcacaagcggtgtgtgcatccagcaagtgtttggtgg

SEQ ID NO: 26497 - DNA, 379 bp, Glycine max
  Clone ID: LIB3051-114-Q1-K1-D3
caacaatggtgccgcaacccattttgcatttaacctttttgtcattaataatctctcttggcacgctttccttggtcgatgccgccgatcccacatttggcttcacccctcttggattatctagtagctcaaacttgcaaatccaaaagccttacgacgttgcagtcaacgagcgctacagcttttcaaatggagtgcacagattttgggtatactccacggacaagcctcatatgcaaggcagcaatacgaagccacgaactgagattcgtatcgctggatacgattatacatccggtgtgtggcaatttcaagggtttttttacgtgcctagtggcacaagcggtgtgtgcatccaacaagtgtttggtggagtaac

SEQ ID NO: 26498 - DNA, 438 bp, Glycine max
  unsure (1)..(438): unsure at all n locations
  Clone ID: LIB3051-115-Q1-K1-D3
cttggaactgcaacaatggtgccgcaacccattttgcatctaacccttttgtcattaagaatgtctctgaccactctttccttggtcgatgccgccgatcccacatttggcttcacccctcttggattatctagtagctcaaacttgcaaatccaaaagccttacgacgttgcagtcaacgagcgctacagcttttcaaatggagtgcacagattttgggtatactccacggacaagcctcatatgcaaggcagcaatacgaagccacgaactgagattcgtatcgctggatacgattatacatccggtgtgtggcaatttcaagggtttttttacgtgcctagtggcacaagcggngtgtgcatccagcaagtgtttggtggagtaacttctgccacaacctcgcagactanggtctatggtggttctctcactcat

SEQ ID NO: 26499 - DNA, 397 bp, Glycine max
  Clone ID: LIB3051-006-Q1-E1-C3
cgggtcggccacgcgtccgaccaagcgtccgtggaagaagctttgaaaatgcgtgaaatgatggaggctaagggattgtaccctggagttgttacttttaattcaattttgcgcaagctgtgccaagatggcaggataagggatgcaaacaaactcttgaatgagatgagtgaaaggaaaattcaagctgacaatatcacatgcaacacactaattaatgcttactgcaagattggagatttgaaatcagctttgaaatttaagaacaagctgttagaagctggtctaaaacctgatccatttacatataaggcactgagtcatgggttctgcaagacgaatgaactagaaagggcaaaggaattaatgttcagcatgcttgatgcctggatttaac

SEQ ID NO: 26500 - DNA, 361 bp, Glycine max
  Clone ID: LIB3051-006-Q1-K1-C3
cccacgcgtccgtggaagaagctttgaaaatgcgtgaaatgatggaggctaagggattgtaccctggagttgttacttttaattcaattttgcgcaagctgtgccaagatggcaggataagggatgcaaacaaactcttgaatgagatgagtgaaaggaaaattcaagctgacaatatcacatgcaacacactaattaatgcttactgcaagattggagatttgaaatcagctttgaaatttaagaacaagctgttagaagctggtctaaaacctgatccatttacatataatgcactgattcatgggttctgcaagacgaatgaactataaagggctaaggattttatgtttagcatgct

SEQ ID NO: 26501 - DNA, 427 bp, Glycine max
  Clone ID: LIB3051-041-Q1-K1-A7
gggatattttgtttgccaccttctggggtcatccctcttcacaatcaccctggaatgacggttttcagtaagctactttttggcactatgcacatcaagtcatatgattgggtcgttgactcgcctcctgaatctcctacaactctcaaaccatcagaaaaccaaggtcctgagatgaggttagccaaagttaaggttgatgctgatttcactgctccttgcaacccttccatcctttatccagaagatgggggcaacttgcactgtttcacagcagtgacagcatgcgcagttctagatgtgcttggtcctccatattctgatgctgaaggcagacactgcacatactaccacgatttccccttttccaacttttcagtggatggattatccataccagaagaggaaaagaatgcttatgaatggc

SEQ ID NO: 26502 - DNA, 266 bp, Glycine max
  Clone ID: LIB3051-044-Q1-K1-A11
attgatgttgtgtgcaacccattggggaagtctggaggtgccctcatccagcaatttatgatattgacttttgggtcactagctaattcaaccccatacttgggaggagtgcttctgctgattggttctgcctggctagcagcggcaaaatccttggatacccaatttactgcattgcgtaaagaggaagaactcgagaaagagatggaacgagcagccgccgtcaagataccagtggtggctgagactgaaagtggaaatgggtc

SEQ ID NO: 26503 - DNA, 415 bp, Glycine max
  Clone ID: LIB3051-044-Q1-K1-A7
gcaggaacaaagtaatggttttggaagcagaagaagaagttggcggtggtgagtttgagcatctgcctgaaggttgcatagcgaatataggttcgttcaccactcctccagatgcctgcgttctctctttggtctcttcctccttcagatctgccttagttaccgacttcgtatgggaaaggttcctaccctacgattatcacgctatcatttcccaatcttacaagcactgcactctcaccatttactgttacaagacggacctctacctgcacctatgccataacccgctgctcatagacgctggtgaacagagctttgcactcgactaactgaacggcataatatgctgcatgctctcagccggagtctctcatttgttgggggagacactcccaggacttgaagatggact

SEQ ID NO: 26504 - DNA, 425 bp, Glycine max
  Clone ID: LIB3051-045-Q1-K1-A7
ccttcccctacttcatcaccatcaacacatacacctggtgatggattaaatacagcaggcagcatgcagcatgtccaaaagagcatgatgatgtatggtacagaggcaacaggaggccttgcatcatcgtcgaatttgctggacgacatggatcgatttggagatgttgatgctttagatgataatgttgaatcctttctatcaaatgatggcggagatggtgggaatctctatggaacagtgaaacaaagtccagctgagcaacagaaagagtcttctaaaggtttcacctttgctgaagttggttgcagaagaacaaggaacagcaaagttacttgttgtcacttttcttcagatggaaagtggctagccagtgctggagatgacatgaaagttgacatctggaacatggacactttagaaac

SEQ ID NO: 26505 - DNA, 418 bp, Glycine max
  Clone ID: LIB3051-045-Q1-K1-B1
ccttcccctacttcatcaccatcaacacatacacctggtgatggattaagtgcagcaggcagcatgcagcatgtccaaaagagcatgatgatgtatggtacagaggcaacaggaggccttgcatcatcgtcgaatttgctggacgacatggatcgatttggagatgttgatgctttagatgataatgttgaatcctttctatcaaatgatggcggagatggtgggaatctctatggaacagtgaaacaaagtccagctgagcaacagaaagagtcttctaaaggtttcacctttgctgaagttggttgcagaagaacaaggaacagcaaagttacttgttgtcacttttcttcagatggaaagtggctagccagtgctggagatgacatgaatgttgacatctggaacatggacactt

SEQ ID NO: 26506 - DNA, 333 bp, Glycine max
  Clone ID: LIB3051-051-Q1-K1-C11
gtcccattgtttttcggggctatcacaaagatgaagcccagacgagagatgtcattggtgaagatggatggctacatactggaaatattgggacgtgggtacctggtggtcgtctcaaaattattggtaggaaagaagaatatctttaaattggcacaaagcgagtacattgctcctgagaagattgaaaatgtatacgccaaatgcaaatttgtggcgcaatgctttgtatatggtgatagcctaaattcttctttggtagctgatggctcggtggatcatgataacttgaaagcatgggctgcttcagaagggataatgtataatgatttg

SEQ ID NO: 26507 - DNA, 414 bp, Glycine max
  Clone ID: LIB3051-053-Q1-K2-A7
acgattagctttggtcgtcgggtgactgaaggatatggaatgacagagagtacttgtattatgagtttcattgatgagggtgacaaacttggtggtcatgttggctctcctaatctagcctgagagataaaacttgcggatgctccacaaatgaactatacatctgatgatcagcccaatccccgtggtgaaatttgtgtcaggggtcccattgtttttcggggctatcacaaagatgaagcccatacgagagatgtcattgatgaagatggatggctacatactggagatattgggacgtggttacctggtggtcgtctcaaaattattgataggaagaagaatatctttaagttggcacaaggcgagtacattgctcctgagaagattgaaaatgtatacgccaaatgcaaa

SEQ ID NO: 26508 - DNA, 431 bp, Glycine max
  Clone ID: LIB3051-031-Q1-K1-F3
cacctcttcctctctcgccccctcagattcaaaagtctttgcgtcgtcaatctcaagagacctgttcccccgctaaaagcatcgatggcggagaccaacaacaacgttgccgtcgaggtcttcgaaaaagaggatcttgccgtgtccctggccaaatacgtcgccgatctctccaacaaattcacttccgaaagaggggctttcactgtctgcttgtctggcggctctttgatcaattatctccggaaacttctggaacctccttatgttgatacccttgaatggtccaaatggcacgtgttttgggtggatgagagagtcgtgcctaagactcacgaagatagcaactacaagcttgctttagatggacttctctccaaggtgccaattcccccgggcaatgtttatgcaatcaatgatgcgctttcagc

SEQ ID NO: 26509 - DNA, 433 bp, Glycine max
  Clone ID: LIB3051-064-Q1-K1-A7
gatgaggaagaattgcaacttggagcttcgccttttccctccttccctctgcgatcttggccccatgatggaagcagaagttagtgagagaccccaacaacaggtcgcccaccatcaacagcaacagcaaccacaaccacaacatccgctgaccattttctatgatggcaagatttcagtttcagatgtcacagagcttcaggccagatccatattaatgctagcaaataaagagatggagaaaagagtgatgacaccaacggggtcagaaccatcttcaccaatattactgcaatcacctcataacatgtatagccccggcactggactttacatgaaaagatcactgcagaggtttctccagaagagaaagaatcgtgtgcaagaaacatgcccataccatcacgagctaattaatgttaaattatcaaaa

SEQ ID NO: 26510 - DNA, 411 bp, Glycine max
  Clone ID: LIB3051-064-Q1-K1-B9
tgttcgttcctgttatcaaaagacaatgaacggatgaacatgggaagaagtgggtggctttgggtcataagatgcaaataattgattggtatgcccaaactgaacttggccatggatctaatgttcaagggcttgaaacaactgcaacctttgatcccagaacagacgagtttgtaaattataggcccacattgacttcaagcaaatggtggcctggtggattgggtaaagtgtcaacacatgccgtggtttatgcccgactaattactgatggacaagatcatggagtgcatggtttcattgtccaactgcggagcctggatgatcacttaccttttccatgcataactgttggtgatattggaatgaaatttggagatggagcatataactccatggataatgggatgc

SEQ ID NO: 26511 - DNA, 346 bp, Glycine max
  Clone ID: LIB3051-065-Q1-K1-A11
cggacgcgtggggggaatgtttgttcctgctatcaaaggacaaggaactgaggaacaggagaagaagtggttgcctttggctcataagatgcaaataattggttgttatgcccaaactgaacttggccatggatctaatgttcaagggcttgaaacaactgcaacctttgatcccagaacagacgagtttgtaattcatagccccacattgacttcaagcaaatggtggcctggtggattgggtaaagtgtcaacacatgccgtggtttatgcccgactaattactgatggccaagatcatggagtgcatggtttcattgtccagctgcggaacctggatgatcac

SEQ ID NO: 26512 - DNA, 390 bp, Glycine max
  Clone ID: LIB3051-024-Q1-K1-B12
tgccacattacaacataagaaaccagcttctagtgttgatgctgaaattgtaggtggatcaacgataagttctcaggctatgctgaagcaagaggtttctactgcatcgtcaaagggcactactcttaaagagggtgatcgagtaaaatttgttggtaactttccttctgccgtctcatcactgccaaattatccttcaaggggacctagctatggctcccgaggcaaagttctgcttgcttttgaagataataggtcttcaaaaattggggttaggtttgataaatcaattccagatggcaatgatcttggaggcctttgtgaggaagaccgtgggttcttttgttctgcaaatcatttactacgggtagatggttcttggagggatga

SEQ ID NO: 26513 - DNA, 440 bp, Glycine max
  Clone ID: LIB3051-030-Q1-K1-G7
cccacgcgtccgcccacgcgtgcgcccacgcgtccgttccaacattattgagaatgaggctgtttctacttcaaatgtggtcaagtttgaagtgcagctttacaaaacccgggaagaaaagtatctgcttgatcttcaaagggtgcagggtccacagtttcttttcttggatctatgtgctgctttccttgcacagcttcgtgtcctctagagcgaagagcttaggctcaccagagacataaatatgccttgtgtttcatgtgaataagcttacattgtacatacaagtatcttttcggtccaagcttatcctctgttttctacccgtttatctgtgggtaaacattataatgagccaatcccaagtatgggatttgcttcgttaacaatggtgctcgactaggtttcccttctcttgtgattttaattttatcagtgta

SEQ ID NO: 26514 - DNA, 424 bp, Glycine max
  Clone ID: LIB3051-065-Q1-K1-A7
gcgatgttttgttcctctttggttcttcgtgcccttcccaatcttcaactttagggttcctgtaatctcgttattcctcttcactcccaaactccgttcactccaacaacactctgatttagaaatggatggaccggctggtcgaggtggtgctggactggacatgtttctgccaaattataaattgggaaaaacacttgggattggatcttttggcaaggtcaaaattgcagaacatgtattgactggccataaggttgcgatcaagattcttaaccgacgcaagataaagaacatggaaatggaagaaaaagtgagaagagaaatcaaaattttaagattattcatgcatcctcacattatacgactttatgaagtcatagaaacttcaactgacatatattttgtcatggagtatgtgaag

SEQ ID NO: 26515 - DNA, 440 bp, Glycine max
  Clone ID: LIB3051-070-Q1-K1-A11
acgctttctctctctaaagttgaagctccgtcactgcaacaaaacaagcactcaaagtgcgtcgggttcgtcactgatcacgtttcggcaatgcaccgtgtgggtagtgcgagtaacggaaacaattcaactcgcccgcgcaaggagaagagaataacctacgtgttgaatgattctgatgacacaaagcattgtgcaggcataaattgtctggctctacttacatctgcagcatctgatgggtctgattatctcttcactgggagccgtgatggtaggttaaaacgatgggcactagatgtgaatagagcaacatcatcggctacctttgaatctcatgtcgattgggttaatgatgctgctcttgttggtgatagcacacttggttcttgttcttcagatacaacccttaagacatggaatgcccttgtctttggaac

SEQ ID NO: 26516 - DNA, 417 bp, Glycine max
  Clone ID: LIB3051-103-Q1-K1-E6
tcgcccacgcgttcgctttggtttgctcaaccgatctccgcagcaatggtgaacgtggcggagacaaagaagacctactgcaagagcaaggagtgcaggaagcacacgctccacaaggtcacccaatacaagaagggcaaggacagcatcgccgctcagggaaaacgccgttatgaccgcaaacagtccggttacggtggccagaccaagcccgttttccacaaaaaggcgaaaaccaccaagaaaattgtgttgaggctccagtgccaaggatgcaagcatgtctcgcagcacgctatcaagaggtgcaagcactttgagatcggtggtgacaagaagggaaaaggaacatctctcttctagatggaatattagaatttgcaatttcacacactctgtgtacttttctcagtttga

SEQ ID NO: 26517 - DNA, 402 bp, Glycine max
  Clone ID: LIB3051-014-Q1-E1-E10
cgacccacacgtacgcccacgcgtccgggcagaacaaaaccgagcgagttgttgtgactgactcagtgagtgagcgagcgagcgagttactcatggcgaacgcggcgcttcggaacgtgaaggtgctcccgaactcggcgaatatggaggaagcgcgtcaccgagtcttcgaattcttcagaacggcctgcagatcgctaccttccgttatggaaatctacaacctctacgacgtcgtttccgtctccgaactccgctcctccgtcgcctcccagatccgcaacaacatccacgtcaccgatcccaaagtgatcgatatgctgcttttcaaggggatggaagagctgaagaatgttgtggaccattcaaagcagaggcatcatattattggtcagtacgtag

SEQ ID NO: 26518 - DNA, 410 bp, Glycine max
  Clone ID: LIB3051-094-Q1-K1-E9
gctggggctatagagtttattatatgccatgcagaggtctcaattgcatttgcagaagaaaagaaaatacctgagctattgaagacatttccaaatgcaacaaagtatctcaagacaattgtaagcttcggaaaggttacccctgaacaaaagcaagaagttgaaaattctgggttggaaatatattcatgggatgaattcttacaagtgggtcaaaatcagagttttgatcttcctattaagaaaaggagtgacatctgtacaataatgtatactagtggaactactggtgaccccaagggagtgttgatatcaaatgagagtattattactctcttagctggggttaagcgactgttggagagtgtaaatgaacaattgactgagaaggatgtatacatatcatacct

SEQ ID NO: 26519 - DNA, 398 bp, Glycine max
  unsure (1)..(398): unsure at all n locations
  Clone ID: LIB3051-029-Q1-K1-H12
ccaagccttcggacctgccggacggcttagcctcgggtgcatgattcaatggaccagccttggaaaggtggttgtggggggcctattccgctgcccttttcctggtcctattcctcggcttgaagttggttttccaaagcagaaaattgagaaacataccaccaggtcctcctccttttcccataataggaaaccttaacctnctcgaacagccaatccaccgtttcttccaacgcatgtcgaaacagtacggcaacgtggtttccctctggttcggttcacgtctggccgttgtcatctnctctccaacagcataccaagaatgcttcaccaaacacgacgttgcctttgccaaccggctaccttctctctcgggaaaatacatcttctacaacaca

SEQ ID NO: 26520 - DNA, 381 bp, Glycine max
  Clone ID: LIB3051-058-Q1-K2-F8
cccacgcgtccgaataggtaaccttaacctcctcgaacaacctattcaccgtgtcttccaacgcatgtccaaagaatatggaaacatcgtttccctttggttcggttcacgtctcgccgttgtcatttcctcaccaacagcataccaagaatgcttcaccaaacacgacgttgccttggccaaccggctaccttctctctcgggaaaatacatattctacaacaacaccaccgtagggtcctgctcccacggggagcactggcggaacctccgccgcatcaccgccctggacgtcctctccacgcagcgagtccactctttctccggaatccgaagcgacgagacgaaaaggttggtacagaggttgctggccaagaactt

SEQ ID NO: 26521 - DNA, 437 bp, Glycine max
  unsure (1)..(437): unsure at all n locations
  Clone ID: LIB3051-084-Q1-K1-A11
cactatcacacacatagttctcttatctggtgcaagtgcaacaatcaagtactgatcggcatgggaatgttgttgttgttgttgtcttattctctccttttcctggttctattccttacactgaaatcccttttccaaagcagaaaattgagaaacctaccaccaggtcctcctcctcttcccataataggtaaccttaacctcctcgaacaacctattcaccgtttcttccaacgcatgtccaaagaatatggaaacatcgtttccctttggttcggttcacgtctcgccgttgtcatttcctcaccaactgcataccaagaatgcttcaccaaacacgacgttgccttggccaaccggctaccttctctctcgggaaaatacatattctacaacaacaccaccgtanggtcctgctcccacgggcagcactggcg

SEQ ID NO: 26522 - DNA, 309 bp, Glycine max
  Clone ID: LIB3051-020-Q1-E1-F12
acgcgtacacccacgcgtccgggaactttgttactctcacacatgtctcgctccgtgcctttggtttcaaccatttttgtcttgcttctgcttctggtggccactgagatgatggggccagcaatggtggcataagcaagaacttgtgagtctcacagccaccgtttcaaggggccatgtttgagtgacaccaactgtggctctgtttgccgaaccgagcgtttcacgggaggacactgccgtggcttccgtcgcagatgcttctgcaccagacattgtgaattttaggaggtgggttaggagtgcgtt

SEQ ID NO: 26523 - DNA, 408 bp, Glycine max
  Clone ID: LIB3051-084-Q1-K1-C6
ggttgctgcatggaaagacaaggatggagactggtacgagacaggcctacacgtcttggttggggcttaccctaatgtgcagaacctttttggagaacttggcattaatgatcggttacaatggaaagagcattctatgatttttgctatgccaaataagcctggagagtttagtcgatttgattttcctgaagttcttccctccccattgaatggaatatgggcaatattgaggaacaatgagatgcttacatggccagagaaagtaaaatttgcaattgggcttctcccagctatgcttggcggacagccatatgttgaggctcaagatggtctttctgttcaagaatggatgaaaaaagcaggcgtacctgaacgggtaactgatgaggtgttcatagcaatgtc

SEQ ID NO: 26524 - DNA, 471 bp, Glycine max
  Clone ID: LIB3051-077-Q1-K1-C5
cccacgcgtccgcggtctcgtgggtgaaaattgcgaggatctttcttctctccaccatggtggggttgtgtttgcgtgtctctccgtaaattgccttcgactgtgacaacacgcaccgatcgccatgaacatcttcaccaagaaacccaccgtcaaagaggctcttcgtgagagtaaacgtgaaatgacaaacgccagtagaggtatagagaaggaaattggagctctacaatcggaagaaaaaaagcttgttgctgagataaagagaactgctaagacgggaaatgaggcagcaactaaaattctagctcgccagttgatcaggcttaggcaacaaattgctaatcttcaaggtagtcgagctcagatgagaggcatagcaactcacactcaggccatgcatgcacattcttctgttgctgttggcttgaaaggtgctactaaggcaatggcagctatgaataagaaaat

SEQ ID NO: 26525 - DNA, 361 bp, Glycine max
  Clone ID: LIB3051-044-Q1-K1-H5
cccacgcgtccgcaacatcaagacataggtttagatgcttatactgaatcaggatgatggaaaattggatctgaattctgtacaaaagatgtttcttaagggaatgtgtagttttggcagtactgattctgacatagttgagatttaccactgctcaggtgcgtcaatgcaagcacgatgggagctgttccagaagcaagctgaaattaccaaaagaaatcatggggaagctaacattcggtatgcttggcttgcttcctctaaaggagaactatctacaatgatgaactatggacttagtcattatggactatctggatcaaagtgcacatatggcattggtggtcatcttgctgctgtt

SEQ ID NO: 26526 - DNA, 392 bp, Glycine max
  unsure (1)..(392): unsure at all n locations
  Clone ID: LIB3051-002-Q1-E1-C4
cgaccatgttggagatgttccattgtctaagaaaattctcgctggatttacaactggtgctatggcaattgcagtggcaaatccaactgatcttgtgaaagttagacttcaagcagaaggaaaattgcctcctggcatgcccaagcgctactctggatcattaaatgcttattcaacaattatgagacaggaaggagttggagcactttggactgggatcggtcncaacatagcaaggaatggtattattaatgctgctgaactagccagctatgatcaaatgaaacagactaattttgaaaatcctggattcaccgacaatgttgttactcaccttcttgctggtccaggagcaagattttttgcagtctgtgttggctcccctgttgatg

SEQ ID NO: 26527 - DNA, 405 bp, Glycine max
  Clone ID: LIB3051-006-Q1-K1-C11
tccacttccaattttcaataattcacgactccttccgagatctctctctctcgcccacgatccaggcatggcgaatacggggaatttagacgcggcgatagagcaattgctgaacgtggagaagcagatgaggctcgccggtgacgtggcgggtaccagaaaagcagccaccgatattttgcagctctgcttcgatgcacgagcctggaaaacactcaatgaccagattgtcgttttgtcaaaacgacgtggccagctcaagcaagctgtaacagctatggtgcaacaggctatgcaatatattgacgagacaccagatatcgaaactcgcatagaactcatcaaaacgttgaacagtgtgtctgcagggaagatatacgtggaaattgagagagctcgattgac

SEQ ID NO: 26528 - DNA, 452 bp, Glycine max
  Clone ID: LIB3051-082-Q1-K1-C1
aatgttcaataattcacgactccttccgagatctctctctctcgcccacaatccaaccgtggcgagtacggggaatttagacgcggcgatagagcaattgctgaacgtggagaagcagatgaggctcgccggtgacgtggcgggtaccagaaaagcagccaccgatattttgcagctctgcttcgatgcacgagcctggaaaacactcaatgaccagattgtcgttttgtcaaaacgacgtggccagctcaagcaggctgtaacagctatggtgcaacaggctatgcaatatattgacgagacaccagatatcgaaactcgcatagaactcatcaaaacgttgaacagtgtgtctgcagggaagatatacgtggaaattgagagagctcgattgatcaaaaaacttgcaaaggataaggaagaacaaaggcttatagctgaaactgttgatt

SEQ ID NO: 26529 - DNA, 401 bp, Glycine max
  Clone ID: LIB3051-006-Q1-E1-F12
caatgaccctgttgtgtccttcaagacagccttgtggtactggatggaacatgtgcgtcctgtcatcaaccagggttttggtgcaaccattatagctatcaatggccgacttgaatgtgatggtgcaaaccctagtactgttcaggctcgtgttaattactacacccagtattgttcacaacttggtgtttcccctggtgacaatcttacttgctaatttatcagtatacatggttccatatgatgacatcatacattcatacggtatatcttaacatatatcagaaaataaaccattcaaggcttacagccttaatttgattattaatgtaattactacttttgggaatattgtatctgattaccatctattatgtgcatccaatattgaataaaactac

SEQ ID NO: 26530 - DNA, 404 bp, Glycine max
  Clone ID: LIB3051-015-Q1-E1-B8
acaaacattatgtagctaggatgagcaagttactactcattcgtgttgctgggttcgtggcaacctttgtcaccatggtgatgatgatggtgcccaaaaacgtgagtgcccaaaacataggtgatgacatcgtcacacaagacttcttcaacagcataatcagtcaggctgatgatggttgtgcagggaagaacttctactcacgagatgctttccttaatgctcacaattcctacaatgagtttggtatgcttggtaatcaggatgactccaagcgtgaggttgcagctgctttcgcccatttcacccatgaaacaggacatttttgctacatagaagagattaacggtgcatcaggggactactgtgacgagagcaacaccgagtacccatgtgcccctaac

SEQ ID NO: 26531 - DNA, 426 bp, Glycine max
  Clone ID: LIB3051-040-Q1-K1-C6
ctattacatacattttgtagctaggatgagcaagttactactcattcgtgttgctgggttcgtggcaacctttgtcaccatggtgatgatgatggtgcccaaaaacgtgagtgcccaaaacataggtgatgacatcgtcacacaagacttcttcaacagcataatcagtcaggctgatgatggttgtgcagggaagaacttctactcacgagatgctttccttaatgctcacaattcctacaatgagtttggtaggcttggtaatcaggatgactccaagcgtgaggttgcagctgctttcgcccatttcacccatgaaacaggacatttttgctacatagaagagattaacggtgcatcaggggactactgtgacgagagcaacaccgagtacccatgtgcccctaacaaagcgtactatgggcg

SEQ ID NO: 26532 - DNA, 303 bp, Glycine max
  Clone ID: LIB3051-067-Q1-K1-F11
aatttctattacatacattttgtagctaggatgagcaagttactactcattcgtgttgctggggtcgtggcaacctttgtgaccatggtgatgatgatggtgcccaaaaacgtgagtgcccaaaacatatgtgatgacatcgtcacacaagacttcttcaacagcataatcagtcaggctgatgatggttgtgcagggaagaacttctactcacgagatgctttccttaatgctcacaattcctacaatgagtttggtaggcttggtaatcaggatgactccaagcgtgaggttgcatctgct

SEQ ID NO: 26533 - DNA, 443 bp, Glycine max
  Clone ID: LIB3051-078-Q1-K1-G2
aacattataatttctattacatacattttgtagctaggatgagcaagttactactcattcgggttgctgggttcgtggcaacctttgtcaccatggtgatgatgatggtgcccaaaaacgtgagtgcccaaaacataggtgatgacatcgtcacacaagacttcttcaacagcataatcagtcaggctgatgatggttgtgcagggaagaacttctactcacgagatgctttccttaatgctcacaattgctacaatgagtttggtaggcttggtaatcaggatgactccaagcgtgaggttgcaactgcttttcgccatttcacccatgaaacatgacatttttgctacatataagagattaacggtgcattcagggactactgtgaccagagcaacaccgagtacccatgtgccccttacaaagcgtactatgggcgtgga

SEQ ID NO: 26534 - DNA, 460 bp, Glycine max
  Clone ID: LIB3051-082-Q1-K1-C2
ataatttctattacatacattttgtagctaggatgagcaagttactactcattcgtgttgctgggttcgtggcaacctttgtcaccatggtgatgatgatggtgcccaaaaacgtgagtgcccaaaacataggtgatgacatcgtcacacaagacttcttcaacagcataatcagtcaggctgatgatggttgtgcagggaagaacttctactcacgagatgctttccttaatgctcacaattcctacaatgagtttggtaggcttggtaatcaggatgactccaagcgtgaggttgcagctgctttcgcccatttcacccatgaaacaggacatttttgctacatagaagagattaacggtgcatcaagggactactgtgacgagagcaacaccgagtacccatgtgcccctaacaaagcgtactatgggcgttgaccaatccaactatcatggaactt

SEQ ID NO: 26535 - DNA, 426 bp, Glycine max
  unsure (1)..(426): unsure at all n locations
  Clone ID: LIB3051-091-Q1-K1-E7
aaacattataatttctattacatacattttgtagctaggatgagcaagttactactcatgggtgttgctgggttcgtggcaacctttgtcaccatggtgatgatgatggtgcccaaaaacgtgagtgcccaaaacataggtgatgacatcgtcacacaagacttcttcaacagcataatcagtcaggctgatgatggttgtgcatggaagaacttctactcacgagatgctttccttaatgctcacaattcctacaatgagtttggtaggcttggtaatcaggatgactccaagcgtgaggttgcagctgctttcgcccatttcacccatgaaacaggacatttttgctacatagaagagattaacgtgnttgcatcatgggactactgtgacgagagcaacaccgagtacccatgtgcccctaac

SEQ ID NO: 26536 - DNA, 419 bp, Glycine max
  Clone ID: LIB3051-096-Q1-K1-D7
cccacgcgtgcgatttctattacatacatttagcagctaggatgagcaagttactactgggtcttgttgctgggttcgtggcaacctctgtcaccatggagatgataatggtacccaaaaacgtgagttcccaaaacatatgtgattacattttcactcaagacttatacaatagtataatcagtcaggctgatgatggttgcgcttggaagaacttctactaacaatatgctttctttaatgctcacaatacctacaatgagtttggtaggctcggtgatcacgatgactgctagcgtgaaggaatacctggttttgcccatataaccctttaaacaagacatttttgctacatagactagattaactgtgcatcatgggactactgtgacgagagcagcaccgattacccaattgcc

SEQ ID NO: 26537 - DNA, 423 bp, Glycine max
  Clone ID: LIB3051-106-Q1-K1-E10
gcagatttttgctacatagaagagattaacggtgcatcaggggactactgtgacgagagcggcgaccgagtacccatgtgcccctaacaaagcgtactatgggcgtggaccaatccaactatcatggaacttcaactacggaccagcagggcagagcatcggatttgatggattgaacgctccagagacggtggccaatgaccctgttgtgtccttcaagacagccttgtggtactggatggaacatgtgcgtcctgtcatcaaccagggttttggtgcaaccattagagctatcaatggccgacttgaatgtgatggtgcaaaccctagtactgttcaggctcgtgttaattactacacccagtattgttcacaacttggtgtttcccctggtgacaatcttacttgctaatttatcagtat

SEQ ID NO: 26538 - DNA, 423 bp, Glycine max
  unsure (1)..(423): unsure at all n locations
  Clone ID: LIB3051-107-Q1-K1-A4
caaacattataatttctattacatacattttgtagctaggatgagcaagttactactcattcgtgttgctgggttcgtggcaacctttgtcaccatggtgatgatgatggtgcccaaaaacgtgagtgcccaaaacataggtgatgacatcgtcacacaagacttcttcaacagcataatcagtcaggctgatgatggttgtgcagggaagaacttctactcacgagatgctntccttaatgctcacaattcctacaatgagtttggtaggcttggtaatcaggatgactccaagcgtgaggttgcagctgctttcgcccatttcacccatgaaacaggacatttttgctacatagaagagattaacggtgcatcaggggactactgtgacgagagcaacaccgagtacccatgtgcccttaa

SEQ ID NO: 26539 - DNA, 437 bp, Glycine max
  Clone ID: LIB3051-009-Q1-E1-H5
aaaacaaaaacatttccctgctacttcatcttcttcttcttcttcttcatcaccggtggttctgttcattcttccttgcaccttcttctttgaagatcgaaattgtgtttttgaaaaaatgggagttccagagaaagaccctctttcccaattgagtttgcctcctggttttcggttttaccccaccgacgaggagctcctcgttcagtatctatgccgcaaggtcgctggccaccatttctctcttccaatcattgctgaaattgatttgtacaagttcgacccatgggttcttccaagtaaggcgattttcggtgagaaagagtggtactttttcagccctagagacaggaaataacctaacgggtcccgacccaacagagtagccgggtcgggttattggaaagccaccggaaccgacaagatcatcaccaccg

SEQ ID NO: 26540 - DNA, 426 bp, Glycine max
  unsure (1)..(426): unsure at all n locations
  Clone ID: LIB3051-011-Q1-E1-H1
aggtggttcttttccttctgagaagatcgaattgtgttttgcaaaaatgggagttccagagaaagaccctctttcccaattgagtttgcctcctggttttcggttttaccccaccgacgaggagcttctcgttcagtatctgtgccgcaaggtcgctggccaccatttctctcttccaatcattgccgaaattgacttgtaccagttcgacccatgggttcttccaagtaaagcgattttcggtgaaaaagagtggtactttttcagccccagagacaggaaatacccgaacgggtctcgacccaacagagtanctgggtcgggttattggaaagccaccggaaccgacaagatcatcaccancgaaggtagaaaattggcataaaaaaagccctcgttttctacgttggcaaagcccccaaaggc

SEQ ID NO: 26541 - DNA, 423 bp, Glycine max
  Clone ID: LIB3051-017-Q1-E1-E9
cacgcgtcagcacaacctagcggcactacacacgttatctctctctctctctctctctctccctctctccttccccaagatgtcgagcgccgattccgagcaccgagaagaagaagaaggacccgccgtcggcgacgacgaggaaaacggagcacacgtcgctcccatcgtcaagctcgaggaggttgctgtcaacaccggcgaggaggacgaagatgcaatcctagatctcaaatcgaagctttaccggttcgacaaggatgggaaccagtggaaggagcgaggcgcgggcaccgtgaagttcctgaagcataaggctacgggcaaggttaggcttctcatgaggcaatccaagacgctcaagatctgcgccaatcatctcattttgcctactatgagtgtgcaagagcacgctgggaacga

SEQ ID NO: 26542 - DNA, 392 bp, Glycine max
  Clone ID: LIB3051-017-Q1-E1-F9
cacgcgtcaacgcaaacttacggcactactcacgttatctctctctctctcactcactctcgctctctccttcgccaagatgtcgatcgctgattccgaacatcgacttgaggatgaggcacccgccgtctgcgacgatgaggacaccggagctcacttcgcacccatcgtcaatctctatgaggttgctgtcaccacctgcgaggaggacgaatatgcattcctatatctcagctcgaagctttacaggttcgacaaggatgggaaccagtggaaggagcgaggcgcgggcaacgtgaagttcctgatgcataaggctacgggcaacgttaggcttctcatgaggcattccatgacgcccaagatctgcgctaatcatcgcattttgccta

SEQ ID NO: 26543 - DNA, 419 bp, Glycine max
  unsure (1)..(419): unsure at all n locations
  Clone ID: LIB3051-019-Q1-E1-D11
aacacgcgtccgcacanaccctcgcctcacactcctcaaaccctagcggcactacacacgttatctctctctctctctctctctctccctctctccttccccaagatgtcgagcgccgatcccgagcaccgagaagaggaggaggcacccgccgtcggcgacgacgaggacaccggagcacacgtcgctcccatcgtcaagctcgaggaggttgctgtcaccaccggcgaggaggacgaagatgcaatcctagatctcaaatcgaagctttaccggttcgacaaggatgggaaccagtggaaggagcgaagcgcgggcaccgtgaagttcctgaagcataaggctacgggcaacgttaagcttctcatgangcaatccaagacgctcaagattctgcgcaatcatctcattttgcctac

SEQ ID NO: 26544 - DNA, 428 bp, Glycine max
  Clone ID: LIB3051-019-Q1-K1-D11
cccacgcgtccgcacaaaccctcccctcacactctccaaaccctagcggcacgacacacgttatctctctctctctctctctctctccctctctccttccccaagatgtcgagcgccgatcccgagcaccgagaagaggaggaggcacccgccgtcggcgacgacgaggacaccggagcacacgtcgctcccatcgtcaagctcgaggaggttgctgtcaccaccggcgaggaggacgaagatgcaatcctagatctcaaatcgaagctttaccggttcgacaaggatgggaaccagtggaaggagcgaggcgcgggcaccgtgaagttcctgaagcataaggctaccggcaaaggtaggcttctcatgaagcaatccaagacgctcaagaactgcgccaatcatctgattttggctactatgagtgt

SEQ ID NO: 26545 - DNA, 449 bp, Glycine max
  Clone ID: LIB3051-027-Q1-K1-C10
cttcttcttctttttcatcaatcatcactagtggttcttttccttctgagaagatcgaattgtgttttgcaaaaatgggagttccagagaaagaccctctttcccaattgagtttgcctcctggttttcggttttaccccaccgacgaggagcttctcgttcagtatctgtgccgcaaggtcgctggccaccatttctctcttccaatcattgccgaaattgacttgtacaagttcgacccatgggttcttccaagtaaagcgattttcggtgaaaaagagtggtactttttcagccccagagacaggaaatacccgaacgggtctcgacccaacagagtagctgggtcgggttattggaaagccaccggaaccgacaagatcatcaccaccgaaggtagaaaagttggcataaaaaaagccctcgttttctacgttggcaaagccccc

SEQ ID NO: 26546 - DNA, 439 bp, Glycine max
  Clone ID: LIB3051-102-Q1-K1-A11
gggatattctcatacttaatagttgccggattgtgtcactgaattgagctgtttgtgtccgcttgagtttatttcagctggcaaagttagggttgggtttgaattttgaggcatgactggttgagctttcggggtctgggagtttgttattattgttatttttcattctacatatgtatttgttgcgagtaatgggtcatgttggttggagggtgcagtccagaaagtcaagaactatatacgaacgttttggtaccgacttgtttgagtttcaaaaaaaaaagaatggtactttttcaaccccaaaaaacaagaaatacccgaacgggtctcgacccaacagaataactgggtcgggttattggaaagccaccggaaccgacaagaacattaccacctaaggtttaaaagtttgcataaaaaaagcccttcgtttcta

SEQ ID NO: 26547 - DNA, 427 bp, Glycine max
  Clone ID: LIB3051-037-Q1-K1-G11
ctccgaactccgaagcccttcagcaaccatgtcgaggagaaaggttagggagccaaaggaggaaaatgtcactcttggtccagccgttagagacggtgaacatgttttcggcgtggctcgcatctttgcctccttcaacgacaccttcatccatgtcactgatttgtctgggagggaaacccttgttcgcatcactggtgggatgaaagttaaagctgacagagatgaatcatctccatatgctgctatgcttgcagcacaggatgttgctgccagatgtaaggaactgggcataactgctcttcatatcaggctccgtgccactggtggaaacaagaccaaaacacctggtcctggtgctcaatcagctcttcgagcccttgcacgttcaggaatgaaaaatggtcgtatagaggatgttactccc

SEQ ID NO: 26548 - DNA, 396 bp, Glycine max
  Clone ID: LIB3051-043-Q1-K1-G4
gccgaagaaggttcatccaatccccgaagcccttcaccgcattgcaaccatgtcgaggagaaaggtcagagagccaaaggaagaaaacgtgactctgggcccagctgttagagatggtgaacatgtctttggcgtcgctcgcatctttgcctccttcaatgataccttcattcatgtcactgatttgtctgggagggaaacgcttgtccgcatcactggtggaatgaaggttaaggctgacagagatgaatcgtctccttatgctgctatgcttgcagctcaagatgttgctgccagatgcaaggaacttggcataactgctcttcatatcaagctccgtgccactggtggaaacaagacatagacacctggccctggtgctcaatcagctcttcg

SEQ ID NO: 26549 - DNA, 448 bp, Glycine max
  Clone ID: LIB3051-098-Q1-K1-A3
gcgtccggaaataaggtggagggcttccagcaaaaccttactccagatctgtataaaaacaaaaacgctggctgtgaaaccctaataagcttcatcaatctccgaactccgaagcccttcagcaaccatgtcgaggagaaaggttagggagccaaaggaggaaaatgtcactcttggtccagccgttagagacggtgaacatgttttcggcgtggctcgcatctttgcctccttcaacgacaccttcatccatgtcactgatttgtctgggagggaaacccttgttcgcatcactggtgggatgaaagttaaagctgacagagatgaatcatctccatatgctgctatgcttgcagcacaggatgttgctgccagatgtaaagaactgggcataactgctcttcatatcaggcttcgtgccactggtggaaacaagaccaaaacacct

SEQ ID NO: 26550 - DNA, 350 bp, Glycine max
  Clone ID: LIB3051-101-Q1-K1-E6
ctgggagggaaacccttgttcgcatcactggtgggatgaaagttaaagctggcggaggtgaatcatctccatatgctgctatgcttgcagcacaggatgttgctgccagatgtaaggaactgggcataactgctcttcatatcaggctccgtgccactggtggaaacaagaccaaaacacctggtcctggtgctcaatcagctcttcgagcccttgcacgttcaagaatgaaaattggtcgtatagaagaatgtactcccattccttccgataggacacctagaaagaatggtagaaggggtagaagactttaaacctcgtatgggataccactggaggtggtaaatttt

SEQ ID NO: 26551 - DNA, 434 bp, Glycine max
  Clone ID: LIB3051-065-Q1-K1-E9
cccacgcgtccgcccacgcgtccgagaacaatcgtatgcagttttaagccacctgcatcgtttggtcatgcgtgcaccttatatattttcctcagactacaaacacttctattgccagtataatgagccatcatatgtcaaaaagttgaagcttgaaatgctgactgcagttgcaaatgaaagtaacacctatgagatagtgacagaattatgtgaatatgctgcaaatgttgacattcccattgcaagggaatcaattcgagctgttgggaagatagcattgcagcagtatgatgtcaatgctattgttgatcgacttctccagtttcttgagatggaaaaggactatgttacttctgaagctctggtgcttgtgaaagatctgctaagaaaatatccacaatggagtcaggattgtatttgctgtgttggaa

SEQ ID NO: 26552 - DNA, 374 bp, Glycine max
  Clone ID: LIB3051-084-Q1-K1-F3
cccacgcgtccggtccagatgttcattggagatggagcaaaacttgttcgtgacgcctgtcaactagcaaaagaaaagtcaccatgcattatttttatagatgaaattgatgcaattggaaccaagcgttttgatagtgaagtaagtggagacagagaggtccaacggacaatgttagaattgcttaatcagcttgatggttttagcagtgatgaccggattaaggtgatagcagcaacaaaccgtgcagatattcttgaccctgcccttatgcgttctggtcgattagatcgtaaaattgagtttccacacccaagtgaagaagcaagagctcgaattctacagatccattcgagggagatgaatgttcaccc

SEQ ID NO: 26553 - DNA, 485 bp, Glycine max
  Clone ID: LIB3051-074-Q1-K1-H1
aattaatgccccagctgaggacaccattcttcctctaccccatgttgtgcatgtgaatacagctggggctgcacctcctccttctggtctttccggcatgtctgaacgtggatttcgtgtcacacacacttatggtctctcagaaacctatggcccctctgtctactgtgcctggaaaccagaatgggaatcacttccccctgaaaaccaagcccggctcaatgcaagacaaggtgttaggtacattggcttggaaggcctggctgttgtgaacacaaaaaccatggaacctgttcctgctgatggtaaaactgttggtgagattgtgatgcggggtaattctgtgatgaaaggctacttaaagaaccctaaggctaacgaggagacctttgcaaatggatggtttcattctggggatcttgctgtgaagcacccagatggatatatagaaattaaagacagatcaaaggacatcataatctctg

SEQ ID NO: 26554 - DNA, 472 bp, Glycine max
  Clone ID: LIB3051-090-Q1-K1-B7
cccacgcgtccgagttcttttctttagcagaagaagctttgaaaatatggtctgagaaggccgggaccttcagccctccacttttaatagtcattggtgatgaaaattgcgaccctaaggcacttaaatatgctctgggcaaaggagccgttgattatgaggattttctccagagtggagatccagaatatgcatggaaacccccagaggatgagtggcagagcatttcattgggttacacatccggtaccactgctagtccgaagggtgtggttttacatcaccgtggagcctatctcatgtctctgagtggagctcttatttggggaatgactgaaggagctgtgtatctttggacacttcccatgtttcattgcaatggttggtgttacacttggacacttgcagctctgtgtggtacaaacatatgccttcggcaggtaacaccgaaagcagtatatgaagccattgc

SEQ ID NO: 26555 - DNA, 402 bp, Glycine max
  Clone ID: LIB3051-090-Q1-K1-C1
cccacgcgtccgagttcttttctttagcagaataagctttgaaaatatggtctgagaaggccgagaccttcagccctgcacttttaatagtcattggtgatgaaaattgcgaccctaaggcacttaaatatgctctgggcaaaggagccgttgattatgaggattttctccagagtggagatccagaatatgcatggaaacccccagaggatgagtggcagagcatttcattgggttacacatccggtaccactgctagtccgaagggtgtggttttacatcaccgtggagcctatctcatgtctctgagtggagctcttatttggggaatgactgaaggagctgtgtatctttggacactttccatgtttcattgcaatgggtggtgttacacttggacac

SEQ ID NO: 26556 - DNA, 431 bp, Glycine max
  Clone ID: LIB3051-008-Q1-E1-C11
acgcgtccgaccacgcgtccgggcgggtctacagccaagttagttgccaagtataggccatcggttccaataatgtctgtggtggttccagtgttgagcacggactcatttgattggacctgcagtgatgagacgccagcaaggcacagcctgatatagaggggcttgattcttaaactgtgcgagggatctgcaaaggctaccgatgcagaatccacagaggtcattctcgaagctgctcttaagtccgcagcacatagggccctttgtaagcctggtgatgcagttgttgccctgcatcgtattggagctgcctctgtcataaagatctgcatagtctaataatgcatgctcaactcaacgtgccgccaacgaatgcacggttatgtattgcctttgagctctttctttctgctgtttatccgtatcat

SEQ ID NO: 26557 - DNA, 384 bp, Glycine max
  Clone ID: LIB3051-065-Q1-K1-G10
gtgatctgcaaaggctactgatgcagaatccacagaggtcattctctaggctgctcttgggaccgtaacataaagggccctttataagcctggtgatgcagttgctgccctgcatagcattggagctgcctctgtcataaagatctgcatagtcaaataatgcatgctcaactcaacgtgcacgcaactaatgcagggttatgctttgacttttattcctttctctctgctgcttatacgtatcatcaaatggaggatttagttactagctgtaaatcgagtggttcatggtatactgctgatatattgccgagcacttctaaatcagattatcatggaaataatactcttaccttttaaaatgtgattggttttgcggaaaaa

SEQ ID NO: 26558 - DNA, 382 bp, Glycine max
  Clone ID: LIB3051-001-Q1-E1-F6
tcttcttcatctacattagtagttcttgttattcattattcttcatactcacacagcttcttctgggggcaaaaggggtcatttttcagatccgaggttgagctcctctacccatcatgatggagctcggatacctgaatcagggtcagccttctagaggaacaacaccacttgtcactcttccattgttgctttcaacacttgtgttcttctccactttcacacatgccttctcttcttctgtgtttccggaattgaatcctattaaacctaagcactcacgtcttctcaggagtgctgtgcaacgagaaactcctacatctcagttgtctgaactatggtcacctctggaaagccaaggatggaaaccttatgttgaatc

SEQ ID NO: 26559 - DNA, 451 bp, Glycine max
  Clone ID: LIB3051-108-Q1-K1-H7
gaaataattccctctgatggaagacaagaagagccttgcttcatctgaagagcgttggcagataaagggaaaagcttctctattagctgcacttgactactatgttggcttgcatagtgacatcttcatctctgcttccccaggaaatatgcacaatgcattggttggacaccggacatacttgaacttaaagactataaggccaaatatggcattgatgggtcagcttttcctgaataaaaccatagagtggtcagagtttcaggatgcagtggttgaaggtcaccaaaatagacaaggggaactaatgctgatgaagccaaaacaatcaatatatacgtatccagctcctgattgcatgtgccaagcttagtagtgactagtagtagtatatacttaaattattattattgctcacggatgtagcctgtgtattttatagttcggtgtc

SEQ ID NO: 26560 - DNA, 372 bp, Glycine max
  Clone ID: LIB3051-109-Q1-K1-D12
aaacaaccaacctcttcagtgatcttttattagtactaagctaaaccatttgggattgcctcaaaatcaaaacctttatctttctagctatttcccttttcaaatcatgccacctaacatcaccaccgttgttgccaatgtcaccaccgagcaattacccaaggctcgtggaggaagtgggcgtgccttcgtgacctttcttgctgggaacggtgattacgtaaagggtgtcgtgggtttggccaaaagactgataaaggccaaaagcatgtaccctttggtggttgctgtgttaccagatgttcctgaagaacatcgtgagattctcaaatcccaaggttgcattgtcagggagattgaacctgtgtaccc

SEQ ID NO: 26561 - DNA, 346 bp, Glycine max
  Clone ID: LIB3051-002-Q1-E1-A7
cccacgcgtccgcagagatcggagcgtggaacctctctctctctctctctctctctgcggaaaccggaatatctcagttctctgatcagatccatccgacgtcgtttcagtgataatggctccgttcagcggcgatgagacggcaccgtttttcggcttccttggagccgcagctgccctcgtcttctcctgtatgggagctgcctatggcacagcgaagagtggcgttggcgtggcttcgatgggtgtgatgagaccagagctggtgatgaagtctattgtccctgttgttatggctggagttttgggtatttatggccttattattgctgttattatcagtact

SEQ ID NO: 26562 - DNA, 421 bp, Glycine max
  Clone ID: LIB3051-051-Q1-K1-H7
cggcgatgagacggcaccgtttttcggcttccttggagccgcagctgccctcgtctggtcctgtatgggagctgcctatggcacagcgaagagtggcgttggcgtggcttcgatgggtgtgatgagaccagagctggtgatgaagtctattgtccctgttgttatggctggagttttgggtatttatggccttattattgctgttattatcagtactggcattaatcccaaggccaaatcttattacctctttgatggttatgcacatctctcctctggtcttgcctgtgggctggctggcctctctgctggcatggctattggtattgttggtgatgctggtgttagagccaatgcacagcagccaaagctttttgttggaatgattcttatgctcatttgtgctgaagctcttgctctc

SEQ ID NO: 26563 - DNA, 424 bp, Glycine max
  Clone ID: LIB3051-094-Q1-K1-A11
cggcgatgagacggcaccgtttttcggcttccttggagccgcagctgccctcgtcttgtcctgtatgggagctgcctatggcacagcgaagagtggcgttggcgtggcttcgatgggtgtgatgagaccagagctggtgatgaagtctattgtccctgttgttatggctggagttttgggtatttatggccttattattgctgttattatcagtactggcattaatcccaaggccaaatcttattacctctttgatggttatgcacatctctcctctggtcttgcctgtgggctggctggcctctctgctggcatggctattggtattgttggtgatgctggtgttagagccaatgcacagcagccaaagctttttgttggaatgattcttattctcatttttgctgaagctcttgctctctat

SEQ ID NO: 26564 - DNA, 404 bp, Glycine max
  Clone ID: LIB3051-040-Q1-K1-B2
gtgcggtaggctcatccgagaccggaagcagcaatggggatcgatctcaaggccggaggtaaaagcaaaaaaaccaaaagaacagcacccaagtccaatgatatctatcttaagctcttggtcaagctttatcgcttccttgttcggagaactggcagcaaattcaatgccgttatactcaagagattgttcatgagcaaggttaacaagcccccattgtctttgtcaaggttgattaagtataccaaggggaaggaagataagattgctgtggtggtgggcaatataaccgatgatattcgtgtttatgaagttccagcctttaaaggtcacagcactcaggtttacagagactgctcgggcaagaattgagaaggcaagtggtgaatgcttgacggttgatc

SEQ ID NO: 26565 - DNA, 166 bp, Glycine max
  Clone ID: LIB3051-100-Q1-K1-H7
aagtataccaagggggagggttatattagggctggggtggtgggcaatataaccgatgatattcgtgtttatgaagttccagccttaaaggtcacagcactcatgtttacagagactgctctttcaataattgataatgcaagtggtgaatgcttgacgtttgatc

SEQ ID NO: 26566 - DNA, 434 bp, Glycine max
  unsure (1)..(434): unsure at all n locations
  Clone ID: LIB3051-025-Q1-K1-E6
gtgaggtagaacccttccacggtggtgactgcgcgatgggtgcctacaagtatgtttcagagctatggcgcaagaagcagtctgatgtcatgcgcttcttgcagcgggtgaggtgctgggagtataggcagcaaccttccattgttcgcttgacaaggtcgacccgccctgacaaggctcgtcgcttgggcttcaaggctaagcagggctatgtgatataccgtgttcgtgttaggaggggtggccgaaagaggccagttcccaaaggtattgtttatgggaagcccacaaaccagggtgttacccaactgaaatttcagcgtagcaagaggtcagttgctgaggagcgagctggacggaagctgggtggacttagggtcctcaattcttactgggtgaatgaggactctacttataaatactntgaggtgatt

SEQ ID NO: 26567 - DNA, 385 bp, Glycine max
  unsure (1)..(385): unsure at all n locations
  Clone ID: LIB3051-028-Q1-K1-A11
cccacgcgtccggaaatttcagcgcagcaagaggtctgttgccgaggagcgagctggaaggaagttgggtggcctcagggttctcaattcatactgggtgaatgaggactcgacttacaaatattttgaggtcattctggtggatgttgcccacagcgctgttagaaatgatccaagaatcaactggctctgcaacccagtccataaacacagggaactgcgtggcctcacttctgctgggaaaagtaacaggggtttacggggcagaggacatctctaccacanaaatcgtccatcccgcagggcaacctggaagagaaacaacactctntcccttcgtcgctaccgttgattntgttgcagttatcggatgttgcttcatttt

SEQ ID NO: 26568 - DNA, 398 bp, Glycine max
  Clone ID: LIB3051-017-Q1-E1-F5
agcagcaattttctattttcttctctcatggcttcagattccaaaaaggatttccctgctgatgacaaagctggaacagcagagaataaagcatccaaagatgaaacgtcatctaaagattctccagcagcacaaagagctactacagctacttctggacctgcaactggttttccaggcaacccttttgatttctctgcaatgtctggcctgctcaatgatccaagtatcaaggaattggctgaacagatagcaaaagatccatcattcaaccagatggctgagcagcttcagaaaacttttcaaggagctccacaggatgctatgcctagctttgataatcaacaatatttttcaaccatgcaacaggttatgcagaatcctaattttatgaccat

SEQ ID NO: 26569 - DNA, 413 bp, Glycine max
  unsure (1)..(413): unsure at all n locations
  Clone ID: LIB3051-070-Q1-K1-C1
ggcgaggtaaaatgtgctcaagttctcctcgaggctggagcaaaagtggatgctttggagaagaataagaacactgctctccattatgcagctggttatggcagaaaggaatgtgtggcccttctccttgaaaatggtgctgcagttactctccagaatatggatggtaaaactccaatcgatgttgcgaagctaaacaatcaaaatgaagtcctaaagctacttgagaaagatgcttttctgtagttgtaatgcatgatgccatgctgtcaccaacaagcaaagggggaaactgaggggaagaaggcatggtgacttcgttattttctcttttggtttcttccagccatttagtgtgttaaactaaattgattagcgttgttggatgagttaccatagaatttgntatctat

SEQ ID NO: 26570 - DNA, 466 bp, Glycine max
  unsure (1)..(466): unsure at all n locations
  Clone ID: LIB3051-070-Q1-K1-C6
ctctcgccgtctaggtttttctctcaaaatttcgaaaccccgattttctctcggttcgagtctgcgattcatcgtaacctaaattattagatagttatattatctctctgcgtttctttcagcaattttctattttctcctctcatggcttcagattccaaaaaggatttccctgctgatgacaaagctggaacagaagagagtaaaacatccaaagatgagacttcatctaaagattctccagcagaacaaagagcgacagctacttttggacctagacctggacctgctgggcatccaggcaacccttttgatctctcagcaatgtctggtctgctcaatgatccaagtatcaaggaattggctgaacagatagcaaaagatccatcgttcaatcagatggctgagcagcttcagaaaacttttcaaggagctncacaagatgctaatcctagcttcgataatc

SEQ ID NO: 26571 - DNA, 442 bp, Glycine max
  unsure (1)..(442): unsure at all n locations
  Clone ID: LIB3051-103-Q1-K1-C4
cccacgcgtccgcccacgcgtccgctctcactcagattcagcaattttctattttctgctctcatggcttcagattccaaaaaggatttccctgctgatgacaaagctggaacagcagagaataaagcatccaaagatgaaacgtcatctaaagattctccagcagcacaaagagctactacagctacttctggacctgcaactggttttccaggcaacccttttgatttctctgcaatgtctggcctgctcaatgatccaagtatcaaggaattggctgaacagatagcaaaagatccatcattcaaccagatggctgagcagcttcagaaaacttttcaaggagctccacaggatgctatgcctagctttgataatcaacaatatttttcaaccatgcaacangttatgcagaatcctaattttatgaccatggctgaac

SEQ ID NO: 26572 - DNA, 440 bp, Glycine max
  unsure (1)..(440): unsure at all n locations
  Clone ID: LIB3051-106-Q1-K1-F10
cccacgcgtccgcccacgcgtccgtatctctctgcgtttctttcagcaattttctatttggtgctctcatggcttcagattccaaaaaggatttccctgctgatgacaaagctggaacagaagagagtaaaacatccaaagatgagacttcatctaaagattctccagcagaacaaagagcgacagctacttttggacctagacctggacctgctgggcatccaggcaacccttttgatctctcagcaatgtctggtctgctcaatgatccaagtatcaaggaattggctgaacagatagcaaaagatccatcgttcaatcagatggctgagcagcttcagaaaacttttcaaggagctccacaagatgctatccctagcttcgataatcaacaatatttttcaaccatgcaacaggttatgcagaatcctaattntatg

SEQ ID NO: 26573 - DNA, 378 bp, Glycine max
  unsure (1)..(378): unsure at all n locations
  Clone ID: LIB3051-025-Q1-K1-A9
gaagttttcaaggaattttatcaaacataaactaagcacaggaaacttacttggatttattccttgggaacctgcaacattagtgggaaattcgatccaaaaactgtggagctgattgtaacaacttaccaggcttcggcattgcttctatttaattcctcagatagactgagttattcggagataatgtctcagttaaacttatctgatgacgatgttattagactgctccactccttgtcatgtgccaagtacaagattcttaacaaggaaccgagcacgaaaacaatatcttctaccgactattttgaatgtaattcanaatttacagacaaaatgaggagaatcaagattcctcttcctactgttgatgagaag

SEQ ID NO: 26574 - DNA, 417 bp, Glycine max
  Clone ID: LIB3051-100-Q1-K1-E1
gtccgaaagtatttgtttgctgttatctataggaagttgcttgctcgaaggcttctctttgacaagggtgccattgatgagcatgagcgaagtattttgacaaaattgaagcaacaatgtggtggacagtttacctcaaagatggaaggaatggttacagatttgacactggcaaaggagaatcaaactagctttgaggagtatttaagcaataatcccaatgcagaccctggcatagacttgacagttacagttctgactactggtttctggcctagttacaaatcttttgatctcaatcttcctgcagaaatgattaggtgtgttgaagttttcaaagaattttatcaaactaaaacaaaacacaggaaacttacatggatttattcggtgggtacctgtaatataagtgggaaa

SEQ ID NO: 26575 - DNA, 434 bp, Glycine max
  unsure (1)..(434): unsure at all n locations
  Clone ID: LIB3051-040-Q1-K1-F3
cttcccgccgagagaggaggctcgacgacgacgccgccattcgtgagcaggccatcgccgccgcgattctctttaagcagcaccagcaacaacagcaacagcagcagcagcaattcgatcgctctgcatcgcttcggtatccgaatggagtctccaagaagagtaacgccaacgccttgcccaggagttcgagttccagggcaaggtccctcaccgaccctctccttcaacctcaccagcttctcaatcagggtgtgaatgtcgatgatctcgagacaaatcatgttgtccttgttcatggaggtggcttcggngcatggtgttggtacaaatccatagcacttctagaagaaagtggttataaagtaactgccatagatttaactgggctcggtgtgagttcatttgatgcaaacagcattacaagtctgtcg

SEQ ID NO: 26576 - DNA, 383 bp, Glycine max
  Clone ID: LIB3051-017-Q1-E1-B5
aggaacttttatcaaccagttgcctgattggagcatgcttcttgctgctatcacaacaattttcttggccgctgaaaagcagtggatgatgcttgattggaagccacggcgacctgacatgcttattgacccctttgggataggaaaaattgttcaggatggtcttgtgttccgtgaaaacttttctattagatcatatgagattggtgctgatcgtaccgcatctatagaaacagtaatgaaccatttgcaagaaactgcacttaatcatgttaaaagtgctgggcttcttggtgatggctttggttccacgccagaaatgtgcaaaaagaacttgatatgggtggttactcggatgcaggttgtggtggaacgctatccta

SEQ ID NO: 26577 - DNA, 422 bp, Glycine max
  Clone ID: LIB3051-027-Q1-K1-C4
cccacgcgtccgcccacgcgtccgggatggtcttgtgttccgtgaaaacttttctattagatcatatgagattggtgctgatcgtaccgcatctatagaaacagtaatgaaccatttgcaagaaactgcacttaatcatgttaaaagtgctgggcttcttggtgatggctttggttccacgccagaaatgtgcaaaaagaacttgatatgggtggttactcggatgcaggttgtggaggaacgctatcctacatggggtgacataatccaagaggacactagtgtttctggatcgaccatcagagcgttgcgccgtgaatggcttttacgtgactgcaaaactggtgaaatcttgacaagagctttcagtgtttgggtcatgatgaataagctaacacggaagctgtctaaaattccagaag

SEQ ID NO: 26578 - DNA, 446 bp, Glycine max
  Clone ID: LIB3051-028-Q1-K1-H5
cccacgcgtccgcccacgcgtccgatttgcttcaggggtgacatagttcaagtggacacttgggtttctggatcagggaagaatggtatgcgccgtgattggcttttacgtgactgcaaaactggtgaaatcttgacaagagcttccagtgtttgggtcatgatgaataagctaacacggaggctgtctaaaattccagaagaagtcagacaggagataggatcttattttgtggattctgatccaattctggaagaggataacagaaaactgactaaacttgacgacaacacagcggattatattcgtaccggtttaagtcctaggtggagtgatctagatatcaatcagcatgtcaacaatgtgaagtacattggctggattctggagagtgctccacagccaatcttggagagtcatgagctttcttccatgactttagagta

SEQ ID NO: 26579 - DNA, 360 bp, Glycine max
  Clone ID: LIB3051-049-Q1-K1-F3
tcgtccacgcgttcgtccacgcgttcgaccttatcaacatcctttacctcttaatttttctgatcaggttaaaactactattcttcagaaaaaggttaaaaaacccagcaccaagtccaccatctcttccaataatcggaaacctccatcagctgaagaaacagccacttcaccgagccttgtacgacctctcacagaaatatggccctaataatatcctctctctgcggttcgggtcccaacccgtcctcgtcgtttcgtccgcatccgcagcggaagaatgtttcaccaaaaacgacatcatcttcgcgaaccgttttcgctcttcattgacaaagtacatcggcttcaaccacacca

SEQ ID NO: 26580 - DNA, 424 bp, Glycine max
  unsure (1)..(424): unsure at all n locations
  Clone ID: LIB3051-070-Q1-K1-B4
cagcaagctaggctcttccctttgttagcttctgcctatgccttcagatttgttggtgagtggttgaaatggctttatatggatgtgatgaaaagattgcaagccagtgatttttcaaccttacctgaggctcatgcgtgcactgcagggttgaagtccttgactacttcagcaactgctgatggaattgaggaatgccgcaaactatgtggtggccatggttacctttgcagcagtggtctccctgagttatttgcagtctacattcctacctgcacatatgaaggagacaacactgtgctgcttttacaggtggctaggcatctcatcaagactatttctcagttgggctccagaaacaagcctgttggtacaacatcttacattggacgagtggaacagcttatgcaatatcngtctgatg

SEQ ID NO: 26581 - DNA, 385 bp, Glycine max
  Clone ID: LIB3051-015-Q1-E1-H1
acgcgtcaggtacaattaaagcatatgtgtctaacaatttatctcttggagaacggcaaattgctgcacagtttcaagaaattccattggatcttcgtatggtggaagctgagcgaattggatttgatatgctgaaggcaaccgcagttgacaaaattccctcagatttagaagggatggaagcatcaatgcaacatctgctagtcttgattgatgacatctacaaatatgttaacgatgttgtggaagggctagttgcaccagacaacaaaatcgggagatttatatcagatgctgtaggttcccttcccaaattgtccccatcagtttttgataagcttgtgaatgacagtttgcaggatcacttgcttttgctgtatttatc

SEQ ID NO: 26582 - DNA, 422 bp, Glycine max
  Clone ID: LIB3051-062-Q1-K1-F3
cggacgcgtggggtctgcaccgtcagcaatattctccctgggtttaggatggggtgcgcagatgggtggtgaacttatggattttatagttgttcttcgtgatatgaaagctgtaaagacattctgcagtcatatgcatttttctcttggtgctggttgtagtgctgcagcagggcctgttgggagagtgcttgaagcagatattcgtgctggtgacagaggctctggcatgtgttacacttacagttgcagtaaaggtgcatttgtgggagtttctttggaaggaaatatagttgcaaccaggatggatgccaatttgcgcttctatggtgatccttacctcaccacatctgatattctactgggaatggtggacagaccaaaggctgctcaacccatgtatgccagtcttcaagaactat

SEQ ID NO: 26583 - DNA, 446 bp, Glycine max
  Clone ID: LIB3051-063-Q1-K1-F3
ccggaaccatatatctgacaatgtggctgtaaccccatatcgtgatacatctcgctatggaatgggaagtgaaacaccaatgcatccttctcgaactcccttacatccatatatgactccaatgagagatcctggagcaacacctattcatgatggaatgagaacacctatgcgtgacccagcatggaatccttatactccaatgagtcctccaagggataactgggaagatggaaatccaggctcttgggcagccagtccacagtatcagcctggaagccctacttcacggccatatgaagccccaactcctggtgctggttgggctagcactcctggtggaaattatagtgaagctggaacaccgcgggacagttctgcctatgccaatgctccaagcccatatttaccatcaacacctggtggacagcctatgacaccgagtt

SEQ ID NO: 26584 - DNA, 460 bp, Glycine max
  Clone ID: LIB3051-083-Q1-K1-C5
gttggcattactgtgagctcccgcaggcagcagcagcactcatagagcttgcgagcgagtggtcacttggccacagttatcgccgtttccccgccgagatctctcaatctccgacgactcagatacctctattaatttttgttcctccggttaggttaggctataatacgtagtttttccttatttatggcttcggagaatgtgaagaccggggattcggccgtgacgacgatcgtcaatctcgccgaggaggccaagctcgccagggaaggcgtcgtcaaggctcccagctacgccctcgccagcatctgcaagtcgctcgtcgccggtggcgtcgccggaggagtgtcacgtactgcagttgctcctctggaacgattgaaaattttgctgcaagtccagaatcctcataacattaaatacaacggaacagtacaaggccctaaatatatatggagaa

SEQ ID NO: 26585 - DNA, 422 bp, Glycine max
  Clone ID: LIB3051-064-Q1-K1-F11
aggaggctcaatggatgcacattgacatggctggtcctgtgtggaatgacaagaagcgctgagcaacagggtttggcattgctactttagtggaatgggttttgaaaaatgcttcaaatgccaactgaaatttcaaatcttgttacatcgcatgtgaaacacaggatgagataagctcatcttgtgatgtttgtgcttcaatggggaatggttatatgaaataagttatttaaagggatggaaaatgtggttaaatgaggcatctgttagcgtattcaaactgttttctacatacaaataacaaccttttatgcttgttcacatttaccaatagttcacattgtctgtgatcattcgtcttacttatattgacacgtagactttcccagtagtgatactaatatactatattaaaccgtttc

SEQ ID NO: 26586 - DNA, 326 bp, Glycine max
  unsure (1)..(326): unsure at all n locations
  Clone ID: LIB3051-066-Q1-K1-F3
cccacgcgtccgcttttctcttatcatggcttctcacaacatcaaaatttacgaccacttaagggtggcccctccctcagcaacagaaatatccctctctctcactttcttcgacctgttctggctcaggttccaccccgtggaacgcatcttcttctacaccctncctacaccccattcaaatccatccattttctattccaaacttgttccaaagctcanaacatctctctctcgcactctccaacactntccccctttcgccggcaacgtcgtttggcctgataacaccccaaacccaaccgtccaataaaccccaggggact

SEQ ID NO: 26587 - DNA, 369 bp, Glycine max
  unsure (1)..(369): unsure at all n locations
  Clone ID: LIB3051-095-Q1-K1-H4
atattattctcacgactagtgctatatctaaggcgatatcttccaaggttgaaacaaacagatgctcttttctcttatgatggcttctcacaacatcaaaatccacgaccacttaagggtttcccctccctcagcaacagaaatatccctctctctcactttcttcgacctgttctggctcaggttccaccccgtggaacgcatcttcttctacaccctccctacaccccattcaaatccatccattttctattccaaacttgttccaaagctcaaaacatctctctctcgcactctccaacacttnccccctctcgccggcaacgtcgtttggcctgataacaccccaaaccccaccgtccaatacac

SEQ ID NO: 26588 - DNA, 412 bp, Glycine max
  Clone ID: LIB3051-031-Q1-K1-E9
cccacgcgtccgctcaccgtttgccaggtcgtcgatacctccgtcagagaggttcaggctttgatattgtcaccaacgagggaactggcctcgcaaactgagaaggttatattggctattggggatttcatcaatatacaagctcatgcatgcgttggaggtaaaagtgtgggagaagacataaggaaacttgagtatggagttcatgtggtgtctggaactcctggccgagtttgtgacatgatcaaaaggagaacattacgcacaagggctatcaagatgctagttcttgatgaatctgatgaaatgttgagcagagggtttaaagatcaaatttatgatgtgtatagatatctcccacctgaccttcaggtttgtttgatctctgctactcttactcatgaaatactgg

SEQ ID NO: 26589 - DNA, 413 bp, Glycine max
  Clone ID: LIB3051-070-Q1-K1-F3
cccacgcgtccgcacagcacggtggggacgaccatggttagagacgatctatgcatcagggttcccagcttcttccgctgccctatatccctcgacgtcatgaaatcccctgtgagcctctgcaccggcgttacctacgaccgttccagcatccaacgctggctcgacaacgggaacaacacctgtcccgccaccatgcaggttctccaaaccagagatttcgttcccaaccgaaccttacagaggctcatccagatctggtctgactcggtcaccctccgagtggactcgcccgagtcacctaccttcacccagtccgaatcagtcctctccaaggaccaaatcctcgtcgccatctccgagttgcagactcactgcgcgaaccgcttcgactcgctcgccaaaatcgcgcg

SEQ ID NO: 26590 - DNA, 431 bp, Glycine max
  Clone ID: LIB3051-080-Q1-K1-D7
cccacgcgtccgaacagaatctcctctcaacacctttgccttgctgcagttcgcaactgcaagtgcactcaaatataaatatatatacatatatatatatatatatatatatgtattacttcatggtcacacatagttaagtttattaattactaggtagctggttttgaatagggtagttggtagttatagatggtgtcccagatatggaagaagcaggtttaggagattgttgctcctcgaattcgacgattacgaggaagagcgataagcgaaagcagcaacaccaacaacaagagaagccatacagaggaataaggatgaggaagtggggcaagtgggtggcggagattagagaacccaataagcgttcgaagatctggctgggttcttacgccacccccggcgccgacgcacgcgcctatgacacc

SEQ ID NO: 26591 - DNA, 431 bp, Glycine max
  unsure (1)..(431): unsure at all n locations
  Clone ID: LIB3051-064-Q1-K1-E8
gagtaacttcactttccccaactccacctgagaaaaagatacccataattcgcacgcacgcacgcacgcacttgttctgactcagtgcttgtgttggacgcagaagaaccagaaaagaaaaacaagcacgaggagatgattaacttcgaagaaaccgagttgcgactcggcctccctggcgggtctgcgagtgatcacaacgagtcaacaacggtcaagggcagtggtggaaagagaggcttctctgaaactgcttctgttgatttgaagcttaatctttcttccagtgatgactctgcctcagattcaccttcatctgcgtctacagagaagactaccactgctgcacctnctcctccttctcgagccaacgaccctgcaaaaccacctgcaaaggcacaagtggtgggttggccaccagttaggtcatt

SEQ ID NO: 26592 - DNA, 397 bp, Glycine max
  Clone ID: LIB3051-082-Q1-K1-F3
acgcaatgtgagaacccccacgggcaagtgtggaattacaatggaggcctcctacccagggaagaatggtttaaactctgctaattcagtttatgaaagcactgaggtgtatgttagcagtgcttgatataacaaccttcatcgttatttatgatctttggaattgggaagaggaacaagtgctcaagttgcaaatgtttctgttatctttgatgcttctattgaatatgtctgttgggctattcttgtacatatatttcttcaagttaaaaaactgaacctgattatcaatttgtactggttttcactcattgttattccatttgaatgttttatctgaaatccttaatgatatggatgcgctagttatatttctgaaaaaaaaaaatattatttt

SEQ ID NO: 26593 - DNA, 394 bp, Glycine max
  Clone ID: LIB3051-045-Q1-K1-E1
cagaaacgaacaccgtgattcctctcgccgtagatctgctccatttcgccgttcatccatggccggcgacttcgaattcgccgacaaagtccctacttccttcgatcgcgcggcttcaaaagggttcaacccagctttaattgttctcctgcttgttggtgggttgctgttgacattcctcattggaaactatgtactctacacatatgcacagaagaccctccctcctagaaaaaagaagccagtctcaaagaagaagatgaaaaaggagagactgaagcaaggcgtctctgcacctggagagtagaactttttcctcactttatattctgtgatgttaaattgtactctctaagaaaaaatttatcgttctgtggtctcttgagttatgtta

SEQ ID NO: 26594 - DNA, 420 bp, Glycine max
  Clone ID: LIB3051-026-Q1-K1-A6
cgtttctttcacttcacaaaaatgaaaaacatgaaattgtgttcggtgatgctatgcttatcactagcgttccttcttggggccacagcagaacaatgtggcacacaagctggtggagcgttatgcccaaatagattatgttgcagcaaatttgggtggtgtggtgacacagattcctactgtggagaaggttgccagagccaatgcaaatctgcaacaccctcaacaccaactccaacaacacctagtagtggtggagatattagcagactcattagctcttctctctttgatcaaatgcttaaataccgaaacgatggccgctgttctggccatggattctacagatatgatgctttcattgccgctgctggctctttcaatggctttggcacaaccggtgatgacaacactcgcaag

SEQ ID NO: 26595 - DNA, 363 bp, Glycine max
  Clone ID: LIB3051-027-Q1-K1-B2
cgtttctttcacttcacaaaaatgaaaatcatgatattgtgttcggtgatgctatgcttatcactagcgttccttcttggggccacagcagaacaatgtggcacacaagctggtggagcgttatgcccaaatagattatgttgcagcaaatttgggtggtgtggtgacacagattcctactgtggagaaggttgccagagccaatgcaaatctgcaacaccctcaacaccaactccaacaacacctagtagtggtggagatattagcagactcattagctcttctctctttgatcaaatgcttaaataccgaaacgatggccgctgttctggccatggatgctacagatatgatgctctcatt

SEQ ID NO: 26596 - DNA, 445 bp, Glycine max
  Clone ID: LIB3051-028-Q1-K1-B10
cccacgcgtccgacttcacatatatgatttacatgaaatggtgttcggtgatgctatgcttatcactagcgttccttcttggggccacagcatatcaatgtggcacacaagctggtggagcgttatgcccaaatagattatgttgcagcaaatttgggtggtgtggtgacacagattcctactgtggagaaggttgccagagccaatgcagatctgcaacaccctcaacaccaactccaacaacacctagtagtggtggagatattagcagactcattagctcttgtctctttgatcaaatgcttaaataccgaaacgatggccgatgatctggccatggattctacagatatgatgctttcattgacgctgctggctctttcaatggctttggcacaaccggtgatgacaacactcacaagaaggagattgctgctttcttggc

SEQ ID NO: 26597 - DNA, 353 bp, Glycine max
  Clone ID: LIB3051-044-Q1-K1-C3
cccacgcgtccgtccacgcgttcgcccacgcgttcgaccacgcgtccgatggactgcatctagtgctgacagctcagcgggtcgggctcctggctacggtgtcatcaccaacataatcaacggtggcctcgaatgcggccacggccaggataatcgggtccaagatcggatcggcttctaccgaaggtactgccagatgatgggaataagccccggagacaacttggattgtaacaatcaaaggccatttgcttaagcaaattgctcacatatatcatccatatagagaataaatagtatgtaataaaggatctaccatgatcttacatgtactgggaaacttgtttctaaag

SEQ ID NO: 26598 - DNA, 431 bp, Glycine max
  Clone ID: LIB3051-048-Q1-K1-G5
gtttctttcacttcacaaaaatgaaaaacatgaaattgtgttcggtgatgctatgcttatcactagcgttccttcttggggccacagcagaacaatgtggcacacaagctggtggagcgttatgcccaaatagattatgttgcagcaaatttgggtggtgtggtgacacagattcctactgtggagaaggttgccagagccaatgcaaatctgcaacaccctcaacaccaactccaacaacacctagtagtggtggagatattagcagactcattagctcttctctctttgatcaaatgcttaaataccgaaacgatggccgctgttctggccatggattctacagatatgatgctttcattgccgctgctggctctttcaatggctttggcacaaccggtgatgacaacactcgcaagaaggagattgct

SEQ ID NO: 26599 - DNA, 424 bp, Glycine max
  unsure (1)..(424): unsure at all n locations
  Clone ID: LIB3051-049-Q1-K1-B4
tcgcggacgcgtgggtgccgctgctggctctttcaatggctntggcacaaccggtgatgacgacagtcgcaagaaggagattgctgctttcttggctcaaacttctcatgaaaccacaggtgggtgggcaagtgcaccagatggtccatatgcgtgggggtattgttttatcaacgaacaaaaccaggcaacttattgtgatggtgggaattggccatgtgctgctggtaaaaaatattatggccgaggaccaatccaacttacacacaactacaattacgggcaagctggcaaagcacttggtctggatttgataaacaatccggatcttgtagccacagacgcaaccgtgtcattcaagacagccctatggttttggatgactgcacagggaaacaagccattaagccatgatgtgatcact

SEQ ID NO: 26600 - DNA, 414 bp, Glycine max
  Clone ID: LIB3051-050-Q1-K1-B6
ccgtttctttcacttcacaaaaatgaaaaacatgaaattgtgttcggcgatgctatgcttatcactagcgttccttcttggggccacagcagaacaatgtggcacacaagctggtggagcgttatgcccaaatagattatgttgcagcaaatttgggtggtgtggtgacacagattcctactgtggagaaggttgccagagccaatgcaaatctgcaacaccctcaacaccaactgcaacaacacctagtagcggtggagatattagcagactcattagctcttctctctttgatcaaatgcttaaataccgaaacgatggccgatgttctggccatggattctacagatatgatgctttcattgccgatgctggctctatcaatggctgtggcacaaccggtgatgacaacac

SEQ ID NO: 26601 - DNA, 416 bp, Glycine max
  Clone ID: LIB3051-054-Q1-K2-E8
caaaaatgaaaaacatgaaattgtgttcggtgatgctatgcttatcactagcgttccttcttggggccacagcagaacaatgtggcacacaagctggtggagcgttatgcccaaatagattatgttgcagcaaatttgggtggtgtggtgacacagattcctactgtggagaaggttgccagagccaatgcaaatctgcaacaccctcaacaccaactccaacaacacctagtagtggtggagatattagcagactcattagctcttctctctttgatcaaatgcttaaataccgaaacgatggccgctgttctggccatggattctacagatatgatgctttcattgccgctgctggctctttcaatggctttggcacaaccggtgatgacaacactcgcaagaaggagattgct

SEQ ID NO: 26602 - DNA, 419 bp, Glycine max
  unsure (1)..(419): unsure at all n locations
  Clone ID: LIB3051-065-Q1-K1-A12
accgtttctttcacttcacaaaaatgaaaaacatgaaattgtgttcggtgatgctatgcggatcactagcgttccttcttggggccacagcagaacaatgtggcacacaagctggtggagcgttatgcccaaatagattatgttgcagcaaatttgggtggtgtggtgacacagattcctactgtggagaaggttgccagagccaatgcagatctgcaacaccctgaacaccaactccaacaacacctagtagtggtggagatattagcagactcattagctcttctctctttgatcaaatgcttaaataccgaaacgatggccgctgttctggccatggattctacagatatgatgctntcattgccgctgctggctctgtcaatggctttggcacaaccggtgatgacaacactcgc

SEQ ID NO: 26603 - DNA, 462 bp, Glycine max
  Clone ID: LIB3051-068-Q1-K1-D4
atacaccgtttctttcacttcacaaaaatgaaaaacatgaaattgtgttcggtgatgctaggcttatcactagcgttccttcttggggccacagcagaacaatgtggcacacaagctggtggagcgttatgcccaaatagattatgttgcagcaaatttgggtggtgtggtgacacagattcctactgtggagaaggttgccagagccaatgcaaatctgcaacaccctcaacaccaactccaacaacacctagtagtggtggagatattagcagactcattagctcttctctctttgatcaaatgcttaaataccgaaacgatggccgctgttctggccatggattctacagatatgatgctttcattgccgctgctggctctttcaatggctttggcacaaccggtgatgacaacactcgcaagaaggagattgctgctttcttggctcaaacttctcat

SEQ ID NO: 26604 - DNA, 359 bp, Glycine max
  Clone ID: LIB3051-072-Q1-K1-A3
gtttctttcacttcacaaaaatgaaaaacatgaaattgtgttcggtgatgctatgcttatcgctagcgttccttcttggggccacagcagaacaatgtggcacacaagctggtggagcgttatgcccaaatagattatgttgcagcaaatttgggtggtgtggtgacacagattcctactgtggagaaggttgccagagccaatgcaaatctgcaacaccctcaacaccaactgcaacaacacctagtagtggtggagatattagcagactcattagctcttctctctttgatcaaatgcttaaataccgaaacgatggccgctgttctggccatggattctacagatatgatgctttc

SEQ ID NO: 26605 - DNA, 427 bp, Glycine max
  unsure (1)..(427): unsure at all n locations
  Clone ID: LIB3051-094-Q1-K1-F11
gggacccacgcgnnnncgggacgcgtgggacaaaaatgaaaaacatgaaattgtgttcggtgatgctatgcttatcactagcgttccttcttggggccacagcaaaacaatgtggcacacaagctggtggagcgttatgcccaaatagattatgttgcagcaaatttgggtggtgtggtgacacagattcctactgtggagaaggttgccagagccaatgcaaatctgcaacaccctcaacaccaactccaacaacacctagtagtggtggagatattagcagactcattagctcttctctctttgatcaaatgcttaaataccgaaacgatggccgctgttctggccatggattctacagatatgatgctttcattgccgctgctggctctttcaatggctttggcacaaccggtgatgacaacac

SEQ ID NO: 26606 - DNA, 375 bp, Glycine max
  Clone ID: LIB3051-098-Q1-K1-H11
cacgcgtccgggagtatcgctgcatgctttgctcaaacttttcatgaaaccacaggcggctgggcaagtgctccagatggaccatatgcgtgggggtcttggtatatcaacgtacacatccaggctacttatcgagatggagggaattggccatgtgctgctagtcaaaaatattatggccgatgaccaatccaacttacacacagctacaattacaggcaagctggcaaagcactgggtctggattagataaacaatacggatcttgtagccacagacgcaaccgtgtcattcaagacagccctatggttttggatgactgcacatggaaacacgccattaagccatgatgtgatcactggaagatggactcca

SEQ ID NO: 26607 - DNA, 323 bp, Glycine max
  Clone ID: LIB3051-107-Q1-K1-E8
aggagattgctgctttcttggctcaaacttctcatgaaaccacaagtgggtgggcaagtgcgccagatggtccatatgcgtggggtattgtttatcaacgaacaaaaccaggcaactaatggtaatggtggaaattggccatgtgctgctggtaaaaaatattatggccgaggaccaatccaacttacacacaactacaattacgggcaagctggcaaagcacttggtctggatttgataaacaatccggatcttgtagccacagacgcaaccgtgtcattcaagacaaccctatggttttggatgacttgccagggaaacaa

SEQ ID NO: 26608 - DNA, 436 bp, Glycine max
  Clone ID: LIB3051-025-Q1-K1-D7
cccacgcgtccggccacatagagacacaatacagagtgagttgttgctccttcgccacaactctctgccaacatgggtatctccagagattctatgcacaagaggcgtgccactggtggcaagaagaaggcctggaggaaaaagagaaagtatgagcttggtcgccagcctgctaacactaagctgtcaagcaacaagacagtcaggaggatccgtgttagaggtggaaatgtgaaatggagggcattgagattggatactggaaattactcctggggaagtgaagctgtaactcgcaagactcgtgtactagatgtggtttacaatgcctcaaacaatgagcttgtgcgtactcagactcttgtcaaaagtgctatcgttcaggttgatgctgctccattcaaacagtggtatcttcagcactatggtgttgaga

SEQ ID NO: 26609 - DNA, 431 bp, Glycine max
  unsure (1)..(431): unsure at all n locations
  Clone ID: LIB3051-091-Q1-K1-F3
cccacgcgtccgtaatgatggagattttgctcaaaagctttcgcatccttcatcaaattggtcaagagaatacattgcaacaattgatggtttagttcacaagaggcacttaatagccataagcgagggaactactgttgagggtgtcctttgtgtgcctgatgttgtggagttacttccacgtcagccagagatgcaaagaactcgaattcgcattgtggttcatgaaggtaggaaacatgaagttcgtgaactcgtcaaaagagctggacttgagattcattcattaaagcgagtacgcattggtgggtttagacttccaccagaccttgggttaggaaagtatattgagttaaataaaacgaatctcaacccgcattgnggtggaagagctaataaagttgcttcttatattactggagctagaaaca

SEQ ID NO: 26610 - DNA, 419 bp, Glycine max
  Clone ID: LIB3051-091-Q1-K1-F4
cccacgcgtccgtaatgatggagattttgctcaaaagctttcgcatccttcatcaaattgggcaagggaatacattgcagcaggtgatggtttacttcacaagaggcacttaatagccataagcgagggaactactgttgagggtgtcctttgtgtgcctgatgttgtggagttacttccacgtcagccagagatgcaaagaactcgaattcgcattgtggttcatgaaggtaggaaacatgaagttcgtgaactcgtcaaaagagctggacttgagattcattcattaaagcgagtacgcattggtgggtttagacttccaccagaccttgggttaggaaagtatattgagttaaataaaacgaatcttcaatcgcattggggtggaagagctattaaattgctttttaaattactgg

SEQ ID NO: 26611 - DNA, 417 bp, Glycine max
  Clone ID: LIB3051-094-Q1-K1-D3
gtctagaatattcctatctgaaattaaaaaaaaaaaaagaaattgtcttgctcatagggaggacgtctataacctgtcgacattgaaaataacaaataatataaattgatagacgaaaagagtagcgggcagtgacaaagcaaaagcgtggagtgggtcttgcgttgtgttggaatcccaaattcatttctgtttctcattctcaattcttcttctattctcattctgatttgccacacacgcagaaaggttgaaaatagtgggacttgattcactggaggtggagaaagatggctaacaacgcagctgcttgtgctgagagagcaactagtgatatgctcattggtccagactgggcaatcaacatagacttgtgtgatatcattaatatggaccctgggcaagccaaggatgctt

SEQ ID NO: 26612 - DNA, 433 bp, Glycine max
  Clone ID: LIB3051-081-Q1-K1-C2
acatagcaaggttcagagactttgccgattcctggaagaagagaagagaaaacctaaatcacagatccatggccgaagaacaccgatgtgaacctgccgaaggtcactgactatgcttcaacaactgccacttcttcagtagcaccgtcacgatgaacctctgctccaaatgctacagcgcgatccgtttgaaggagcaagaagaagcgtcgacgaaatgcacaatcgaaaccgtgctctattctgcctcctcagcaaaaccgtcgtcagtacacgtcacctacgacgtctgcggtcgatgtgctcatggaatctccaccgacgtctgctgcggaggttgacgttgctgtcacggtcacagtcgcggcggcgtcaagttctatttccataaactcaggttcggttgcgcaaccgaaccgttataccacgtgtc

SEQ ID NO: 26613 - DNA, 426 bp, Glycine max
  Clone ID: LIB3051-035-Q1-K1-H11
cccacgcgtccggcaaaagacacccgcattcccctggtttcatttactggaagttcaaaggttggcttgatggtccagcaaacagttaatgagagatttggcaaatgcttgcttgagttaagtggtaacaatgcaataatagtcatggatgatgcagatatcaaattggctgtacgatctattttgtttgcagctgtgggtactgctggtcagcggtgtacaacttgccgtagactgtttctgcatgaaagtatttacgcagatgtactagaccaacttattggagtctacaaacaagtcaaaattgggaatcccttggagaaggggactctagttgggcccttgcatactcctacttcagtggaaaactttcagaagggtatttcagtcataaaatctcagggagggaagatcctaacaggtgga

SEQ ID NO: 26614 - DNA, 353 bp, Glycine max
  Clone ID: LIB3051-058-Q1-K2-E1
cccacgcgtccgatttcaaaggcatgttttttcaacaaagttcattctacccacgagtcgattcaacaaacccagacgctaattctcccttctctatccccgcaccatcttcttcttcttcttccatttatccctcagtggaaacaacagagaatctcatttgggaagagccaaacacgactacagaagaagccatggaaaacgttctggtcacggtcccgggtgcgattctgcatctgatagaaaaggattccagcgtgcaccttgcttcgggcgacctcaccatatcgaccctcggagaaggcgacaaagtggtggcggttctggcatgcgtcggcgatcaggttcagtgg

SEQ ID NO: 26615 - DNA, 399 bp, Glycine max
  unsure (1)..(399): unsure at all n locations
  Clone ID: LIB3051-074-Q1-K1-E2
aatcaatcacatttcaaaggcatgttttttcaacaaagttcattctacccacgagtcgattcagcanacccagacgctaattctcccttctctatccncgcaccatcttcttcttcttcttccatttatccctcagtggagacaacagagaatctcatttgggaagagccaaacacgactacagaagaagccatggaaaacgttctggtcacggtcccgggtgcgattctgcatctgatagaaaaggattccagcgtgcaccttgcttcgggcgacctcaccatatcgaccctcggagaatgcgacaaagtggtggcggttctggcatgcgtcggcgatcaggttcagtggccgttggcgaaagacgtgtcggcggtgaagctggatgagtcgcactac

SEQ ID NO: 26616 - DNA, 463 bp, Glycine max
  unsure (1)..(463): unsure at all n locations
  Clone ID: LIB3051-087-Q1-K1-G8
catttcaaaggcatgttttttcaacaaagttcattctacccacgagtcgattcaacaaacccagacgctaattctcccttctctatccccgcaccatcttcttcttcttcttccatttatccctcagtggaaacaacagagaatctcatttgggaagagccaaacacgactacagaagaagccatggaaaacgttctggtcacggtcccgggtgcgattctgcatctgatagaaaaggattccagcgtgcaccttgcttcgggcgacctnaccatatcgacccttggagaaggcgacaaaatggtggcgggtctggcatgcgtcggcgatcaaggtcaatggcccgtggcgaaagacgtgtcggccgtgaagctggatgaatcgcactacttcttcacggtccaggtcccacaggagcacggngaggagaagggattcgaggtgttgaattacggtttaacgg

SEQ ID NO: 26617 - DNA, 428 bp, Glycine max
  Clone ID: LIB3051-038-Q1-K1-C3
ccaattcgtgctgatcccaggctatttgaatatccagaaaatgcatgagatgacaagaatgaaaagaacaccattgtcttcaagctacatgttcgttgtcaagtgggtcaacctcgtattactgtaaaatcagataaactgaagtggttacctaatgggagtgagcttccctgtgaagatgtcaaaccaaatgcaggttcaaaaccaaaaacatttacatctttcacttgcagccaagattcacttcctgaattttccaacaattcaattggtcttacatattcggatattatattggctaaacttggacctggtcaggaaattgaacttgaagcacatgcagttaaaggcattggtaagacacatgcaaaatggtccccagttgccactgcttggtaccggatgcttccggaggttgtactcttgga

SEQ ID NO: 26618 - DNA, 402 bp, Glycine max
  Clone ID: LIB3051-070-Q1-K1-A2
ctacactcattgcaacgaattgctaacgtcccacacgctacagagaagatacgacagagtgagagagaaagaagcacaacaaggatgtcttcgtcgtcatcgtcgtcgtcgtcgtcggaagatgaatctatgtcggaacagagcaatgaattaggacttgatttcatcttgagcttggacaatgttccatcaaagctccctccacacctcgaactctttaaaacacgtgttctttgcaacaacgatgctcctgtgcacactgatactgttcaatattccggtgcctatgctattatgggagttgataatagtgtgcggttggatagcttctgtgaaaactttaaggttgaagtgaagcggctgacggatagcgatattgaatttgatatgattggaatcgat

SEQ ID NO: 26619 - DNA, 454 bp, Glycine max
  unsure (1)..(454): unsure at all n locations
  Clone ID: LIB3051-027-Q1-K1-D12
cttgaaatgagagggtgtgtatttttcagtgaacgtgcacttgctgtggctgcaacacaattgacttctcttaggtacttgtgggtgcaaggttatggtgtatctccatctggacgtgatcttttggtaatgtctcgacccttttggaacattgagttgattccttctagaaaggtggctacgaataccaatccagatgagactgtagttgttgagcatcctgctcatattcttgcatattattctcttgcagggcagagatcagattttccagatactgttgtgcctttggacactgccacatgcgttgatacctagaggccagagctgtgtatatataccagttttcttttgtttttcttctcccctttcatatgctgnttctatgttcctgctctatttgtagttcattttagacaattagtcttgtaataagcctgtgttttcatttgaa

SEQ ID NO: 26620 - DNA, 377 bp, Glycine max
  Clone ID: LIB3051-062-Q1-K1-E9
aatttgcacagtaacatattccctgacaacacaacaatgagtcgcaagagagacagggcagctgacttttcccgccacgactccgccaagcgccgcctccccttgccggagcccgcggaggaggagacgcctacgatgagaccggcgccgccgtccgcggtggtcgtgatgggcctcccccaggactgctccgtcctcgatctcaagtcccgattcgagatctacggcgccatctcccgcatccgcatcgaccgcgacgccgtcggatacatcacctaccggaccaaggactccgccgacgctgccatcgccgccggcctcgaccccaccttcggaatcaccgttaactctaaaatggttcaagtgttgtgggcaac

SEQ ID NO: 26621 - DNA, 404 bp, Glycine max
  Clone ID: LIB3051-039-Q1-K1-C3
tcggtgaaaaaaaaaagagagagagaagaaaagaacgcagaaactgaactcaacaatggcagaacccaagggtaaatacgatcgccaactcagaatatggggcgaacaaggacaggcagcccttgagaaatctagtatttgcttacttaactgtggtcctactggttctgaaacacttaagaatcttgttcttggtggggttggaagtattactgtagtcgacggatcttaagttgaagtgggtgacctcggaaacaattttttggtggatgaagcaagtcttgggaagtcaaaagccaaatgtgtatgctcatttcttcaagagctgcatgatgcagcttaagcgaaatttgtagaagagtcttcagaaacattgattgagacaaatccatcattcttttctc

SEQ ID NO: 26622 - DNA, 443 bp, Glycine max
  Clone ID: LIB3051-106-Q1-K1-F11
ctcaagcaatattatgcaacctgtttttctcttattgccgggataattctttttggtggggggcttgcacctagtggggagcttaagcttggactatggggcacatcttatgcagattttattgaaagtttacatcttcctatgcaactgagtcaggttgatcccatagtggcatcattctctggaggagcagttggagtaatctcggcattaatggtggttgagataaacaatgtaaaacagcaggagcagaaaagatgcaaatactgtcttggtactggatatcttgcatgtgctcgctgttcaagcacaggagcacttgttctgattgaaccagtatccacagtcaaaggtggagataagcctgtttcaccaccaaaaactgagagatgttcaaattgctctggatctggcaaggttatgtgtccaacatgtctgtgcac

SEQ ID NO: 26623 - DNA, 398 bp, Glycine max
  Clone ID: LIB3051-062-Q1-K1-C11
cccacgcgtccgccgtcgaggtcttgcccattcaatcaaagcacaaaaatggaggtgactgttttcactcctgcactggaaggaattaagcttgtaaaatcagagcaaggagaaattttgacccagcctttcttggatgcttgcaagcatatacttcctgttatagataagtttggagctgctatggcccttgttaaatctgacattggtggtaacatatcgagattggaatctaagtactcctccaatccaaccaaattcaactacctgtacagtttggtacaagttgaggttgaaactaaaacggctaaatcatcatccagttgtaccaatggacttctttggcttacaagagcaatggatttcttggtggcattgttccaaaacttaattgagca

SEQ ID NO: 26624 - DNA, 348 bp, Glycine max
  Clone ID: LIB3051-072-Q1-K1-E5
cagaaacggcactgctgaagaattggatggagctacttcagctgatgcgagatcctgggggggccgtagatcgggcctggtcttttgtgcctgagaagccacttatctacttgcgttgagtgagggagaggatgtctggtggcacacagaagagtctgagaaaagcacttggagcccttaaggacaccacaacagtctcgttggctaaggtcaacagtgattacaaggaattggacattgctatagttagagccacaaatcatgttgaacgtccggctaaggaaaaacatataagagctatattttcagctatctcagctacaagacccaaggctgatgttgcctatt

SEQ ID NO: 26625 - DNA, 427 bp, Glycine max
  Clone ID: LIB3051-073-Q1-K1-E1
cgcaaactacaccactctatctctctcttcaattcaactccttcagctacagcgaaatcctggtctatccgtaaatcgtgccttgtctcttgtgcctgagaagccacttctctacttgcgttgagtgagggagaggatgtctggtggcacacagaagagtctgagaaaagcacttggagcccttaaggacaccacaacagtctcgttggctaaggtcaacagtgattacaaggaattggacattgctatagttagagccacaaatcatgttgaacgtccggctaaggaaaaacatataagagctatattttcagctatctcagctacaagacccatggctgatgttgcctatgggatccacgcacttgccaggcgggttatcaatgacacataactgggcggttgctttgaaaactttaattggtat

SEQ ID NO: 26626 - DNA, 433 bp, Glycine max
  unsure (1)..(433): unsure at all n locations
  Clone ID: LIB3051-002-Q1-E1-F7
ctgaatatctcacgccgaagaccgtgcgttgaaatcttgcaaggacgagatccaagcatcgttgttttccttcccagaatttacgctcttcttactatcatcaagatacaaaatggaatatcgacggaccagtggtaggcaggaaaccggtggccgtgacagaagacaatctaaaagggaacaggcatatcaggactctcttattgaggatttgtcacaggattttcgtttgccaatcaaccacagggcaacaaaaaatgttgatttggacaacgtagagcaagcatctttggacacacagataacatcatctaatattggctttaagctcctccaaaagatgggatggaaaggaaagggtcttgggaaggatgaacaagggatcattgagccaatanaatcctggatttagagatcaaacgttggggattgg

SEQ ID NO: 26627 - DNA, 410 bp, Glycine max
  Clone ID: LIB3051-078-Q1-K1-D10
gaatatctcacgccgaagaccgtgcgttgaaatcttgcaaggacgagatccaaggatcggtgttttccttcccagaattgacgctcttcttactatcatcaagatacaaaatggaatatcgactgaccagtggtaggcaggaaaccggtggccgtgacagaagacaatctaaaagggaacaggcatatcaggactctcttattgaggatttgtcacaggattttcgtttgccaatcaaccacaggccaacagaaaatgttgatctggacaacgtagagcaagcatctttggacacacagataacatcatctaatattggctttaagctcctccaaaagatgggatggaaaggaaagggtcttgggaaggatgaaccaagaatcattgagccaaataaatctggaattaga

SEQ ID NO: 26628 - DNA, 446 bp, Glycine max
  unsure (1)..(446): unsure at all n locations
  Clone ID: LIB3051-060-Q1-K1-C3
cccacgcgtccgctgtctttttttctctttctctctctagattgtctttcttcttcttcggtatgagccctaactgggggccccatagtcgtcgctgctagctagccatgtcgctgaggaaggtcttccgctcccgcaagttctccaaatcgttcaaagaggtgctgccggcggagggcgccgccgtcgagggcggggtcgccggcaccgtcgaggaggcggcgaatgggaataataatgggtggtctagcatgctgccggagatcctcggcgagatcgtgcggcgcgtggacgccgncgaggagcagtggccgaaccgccaaaacgtcgtcgcctgcgcgtgcgtctgcaagaggtggcgtgacatcacgcgcgaggtcgtgcgtgtgccctcgcataccgggaaaatcactttcccttcgtgccttaaacagccaggaccacgt

SEQ ID NO: 26629 - DNA, 417 bp, Glycine max
  Clone ID: LIB3051-112-Q1-K1-D6
ccagctgctactcgtgaatatgcaccattgattgaggaattatggaatgatgctggcattgaggctacatacgaaaggagaagcgaattagaaatgctgcctagtgttgccggttatttcttagagcgggctgttaaaatattaaggacagattatgaactctctgatttagatatcctttatgccgagggagttacttcatctaatggggtggcttgtgtggagttttcatttccccaatcagtgtctgaggaaactgttgacactaccgatcgatatgattctttggtcaagtatcaactaattaaggtgcatgcaagggggctaggagaaaattgcaagtggctagagatgtttgaggatgttgaaatggtcatcttctgtgtttccttgactgactattatcagtttttctgt

SEQ ID NO: 26630 - DNA, 434 bp, Glycine max
  unsure (1)..(434): unsure at all n locations
  Clone ID: LIB3051-079-Q1-K1-C5
cccacgcgtccgagcaactcgaaacagatgctgcagaagaagaagataacgtacaagcagcaatcaagctctcactgctattccccaaaatatttcaaaaaacataacaagaagaagaaaaaactgcaatgtatggaaaagtggttctctcgttcatcttcgtgctcttgctcgtcttctcttactcaattttcattggcaccctcgacattcgatcttatttcttccctcgcctaaagttacccgcggctgcacctgctccctgtgcacccgagcctnctcttcgggttttcatgtacgatctccctcgccgattcaacgtcggcatgattgaccgccggagcgcgtcggagacgcccgtcaccgttgaagactggccggcgtggcccgtgaactgggggcttgaaaagcagcacagcgtggagtactggatg

SEQ ID NO: 26631 - DNA, 424 bp, Glycine max
  Clone ID: LIB3051-085-Q1-K1-E1
gaagaatcaagcaatggagcattcaatgagtgagaactcctgccaattgtgtgctgtagagaagcttacctttgaaccaccgcctatttattgcacaacttgtggggttcgcattaaacgaaataatatgtattataccacgggcaccggtgacacacggcattatttttgtcttccatgctataatgatgctcgtacagagaacatcattgttgatgggactcccattgccaaatcaagattggaaaagaagaagaatgatgaggaaactgaagaatggtgggttcaatgtgataaatgtgaagcatggcaacatcaaatttgtgctttatttaatggcagaagaaatgatggtggacaagctgaatatacttgccctaactgctatattcaagaggtagaaagaagagagcgcaagccctta

SEQ ID NO: 26632 - DNA, 453 bp, Glycine max
  Clone ID: LIB3051-067-Q1-K1-C11
tgggaattgaagctttgaagtatattagttaccctgctcaggtgctggcgaagtcctctaaagggaggccagttatgctgatgggtactctggtatatggtataagatacacttttccagaatacctttgtacttttcttgttgctggaggggtatcaacatttgcacttctaaagactagctcaaagactatcagcaagctggcacatccaaatgctccccttggatatgggttgtgtttcctgaaccttgcttttgatggatttaccaatgcaactcaggattctttaaaagcaaggtatccaaaaacaagtgcttgggatattatgctgggcatgaatttatggggaaccatatacaatatgatttacatgtttggatggccccgtgccagtggatttgaagcagttcgcttttgccagcagcatccagaagcagcatgggatatttttc

SEQ ID NO: 26633 - DNA, 429 bp, Glycine max
  Clone ID: LIB3051-045-Q1-K1-C10
caggaaactctttctcttcttccgtttcctagtctcacacccaaacctcatggaaggcggctgtcaacgaacgtcttgattttgggaagatgggatatgggtgcaatcattaccggagaagatgcaggattcgggctccctgctgcaacgagatctactcatgccgtcactgtcataacgacgctgcgagcttgttgaagaatccctttgatcgccacgagctcggtcgccaagatgttaaacaagttgtttgttcagtttgtgacactgagcaacctgttgctcaaggttgcacaaactggggcgtctaaatgggagaatacttctgcaacatctgcaaattcttcgatgattatgttgagaaagaacaatttcactgtgatgattgtgggatctgcagggttggtggtcgagataattttttccact

SEQ ID NO: 26634 - DNA, 175 bp, Glycine max
  Clone ID: LIB3051-087-Q1-K1-E9
cccagacgtccgctgaagatgcttcatttccacagttactacatccagcttcactttcaggaatggttaaatgcatgtgtaggtattttagacactgctatagttccaagcctgtacttgaacttacaatctgagcaatacctgctgacacttgggagcacaaaattgtggaatc

SEQ ID NO: 26635 - DNA, 435 bp, Glycine max
  Clone ID: LIB3051-019-Q1-K1-F11
gccccagtatttcaagagtgcatttgtaggatacactgttggcttggtccttacaattgttgtgatgaactggtttcaggctgcacagcctgctcttttgtatattgtaccttctgtaattggatttttggctgctcattgcttatggaatggtgatgtcaaacagttgttggagttcgatgagtcaaagactgccaattcacctcaagagagtgctgacgacaagtctagcaaaaaggttgaataagttgaagcatgcccaataccaatacttccgagtcacagaacaaatactgcttttttctgagaaaaccgtttcttttaaagctaacttatttcagcagcacacctctgtaactgattgtgattaaaaaaaaatgtattacttatttttcaaattggcgttttgcttttactggctgaatgccccaatct

SEQ ID NO: 26636 - DNA, 417 bp, Glycine max
  Clone ID: LIB3051-016-Q1-E1-C10
agctcatcaagtccaagaaccaacctaccttttgcaatctcaattcaatggcgtcctctctcattgcgaagcgcttcctctcctcttccctcctctccaggtccctccttcgccccgccgcttccgcttcccaccgctctttcaacaccaacgccatgcgccagtatgacaaccgcgccgacgaccacagcaccgacatcgatcgtcactccgaacgctctttccctagcactgcgcgccgcgacgatatcttctcaggtagttgtagtcgctctctccctaacctcgcactaaccgattctcttaattcttctattttttatgtagtttagttgattcaatcgtggttttaaattgcgttgccgcaattgtccaaatctataaaaaatttatggctcaccgaaagtgcaatcgcaa

SEQ ID NO: 26637 - DNA, 445 bp, Glycine max
  Clone ID: LIB3051-020-Q1-E1-D5
gacccacgcgtacacttgctcatcaagtccaagaaccaacctaccttttgcaatctcaattcaatggcgtcctctctcattgcgaagcgcttcctctcctcttccctcctctccaggtccctccttcgccccgccgcttccgcttcccaccgctctttcaacaccaacgccatgcgccagtatgacaaccgcgccgacgaccacagcaccgacatcgatcgtcactccgaacgctctttccctagcactgcgcgccgcgacgatatcttctcagatgtgttggatccattttttccgactcggagtttgagccaggttctgaacatgatggaccaggtcatggacaatccgttcctctccgcgtcgcgcgggatcggagctggcgctggagtgcgtcgcggatgggacgcgagggagacagaggatgctctgcatctgcgcgtgg

SEQ ID NO: 26638 - DNA, 406 bp, Glycine max
  unsure (1)..(406): unsure at all n locations
  Clone ID: LIB3051-008-Q1-E1-E12
aaaaaacattgcccttgtcctttcaaagttacaaaccacaattccacaacacaccagcaccatatggcgtctgaacaattggcccgcaaaaagaacaccaccaccgaaaaggaaattcacgttgaaaaatacagggttcccaaaatggccacccacttcaagcaccttgcggagcaagctaaagaatctgacatcaccgctgggaaggatactccgcagggtagcatanaagccttgcaagctggagagaaggtcaaagatcatgcangaaaagccatgggagatattggtggacgtgggaaagccagagagactcacgagctgggtgcacactttgaatccctggctgacaaagtaactgaccatgcagcagccaatgtagttggaaacaaagagagtcaaagag

SEQ ID NO: 26639 - DNA, 448 bp, Glycine max
  unsure (1)..(448): unsure at all n locations
  Clone ID: LIB3051-011-Q1-E1-D3
cccacgcgtcaggcagaccctcagaaaattcaccctgtgcaccatgatgttgaggcacaaaaccacccttcagcaccattggtgccaaggagcatgtccaaatctgatgcaggtgatccacaacgagtagtaatacaacaacaacaacaaaacattcctctgaagcaaaccaagccaccaccgaaagaaaagaagaagctgctgctgcaggttcttctgttggctaataagcatattgctgattctgatagtggcaattggcatcactgttggaatactctaccttgtcttcaggccaaagcttccaaagtactcggtggacgaacttagagtcacacactttgatcttgcagacaacaacagcttatcagtgacattcaacttgacaataaccgccagaaaccccaacaaaaaaattggaatagactatangggtggcagccacata

SEQ ID NO: 26640 - DNA, 413 bp, Glycine max
  Clone ID: LIB3051-036-Q1-K1-E12
ttcttctgtccctaaatggaaggatcaggatccggtgtggttacagtctacggcaacggcgccatcaccgagaccaagaagtcccccttctgcgtcaaagtcggcctagcccagatgctccggggcggcgtcatcatggacgtcgtcgacgccgagcaggcccgcatcgcggaggaggccggtgcctgcgcggtgatggccctggagcgtgttcccgccgacatacgggcccagggcggcgtggcccgcatgagcgatccgcagctcatcaaggatatcaagcgggccgtcaccatccccgtgatggccaaggcccgcatcggccacttcgtcgaagcccagatcctcgaagccatcggcatcgactacgtcgacgagagcgaggtcctcaccctcggcgacgacgccaacca

SEQ ID NO: 26641 - DNA, 416 bp, Glycine max
  Clone ID: LIB3051-078-Q1-K1-D5
cttccttctcttctcacacaacaaacatatctcttcctcttctgtccctcaatggaaggatcaggatccggtgtggttacagtctacggcaacggcgccatcaccgagaccaagaagtcccccttctccgtcaaagtcggcctagcccagatgctccgcggcggcgtcatcatggacgtcgtcgacgccgagcaggcccgcatcgcggaggaggccggtgcctgcgcggtgatggccctggagcgtgtccccgccgacatccgggcccagggcggcgtggcccgcatgagcgatccgcagctcatcaaggatatcaagcgggccgtcaccatccccgtgatggccaaggcccgcatcggccacttcgtcgaagcccagatcctcgaagccatcggcatcgactacgtcgacgagag

SEQ ID NO: 26642 - DNA, 332 bp, Glycine max
  Clone ID: LIB3051-113-Q1-K1-D8
tctcacacaacaaacatatctcttgctcttctgtccctcaatggaaggatcaggatccggggtggtgacagtctacggcaacggcgccatcaccgagaccaagaagtcccccttctccgtcaaagtcggcctagcccagatgctccgcggcggcgtcatcatggacgtcgtcgacgccgagcaggcccgcatcgcggaggaggccggtgcctgcgcggtgatggccctggagcgtgttcccgtcgacattcgggcccagggcggcgtggcccgcatgagcgatccgcagctcatgaaggatatcaagcgggccgtcaccatccccgtgatgg

SEQ ID NO: 26643 - DNA, 362 bp, Glycine max
  Clone ID: LIB3051-075-Q1-K1-A12
gcttgaggccacgatcagtggcttgagggatgatgttgcaaagaacgcttcgattgttgaggatgtggagagggacttagctgttagggatcagaggctgaacgaggtttcggagaatttgagtaaggagcaaagcgaggctttgcagttgaaggagttcgttgctgagtgtgaggagaagttgagtaacttggaatctcggatggaatcgcaaaggcctttgttgattgatcagttgagttttgtttccaaaattcataaccagatatgcaatgttgttaagatacttgatgacggtggcacctcggagctgtctgaatcgttgtttgtcccgcaagaaacagacgttgaggagaatattc

SEQ ID NO: 26644 - DNA, 434 bp, Glycine max
  Clone ID: LIB3051-078-Q1-K1-C3
tcggtttgttggtgagtgtgaggagaagttgagtaagttggaatctcggatggaatcacagggagctttgttgattgatcagttgagttttgtttccaaaattcacaaccagatttgcaatgttgttaggataattgaccacggtagcaccgaagagctatctgaatcgttgtttgtcccgcaagaaacggatgttgaggagaatattcgtgcctctttggctgggatggagtccatatatgagttgaccaagattgttgttcataaagctaacgatgtgcttgacgagaaggatcgtgagattaagagtttacatgagacattggctcggttagttatggagaatgatcaaaattgttcttttcttaagagtgctttgtctaagaaggtggcagttgatccgtcttttagaaagagtgaacctgtttaaactg

SEQ ID NO: 26645 - DNA, 359 bp, Glycine max
  Clone ID: LIB3051-025-Q1-K1-E2
ccggtttctcttgtcacaccaaatggaccgacccgccgccatattttccgacaccgtcaacctcaacggcacggtgacgcagctgtctctgctcgccgacgggaggctgtggtggccggagggcggtcaacgcaatttgagcatcgagaaagaggttctcgggttcaccggcgacggtcccgatataaggctcaaaacaatcgtggaaaccgaagatggatgctgtggcggtgcaagcagagcaaaactagtccgaaacgacgtcgtttttcggccatcgtccgaggaaacgcataagctctggtgccagaagcttggcgaattcatcgattctctcggacgacccaagaggctttttg

SEQ ID NO: 26646 - DNA, 410 bp, Glycine max
  Clone ID: LIB3051-027-Q1-K1-F10
cgcattataaccgaggctgttggtggccaggttgtggagcagtatgtggaggcaactccggttgaggcagggcgaagcagtgcaattaaggagaatgccataacaataggagaggcattggaggcgacggcacagactgtgggtcagaaagcggtggatcagagtgacgcctccgcgattcaggcggcggaggtgagagcaacgggaagtaacgttataacgccgggtggacttgcggctatggctcaatcagctgctgcttataatgctgactgcaagcttgaccaggacaaggtcaagctcgccgacattttggccggagccacagccaagttgcccgcggacaaggccgtcacactgcaagatgctgaaggtgtagcgtgtgctgaggtgaggaacaaccctgatgc

SEQ ID NO: 26647 - DNA, 396 bp, Glycine max
  Clone ID: LIB3051-042-Q1-K1-E6
aatgaacaggctggtcttgtcggtcaccaggacgtcaccgacatcaccggcgaccatggcgtcacagtcacagaaactacattccatggaagacgcataataaccgaggctgttggtggccaggtagtggaacagtatgtggagccaaatccagttgaggctggacgaaccagtgcaattaaggagagtgctataacaataggagaggcattggaggccacggcacagacggtgggtcacaagccggtggatcagagtgatgcctcagcgattcaggcggcggaggttagagcaacgggaagtaacgttataacgccgggaggacttgcggctatggctcaatcagctgctgcttataatgctgactgcaagcatgaccaggacaagggcaagctt

SEQ ID NO: 26648 - DNA, 420 bp, Glycine max
  unsure (1)..(420): unsure at all n locations
  Clone ID: LIB3051-094-Q1-K1-A8
caaaaccaaaacagtaaagctaacttcaacacctttaattttctaaaagtaattcagcggctgaataccaagcggagaagatgagtcaggagcagccacggcgtcccaaaggccaaaaccccatcaaatacggcgacgtttttgtcgtctccggcgaccttgcacagaagcccgtcgcaccggaagatgctgccatgatgcaaagcgcggaaactcgagtgctcggacaaacccaacccggcggagcagcttccgtcatgcaatctgccgccaccaggaatgaacaggctggccttgtcggtcaccgggacgtcaccgacgttaccggcgaccgtggcgtcacagtcacagaaactaaagtccctggaagacgcattataaccgaggcttgtggtggccangnntctttttttttctttt

SEQ ID NO: 26649 - DNA, 401 bp, Glycine max
  Clone ID: LIB3051-050-Q1-K1-B4
atcaagcaagtggatggtataatcggctcattgggtagactactaatagaagatcaggtcaagatcgttgcagcattaaaagaagctggaaacgttaagagattttttccatctgaatttgggctggatgtggaccgtcacgatgcaactgagccagtcagagaagttttcgaggaaaaagcgaaaatccgaagagtaattgaagctgaaggaattccatacacttacctatgttgccatgcctttactggttacttcttacgtaaccttgcacagattgacatcactgttcctcctagggacaaggttttcattcaaggagatggaaatgtcaaaggagcgtatatcactgaggccgatgtgggagtttttacaatccaagcggcaaatgaccctaatgc

SEQ ID NO: 26650 - DNA, 455 bp, Glycine max
  Clone ID: LIB3051-081-Q1-K1-C3
ctaattcaaagcttccaaattcttggagttcctttaatccagggagacctgattgatcatgaaggtctggtgaaagcaatcaagcaagttgatgtagtaatctgctcatttggtagactactaatagaagatcaggtcaagatcgttgcagcaataaaagaagctggaaacgttaagagattttttccatctgaatttgggctggatgtggaccgtcacgatgcaactgagccagtcagagaagttttcgaggaaaaagcgaaaatccgaagagtaattgaagctgaaggaattccatacacttacctatgttgccatgcctttactggttacttcttacgtaaccttgcacagattgacatcactgttcctcctagggacaaggttttcattcaaggagatggaaatgtcaaaggagcgtatatcactgaagccgatgtgggagtttttacaat

SEQ ID NO: 26651 - DNA, 413 bp, Glycine max
  Clone ID: LIB3051-107-Q1-K1-B2
gtttagttacgtacatagcttgaaaacacagtgcttgtttagactagtatcttccatggctgcgaaagatagaatcctggttttgggacccacaggagccattggaagacacatagtttgggcaagtgtaaaggcagggaatcccacttttatattggttagggacacccctgcctctgttaacaagccaaggcttgtcactgctgctaatcctgaaaccagggaagagctcattcagagcttccaaaattctggagttactctaatccagggagatatgaacgatcatgaaagtctggttaatgcaatcaagcaagttgatgtagtaatctgctcatttggtagactactaatagaagaccaagtcaagatcgttgcagcaataaaagaagctggaaacgtcaagagatttt

SEQ ID NO: 26652 - DNA, 406 bp, Glycine max
  unsure (1)..(406): unsure at all n locations
  Clone ID: LIB3051-019-Q1-E1-B6
accacgcgtccggacgttcttgcaatccacgccacacgaagggtcgacccaacaacttggcccattggtcacagtcccacaattcctcttttcttgtgcaccttccttccttgttcaaaagggtcttcctagaaacactcaatgtgtggctgggttaggccatgcaccaatttctcttccaaaccaactcgcttcccactttggcctacaacgccaattcaccacttgcctttctcgctaccctacttcatagggtgctataatattcggggatgcacctatcaacatgcgacagtttcaaaaccaagatattttccacgatttggccttcaccccattaaccatcaccctgcanggagagtacaacgtgagagtcaactcaataagaatcaaccagcacagtgtg

SEQ ID NO: 26653 - DNA, 406 bp, Glycine max
  Clone ID: LIB3051-084-Q1-K1-C1
tcgcccacgcgtccgcaaaccttgctctatactacacagtacacacactagaagaataatggcttccatcctccactactttttagccctctctctttcttgctcttttcttttcttcttatccgactcagtcacccttacaaaaccaataaaccttgttgttctacccgttcaaaatgatggttccacagggctccattgggccaacctccaaaaaagaacccctctaatgcaagtaccagtcctggtggacctcaatggaaatcacttgtgggttaactgtgagcagcagtactcatccaaaacgtaccaagcacccttctgccactccacccaatgctctagagccaacacccaccaatgccttaattgccccgcggcattaagggccaggtgccacaaaaac

SEQ ID NO: 26654 - DNA, 436 bp, Glycine max
  Clone ID: LIB3051-083-Q1-K1-C3
ctaagtgtaatgatgagactgtagacgaatcttcaaatgatgtcaacggttctatcaacttgctaccagtgacatacatgcctactattaactcaagcgacaatacgtctatgcacaccactcaaactcaaggatacattccaactgctgccaaaggccataaagattctgatcatgcactggctatgaatgaaagtggaacaattcttgactctggtggcacacaaaacgttgtgcgtatctgggacacatgatcatgatcaaagactctcaagctaagagggcatacagataacatcagggctctgcttctggattctagcggcagatactgactatcaggatcattagactctatgatcaggcttcgggatataggtcatcaaaaatgtgtgcattcttatgcagttcatacacattctgactgggcactcgc

SEQ ID NO: 26655 - DNA, 446 bp, Glycine max
  unsure (1)..(446): unsure at all n locations
  Clone ID: LIB3051-111-Q1-K1-E1
cccacgcgtccgcccacgcgtccgggagatctcagcgttgatgaggaaaatggggtacaagcggaacgccaaaaggtgcaaagagaagtgggagaacatcaacaagtacttcaagaaggtcaaggaaagcaacaagaagaggcctgaagattcaaagacatgtccctattttcaccagttggaggctctatacagggagaagaacaagggagaggggcagatgaagccggagagcatgatggcgccgctcatggtgcagccggagcaacaatggcctcctcaaacaacgcttgtggtaccgccagaagtaaccatgggagacacccagaatgaccccatggaccggcagtaccatgaggagaatgaggatgacgaggacgacaaggaaattggagatgaagacgaggatgaggacgacgaangaggtgataattatgagatagttg

SEQ ID NO: 26656 - DNA, 438 bp, Glycine max
  Clone ID: LIB3051-087-Q1-K1-C11
tttatattgaaaatccttaaacgtacgctattcctataataataataagcgacactatgggaataggtacattgtcaagggttcattcaccgactccttttggttgctacagagacagggagacaagacagagtagtacagattactaccaatggctaccaaggtttacattggttattattctacgtatggacatgttgagaagctagctagagagatagaaaaaggggctgcttctgtggagggagtagaagcaaaactgtggcaggtacctgaaacattgcctgaagaagtccttgctaagttgggagcacctccaaagagtgatgttccaattattactcccaatgagcttactgaggctgatggctttttgtttggttttcccacaagatttggatctatggccgctcaattaaagcatttcttgatgcaact

SEQ ID NO: 26657 - DNA, 413 bp, Glycine max
  unsure (1)..(413): unsure at all n locations
  Clone ID: LIB3051-082-Q1-K1-A3
gtgtcgatggcgggaaaaggagggaaggggcttgtggccggaagaaccacggcagcgaacaaggacaaagacaaggataagaagaggcccgtctctcgttcatcccgtgctgggatccagtttcctgtgggacgtatccacaggcagttgaagcaaagggtgcaagcaaatggacgtgtgggggcgactgctgctgtgtacttggcctccattctggaatatctgactgctgaagtgctggagctggcagggaatgctagcaaagatcttaaggtgaagaggatcacaccaaggcacttgcaacttgctatcangggagatgaagaacttgataccctcatcaaagggaccattgctggcggtggtgtcatcccttacattcacaagtttttgatcaacaaaagcgccaaaga

SEQ ID NO: 26658 - DNA, 412 bp, Glycine max
  Clone ID: LIB3051-020-Q1-E1-B9
agtctcttgcacatcaaatgtacaagactggcaattataagcaagccctagaacacagcaacactgtctatgagagaaatccgctccgtactgacaacttactactcctgggtgcagtttattatcagttgcatgattttgatatgtgtgttgcaaaaaatgaagaagcactgaggattgagccacactttgctgagtgttacgggaatatggcaaatgcatggaaggagaaaggaaacattgaccttgcaattcgctactacttgattgccatagagctccgtcccaattttgctgatgcatggtcaaatctagctagtgcatacatgcgtaaaggaagactcactgaagcagcccagtgttgtcgtcaagcacttgctagaaatcctctaatggttgatgcccatagcaa

SEQ ID NO: 26659 - DNA, 327 bp, Glycine max
  Clone ID: LIB3051-054-Q1-K2-G10
aagactacccagaaaagcccccaagtgttcggtttcattcacgaatcaatatgacttgtgttaatcatgaaactggagtggttgaatcaaagaaatttggtcttcttgcaaattggcaacggaggtttaccatggaagatatactgacccagctgaagaaggaaatggcgggtttcacataaccgcaagcttgtccaacctcctgaaggtactcactattagtgtccaagatcataccgatattggatcatattgcatttgcagtatgcaatatatagtatgtattactcttgatccttctaaattcaagaacataattgggaatgc

SEQ ID NO: 26660 - DNA, 277 bp, Glycine max
  Clone ID: LIB3051-014-Q1-E1-C2
accacgcgtccacgtaactttcatttgttgtgcaatcttacaagttccaaacttctctattttgttattatttgttctcacttctcacacatacagatttgagccttttatattatcatggcttctaaggtggtttcggttttggttatagcgatgatgttgtttgccatgaactgtaactgcactagtgttggccaaatgccttcaaccaaagaggaaggtcacgattttcaggattctaaagccaaaaccaaccaaattgcaaacaaggccatgg

SEQ ID NO: 26661 - DNA, 437 bp, Glycine max
  Clone ID: LIB3051-020-Q1-E1-E1
acacatacagatttgagccttttatattatcatggcttctaaggtggtttcggttttggttatagcgatgatgttgtttgccatgaactgtaactgcactagtgttggccacatgccttcaaccaaagaggaaggtcacgattttcaggagtctaaagccaagaccacacaaactgcgaacaaggccatggaaactggtaaagagggacaagaagccgcagagtcatggacagaatgggctaaagagaaactcagtgaaggtcttggcttcaaacatgatcaggaatccaaagaatccaccactaacaaagtctctgattatgccactgacactgcacagaaatccaaggattatgcaactgacactgctcagaaatcaaaggactatgcaggtgatgctgctcagaaatcaaaggactacgcaggtgatgctgctc

SEQ ID NO: 26662 - DNA, 385 bp, Glycine max
  Clone ID: LIB3051-051-Q1-K1-B8
cccacgcgtccgcagaaaaccaaggactatgccggtgacactgcacagacatcaaaggactatgccggtgatgctgctcagaaatcaaagggctatgtcggtgatgctgcacaaaagaccaaagaatatgttggtgatgctgctcagaagaccatggattatgccactgatgcagcacagaagaccaaagattatgctactcagaagactaaggactatgcaagtgatgcaactgatgctgcaaaaaagactaaagattatgctgctcagaagaccaaggattatgcaagtgatgcaactgatgctgcaaaaaagactaaggattatgctgcgcagaagaccaaggactatgccagtggtggtgcgcagaagaccaaggactatg

SEQ ID NO: 26663 - DNA, 443 bp, Glycine max
  unsure (1)..(443): unsure at all n locations
  Clone ID: LIB3051-067-Q1-K1-D1
gctcagagaagcaaaggggctgctgaatatgctagtgatgcggctcagaggaccaaagagtatgctggtgatgctaccaagagaagcaaagaggcttctaatgatcatgccaatgacatggctcagaagaccaaagactacgccagtgacactgctcagagaaccaaggaaaaactccaagacattgcatctgaagctggtcaatacagtgcagagaaagctagagaaatgaaggatgcagcagcagagaaggcaagtgacatagcaaaggctgcaaagcaaaaatcacaagaggtgaaagagaaattaggtggacaacaccgggatgccgagctttgagaattgagatgtttgaatcactttgaaccttttaattatgccaacaatagtngtctaaatctgccagaaataatggtgtgtgtatatattatatggcaagatct

SEQ ID NO: 26664 - DNA, 345 bp, Glycine max
  Clone ID: LIB3051-079-Q1-K1-F4
gtttggcgttcaatctaacaaacttctctatatcgtgtactttttcaacacacgttacacacttgtttatttgagcctttcatataaacatcatggcttctagggtggtttcggcattggtgatagcgatcatgtcgtatggcatgaactgtaactgcactagtgttggccacatgccttgaaccgaagaggaaggtcacgattttcaggaggctaaagccaagacaacacaaactgcgaacaacggcatggaaactggtaaagatgggaaagaagccgtatagtcatggacagaatgggcttaagagaaactcactgaaggtcttgggttcaaacatgatccag

SEQ ID NO: 26665 - DNA, 289 bp, Glycine max
  Clone ID: LIB3051-110-Q1-K1-B11
gtcttcaaacatgatcaagaatccaccactaagaaagtctctgactatgccggcgatgctgctcagaaatcaaaggactatgccggtgacactgctcataaaaccaaggactatgccagtgacactgctcaaaaaaaccaaggactatgcccgttgaaactgcacaaccataaaaggactatgccggtaatgcttataacaaatcaaagggctatgtctggaataccgcacaaaggaccaaggaaaatggtttgaatgctacttaaaaaaccttggattttgccacttt

SEQ ID NO: 26666 - DNA, 294 bp, Glycine max
  Clone ID: LIB3051-061-Q1-K1-F2
gctctgaaatcgattagtcttcttcgtttttcttcacattcctcgtgacagatctaatctaatcatgctgttgggggtgactcagacattgcatgcatatcggtggttgtgttggatgctataaaaggcctacactgagtgctactgtggatgtgccatcgaaagggttggccacacatggtaactgactgaggaaaccaagctcatgctaggatttttggaccactagcacgcatgatatggacaacagcgctgtccaatcacaggggagcatatattcagccattctaacaa

SEQ ID NO: 26667 - DNA, 367 bp, Glycine max
  unsure (1)..(367): unsure at all n locations
  Clone ID: LIB3051-088-Q1-K1-E7
cccacgcgtccgctttctctctcaaaaccctaaccctaaccccaatccccagagtctggaagcctctccaatggcgtaccagacccccgatcaagattcaggttccgatccgaagaccccaacgcgcctctacaacccctacaaggatctcgaagtccccattcgcaacctctaccagctcccaacctccccggagtacctcttcgtcgaagaagcccgccgcaagcgccgatcctggggcgagaacctcaccttctacaccggctgcggctacctctccggcgctgtcggtggcgccgactccggcctcgtcggcggcgttaaatccttcgagtccggcgacaccgncaagctccgcgtcaaccgc

SEQ ID NO: 26668 - DNA, 415 bp, Glycine max
  Clone ID: LIB3051-116-Q1-K1-E1
cccacgcgtccgccacgcttctctccttccttcaacgtcgctttccactgtggccaccgggtgaacttttcaagtttgtggacacgctttaatgtacagaagcagcaatattgtggccagggtttttgatcgtcaaatttgcactcctgctcctggcactagtgtgtaatttaattcttgcaggttcatcatgctcggcgattctatgaaaatttggtaccaagtcacacagtatatgaggtcgagtgcccagaccattcatttcgtaaattcactgatgatggtcaataccttataagtttcagcagaaatcatcaggagttgattgtttataggcctagatggctttctttttcatgcaaggatgaagattgtgataaacatgatttgccatcaagagcaaagagatttgaca

SEQ ID NO: 26669 - DNA, 406 bp, Glycine max
  Clone ID: LIB3051-035-Q1-K1-F3
ctcaaatctgcaaactaggctttttcccaacgggttcagtttattcaagttttacaatttcgtggctctgaaactattagatggggaattgtttgcgcaaggctcatgcggatgatgattctgatcatattgtggagcttgcttctgggaatgtgcaacttattactaccaaagaatcttgggaccaaaagttggatcaagcgaggaaggagagtaaaattgtaattgcaaatttcagtgcaacatggtgtggtccttgtaaggtgattgcaccacattattgcgagttgtccgtgaaatacccgtctatcatgttcttattagtcgatgtggatgaactagctgacttcagcacttcgtgggacatcaaagccacaccaactttcttctttcttaaagatgggaa

SEQ ID NO: 26670 - DNA, 450 bp, Glycine max
  Clone ID: LIB3051-095-Q1-K1-B3
cccacgcgtccggttttccatcaaactcaaacataacagggaaatcatttggatttacgggttgttcggaaccaatggctcttaatagaccccaagatacagtttctaatgtcacaggcaaatgaagataaaacatctggagacttcagagaaatgggatttcggcttgcccaggaagtgatcttgttcctgaaaaagaagatggataaagcttcaagaaatggaaacttgaaagatatcaagcttagctttgttggtcattctattgggaatctcattatcaggacagccttgacagagagcgtcatggagccatatctaagatacttacatacatatgtctccatatcgggtccacacttgggttatatgtatagttcaaactctctattcaattcagggttgtggatattgaagaagctcaagggcacacaatgcaatcaccaactt

SEQ ID NO: 26671 - DNA, 386 bp, Glycine max
  Clone ID: LIB3051-093-Q1-K1-E9
gccatgaaaaggactatatctggtatgctgggcttgcttccatctgatcagtttcacgttgtcattgaggccttgtgggaacccctttccaagttactaatttcttcaatgatgactgggtatacgctgcacaatgttgaatatagactttgtcttgataaaaaccttgatatgtttgaaggagatatagagaagccaaaggcataaagtacgaaagtggacttacaagggttgatgcatgacagtgtaaatgtaattgactttggtagagataagagcttgtcttctaaagttgaaaagctttcatgaagacgctgacattcaagaacttggtgacatatctgcataagctctgcaatatatttttaatctgcaatctcgcttgt

SEQ ID NO: 26672 - DNA, 438 bp, Glycine max
  unsure (1)..(438): unsure at all n locations
  Clone ID: LIB3051-080-Q1-K1-F4
cccacgcgtccgcccacgcgtccgtttctctcttctctgcttcttcttgttcaaatcttaggagctgaggagaatcaatcgagagaaatatgtctggtatcgctcgtggacgccttgctgaggaacgaaagtcatggcgcaaaaaccatccacacggtttcgttgccaagcccgagactctacctgatggcaccgtaaatttgatggtctggcattgcactattcctggcaagaccgggactgattgggagggtggatatttcccactgacaatgcacttcagtgaagattaccctagcaagcctnccaagtgcaaattccctcaaggtttctttcaccctaatgtgtatccatctggaactgtttgcttgtctatacttaatgaagatagtgggtggagaccagctataacagtgaagcaaattcttgtgggcattc

SEQ ID NO: 26673 - DNA, 331 bp, Glycine max
  unsure (1)..(331): unsure at all n locations
  Clone ID: LIB3051-095-Q1-K1-G5
attttctctcttctctgcttcttcttgttcaaatcttaagagctgaggagaatcaatcgagagaaatatgtctggtgtcgctcgtggacgccttgctgaggaacgaaagtcatggcgcanaaaccatccacacggtttcgttgccaagcccgagactctacctgatggcaccgtaaatttgatggtctggcattgcactattcctggcaagaccgggactgattgggaaggtggatatttcccactgacaatgcacttcagtgaagattaccctagcaagccctccaagtgcaaattcccttcaggtttctttcaccctaatgtgtatcca

SEQ ID NO: 26674 - DNA, 420 bp, Glycine max
  Clone ID: LIB3051-018-Q1-E1-C8
agcacggagtgatggctgtgcagctgtgggaaaccctgaaggaagccatcgtagcctacactggcttctctccttccaccttcttcacggtgctggcgcttctttttgccgtttactacgtcgtcacgggtctctttggctcctccgacgatcaccatcaccgccaccgccacgtcgaggaggaggaggagatgccgcctctgcgccccccggttcagctcggcgagatcacagcggaggagctcaaggcctacgacggcaccgatcccgagaagcccttgctcatggccatcaaggcccagatctatgatgtctcccagagcacgatgttttatggacctggtggaccttatgccctatttgctggcaaggatgctagcagagccttagcaaagatgtcttttgaagagaaagatctga

SEQ ID NO: 26675 - DNA, 382 bp, Glycine max
  Clone ID: LIB3051-059-Q1-K2-B9
gggagcaacaccatctttcattttccggcgatctcttgtttcttccatcatcaccgttgtccggcgatccctaatcctcgcaaacagaaatgacgacatcaaggcgccttgcggacaggaaggtggagaagtttgagaagaacatcacaaaaagaggatttgtgccagacactaccactaagaagggaaaagactaccctgttggcccagtgctgctcggtttcttcgtctatgttgtcattggatcatctctcttgcagataatcaggacagcaacgagtggaagcatggcttaaatggagcttggtttggattatgtgtcatcttctctttcttagcctcctcgtagaaaatgctaatacttctctacatgtactgtact

SEQ ID NO: 26676 - DNA, 399 bp, Glycine max
  Clone ID: LIB3051-015-Q1-E1-G5
gacccaagcgtcagccaatacccatttcggtaaataatataatcgcaatccttcttcactcgcttcgatggcgacagggttactgaagagggcggcgcagaggctcccctcctcgccggggttcaagctggccctcctccgggcccacgcgtcggaggcccaggcccagcaggtggagcccaaggcccgcggcaccccgaccctcaaaaccttccaaatctaccgctggagcccggagaacccctcaaagcccgagctcaaggactaccagatcaacctaaaggagtgcgggcccatggtcctggacgcgctcatcaagatcaagaacgagatcgacccgagcctcacgttccgccgctcgtgccgcgaggggatctgcggctcctgcgccatgaacat

SEQ ID NO: 26677 - DNA, 421 bp, Glycine max
  unsure (1)..(421): unsure at all n locations
  Clone ID: LIB3051-002-Q1-E1-B1
accacgcgtccgatcggatcgatcaagcatcagggagctttgagggttgattctctggtgtagtagcaggcagcacaatagaaaatgttttttgacggatatggatatcatgggacatcatttgagcagatatatcgatgctacccagcttcctttattgaaaagccccaaatccaaagtggtgacaaaattatcatgcctccatcagcccttgaccgtctagcatctctgcatattgattacccaatgttgtttgaactccgtaatgatgctgccgaacgggtttctcattgtggggttctggagttcattgctgangaaggcatgatatacatgccatactggatgatggagaacatgcttttaaaagacggggacactgtcaaagtgaaaaatgtgacacttccaaaggggacatatg

SEQ ID NO: 26678 - DNA, 451 bp, Glycine max
  Clone ID: LIB3051-028-Q1-K1-D2
ctctcatgtcatcggatcgatcaagcatcttggagctttgagggttgattctctggtgtagtagcaatcagcacaatggaagatgttttttgacggatatggatatcatgggacatcatttgagcagatatatcggtgctacccagcttcctttattgaaaagccccaaatcgaaagtggtgacaaaattatcatgcctccatcagcccttgaccgtctagcatctctgcatattgatgtcccaatgttgtgtgaacttcgtaatgatgctgacgagcgggttgctcattgtgggggtctagagttcattgctgaggaaggcaggatatacatgccatactggatgatggtgaacatgctttgacaagagggggacattgtcaaattggaaaatggtacactttcaaaggggacatatgttaagttacagccccacacaaaagactttttg

SEQ ID NO: 26679 - DNA, 395 bp, Glycine max
  unsure (1)..(395): unsure at all n locations
  Clone ID: LIB3051-075-Q1-K1-C2
gatcgatcaagcatcagggagctttgagggttgattctctggtgtagtagcaatcagcacaatggaaaatgttttttgacggatatggatatcatgggacatcatttgagcagatatatcgatgctacccagcttcctttattgaaaagccccaaatcgaaagtggtgacaaaattatcatgcctccatcagcccttgaccgtctagcatctctgcatattgattacccaatgttgtttgaactccgtaatgatgctgccgagcgggtttctcattgtggggttctggagttcattgctgangaaggcatgatatacatgccatactggatgatggagaacatgcttttacaaaaaggggacattgtcaaagggaaaatgtgacacttccaaagg

SEQ ID NO: 26680 - DNA, 442 bp, Glycine max
  Clone ID: LIB3051-111-Q1-K1-C2
atactggatgatggagaacatgcttttacaagagggggacattgtcaaagtgaaaaatgtgacacttccaaaggggacatatgttaagttacagccccacacaaaagactttttggatatttccaatccaaaagctatcttagaaacaacattgaggaatttttcctgcttgactactggagatagcattatggtggcttacaacaacaagaaatattacatagatattatagaaactaagcctgacactgccataagcataattgagactgactgtgaagtggactttgctcctcccttggattacaaggaacctgaaaaacccactgcacccctttctgctgggaaggcagcagtggctgctgaggtgatccctgctgaagatgagcccaagttcaacccattttctggaactgggagacgcttggatggaaaacctttg

SEQ ID NO: 26681 - DNA, 258 bp, Glycine max
  Clone ID: LIB3051-024-Q1-K1-C7
cccacgcgtccgattctcttctcatctatggggcagaagtctctgatctacgcgggggtgtcgcggggaacagtgattctcgcggagtacaccgaattcagcggaaacttcaactccatggccttccagtgccttcagaagctccctgccaccaacaacaagttcacctacaattgcgacgcacacaccttcaattacctcgtcgacaatggctacacatattgtgtaggtgcagatgaatcaattggaagacaggga

SEQ ID NO: 26682 - DNA, 331 bp, Glycine max
  Clone ID: LIB3051-106-Q1-K1-H10
gcggccacgcgtacggtctccacgaatcatcgatggtaactgccacgttgatgattgaactctggaggatgggcctgagtctgattctgctggaccaacttcgggaagcactgtctgtgctgtcgctattagaaacaaccaacttgttgttgcaaatgctgctgattcgcgatgtgtgatatctcggatgggccatgcatacaatccgcctatagaccacaaacctgatcttgagattgatatggacagaatcttaaaagcttgagcttacattcatgcacgactagttaatgtaagtttaaatcttgctagagctattggtgacatggaa

SEQ ID NO: 26683 - DNA, 405 bp, Glycine max
  unsure (1)..(405): unsure at all n locations
  Clone ID: LIB3051-093-Q1-K1-F3
caacattttacactcttttcttcttctcgttgttgcttcgctgttgaatcatggatcagggggtcgatttcagcgctgcccattccatgggaaccactatcatcggcgttacttacaacggcggtgtcgttctcggagccgactctcgaaccagcaccggagtgtatgttgccaaccgagcatcggacaaaatcactcagctcactgataatgtatacgtgtgtcgctctggatcggctgctgattctcagattgtctctgattatgtgcgttacttcctccatcaacacacaatacaacttggacaacctgcaacagttaaagttgctgcaaaccttgtccgacttctctcatataacaataagaatntcttagagaccgggttaaattggtggtggatgggat

SEQ ID NO: 26684 - DNA, 378 bp, Glycine max
  Clone ID: LIB3051-022-Q1-K1-C1
ccagcgtcgtcacaaccatggataattccaaccttcaacgtctcttcactctcttcctttttgccctaattgcaccctctttggctcaacaatccttcagacccagagccctcgttgtcccagttaaaaaagacgcttccaccctccaatatattactcaaatcaaacaaagaacaccactcgtcccagaaaacctagtacttgacatcggtggccaattcctgtgggtcgattgcgacaacaactacgtctcctccacttaccgccccgcacggtgtggctccgcccagtgctccctcgccagatccgacagctgcggaaactgcttctccgccccaaaacccggctgcaacatcaacacgtgcggcgtcatgccag

SEQ ID NO: 26685 - DNA, 314 bp, Glycine max
  Clone ID: LIB3051-027-Q1-K1-F2
tgcttctccgccccaaaacccggctgcaacttcaactacgtgcggcgtcacgccagacaacaccgtcaccggcaccgccaccagcggcgagctcgcgcaagacgtcgtctgcctccaattcaccaacggttttaaccctatacaaaacgccgccgtttcgcgcttcttattctcctgcgctccaaccttcttactccaaggccttgccaccggtgtcagcggcatggccggtctcggcagaactagaattgctctcccctcgcagctcgcttccgctttcagcttgcgtagaaaattcgccgtctgcctctcat

SEQ ID NO: 26686 - DNA, 444 bp, Glycine max
  unsure (1)..(444): unsure at all n locations
  Clone ID: LIB3051-038-Q1-K1-A10
ccaaccttcaacgtctcttcactctcttccttttttccctaattgcaccctctttggctcaacaatccttcagacccagagccctcgttgtcccagttaaaaaagacgcttccaccctccaatatattactcaaatcaaacaaagaacaccactcgtcccagaaaacctagtacttgacatcggtggccaattcctgtgggtcgattgcgacaacaactacgtctcctccacttaccgccccgcacggtgtggctccgcccagtgctccctcgccagatccgacagctgcggaaactgcttctccgccccaaaacccggctgcaacaacaacacgtgcggcgtcacgccagacaacaccgtcaccggcaccgncaccagcggcgagctcgcgcaagacgtcgtctccctccaatccaccaacggtttcaaccctatacaaaacg

SEQ ID NO: 26687 - DNA, 356 bp, Glycine max
  unsure (1)..(356): unsure at all n locations
  Clone ID: LIB3051-047-Q1-K1-C1
cccacgcgtccggataatnccaaccttcaacgtgtcttcactctcttccttttttccggaattgcaccctctttggctcaacaatccttcagacccagagccctcgttgtcccagttaaaaaagacgcttgcaccctgcaatatattactcaaatcaaacagagaacaccactcgtgccagaaaacctagtacttgacatcggtggccaattcctgtgggtcgattgcgacaacaactacgtctgctgcacttaccggcccgcacggtgtggctcctgccagtgctccctcgccagatccgacagctgcggaaactgcttgttcgacccaaaacccggctgcaacaacaacacgtg

SEQ ID NO: 26688 - DNA, 427 bp, Glycine max
  Clone ID: LIB3051-059-Q1-K2-E8
cccacgcgtccggcgtgaaatcgattaaaatcgacgaaaagacagtgccgttaaacacgactttgttgtccataaacagcaaaggcgttggtggaaccaagattagttccgttaacccttacactgttttggaggattctatcttcaaagcggtgacggaggctttcgtgaaagcttcttctgctaggaacataacgagggtggcttctgtggcgccgtttgaggtgtgcttcagtagggagaacgtgctcgccacgcggttgggggcggcggtgccaactattgagcttgtgctgcagaaccagaagacggtttggaggatttttggagcgaactcgatggttagtgtgagcgatgataaggtgctatgccttgggtttgtgaatggaagtgagaatccgaggacttcgatagtgattggaggata

SEQ ID NO: 26689 - DNA, 452 bp, Glycine max
  unsure (1)..(452): unsure at all n locations
  Clone ID: LIB3051-085-Q1-K1-F3
gcgaccctacgttcttctccccaacgtcgacgcttctcagctactcaccttcacgccgttattaatgaaccccgtgggcaccgcctctgctttctcccagggagagccttccgccgagtatttcatcggcgtgaaatcgattaaaatcgacgaaaagacagtgccgttaaacaccactttgttgtccataaacagcaaaggcgttggtggaaccaagattagttccgttaacccttacactgttttggaggattctatcttcaaagcggtgacggaggctttcgtgaaagcttcttctgctaggaacataacgagggtggcttctgtggcgccgtttgaggtgtgcttcagtagggagaacgtgctcgccacgcggttggnggcggcggtgccaactattgagcttgtgctgcagaaccagaagacggtttggagggatttttggagcgaac

SEQ ID NO: 26690 - DNA, 385 bp, Glycine max
  unsure (1)..(385): unsure at all n locations
  Clone ID: LIB3051-106-Q1-K1-G1
gtcacaaccatggataattccaaccttcaacgtctcttcactctcttccttttttccctgattgcaccctctttggctcaacaatccttcagacccagagccctcgttgtcccagttaaaaaagacgcttccaccctccaatatattactcaaatcaaacaaagaacaccactcgtcccagaaaacctagtacttgacatcggtggccaattcctgtgggtcgattgcgacaacaactacgtctcctccacttaccgccccgcacggtgtggctccgcccagtgctccctcgccagatccgacagctgcggaaactgcttctccgccccanaacccggctgcaacaacaacacgtgcggcgtcacgccagacaacaccgtcaccg

SEQ ID NO: 26691 - DNA, 388 bp, Glycine max
  Clone ID: LIB3051-014-Q1-E1-E11
acgcaaaggcccaggccttgaagactgctaaggcagttaagtcaggtgctacctttaagaagaaggtaaagaagatccgaacttctgtcactttccacaggccgaagaccttgaacaaggacaggaaccccaagtaccctcgcattagcgccccgccgaggaacaagcttgatcattatcagatcctgaaataccccctcaccactgagtctgccatgaagaagattgaggataacaacactttggttttcattgtcgacctgcgtgccgacaagaagaagatcaaggatgcggtgaagaatatgtatgacatccaggccaaaaaagtgaacaccttgatcaggcctgatggcaccaagaaggcatatgtcacgttgacacctgatta

SEQ ID NO: 26692 - DNA, 400 bp, Glycine max
  Clone ID: LIB3051-063-Q1-K1-D10
cgcagggtttcccgaagatttaacacctatggctcctaaagctgatagttgaaagaaggctgatccaaaggcacaagccttgaaaactgctaaggctgttaagtcaggtgctactttaaagaaaaagaccaagaagatccgaacatctgttaccttccatcgaccaaagaccttgaaaaaggataggaaccctaaatacccacgcattagtgctccacccaggaacaagcttgatcactatcagatattgaagtatcctctcacaactgagtctgcaatgaagaagattgaagacaacaacactttggttttcatagtcgacttgcgggctgacaagaagaagatcaaggatgcagtcaagaagatgtatgatattcagaccaagaaagttaacacctta

SEQ ID NO: 26693 - DNA, 416 bp, Glycine max
  Clone ID: LIB3051-065-Q1-K1-D7
gcaggaattaggaatattcgacaggtagagtttcttcaatggctcctaaagttgataagaagaatgatccaaaggcccaggccttgaagactgctaaggcagttaagtcaggtgctacctttaagaagaaggtaaagaagatccgaacttctgtcactttccacaggccgaagaccttgaagaaggacaggaaccccaagtaccctcgcattagcgccccgccgaggaacaagcttgatcattatcagatcctgaaataccccctcaccactgagtctgccatgaagaagattgaggacaacaacactttggttttcattgtcgacctgcgtgccgacaagaagaagatcaaggatgcggtgaagaaaatgtatgacatccaggccaaaaaagtgaacaccttgatcaggcctgat

SEQ ID NO: 26694 - DNA, 318 bp, Glycine max
  Clone ID: LIB3051-041-Q1-K1-B11
taggcctcagcctctccaatatgtggtcaatgcggcctttttggctgccctatatagtgattatcttgatgctgctgatacacctggatggtattgtggacctaatttcttttcaaccgacgtgctccgtagctttgccaagtcccagattgattacatccttggaaataacccaaggaaaatgagttatgtcgtaagttttggtaatcattacccaaaacacgtccaccatagaggagcatctgtaccgaagaacaagatcaagtatagctgtaaaagtggatggaaatggaaggacacttctaagccaaacccaaa

SEQ ID NO: 26695 - DNA, 427 bp, Glycine max
  Clone ID: LIB3051-041-Q1-K1-G7
taggcctcagcctctccaatatgtggtcaatgcggcctttttggctgccctatatagtgattatcttgatgctgctgatacacctggatggtattgtggacctaatttcttttcaaccgacgtgctccgtagctttgccaagtcccagattgattacatccttggaaataacccaaggaaaatgagttatgtcgtaggttttggtaatcattacccaaaacacgtccaccatagaggagcatctgtaccgaagaacaagatcaagtatagctgtaaaggtggatggaaatggagggacacttctaagccaaacccaaatacaattgttggtgccatggttgccggtcctgacaagcatgatggcttccatgatgttcgtacaaactacaattacacagagccaacacttgctggaaatgccggttta

SEQ ID NO: 26696 - DNA, 421 bp, Glycine max
  Clone ID: LIB3051-033-Q1-K1-C10
cccacgcgtccgaaatctgatgcccacagaatggtgaggactggtcttcaaaaagaaggatcaagagtgatttttggtgttcctaaacctgggaagaaaagaaaatttatggaagtaagcaagcattatgttgcagatgggacaagcaagatcaatgatggaactgattcagtcaagctttcaaatttcttgatacctcaaggtactggatcacgtgggtggaaaaatagttcaaaaaatgataccaaggaaaaactaggagctgactccaggcccacctttaagtctggaaagtcgcagagtgttttgggtagagtggtcccaccaaaagaaaacccattatcaaactctcgtactaatgatttgacaagtcatgcagaaaggatcaaggattcatcaagtcattttaagaatgtatctc

SEQ ID NO: 26697 - DNA, 451 bp, Glycine max
  Clone ID: LIB3051-092-Q1-K1-B7
gatggattgccctatgatgaattcttttcacaaagatctgagtctctcttgaaggttcttaggtcaggggccaggataaagaaagaagcctttcaggctgcttcaattcctgttgttttggtcgagaacagtgggagatgcaacaaaatgacagtgatgaaaaggttcttccaaatgggactgcttggattcctaatctagtccagacaatcacagaaatcgcattgaacaaaagtgagtctattcatgttgacaagaatttgattgaagggccaaatccgaatcagagaggaaaattatggattcctctcgtgttcgctctccaatacttccttatcatgaagccaataaaaggactgatcgagaaagacattgcaaatgagagaaagccaacatgggagagacgcgatgctgcttttcggaagagagatttatattaattgtgcatttc

SEQ ID NO: 26698 - DNA, 221 bp, Glycine max
  Clone ID: LIB3051-098-Q1-K1-D8
ggacatgcaacaaaaatgacagtgaggaaaatgttcttccaaatgggactgcttggattcctaatctagtccaaacaatcacagatattgcattgaaccaaagtgagtctattcacgttgacaagaatttgattgaagggccaaatccgaatcagagaggaaaattatggactcctcttgtgattattatattattaatctatattatttttaatatatta

SEQ ID NO: 26699 - DNA, 285 bp, Glycine max
  Clone ID: LIB3051-109-Q1-K1-B4
tgaactccttaactatacttgtgattggaaaagggggtgtttgaaaatcttcaactgggaactccatcattggggatagagtgggttccaataatcctttccaatccgaaaggcccaaaaccctgattgtgtcgcgaacaaaggcttgttttacattgaacattcatgacactcctggtctcattgaagggggatacatcaatgatatggcacttgatataataaaacgtttccttcttaacaagaccataaatgtactgctttatgtggatcgcttggatgtgt

SEQ ID NO: 26700 - DNA, 378 bp, Glycine max
  Clone ID: LIB3051-043-Q1-K1-F6
atcctcacacaaacgaaaacaaatatctttcacttcttctgcatccgacgctagaagaggtgtcggaacaaacaagcttcgtttcgccggaacgatgaccggcggcggatcgacggggaggttgccaacatggaaggagagagaaaacaacaagaggagagagaggagacgaagagcgatcgccgctaagatctacaccggtcttcgagctcaggggaactacaagcttccgaagcactgtgacaacaacgaggtcctgaaagctctatgcgccgaagctggttggatcgtggaagaggatggcaccacttatcgaaagggatgcaagagacccagcgcgagtgagattggaggaacagtggcaaacataagcgcgtg

SEQ ID NO: 26701 - DNA, 370 bp, Glycine max
  Clone ID: LIB3051-015-Q1-E1-F8
acggtaaactcaaagatgaatatgctatgctaaatgaagaatctcgtgagttgactctagagaaaactgatctcagggaagagaaggcttctcttaaatcagatattgacaacttgaataatcagtatcagcagcagctcaggaccatgtttccatggactgcaatggagcattcagttatgatggctccatcatcgtatccatatccagtgccaatggcagtacctcctggtccaattcccatgcagccataccccttctttgctaatcaacatcctgcagtcatctccaacccctgttcaacttatgttccttatttagcccccaataccattgttgaacaacaatccaccctgtacgtatcccctcc

SEQ ID NO: 26702 - DNA, 414 bp, Glycine max
  Clone ID: LIB3051-116-Q1-K1-H2
ggggaacacggagaagctgatgaaccagatcatggaattgaaattcacttcgaaatcgctgcagcgtcaatcgcgtaagtgcgagaaggaggagaaatcggagaagctgaaggtgaagaaggcgatcgagaaaggcaacatggacggcgctcgaatctacgcggagaacgcgatccgtaagcgcacggagcagatgaactacctccgcctggcctcgcgcctcgacgccgtggtcgcccgcctcgacacgcatgcgaagatgacgacgatcagcaagtcgatgggcaacatcgtgaaatcgctggagtcatcgctggccacggggaacctccagaagatgtcggagaccatggactcgttcgagaagcagttcgtgaacatggaggtccaggccgagttcatggagagcgccat

SEQ ID NO: 26703 - DNA, 430 bp, Glycine max
  Clone ID: LIB3051-087-Q1-K1-E11
agaaaaaccagctttcttcaagcacctagatttactctctctctaaatggcgttctcttgttttcgcggcagagtcctcttcgcctccgttttcatcctctccgcttaccaagaatttaattcttatggagttgatgggggacccgcagcaaaagcactcagaccgaagtttgatgcctttgcacatcaagtacattctaaagttggctttcaacttccagatattgatatgaaatttttagtggctggggctattgctctcaagggccttggagggattcttttcatactcagcagctcttttggagctttccttttgcttttgcatcaagtgatcactactccaatactgtatgatttctacaattatcacagtgaggacaaagaatttatccaacttttcatcaaatttactcagaatatggctctc

SEQ ID NO: 26704 - DNA, 444 bp, Glycine max
  Clone ID: LIB3051-010-Q1-E1-B11
gacccacgcatccgctccctcatcaccttgctaaattctctggctaattcgcgattttcttgtagtaaacagagcaagcgagcttctccaattcaacatacatggcccccgaaaccgattcaattgaaatgttcttcttccccttcgtaggaggaggccatcagattccaatgatagacgcagcaagagtgtttgcatctcacggagccaaatcaaccattctagccacaccctccaatgctctccacttccataactcaatctcgcatgaccaacaatccggtcttcccatcgccattcataccttctccgccgatatatccgacacagacatgtctgctgccggtcccttcatcgactcctcggctctcctcgaaccgctgaggctgtttctcctgcaacgcccccccgactgcattgtcatcgacatgttccatcgttggg

SEQ ID NO: 26705 - DNA, 413 bp, Glycine max
  unsure (1)..(413): unsure at all n locations
  Clone ID: LIB3051-034-Q1-K1-B5
ctcatcttgcaaaattctctcagctaattcgctattttcttgtagtaaacagagcaagcaagcatatccatttcaacatggccctcaaaactggttcagttgaaatgttcttcttccccttcgtaggaggaggacatcagattccaatgatagacacagcaagagtgttcgcatctcacggagccaaatcaaccattctagtcacaccctccaacgctctaaacttccaaaactcaatcaagcgcgaccaacaatccggtcttcccatcgccattcacaccttcttcgncgacatacccgacacagacatgtctgccggtcccttcatcgacaccttggcccttctcgaacctcttcggcagctcctcatccaacgccccccggattgcattgttgtcgacatgttccatcgc

SEQ ID NO: 26706 - DNA, 352 bp, Glycine max
  Clone ID: LIB3051-079-Q1-K1-F5
tcgcctcatcttgcaaaattctctcagctaattcgctattttcttgtagtaaacaaagcaagcgagcatatccatttcaacatggccctcaaaactggttcagttgaaatgttcttcttccccttcgtaggaggaggacatcagattccaatgatagacacagcaagagtgttcgcatctcacggagccaaatcaaccattctagtcacaccctacaacgctctaaacttccaaaactcaatcaagcgcgaccaacaatccggtcttcccatcgccattcacaccttcttcgccgacatacccgacacagacatgtctgccggtcccttcatcgacacctcggcccttctcg

SEQ ID NO: 26707 - DNA, 414 bp, Glycine max
  Clone ID: LIB3051-070-Q1-K1-C3
atcctcagagcggtggatagggatttttcactctgcagcgttccgttccattgtgatttgttgaagtttctgatggagcagcgaaagcttgtggttttggggattccgtgggatatcgatactgagggattgagggaatatatgagcaagtttggtgagctggaagattgcattgtcatgaaggagcggtcaactggacggtctcgtggttttggatatgttacatttgcttcagtggatgatgctaaggaagtactatcaagtgagcatattcttggtaataggacgctggaagtcaaagtggcaacaccaaaggaagaaatgagggcaccggtcaaaaaagttactagaatatttgtagccaggattccacaatcagtaacagaagctactttcagaagtcattttgagaaa

SEQ ID NO: 26708 - DNA, 270 bp, Glycine max
  Clone ID: LIB3051-054-Q1-K2-H9
gtctatgcatatgctgctgctcaagtgaagaaagccatagaggtgacacattatggggggggagaaaattatgttttctggggtggtcgtgaaggttatcaatctcttttgaacacagatatggagcgagagcttaatcatttggctaggttttttgaagctgctgatgcatacaaaaagaagattggattcaatgggacatttctaatcgaaccatagccacatgaacctacaaaacaccagtatgattgtgatgcttcaaccttaact

SEQ ID NO: 26709 - DNA, 293 bp, Glycine max
  Clone ID: LIB3051-092-Q1-K1-B6
ccacgccgacccacgcgtgcggtacactcggagtagacttttggtgttcccacatacagggatatagcactcctgggggaaaaggtcttgaggaatctaatgcaaacttggatgaagtggatgcccttgctcaagagctccagactagagctaaaaaaagagggttatgagtaacagctcattagttcatgcattctccatacatgcatggcgctgctactagctctgaattgaaggcacacgcatatgctgctgatcagatgaagatagccatgaaggtgacacattatatg

SEQ ID NO: 26710 - DNA, 424 bp, Glycine max
  unsure (1)..(424): unsure at all n locations
  Clone ID: LIB3051-050-Q1-K1-A10
ggaacaagagcatctccaatattctggaatgcggggaattatagtggagatactgttatcattgagattttttatctaccagtatggtctggtatatcacttaaatattacgaagaaaggcacaaaaagttttctggtctatggcatttcatggttggtgatattcgtaatattgtttgtgatgaagacggtatctgttgggaggcgtaaattcagtgcaaattttcaacttgtcttccgactaatcaagggaatgatattcctcacttttgtctcgattcttgtcattttgattgctcttccgcatatgacagtgcaagacattgttgtttgcattcttgctttcatgccaactggttggggaatgctgcagattgctcaagcattaaaacctgtagtacgcncggctgggtttttggggatc

SEQ ID NO: 26711 - DNA, 348 bp, Glycine max
  Clone ID: LIB3051-044-Q1-K1-E4
ggccttgcctggcgccaccatgttccctcaagtcatctcaaccgctgcttcgtttaatcagtcgctgtggcaggaaattggacgggtggtgtctgatgaagcaagagcaatgtacaacggtggacaggctggtttgacgtattggagtcctaatgtgaacattttccgtgacccacggcggggccgtggccaagagactcccggcgaggacccgacattggccgcaaaatacgccgccagctatgtcaaaggactccaaggcgatggtgccggaaatcgcctcaaggttgctgcttgttgtaaacactacactgcctatgatcttgataattggaatggtgtggacag

SEQ ID NO: 26712 - DNA, 352 bp, Glycine max
  Clone ID: LIB3051-003-Q1-E1-D5
gagatggacaaccaaagcagacaatctcttacatggctgaacgtgtggttgggactggttcttttggtgttgtttttcaggctaagtgccttgaaactggtgaatctgttgccataaagaaggtgttgcaagacaggagatataagaatagggaactccaggttatgcgcacagttgaccatcctaatgttgtcaaactaaagcactacttcttttcaactaccgataaagatgaattgtaccttaacctggttttggagtatgtacctgaaactgtctacaaagtttcaaaacactatgttaggatgcaccaacacatgcctatcatttatgtgcaactttatacctacca

SEQ ID NO: 26713 - DNA, 265 bp, Glycine max
  Clone ID: LIB3051-098-Q1-K1-G3
agtttcgggactggttctgaccatattggataggtagattgaatctgggcagattcggcctggctatctatacttgcatataaaaataaagataaacttgaagacaagcttgtcactgttgaagacatagttcgccagcattgggctacttatgggcgccattattatactcgatgactatgaaaacgtggatgcatgtgcagcaaaggaactgatggcatatttggtcaagctgcagtccttaattataaaagtcaatcagatt

SEQ ID NO: 26714 - DNA, 422 bp, Glycine max
  unsure (1)..(422): unsure at all n locations
  Clone ID: LIB3051-040-Q1-K1-F11
ggctgaggctgctgcagcctcctttggggaaccagaaagtgagaaacaaaagtttttgggtatttgaagttgccaccttgaagaagattgtgcctctggggatgatgttcttttgcatcctcttcaactatacaatcttaagggacacaaaagatgtgttggttgtgacggccagaggaagcagtgctgagattataccgttttctcaaaacctgggtgaaccttcccatggccattgggttcatgttattgtacacaaagttggctaatgtgttgtccaagcaggctctcttctactctattattcttcccttcattgccttctttggggcctttggttttgttttgtaccctctcagcaactatattcaccctgaggcttttgcggataagcttctcaacatccttggnccacggttcct

SEQ ID NO: 26715 - DNA, 438 bp, Glycine max
  Clone ID: LIB3051-038-Q1-K1-C11
ctcaaaattgcatcagagacctcgcctaaccctgcagcttcaattgggttatatcttgactgtggttccatctatgagacgccattttcaagcggggcttcacacttgctagagcgaatggctttcaaaagcacaacaaaccgtagtcactttcgcattgtaagggaagtagaagcaattggtggtaatgtaggagcctcagcctctcgggagcaaatgggttatacatttgatgccttaaagacctatgttccacaaatggttgaattactggttgactgtgtaaggcacccagccttcttggattgggaagtcaatgaagagcttcggaaagtaaaagcagagcttggagaactctctaacaatccccagggcttgcttttggaagcaattcactctgctggttattctggtgcattggcttatcctcttttggct

SEQ ID NO: 26716 - DNA, 373 bp, Glycine max
  unsure (1)..(373): unsure at all n locations
  Clone ID: LIB3051-066-Q1-K1-H9
atcgaagtccttcattttcattctcttccttgtcactgatcgtcatgtacagagttgcagcatgatcattcagaaggcatctcaagggccatggaggtaacttgggatccactaggttttcaacttcagccgcggtagctgcaaggacttcatcaggtggtttgtttagctggcttactggagagcgttctagtgctcttcctcctctggacatgccccttggtggtgttgctctccccgattcacttccagattacgtcgaacaaagcaagaccaagatcacaacactccccaatggactcaaaattgcgtcagagacctctnctaaccctgcagcttcaattgggttatatcttgacttggggtccatcta

SEQ ID NO: 26717 - DNA, 420 bp, Glycine max
  unsure (1)..(420): unsure at all n locations
  Clone ID: LIB3051-039-Q1-K1-C2
gttgccccacttgttgcaacccttcccttggagatcaagggagaaattgaggagtttctcaaagtggttttcactctgtttcaagacctggattttactttcttagagatgaatcctttcacattggttgatggaaagccttatcctttggatatgagaggcgagctagatgacactgctgctttcaagaacttcaagaaatggggagacattgaatttccactgccatttggaagggttatgagtgccaccgagtctttcattcatggattagatgaaaagacaagtgcatccttaaaattcacagtgttgaacccaaagggccgaatttggacaatggtagctgggggaggtgctagtgtcatttatgctgatacggtangagatcttggctttgcatctgagcttggaactatgctg

SEQ ID NO: 26718 - DNA, 305 bp, Glycine max
  Clone ID: LIB3051-049-Q1-K1-A5
cccacgcgttcgagcggtgcacccaaagaagaggaggtcttgcagtatgccagagttgtaattgattgtgcaactgcaaaccctgatggccagaagagagctcttgtgataggaggaggcatagccaactttactgatgttgctgccacatttagtggtataattcgggcattgaaggagaaggagtcgaaattgaaagcagcaaggatgcacatctttgtgaggagagggggtcccaactaccagaagggtctagctttgatgcgagcacttggagaagagattggcattcccattgagggtta

SEQ ID NO: 26719 - DNA, 432 bp, Glycine max
  Clone ID: LIB3051-009-Q1-E1-E5
atggaagcagatggctgatgctggaataaagtatattcctagcaacaccttctcactttacgatcaagtactggacacaacagccatgctcggggcagttccatctagatataattggaatggtggggagattgggtttgatgtttacttctcaatggcaagagggaatgcatctgtaccagctatggaaatgaccaagtggtttgacaccaattaccattacattgttcctgaattgggtcctgatgttaagttctcctatgcatcacacaaggctgtcgatgaatttaaagaggccaaagttctgggagttaatactgtacctgtgcttgtgggacctgtatcctacttgttgctgtcaaaaccagctaagggtgttgagaagtcattttcccttctttccctaattgacaagatccttcctgtctacag

SEQ ID NO: 26720 - DNA, 429 bp, Glycine max
  Clone ID: LIB3051-059-Q1-K2-F11
cccacgcgtccgcccacgcgtccgggcattgtcagcacaatgtccttgtgggcaatactgccattgttggtgttgttttatgtagcatatttatactatcagagcaccgctcgtgaagtaaagcgcttagactcaattagcagatctcccgtttacgcacagtttggagaagcactgaatggcttatcaacgattcgtgcttacaaagcgtatgatcgaatggcagatataaatgggaaatccatggacaacaacatccgattcactctggtgaacataagtggaaaccgatggcttgcaatccgattggaaactttgggaggcctcatgatatggttgactgcaacctttgccgtcatgcagaatggcaaggcggagaaccagcaagaattcgcatccaccatggggttactacttagctatgctctg

SEQ ID NO: 26721 - DNA, 332 bp, Glycine max
  Clone ID: LIB3051-012-Q1-E1-E9
agcccacgcgtccgcccacgcgtccgggactggtggaaatttagtagccgccgggtgtaaatcgcagatactgttctgggattggagaaatatgaagcaagttgcatgcctggaggactctcatgtggatgatgtcactcaggttcattttgtccctaatgaacaaggcaagctgatttctgcttcagtagatgggttgatctgcacatttgatgctactggagatatcaatgatgatgatcatctagaatcagtgattaacatggggacttcaattgcaaaggtggggatttttggagagaattatcagaagctttggtgcctaacacata

SEQ ID NO: 26722 - DNA, 358 bp, Glycine max
  Clone ID: LIB3051-024-Q1-K1-A12
tgagaggccttctgctatacagcaaaggggaatggttcctttctgcaaaggactggatgtgattcaacaggctcagtctggaacaggaaagacagcaacattttgttctggaattttgcagcagcttgattatggattggttcagtgccaggctttggttttggcaccaacaagggagctagcacagcagatcgagaaagttatgcgagctcttggtgattacttgggagttaaggtccatgcttgtgttggtgggacaagtgttcgtgaggatcagcgcattctccaagctggtgtccatactgttgttggcactcctgggcgagtgtttgacatgctgcggaggcagtctcttctc

SEQ ID NO: 26723 - DNA, 428 bp, Glycine max
  Clone ID: LIB3051-067-Q1-K1-D6
caaaagcctaaactcactcagtcctacgatacgattctcttccgcctcccttcccttgaactggccggcgcagatccgaggagtttgggaaaccctaattcattcctctttgcttcttctatctctattcctctaacaccagtgatggcaggtttggctccagaaggatcgcagtttgatgctcggcaatatgattctaagatgaatgaattgctttccgccgatggacaagaatttttcacttcatatgacgaagtctatgatagttttgatgcaatgggccttcaagaaaatcttctgagaggcatatatgcttatggttttgaaaggccttctgcaatccagcagaggggaattgttcctttctgcaagggtctggatgtgattcagcaagctcagtctggaactggaaagacagcaacgttctg

SEQ ID NO: 26724 - DNA, 439 bp, Glycine max
  Clone ID: LIB3051-042-Q1-K1-F9
cccacgcgtccggtttaggtgaactaattcggagaccttgcaagacttgatcaatggctgtcaaagtttatattgtgtactactccatgtatgggcatgttgagaaactagcagaagaaataaagaaaggggcttcctctgtggaaggtgttgaggccaagttatggcaggtacctgagacactgctggatgaggtgcttggtaagatgagtgcaccacccaagagtgacgtaccagtcattacccccaatgaactatccgaggctgatggctttgtattcggcttcccaacaaggtttggaatgatggctgctcagtttaaagcctttctagatgctactggaggcttatggagagcacaacagcttgcaggcaagcctgctggcctcttctacagcaccggttcacaaggtggtggacaagagactacagcactcac

SEQ ID NO: 26725 - DNA, 429 bp, Glycine max
  unsure (1)..(429): unsure at all n locations
  Clone ID: LIB3051-091-Q1-K1-E2
catgtatgggcatgttgagaaactagcagaagaaataaagaaaggggcttcctctgtggaaggtgttgaggccaagttatggcaggtacctgagacactgctggatgaggtgcttggtaagatgagtgcaccacccaagagtgacgtaccagtcattacccccaatgaactatccgaggctgatggctttgtattcggcttcccaacaaggtttggaatgatggctgctcagtttaaagcctttctagatgctactggaggcttatggagagcacaacagcttgcaggcaagcctgctggcctcttctacagcaccggttcacaaggtggtggacaagagactacagcactcactgctatcactcnaactggttttcatcatggaatgatattcgttccaatcggttacacattcggtgccggcatgtt

SEQ ID NO: 26726 - DNA, 464 bp, Glycine max
  Clone ID: LIB3051-071-Q1-K1-F7
atgaaaacctctcacgacacaatgcagggcttttatggctgccaccctgaactaagtgacgggcctacgcttactgtccaagttcttacaacagggtcttggccaactcagtctagtgttacatgcaacttgccagcagaaatgtctgcgctgtacgagaagtttcggtcattttaccttggcacccatactggcaggagattgtcctggcaaactaatatgggcacggcagacttgaaagcaacctttgggaaggggcagaagcacgagttaaatgtctctacttaccaaatgtgtgttgtcatgctgtttaataatgctgatagactgagctacaaggagattgagcaagcaactgagattcctgcttcggatcttaaaagatgcttgcaatcattggctttagttaagggaagaaatgtccttagaaaggaacctatgggtaaagatattggtgacgatga

SEQ ID NO: 26727 - DNA, 429 bp, Glycine max
  Clone ID: LIB3051-020-Q1-E1-C7
acccacgcgtccggagaagaaaggtcaatattctaagttctggaatgagtttggtaaatccattaaacttggtatcatcgaggatgccaccaacagaaatcgtttggcaaaactgctcagatttgagagcaccaagtctgagggtaaattgacatctctggatcagtacatatctagaatgaaaactgggcagaaggatatcttttacataactggaaccagcaaagaacaactggaaaactctcccttccttgagcggcttaagaagaaaaattttgaggttattttcttcacggatccagttgatgagtacttgatgcaatacctgatggattatgaagacaagaagttccaaaatgtgtccaaggagggtttgaaacttgggaaagattcaaaagacaaggaactgaaggaatcttttaaggatct

SEQ ID NO: 26728 - DNA, 385 bp, Glycine max
  Clone ID: LIB3051-036-Q1-K1-D7
aattgacatctctggatcagtacatatctagaatgaaaactgggcagaaggatatctttgacataactggaaccagcaaagaacaactggaaaactctcccttccttgagcggcttaagaagaaaaattttgaggttattttcttcacggatccagttgatgagtacttgatgcaatacctgatggattatgaagacaagaagttccaaaatgtgtccaaggagggtttgaaacttgggaaagattcaaaagacaaggaactgaaggaatcttttaaggatcttaccaagtggtggaaaactgctctttccaaagacaatgttgatgatgtgaagatttccaaccgattagataacactccttgtgtagtggtgacatcaaaatt

SEQ ID NO: 26729 - DNA, 323 bp, Glycine max
  Clone ID: LIB3051-109-Q1-K1-E11
atcaatattaaatattggtgcacagaaaatacgtcatctgacaataatgaggagaaaggtcaatattccaagttctcgaatgagattcatacatcattaaacctggcatcatcgaggatgccaccaacacaaaacgtttggcaaaactgctcacatttgaaagcaccaagtctgaaggtaaattgacatctcctgatcagtacatatctagaatgaaagctgggcagaacgatatcttttacataactcgaaccagcaaagaacaactggtaaactctccattccttgagcggcttaagaagaaaaattttgacgttattttc

SEQ ID NO: 26730 - DNA, 378 bp, Glycine max
  Clone ID: LIB3051-037-Q1-K1-E5
cgtaagtctgtgaaaaaaataatctctgaggatgagcagactcctgtgcgcgaaaaaaccccaaccacaagaacgaaagaaggaaaaatcaagcgtggtagtggtacagaaaaacagaaactgcgggaacaaataagagagatgctgctgaattcaggttggacgatagactatcgacctcgaaggaacagagactacctggatgcagtttacattaatccagcaggtacagcctattggtctatcatcaaggcctatgatgctcttcaaaagcaatcaaatgatgatgctgatgaggtcaagcccaaaggggatagttcttcttttgctcctattgctgatgaagttctcagtcagctaacaaggaaaactaggaag

SEQ ID NO: 26731 - DNA, 445 bp, Glycine max
  Clone ID: LIB3051-084-Q1-K1-F11
cccacgcgtccgcgacttttggagagcatggtatgggaaaagggttcttcaaggtatagactctttggcagttgccagaccttccctttctgcagagataaatcgtcttggactgttagctgaaccaatgccatcattggatgaaattgcaatgcatattaacttctcttgtggaggactgccaccagtgcctaccttgcccaagcttgaaagttctccaactcagaatggggatatcagatcaccaaagcgaaatgttttaatggaaagaaattctttcacttcaccagtgaaagatcgccttcttcccttcaacagccttaagtcaaaactacccccacctcctttgcagtcagcatttgccagccccacaaagccaaatccaggaggtggaggggaaacatgtgcagaaactgggatcaacatcttttttggcaagatcatt

SEQ ID NO: 26732 - DNA, 389 bp, Glycine max
  Clone ID: LIB3051-013-Q1-E1-C7
acccacgcgtccgcctcaattggcaaagaagttgaacaagattcttgcacaacacatcaagtctgtgttaccagggctgagagcacgtataagcgcttcactagtcactattgcaaaggaacatgcaagctatggagaaatcacagagtccaaggctggacagggtgctcttctccttaatattctttcaaaatactgtgatgcattctcctccatggtagagggaaagaatgaggagatgtctacatctgagctgtctgggggtgcaagaattcattacatttttcaatccatctttgtgaagagcttagaggaggtggattcatgcgaagatttgactgatgatgatattcgcacagccatacagaatgcaactggacctaaatcag

SEQ ID NO: 26733 - DNA, 440 bp, Glycine max
  Clone ID: LIB3051-060-Q1-K1-H6
cctcaattggcaaagaagttgaacaagattcttgcacaacacatcaagtctgtgttacgagggctgagagcacgtataagcgcttcactagtcactattgcaaaggaacatgcaagctatggagaaatcacagagtccaaggctggacagggtgctcttctccttaatattctttcaaaatactgtgatgcattctcctccatggtagagggaaagaatgaggagatgtctacatctgagctgtctgggggtgcaagaattcattacatttttcaatccatctttgtgaagagcttagaggaggtggatccatgcgaagatttgactgatgatgatattcgcacagccatacagaatgcaactggacctaaatcagcactgtttgttcctgaagtcccgtttgaagtgcttgtacgcaggcagatatctcgactattgga

SEQ ID NO: 26734 - DNA, 428 bp, Glycine max
  Clone ID: LIB3051-039-Q1-K1-E5
cccacgcgtccgcccacgcgtccgccttctcgtccgcccacgcgtccggcaatcactggctcgctcctttgatccattcttgaaattctcgttatcgctcttcgaactcaagctctctcgctagcgattcctacttctgcaccaatttctacgttttctcaagtcacaggtttaagagcaaaggtcgcatttatcccgttattctccccgtccaaaacaacaaagttaatggcaggtgcttcttggtatctccggagtagaactagatatcttagatgagttcaaggatgttgaatatactagaactgatgttgaggtttccttgaaggacaagtctgaaaggttacaagttagcgcttatgtttggagcaacccaaatgatcctaacttatatgcagagtgggattttgaggattgaattgtggatt

SEQ ID NO: 26735 - DNA, 416 bp, Glycine max
  Clone ID: LIB3051-040-Q1-K1-E8
cccacgcgtccgcccacgcgtccgcccacgcgtccgcccacgcgtccggcaatcacttgctcgctcctttgatccattcttgaaattctcgttatcgctcttcgaactcaagctctctcgctagcgattcctacttctgcaccaatttctacgttttctcaagtcacaggtttaagagcaaaggtcgcatttatcccgttattctccccgtccaaaacaacaaagttaatggcaggtgcttcttggtatctccggagtagaactagatatcttagatgagttcaaggatgttgaatatactagaactgatgttgaggtttccttgaaggacaagtctgaaaggttacaagtttgcgcttatgtttggagcaacccaaatgatcctaacttatatgcagagtgggattttgaggatt

SEQ ID NO: 26736 - DNA, 301 bp, Glycine max
  Clone ID: LIB3051-019-Q1-K1-C11
ctagaatagatagatcctctgatgatgagtcgacggatgatgaaaatgaagctgttgtgagccaaggttacggggatatggatgtggatgatgtactcaagacaaatgaacacctggttgtgaagagtgggtcaaaattgttgccaggacatcttgaatactcaatacttgtgaatgcaaatattcaggaccctgctaatggtcccataaattcattccagttccatccgaatgcgcagttgtttcttgcagctggattggaccggaagcttagattttttcaaattgatggctagcggaa

SEQ ID NO: 26737 - DNA, 333 bp, Glycine max
  Clone ID: LIB3051-041-Q1-K1-H11
cgatcatcaagcctaatagagggctaatccttcacttgtttgttttgtggtgtattattacattttgcaccatgccttctctcttcgctagaaaccagaggttctcattggctactctcctgcttcttctggaactattgacaggaaaccttcgcatggcagatgctcaaattggtgtgtgttatggcatgctgggcaacaatctaccgtcagcaaacgatgttataggtctttatagatcaaataacataaagagaatgagactctatgatcctaatcaagctgctctagaagcacttagaaattctggcattgaactcattcttggggtgc

SEQ ID NO: 26738 - DNA, 382 bp, Glycine max
  Clone ID: LIB3051-046-Q1-K1-E5
ctctcctgcttcttctggaactattgacaggaaaccttcgcatggcagatgctcaaagtggtgtgtgttatggcatgctgggcaacaatctaccgtcagcaaacgatgttataggtctttatagatcaaataacataaagagaatgagactctatgatcctaatcaagctgctctagaagcacttagaaattctggcattgaactcattcttggggtgccaaactctgaccttcaaggccttgccaccaatcctgacacttctcgtcaatgggtgcaaaaaaacgtgttgaacttttggcctagtgtcaaaatcaagtacgtggcagttggaaatgaaatgagtcccgttggaagctcttcttcggtagcccaatatggtct

SEQ ID NO: 26739 - DNA, 458 bp, Glycine max
  Clone ID: LIB3051-082-Q1-K1-B4
cgatcatcaagcctaatagagggctaatccttcacttgtttgttttgtggtgtattatgacattgtgcaccatgccttctctcttcgctagaaaccagaggttctcattggctactctcctgcttcttctggaactattgacaggaaaccttcgcatggcagatgctcaaattggtgtgtgttatggcatgctgggcaacaatctaccgtcagcaaacgatgttataggtctttatagatcaaataacataaagagaatgagactctatgatcctaatcaagctgctctagaagcacttagaaattctggcattgaactcattcttggggtgccaaactctgaccttcaaggccttgccaccaatcctgacacttctcgtcaatgggtgcaaaaaaacgtgttgaacttttggcctagtgtcaaaatcaagtacgtggcagttggaaatgaagtgagt

SEQ ID NO: 26740 - DNA, 460 bp, Glycine max
  Clone ID: LIB3051-090-Q1-K1-H3
cccacgcgtccgcccacgcgtccgctaatccttcacttgtttgttttgtggtgtattattacattttgcaccatgccttctctcttcgctagaaaccagaggttctcattggctactctcctgcttcttctggaactattgacaggaaaccttcgcatggcagatgctcaaattggtgtgtgttatggcatgctgggcaacaatctaccgtcagcaaacgatgttataggtctttatagatcaaataacataaagagaatgagactctatgatcctaatcaagctgctctagaagcacttagaaattctggcattgaactcattcttggggtgccaaactctgaccttcaaagccttgccaccaatcctgacacttctcgtcaatgggtgcaaaaaaacgtgttgaacttttggcctagtgtcaaaatcaagtacgtggcagttggaaatgaagtgagtc

SEQ ID NO: 26741 - DNA, 431 bp, Glycine max
  Clone ID: LIB3051-008-Q1-E1-A7
gacccacgcatccgaccacgcgtccggaaaaattgaaggttatgttaccaatatttcttgaatgttgtgacgatatggtttccaaatgggaaaggttgttgtcttcaaatgacaaatccgaaattgatgtgtggcctttccttcaaaatttaacatgtgatattatatctagaacagcatttggaagcagttatgaagatgggaaacgtatatttgaacttctgaaagagcaaactggacttatgatgaaattgcagaacgcttacattccaggatggtggttgctgccaacaactacaaataagaggatgaaaaaaattgatactgagatacgagcattacttaaaggtgtcatcaacaaacgagagaatgcaatgaacgctggtgaagtcttgaacaatgacttgttgggcatgcttttggaatcaaac

SEQ ID NO: 26742 - DNA, 418 bp, Glycine max
  unsure (1)..(418): unsure at all n locations
  Clone ID: LIB3051-045-Q1-K1-E10
actcaatatcaaattctttgtcccacaaaagatggggttcactcccacaagtactgcggcgatgctttctcataatagcacctctggttgtgctatggtgttggaagctactaaagtgggtgtggctgatgccaaagagattggagagagcattaagggcacagggccttcaggggaatccctacagcctcttgattggggacactaaggaaatgtacacagtgctcatgcaagctgccagatctcaacaatctacaagttcttttctctctaaagataaagatgcagcaccacatatcacaacctttaaccatcacattgtcaacanattcggcaagaattcatttttttgggaaggtaccaaaccaaaagtggtaatcactgaccctgagcaaatcaaagaagtcttcaacaagat

SEQ ID NO: 26743 - DNA, 313 bp, Glycine max
  unsure (1)..(313): unsure at all n locations
  Clone ID: LIB3051-068-Q1-K1-B9
cccacgcgtccgaccacgcgnccgcctacctatgcacatgctccagtcactgctcactgtgaatccaaaatatggtgctcatatcatcttacataagttgtagtgtcatctattaatttgtatcctgcacacctaattatctccattcctttcttatgttctaatctcttgtatttatagagggaaacctctttattatattgaatgctatttttatttcctaaaaaaaaaaaaaaaaaaaaaaaaaaaaaaaaaaaaaaaaaaaaaaacacaaaaaaaataaaaaagataaaaaaaaaacaacgataagact

SEQ ID NO: 26744 - DNA, 362 bp, Glycine max
  Clone ID: LIB3051-046-Q1-K1-E9
gtatttcgatattcagatccatggcaaattagcgggtcgcatagtcatgggccggtatgggaacacagtaccgaaaactgcacaaaactttcgagcgctttgtacaggagagaaaggagtgggaagaagtgggaagtctcttcattataaagggagcacattccataggattataccgagctttatggtccaagggggtgatttcacccgtggtgatggaagaggtggagaatcaatctatggtgataagtttgctgatgaaaactttaagctgaagcataccggaccgggatacttatccatggcaaattctggggaagacaccaatgggtcccagttcttcattacaacagttaaaacca

SEQ ID NO: 26745 - DNA, 373 bp, Glycine max
  Clone ID: LIB3051-031-Q1-K1-C6
cccacgcgtccgcggacgcgtgggcgccattgctattgtggaaaaacagacaggaggttcgcttatgattcgcttacttgcgtcaactgaaagtaccaaaaccctgccacacctgccctcacaacctcgccttctgttccccctacgatctccgcaatttcatcgtacccggtcacaacaacctctacctcgccgacgtcgccgattccttcgtcttatctctctctgctcatgacaacatatgcagcgtccagattgcgttgaatgtcgttcaacgccggtgtgtcaaagtttcttccggcgattccgtgcaagtgagccgatttgtgcccactgaagacttcaacctcgcactgctaactcttgatttgga

SEQ ID NO: 26746 - DNA, 326 bp, Glycine max
  Clone ID: LIB3051-030-Q1-K1-H1
gagagaacccataacagctagttaatggccctcgctttcacttcttcaatttccgcaccaactgccaccttcccatcatcggaacccaaacttccgcaaattgggtcaattaggatttcggagaggcccattggaggcgccgttaatttcaatttatctcaaagacggagcttggtaaagcccgttaacgccgaaccttcacgcaaggattccattgttcctctcgcagcaacaaccatcgttgcttctgcttctgagacgaaagaggaagattttgaacagatagccagtgatctcgacaatgcttcacctcttgaaatcatgga

SEQ ID NO: 26747 - DNA, 326 bp, Glycine max
  Clone ID: LIB3051-039-Q1-K1-C7
ggaagagataaccaagaacgacgtcggagtaacctccaaaaccaccagaagcagctccaggttctggcctcgttggattcccacttccaccgatcacatcatcgctgccgagaagcgccttctttccgtcgtcaagactggttatgttcaagagcatgttaacattggctctggtcctcctggctccaaagtgaggtggttccgttcatccagcaacgagccgcggtttattaacaccgttacatttgacagtaaaccccattctccaacgctggtcatgattcatggttatgctgcttcacaggggttcttttttcgcaattttg

SEQ ID NO: 26748 - DNA, 424 bp, Glycine max
  Clone ID: LIB3051-107-Q1-K1-F7
cttttgagttttctctctcacaaacacactccacttctcttctcggcgtcgatcttacgcgggggcgtgcatgggcgaattccacaaaacccgacccttccggcggcaggccagccgcctgcagagccgcgccccgtcgtcgctccagataaaccgcaccgtcgagtggaacgtcgcgatcccgctgctgtccccgctggtctcgtcgccccctccgccgccgcagaaggacgagccgtcaccgtcgcagcaacaacgcccgccggaaaaagttgtcttcaaaaagtggcagcaccccgccgcaccgttttgctacgaaccaccttcgcgggttcctcctttcgttaacgtgtaaataataaataaaaaaatgaagaaaaattatgaatatttcttctaacatcttttgttcattttcattttc

SEQ ID NO: 26749 - DNA, 444 bp, Glycine max
  Clone ID: LIB3051-110-Q1-K1-F7
cttcatgtctcaaggcaaagggttaaaggtggaggttggatcatggattccatgtcaaatgtgtcaaaaagagaccctgctgcacagttcctcatcatcttcagaagcaaggacacaattggattgcgatcccttgctgctggtggaaaattattgcagatcaatagaagaatggagtttgtatttgctagtcatagttttgatgtttgggagaactggactctagaaggttccttacaggaatgcagactggtgaactgtagaaacccatcagctgttttggatgtacgcgttgagattttggcaactgtaggcgaagatggagttactcgttggcttgaatagagtgattgtaggtctgtaatactcaaaagggagaagcttgtaaatactccaatcccgtgacttaatgatctttcaaatgtctctttgtgaaagatggaa

SEQ ID NO: 26750 - DNA, 387 bp, Glycine max
  Clone ID: LIB3051-003-Q1-E1-E12
cccacgcgtccgcccacgcgtccggtacttgaaccctatattggtggtgaagcaatatcagttttggcgcctggttactaatttcttgtactttcgtaaaatggacttggatttcctgtttcatatgttttttcttgctcgttactgcaagcttcttgaggagaactcgttcagggggaggactgctgatttcttttacatgctcttatttggtgccactgtattgactggaattgttcttcttgggggcatgataccttatttatcagagtcgttcgcaaaaataatattccttagcaactcattgacatttatgatggtttacgtgtggagcaaacaaaatcccttcattcacatgagcctcctgggtctctttactttcactgc

SEQ ID NO: 26751 - DNA, 420 bp, Glycine max
  Clone ID: LIB3051-044-Q1-K1-C11
ctcagtttctcgttttcccaatcgcagctaaaaaatcctctgtacccttttacccttttctcaataagaagaaattaggaaacgcaacaatggctcaagcggttgaagaatggtataagcagatgcccgtcatcacgcgctcctatctcaccgctgctgttgtcaccactatcggatgctcccttgatataatttctccgtatcatttgtacttgaaccctatattggtggtgaagcaatatcagttttggcgcctggttactaattacttgtactttcgtaaaatggacttggattttctggttcaatatgtatttctgctcggtactggcagcttctttgaggagaactcggtcagggggagaactgctgattcctttaacaggctctaatttggtgccactgtattgactggaattg

SEQ ID NO: 26752 - DNA, 350 bp, Glycine max
  Clone ID: LIB3051-046-Q1-K1-C7
ctcagctaaatcttcttatccaccatctcttcgcccataacctaattagtgctcaatcgcaaaacatcaatttctctatgatcatgatgatgatgatgggttcaaacacaaaaccccttgtgcacctttctcttctaattttggttctcttttcttcttcaaccgaatccctcagattcgaactccaatctgggcacaccaaatgcatctacgaggacatcaagagcaattccatgaccgtgggcaagtaccaaattgttaactccaacgagggtcagcctcttcccgattcccaaagagtcacccgtcagggtgacttcgtcttaatggaacaactattactaccggga

SEQ ID NO: 26753 - DNA, 430 bp, Glycine max
  Clone ID: LIB3051-039-Q1-K1-H6
aatccctcatctcattgctgagatctgcaagctggctatggactacgaaccctacgacagtagcggaactgatgatgaccttccaccaacccatcaaaatagaatttccaggggaggaggaggacgtctcgctgggaatgggagatctgctgttggttcaattccttacccaaggatgtatggtgaaattgatatggagacccaaattcatcagcttgagcaagaagcatacagttcagttctaagagcctttaaagctcaagccgatgccattacttgggagaaagaaagtttgattacagagctgagaaaagaactgagattgtcaaatgaggagcacagagaacttctaggtcgagttaatgctgatgatgtgatacggaggattaaggaatggagacaggcaggtggccatcagcctggtgtactt

SEQ ID NO: 26754 - DNA, 380 bp, Glycine max
  Clone ID: LIB3051-112-Q1-K1-F6
caatccctcatctcattgctgagatctgcaagctggctatggactacgaaccctgcgacagtggcggaactgatgatgacctttcaccaacccatcaaaatagaatttccaggggaggaagaagacgtctcgctgggaatgggagatctgctgttgggtcaattccttacccaaggatgtatggtgaaattgatatggagacccaaattcatcaacttgagcaagaagcatacagttcagttctaagagcctttaaagctcaagccgatgccattacttgggagaaagaaagtttgattacagagctgagaaaagaactgagattgtcaaatgaggagcacagagaacttttaggtcgagttaatgctgatgatgtgata

SEQ ID NO: 26755 - DNA, 346 bp, Glycine max
  Clone ID: LIB3051-023-Q1-K1-H3
ggttgagcacctcttctttgctcagcagtaccatgacaggaagcaaagagaggagaggatgagaatgagcagggaagagagggcaaggaccccttatgttgattacttgaggccaatcatagctgatggcgacactggttttggtggtaccacagcaactgtcaagctttgcaagctatttgtggagagaggtgctgccggaatccacattgaggaccagtcttcagtgaccaaaaagtgttggccacatggctggaaaagtgcttgttgccatcagtgaacacatcaataggcttgtggctgcaagacttcagtttgatgtcatgggggtggaaactgttttggt

SEQ ID NO: 26756 - DNA, 402 bp, Glycine max
  Clone ID: LIB3051-043-Q1-K1-B4
cccacgcgtccgccttaaagggaagagtttagcaactcttatgcaacaaggcatggctgctgggaagagtggagctgagcttcaggctttggaggatgagtggctctcaaaggcacagttgaagactctctcagaagcagttgtggaggcaattgagaggcagaacattggagaggaagagaagagaaggaagctgaatgagtggatgcaccattcaagctatgaaaggtgtctttccaatgaggagggtagggagatagctgaaaagttaggagtaaggaacctcttttgggattgggacttgcctaggactagagaagggttctacaggttcaaagggtcagtgattgcatcagttgttagaggttgggctttgctccacatgctgatgtgatatggatg

SEQ ID NO: 26757 - DNA, 392 bp, Glycine max
  Clone ID: LIB3051-043-Q1-K1-H1
gaaagaaaaaaaagaagaagaaagagttctgaccatggctgcatcattatttatgccttcatccatagtggacgaagaagcgaggtttgaagccgaagtggcggaggtgcaagcatggtggaactctgagaggttcaggctaacaaaaagaccatacacagcaagagatgtggtgtccctccgaggcaacctcagacaaacctatgcctcgaacgagatggcgaaaaagctctggtgccttctgaagaaccaccaagccaacggcacagcctcaaggacttttggtgcacttgatcctgttcaggtcactcaaatggccaagcacttggacacaatctatgtctcagggtggcagtgctcagccacacacaccacgagcaacgagccgggcc

SEQ ID NO: 26758 - DNA, 415 bp, Glycine max
  Clone ID: LIB3051-059-Q1-K2-F10
cccacgcgtccgcggacgcgtgggtttatagaaagaaaaaaaagaagaagaaagagttctgaccatggctgcatcattatttatgccttcatccatagtggacgaagaagcgaggtttgaagccgaagtggcggaggtgcaagcatggtggaactctgagaggttcaggctaacaaaaagaccatacacagcaagagatgtggtgtccctccgaggcaacctcagacaaacctatgcctcgaacgagatggcgaaaaagctctggtgccttctgaagaaccaccaagccaacggcacagcctcaaggacttttggtgcacttgatcctgttcaggtcactcaaatggccaagcacttggacacaatctatgtctcaaggtggcagtgctcagccacacacaccacgagcaacgag

SEQ ID NO: 26759 - DNA, 458 bp, Glycine max
  Clone ID: LIB3051-071-Q1-K1-E5
gttataacatttatagaaagaaaaaaaagaagaagaaagagttctgaccatggctgcagcatgatttatgccttcatccatagtggacgaagaagcgaggtttgaagccgaagtggcggaggtgcaagcatggtggaactctgagaggttcaggctaacaaaaagaccatacacagcaagagatgtggtgtccctccgaggcaacctcagacaaacctatgcctcgaacgagatggcgaaaaagctctggtgccttctgaagaaccaccaagccaacggcacagcctcaaggacttttggtgcacttgatcctgttcaggtcactcaaatggccaagcacttggacacaatctatgtctcagggtggcagtgctcagccacacacaccacgagcaacgagccgggccctgaccttgctgattacccttatgatactgtcccaaacaaggttgagcacc

SEQ ID NO: 26760 - DNA, 447 bp, Glycine max
  Clone ID: LIB3051-086-Q1-K1-F1
aaagaaaaaaaagaagaagaaagagttctgaccatggctgcatcattatttatgccttcatccgtagtggacgaagaagcgaggtttgaagccgaagtggcggaggtgcaagcatggtggaactctgagaggttcaggctaacaaaaagaccatacacagcaagagatgtggtgtccctccgaggcaacctcagacaaacctatgcctcgaacgagatggcgaaaaagctctggtgccttctgaagaaccaccaagccaacggcacagtctcaaggacttttggtgcacttgatcctgttcaggtcactcaaatggccaagcacttggacacaatctatgtctcaaggtggcagtgctcagccacacacaccacgagcaacgagccgggccctgaccttgctgattacccttatgaaactgtcccaaacaagggtgagcacctcttc

SEQ ID NO: 26761 - DNA, 454 bp, Glycine max
  Clone ID: LIB3051-091-Q1-K1-F12
cccacgcgtccgcccacgcgtccgaaagaaaaaaaagaagaagaaagagttctgacgatggctgcatcattatttatgccttcatccatagtggacgaagaagcgaggtttgaagccgaagtggcggaggtgcaagcatggtggaactctgagaggttcaggctaacaaaaagaccatacacagcaagagatgtggtgtccctccgaggcaacctcagacaaacctatgcctcgaacgagatggcgaaaaagctctggtgccttctgaagaaccaccaagccaacggcacagcctcaaggacttttggtgcacttgatcctgttcaggtcactcatatggccaagcacttggacacaatctatgtctcaaggtggcagtgctcagccacacacaccacgagcaacgagccgggccctgaccttgctgattacccttatgatactgtcccaaaac

SEQ ID NO: 26762 - DNA, 367 bp, Glycine max
  Clone ID: LIB3051-113-Q1-K1-E8
tgaacacatcaataggcttgtggctgcaagacttcagtttgatgtcatgggggtggaaactgttttggtggcaagaacagatgcagaagctgctaatttgattcaatcaaacattgacacaagggaccatcaatttatcttgggagtgaccaaccccaaccttaaagggaagagtttagcaactcttatgcaacaaggcatggctgctgggaagagtggagctgagcttcaggctttggaggatgagtggctctcaaaggcacagttgaagactctctcagaagcagttgtggaggcaattgagaggcagaacattggagaggaagagaagagaaggaagctgaatgagtggatgcaccattcaagc

SEQ ID NO: 26763 - DNA, 332 bp, Glycine max
  Clone ID: LIB3051-002-Q1-E1-G1
atttcatacatatgttcacgttactatcgggctccagaactaatatttggtgcaactgaatacacaccttctattgatatctggtcagctggttgtgttcttgctgaacttcttctaggacagccattgtttcctggagaaaatcaagtggaccaacttgtggaaattattaaggttcttggtactccgactcgagaggaaatccgttgcatgaacccaaattatacagattttagattccctcagattaaagctcatccttggcacaaggttttccacaagcgaatgcctcctgaagcaattgaccttgcatcaaggctttcccaatattc

SEQ ID NO: 26764 - DNA, 437 bp, Glycine max
  Clone ID: LIB3051-060-Q1-K1-D6
ttcatctccgaaccgcgtttctatttttgactctctctctctactcagtaagaatgtatgctaatattggtatgccaccgggggtacctcagcatcatcctcaacctccaacgagctcacaacctaatctgttcgggaatgcattcaattctgctggttctggactcattcgaggtggattgggtgcgtatggagaaaaaatattaggatcaagctccgagtatgtccaaagcaatataagccggtatttctctgatccccaatactactttcaagtgaatgaccactatgttaagaacaaattaaaggttgtgttgttcccattcttgcaccggggtcattggactaggattactgaaccagtgggaggtaggctctcttataaaccaccaatttacgacataaatgctcctgacttgtacattccattaatggca

SEQ ID NO: 26765 - DNA, 476 bp, Glycine max
  Clone ID: LIB3051-068-Q1-K1-H4
tcccattcttgcaccggggtcattggactaggattactgaaccagtgggaggtaggctctgttataaacctccaatttatgacataaatgctcctgacttgtacattccattaatggcatttggtacctatgttgttcttgctggcatctcattgggtcttcgtggaaagtttagtcctgaagctttgaactggttatttatcaagggattggttggttggtttatgcaaacagcactgcttaaagttactttactttcattaggcagtggggaagcacctctattggacattatagcgtacgccgggtacacttttcctggcttgtgtttggctgtttctggaagaataatatggagttactcctactactttctgatgctgtggacctgcttatgtatggcagtgtacttggttaaaacaatgaagagagtcctttttgcagaagttaggagttatgattcaagcaaacaccac

SEQ ID NO: 26766 - DNA, 456 bp, Glycine max
  Clone ID: LIB3051-077-Q1-K1-D12
cccactcgtccggacttataattaaaagaaaattattattaataaattactgtattttataagtgtcaattattatttaataaaatttgtaaaatactatattgaaggtattttttttaccgttgtaggatattgtcaacaatttctgtctttagatataaataataaaaagagaaaaagaataaataaaagtggaggaggagggtgtaggtttggttgatttgattgttgtgcatccatcgttaagctagtggcgatcggatccagctacagcatagagatcaaggaaggaaggaaggaagatgttgggtgttataaggcacaagagtattcgccctgccttctccgcaatcagacacttgtcttctgcagctaaagagattactgtcaaggaagctctgaactccgcactcgatgaagaaatgtcagctgatcctaaagtgttcttgatgggtg

SEQ ID NO: 26767 - DNA, 445 bp, Glycine max
  Clone ID: LIB3051-081-Q1-K1-E5
ggttatttgattggtgtgcatccatgttaagctagtggcgatcggatccagctacagcctacggcctacagttttggtttggtttgcttgattgaagatcaaggaaggaagatgttgggtgttataaggcacaagagtattcgccccgccttctccgcaatcagacacttctcttctgcagctaaagagattactgtcagggatgctctcaactccgcactcgatgaggaaatgtcagctgatcctaaagtcttcttgatgggtgaagaggttggggaatatcagggtgcatacaagatatccaaggggctgctcgacaagtatggccccgagagggttctcgatactccaatcactgaggctgggtttgctgggattggagttggcgctgcttactatggtctaaggcctgttgtggagtttatgacttttaacttctccatgc

SEQ ID NO: 26768 - DNA, 459 bp, Glycine max
  Clone ID: LIB3051-090-Q1-K1-G3
cccacgcgtccgctggttagttctttgcagaaacaaaattctccctattttccgccacagaacagcaggaagaaagtgcatccaaagaatgctgattgtaactcatttattatgttaggctttggtttaaaagattctgtcgtatgcataatactgtcctaattttcaggactcacagatgctatacattttttccccttctcagcatatctgggaggaagttaatgttaaataacttgtacaacaatgacacaaaggcagcaggaagttatctgcggtcatggtttctgcttggcaataactaaaaatcaactttttgaaaaagcaccaatggtgttagtcggggattgatttctcgaaaaggtggcttacaacttatcaatgggagtaaaactgccattggtactaaatacaactgtgcaaattgtggttcctgatgatgctattggctctgtatat

SEQ ID NO: 26769 - DNA, 354 bp, Glycine max
  Clone ID: LIB3051-111-Q1-K1-E12
aattccacccagccgtccggccacgcgtcctggttatttgattggtttgcattcatgttaagctagtggcgatcgggtccagggtcagtctacaacctacagttttggtttggtttgcttgattgaagatcaaggaatgaagatgtcgggtgttataaggcacaagagtattcaccccgccttctccgcaatcagacacttctcttctgcagctaaagagattactgtcacggatgctatcaactcctcactcgatgaggaaatgtcacctgatcctaaagtcttcttgatgggtgaagaggtttgagaatatcatggtgcatacaagatatccaatgtgctgctcgacaagta

SEQ ID NO: 26770 - DNA, 442 bp, Glycine max
  Clone ID: LIB3051-054-Q1-K2-C7
cccacgcgtccgcccacgcgtccgcccacgcgtccgctcttctgacggtgggactcaaaattcacatcgtgatattgaagctgagttgcgtgaaataaggttgagtctattgatggagatagagaagcggaagcaagttgaagaaacccttgacagcatgcaaagccactgggagagacttgggcaacggttatctcatattggaattgttttgccttcagatcttactgctgagggtgggcagctgagttctgatcctatggaagatgtatgtcagcaactttacattactaggttcatatcaaacactattgggagaggaattgccagggcagaagcagagattgagatggaagctcaattacaatcaaagaactttgagattgctcgactattggaacgtcttcactgttatgagaccatgaatagggagatgtctcaa

SEQ ID NO: 26771 - DNA, 377 bp, Glycine max
  Clone ID: LIB3051-058-Q1-K2-C7
tggaggttcacgaccacacctcttacttaatttacttcattagctctattattgtctgcgcgttattcaaattagttcaaggatcggattccaaaacctcctctacctgctgcaaattgcccccaggaccaaggacactaccgctcataggaaacatgcaccagtttgttggctcactgccggttcatcactgcttaaaaaatttggcagataattatgggccgctaatgcatctaaaactaggagaggtatctaacatcatagtcacttcacaagaaatggcacaagagattatgaagacacgcgatctcaacttctctgataggccaaaccttgtatcatctagaacaggttcttacaacggctctaacattgtc

SEQ ID NO: 26772 - DNA, 319 bp, Glycine max
  Clone ID: LIB3051-059-Q1-K2-C7
aagcaaatgatggtatacaaaaccttccaggttgcaaattatgcaagatcagaaaggagattgctttctcggaagcaggttgagtgtcaaccttggtctaaccacacatacaaggttgatgacaagatagagttactttgtcaagatagtggcatcagaggctgctggttcaggtgtacagttgttcaggtagcccggaagcagttgaaagtccaatatgatgatgtccaggatgaagatggaagtggaaatcttgaggaatggatccctgctttcaagttagccaggcctgataaacttgggatgaggcattctggcc

SEQ ID NO: 26773 - DNA, 377 bp, Glycine max
  Clone ID: LIB3051-013-Q1-E1-G10
acgcgtacgccaacgcgtccgccggcagataaagaacaaaccgtacccgaaatcccgtttctgccgcggcgtgccggagccgaagatgcgaatctacgacgtgggaatgaacaagaacggcgtggacgagttcccgttctgcgtgcacctggtctcgtgggagaaggagaacgtctccagcgaggctttggaggcggcgcgcatcgcatgcaacaggtacatggccaagttcgccggaaaagatgccttccacctgcgcgtgagggtgcatcccttccacgtgctccgcatcaacaagatgctatcgtgcgccggggccgacaggctccagaccggcatgaggggcgcctttgggaagccgcaagggacctgcgcta

SEQ ID NO: 26774 - DNA, 428 bp, Glycine max
  Clone ID: LIB3051-042-Q1-K1-C12
cccacgcgtccgcccacgcgtccggccggagccgaagatccgaatctagtacgtgtgaaggaagaataaaggcgtggacgagttcccgttctgcgtgcacctggtctcgtgggagaaggagaacgtctccagcgaggctttggaggcggcgcgcatcgcatgcaacaagtacatggccaagttcgccggaaaagatgccttccacctgcgcgtgagggtgcatcccttccacgtgctccgcatcaacaagatgctatcgtgcgccggggccgacaggctccagaccggcatgaggggcgcctttgggaagccgcaggggacgtgcgctagggttaacattggtcaggtgctgctctcggtgaggtgtaaggatgctaacagtcaccatgctcaggaagctcttcgtaaggccaagttcaagttccccg

SEQ ID NO: 26775 - DNA, 353 bp, Glycine max
  Clone ID: LIB3051-051-Q1-K1-C10
gtcaattccaacaacaccacaatgggaagaagaccggcgaggtgttaccggcagatgaagaacaaaccgtacccgaaatcccgtttctgccgcggcgtgccggagccgaagatccgaatctacgacgtgggaatgaagaagaaaggcgtggacgagttcccgttctgcgtgcacctggtctcgtgggagaaggagaacgtctccagcgaggctttggaggcggcgcgcatcgcatgcaacaagtacatgggcaagttcgccggaaaagatgccttccacctgcgcgtgagggtgcatcccttccacgtgctccgcatcaacaagatgctatcgtgcgccggggccgacaggct

SEQ ID NO: 26776 - DNA, 439 bp, Glycine max
  Clone ID: LIB3051-065-Q1-K1-G2
cccacgcgtccgtcgtcaattccaacaacaccacaatgggaagaagaccggcgaggtgttaccggcagataaaggacaaaccgtacccgaaatcccgtttctgccgcggcgtgccggagccgaagatccgaatctacgacgtgggaatgaagaagaaaggcgtggacgagttcccgttctgcgtgcacctggtctcgtgggagaaggagaacgtctccagcgaggctttggaggcggcgcgcatcgcatgcaacaagtacatggccaagttcgccggaaaagatgccttccacctgcgcgtgagggtgcatacctttcacgtgctccgcatcaacaagatgctatcgtgcgccggggccgacaggctccagaccggcatgaggggcgcctttgggaagccgcaggggacgtgcgctagggttaacattggtcaagtgct

SEQ ID NO: 26777 - DNA, 350 bp, Glycine max
  Clone ID: LIB3051-110-Q1-K1-A10
gtcaattccaacaacaccacaatgggaagaagaccggcgaggtgttaccggcagataaagaacaagccgtacccgaaatcccgtttctgccgcggcgtgccggagccgaagatccgaatctacgacgtgggaatgaagaagaaaggcgtggacgagttcccgttctgcgtgcacctggtctcgtgggagaaggagaacgtctccagcgaggctttggaggcggcgcgcatcgcatgcaacaagtacatggccaagttcgccggaaaagatgccttccacctgcgcgtgagggtgcatcccttccacgtgctccgcatcaacaagatgctatcgtgcgcccgtgccgacag

SEQ ID NO: 26778 - DNA, 381 bp, Glycine max
  Clone ID: LIB3051-042-Q1-K1-D5
cagacactgcaccaaacaccaacaacgctttagctctctctcttctctccataaccgcgcaccggcgatctggcactaacagatcgccgctgctacatctgaacccgatccagccaacagatctctccaattcaaatggagaatctaatctctttggtcaacaaaatccagagagcttgcaccgccttaggtgaccacggcgaaaacagtgcactccccacactatgggactctctccccgccatcgccgtcgtcggaggccagagctcaggaaagtcctccgtcttggagagcgttgtcggcaaagatttcttacctcgtggatcaggtattgttacgcgacgaccgctcgtgttgcagcttcacaagattgaaaaggga

SEQ ID NO: 26779 - DNA, 300 bp, Glycine max
  Clone ID: LIB3051-064-Q1-K1-C7
ctccataaccgccaccggcgatctggcactaacagatcgccgctgctacaggtgaaccggatccatccaacagatctctccaattcaaatggagaatctaatctctttggtcaacaaaatccagagagcttgcaccgccttaggtgaccacggcgaaaacagtgcactccccacactatgggactctctccccggcatcgccgtccactgaggccagagctcacgaaagaactgcgtcttggagagctgagtcgtcacagatttcttacctcgtggatcaagtattgctacaccacgacc

SEQ ID NO: 26780 - DNA, 442 bp, Glycine max
  Clone ID: LIB3051-070-Q1-K1-C11
caaagttttcaatcacccaataagaatgcattgttgatgacatccttaccacaagactcacagtttcagcaacgaatagaccagcaagctagtctcttacagaggcagcagcagcagcagacacagttgcaatcatctccgttgcagttattgcaacaaagcttgtcacagagggcatcacagcaaccacaaatgactcaaatgtgtcagcaaaacagctcagagcaacaaccacagttgcagttgctacaaaaattgcagcaacagcagcagcagcagcaacaacaacaacagcaacaactgctttccacttctagcccacttttgcagtctcagcttctacatcaacaaaatactcatcaacaaaaccagcaattgccgcaacttgctctatcacaaggtcatcagccttaacaagctggaaacaatgctttctcaatgg

SEQ ID NO: 26781 - DNA, 321 bp, Glycine max
  unsure (1)..(321): unsure at all n locations
  Clone ID: LIB3051-087-Q1-K1-H8
cggacgcgtggggtagaatcgtgtggatcgtttgcagaagaagaggtaaagagaaggagtgaccgaagcgaagatgttacccacagcttccaaaggacgttcttcttcctcctcctcttcctctcgacctaacaatcccatgctgcttccctacctccgcagaatcatcaagtggcaacaaatggatattgaatatactttttggcaaatgcttcatctatgtacgtccccgaaagttgtctatcagcatactaaatatcacanacaaaccaagaatcaatgggcacgtgatgatcctgcatttgttgtgatctgcagtct

SEQ ID NO: 26782 - DNA, 435 bp, Glycine max
  Clone ID: LIB3051-101-Q1-K1-E5
cccacgcgtccgaaagaatagtagaatcgtgtggatcgtttgcagaagaagaggtaaagagaaggagtgaccgaagcgaagatgttacccacagcttccaaaggacgttcttcttcctcctcctcttcctctcgacctaacaatcccatgctgcttccctacctccgcagaatcatcaagtggcaacaaatggatattgaatatactttttggcaaatgcttcatctatgtacgtccccgaaagttgtctatcagcatactaaatatcacaaacaaaccaagaatcaatgggcacgtgatgatcctgcatttgttgtgatctgcagtcttcttttggcagttgcaactttggcttattgtgcggcgtatgaccatagtactgcacatacacttcttggtatcttctcagtgttggttttccactttatattgact

SEQ ID NO: 26783 - DNA, 382 bp, Glycine max
  Clone ID: LIB3051-101-Q1-K1-E11
atttcgatcatctttattttttagaatattcccacttaacatggatcagttaacactaggatttccatttttactaacacttcatctgttagtatcaggtgtagtagcaacaacatcgttcacactggttaacaaatgctactacacattgtggccagacattctctcaaacgcaggaatcgccacgcttacaacaacaggtttcgttcttcaaaccggagagtccaaaaccgtgaccgctccaacctcttggggtggccgtttctggggccgcacactctgcacgcactactccgacgtgaaaattctgttgcctcagcggcgagtgcagctccggcaagctcgaatgcgccggaaacgccgacaggccgactgctacctt

SEQ ID NO: 26784 - DNA, 381 bp, Glycine max
  Clone ID: LIB3051-103-Q1-K1-E9
atttcgatcatctctagctattagaatatccccacttaacatggatcagttaacactaggatttacatttttactaacacttcatctgttagtatcaggtgtagtagcaacaacatcgttcacactggttgacaaatgctactacacagtgtggccagtcattctctcaaacgcacgaatcgccacgcttacaacaacaggtttcgttcttcaaaccggagagtccaaaaccgtgaccgctccaacctcttggggtggccgtatctggggccgaacactctgcacgcatgactccgactgaaaattctcttgcctcagcggcgattgcagctccggcaagctcgaatgcaccggaaacgccgtcacgccgactgctacctt

SEQ ID NO: 26785 - DNA, 442 bp, Glycine max
  unsure (1)..(442): unsure at all n locations
  Clone ID: LIB3051-039-Q1-K1-D3
tcttcattgtgatctgcacttcaacccttgtgtgcacaaattggcagagggaagaccagaccgaacaggtttgcggttgtcgaatgagctggccaaacttgatgtttcagtgaaacttctaatagattctgctgttgcatatactatggatgaggtggacatggtttttgtgggtgcggatggagttgtcgaaagtgggggcataatcaacatgatggggacctatcaaatagcattggttgctcacagtatgaataaaccagtttatgtcgctgctgagagctacaagtttgctcgcctttaccctcttgaccaaaaggatttagcccctgcattacgccctattgattttggcgtacctattccatcgaaggttgaggttgaaaggtccgcgcgggactacacccctnctcaatacctgactctgcttttcacagattta

SEQ ID NO: 26786 - DNA, 409 bp, Glycine max
  Clone ID: LIB3051-005-Q1-E1-F7
agtccatttccaccatcaatactattttcttgtcgttgagaagcttcgcgaacgaaagcaaagaaccctagaccgtcacagaaccattccatagccatgtctggtgttggccctctttctcaggattgggaacctgtcgtcctccgcaagaaggctcccaccgccgccgccaagaatgacgagaaagccgtcaacgccgcccgccgctctggcgccgaaatcgaaaccctaaaaaagtataatgctgggacaaacatagcagcatctagcggcacttcattgaacactaagaggctggatgatgatactgagagtctagctcatgagaaggtgccaactgaacttaagaaggctataatgcaagctaggatggacaaaaagcttactcagtctcagcttgctcaactga

SEQ ID NO: 26787 - DNA, 335 bp, Glycine max
  Clone ID: LIB3051-109-Q1-K1-E12
gcgaggcaataccattctcatcttgcatttgcaccatctatactattttagggtggaggagaagcttcgcgaacgaaagcaaagaaccctagaccgtcacagaaccattccatagccatgtctggtgttggacctctttctcaggatcgggaacctgtcgacctccgcaagaaggctctcaccgccgccgcccagaatgacgagaaagcccgcaacgccgcccgccgctctggcgccgaaatcgaaaccctaaaaaagtataatgctgggacaaacaaagcagcatctagcggcacttcattgaacactaagacgctggatgatgatactgagag

SEQ ID NO: 26788 - DNA, 433 bp, Glycine max
  Clone ID: LIB3051-039-Q1-K1-D4
gtttaccttcgcagcgctctttctctctgaaccctaatttacacacactccctttattcgatccctctctccaaccatggcgatcaactcttccaagaatccagatggttctgtccaaaatgcaatgccttcgtatttttattctccaccactagatgtttctgctgcatttccacaagcaacaccagcatcaacgtttcctccttgtgcttcagattattttcaattggacaacttattgacagcagaggagcaagccattaggaagaaagtaagagagtgtatggaaaaagaaattgctccaataatgactgagtactgggagaaggccaaatttccatttcatgttattccaaagcttggtgcattgcgcattgctggtggcacaatcaaggattatggttgtcctggtctttctatcactggaagtgct

SEQ ID NO: 26789 - DNA, 407 bp, Glycine max
  Clone ID: LIB3051-083-Q1-K1-C7
ctgaaccctaatttacacacactccctttattcgatccctctctccaaccatggcgatcaactcttccaagaatccagatggttctgtccaaaatgcaatgccttcgtatttttattctccaccactagatgtttctgctgcatttccacaagcaacaccagcatcaacgtttcctccttgtgcttcagattattttcaattggacaacttattgacagcagaggagcaagccattaggaagaaagtaagagagtgtatggaaaaagaaattgctccaataatgactgagtactgggagaaggccaaatttccatttcatgttattccaaagcttggtgcattgcgcattgctggtggcacaatcaaggattatggttgtcctggtctttctatcactggaagtgct

SEQ ID NO: 26790 - DNA, 436 bp, Glycine max
  Clone ID: LIB3051-041-Q1-K1-A2
aaaattgcagtcttctgtgaatgttgattataagcctaataatgatggttacaactggaggaagtatgggcaaaaacatgtgaaaggtagtgacttctcaagaagttattataagtgcacacgtccaaattgtcctgtgaagaaaaaacttgagcgttctcttgagggtcatgtgactgcaattatttataaaggagaacacaatcatcaacgtgctcatcgcagtaagattgtgaaagaaacacaaacttcaaatgaaaattcagtgtctaagatggatctagggtctagtcaggccacaggtgaacatggatcaggaacacgtgatagtgaggaagtacatgaccatgaaactgaagcagatgagaaaaatgatgaacctgatgccaagagaagaaacacaggaaccaggatccatgatccagccactttgcat

SEQ ID NO: 26791 - DNA, 447 bp, Glycine max
  Clone ID: LIB3051-065-Q1-K1-A2
cccacgcgtccggcgacggtggagctctggtggatgacgtgctttctctaacaactgctctgagaaaagagagagagaatggcggtggagtacacatgctgctcaacggcgttcttcgttcacatagtggtaatcgtgctgctggtgctgttcgcgggcctcatgtcgggcctcaccttgggcctcatgtcgctcagcctcgttgatcttgaggttctcgctaagtccggcactcctcaggatcgtaaacacgctgagaagatattaccagttgtcaaaaaccaacatttattgctatgtactcttctaatttgcaatgctgcggccatggagacacttcctatttttcttgatggtcttgttactgcttggggcgctatcctgatttcagtgacattaattcttttgtttggtgagattataccccaatcagtttgttctcggtat

SEQ ID NO: 26792 - DNA, 428 bp, Glycine max
  Clone ID: LIB3051-095-Q1-K1-B9
gaaacaatggcgacggtggagctctggtggatgacgtgctttctctaacaactgctgttggaaaagagagagagaatggcggtggattacacatgctgctcaacggcgttcttcgttcacatagtggtaatcgtgctgctggtgctgttcgcgggcctcatgtcgggcctcaccttgggcctcatgtcgctcagcctcgttgatcttgaggttctcgctaagtccggcactcctcaggatcgtaaacacgctgagaagatattaccagttgtcaaaaaccaacatttattgctatgtactcttctaatttgcaatgctgcggccatggagacacttcctatttttcttgatggtcttgttactgcttggggcgctatcctgatttcaatgacattaattcttttgtttggtgagattataccccaatc

SEQ ID NO: 26793 - DNA, 419 bp, Glycine max
  Clone ID: LIB3051-020-Q1-E1-H10
attcggcggccgacccacgcgtacaggagatgtcggtggagcagaaagcagcagggaaggaggaggagggaaaactgcagaagggaattgcagagttctacgacgagtcgtctggcatatgggagaacatttggggcgatcacatgcaccacggcttttatgacccggattccaccgtttctgtttctgatcatcgcgctgctcagatccgaatgatccaagaatctcttcgttttgcctctctgggttctgagaacccttctaaatggcccaagagtatagttgatgttgggtgtggcatagggggcagcggcagatacgtggccaagaagtttggagcaacgagcgtacgcggtactctgagtcctgttcaagcgcagagagcagagtctcttgctgctgctcaacggttgggggac

SEQ ID NO: 26794 - DNA, 257 bp, Glycine max
  Clone ID: LIB3051-019-Q1-K1-E12
ctctcagagaggaaagatggcatttttgtggtcagatctgatgcaacaaggggaagcagccaggttctgaaggctggagctcgtaagcatgaattgttagttactaatgcagttgcaacaaaggaaggccgtcctgcggcttctacatcaaaatctgggcatgaacttctcctttttgaggccctacgtgaaggtttggaagaagaaatggatagggatccttgtgtatgtgaaatggtcgataatgtattatatta

SEQ ID NO: 26795 - DNA, 394 bp, Glycine max
  unsure (1)..(394): unsure at all n locations
  Clone ID: LIB3051-112-Q1-K1-H12
cggacgcgtgggaaaaatcaaaggcctgaaagggatgaatccagtggatcaaaagatagagcagatcaaaagacattaagacggcttgctcaaaatcgtgaggctgccaggaaaagccgactgaggaaaaaggcatatgtgcaacaattagagagcagtaggttgaaactgacccaacttgagcaggagctccagcgatctcgccagcagggaatatttatttcaagtactggagatcaggcacagtcaatgagtggaaatggcgctatggcatttgatgtagagtacgcacgatggttagaagagcataatagacaaaccaatgagctaaaggcttgcaataaatctcatgctggaaatatngaacttcgaaccattngtgacaatttcatga

SEQ ID NO: 26796 - DNA, 353 bp, Glycine max
  Clone ID: LIB3051-035-Q1-K1-H3
aaggcaatgaatctgatgcaggcggttcgctacgacgcctacgggggaggtcctgccggcctcaagcacgttgaagttgccgttcccagtccaaaggcaaatgaggttttaatcaaactggaagcagttagcattaaccctattgattggaagattcagaagggtcttctccgtcctttatttctccccagaacctttccccacataccttgcactgatgtggctggagaaatagttgagatcggaactcaagtcaaagatttcaaagttggcgaccaagttcttgctaaactcactcatcaatttggaggtgggtttgccgagtttgctgtggctagtgagagcttaacagc

SEQ ID NO: 26797 - DNA, 420 bp, Glycine max
  Clone ID: LIB3051-040-Q1-K1-H2
ctttgttgtaagcagcacgttgaagttgccgttcccagtccaaaggcaaatgaggttttaatcaaactggaagcagttagcattaaccctattgattggaagattcagaagggtcttctccgtcctttatttctccccagaacctttccccacataccttgcactgatgtggctggagaaatagttgagatcggaactcaagtcaaagatttcaaagttggcgaccaagtccttgctaaactcactcatcaatatggaggtgggtttgccgagtttgctgtggctagtgagagcttaacagcagccagaccatctgaggtctcagccgctgaagctgcagcattgccaatcgccgggcttacagctcgtgatgccctcactcaaattgcaggagtcaagcttgatgggactggccagctc

SEQ ID NO: 26798 - DNA, 352 bp, Glycine max
  Clone ID: LIB3051-107-Q1-K1-H12
ggcaatgaatctgatgcaggcggttcgctacgacgcctacgggggaggtcctgccggcctcaagcacgttgaagttgccgttcccagtccaaaggcaaatgaggttttaatcaaactggaagcagttagcattaaccctattgattggaagattcagaagggtcttctccgtcctttatttctccccagaacctttccccacataccttgcactgatgtggctggagaaatagttgagatcggaactcaagtcaaagatttcaaagttggcgaccaagtccttgctaaactcactcatcaatatggaggtgggtttgccgaatttgctgtggctagtgagagcttaacagca

SEQ ID NO: 26799 - DNA, 438 bp, Glycine max
  Clone ID: LIB3051-028-Q1-K1-C10
tgctttctctgtctggcaaagtgcaccatttacgatggttggatttgttcctcgaatgcactggctggataaggagcaaaataatgctgcatattacaggtatggaggatggtggtctgtttggtggatgggcacttatagcatggttctctcaaaggctgcattctttcacaggaaatacttggatttatatactcatgagatgtctccatcaattcaggactatgtttccagggagagaacttgtgaagacattgcaatgtccctttatgttgctaatgctacaagtggtcctccaatatgggtgaaaggcaaaatctatgagattggtgcatcgggtattagcagtctgagagggcatagcaacaggagaaacaaatgtctcaatgacttgatatcactatacggaactcttccacttgtgtcaactaatgtgaa

SEQ ID NO: 26800 - DNA, 428 bp, Glycine max
  unsure (1)..(428): unsure at all n locations
  Clone ID: LIB3051-040-Q1-K1-C1
gaatattttcgttttcgaaatccaccgatctctctcattcttcaatggccaccctttccgcatgcgcttcccctccatggccaaaccctaattctcccaattcaaatccagaccctaatttcctccccgatcaatcccaaaccctcgacttcgactccctcatgcctccgcaacccgaatctccaccgccccaccaccaccactcccccgacgcatcgccgccggaatcctccccatcgctcccgccgccgtcgctcctctacctctccttcaaccaggaccaggcctgcttcgccgncgncgncgacagcggcttccgcatctacaactgcgaccccttccgcgagctcttccggcgcgatttcgacggcggcggaatcggccacatggagatgctcttcctctgcaacatcttcgccctcgtcggc

SEQ ID NO: 26801 - DNA, 440 bp, Glycine max
  Clone ID: LIB3051-104-Q1-K1-C7
ggccaccctctccgcatgcgcttctcctccatggccaaaccctgattctcccaagtcaaaggcaaaccctaattgcctccccgaccaatctcaaaccctcgacttcgactccctcatgcctccgcaacccgaatccccaccgcccaaccatcaccactcccccgacgcctctccaccggaatcctccccgtcgccgccgcctccgtcgatcctctacctctccttcaaccaggaccaggcctgcttcgccgccgccgccgacaacggcttccgcatctacaactgcgaccccttccgcgagctcttccggcgcgagttcgacggcggcgggatcggccacgtggagatgctcttccgctgcaacatcctcgccctcgtcggcggcgggcctaaccctcagtacccgcccaacaaggtcatgatctgggacgaccaccagg

SEQ ID NO: 26802 - DNA, 412 bp, Glycine max
  Clone ID: LIB3051-050-Q1-K1-F9
ttcaagttttccgattttgtactgagtatacaatagaagagaaagtcattgaaaggggctacaaaaagcttgcacttgatgctctggtgattcagcaagggcgattggctgagcagaagacggtaaataaagatgaattgcttcaaatggttagatttggggctgaaatggttttcagttccaaggatagtacaattacagatgaagatattgatagaattattgctaaaggagaagaagcaactgctgagctagattccaagatgaagaaatttactgaagatgccatcaaatttaagatggatgacactgccgagttatatgattctgatgatgagaaggatgaaggcagattggatataaaaaaattgtgagtgagaactggattgaaccacccaaaagggagcggaag

SEQ ID NO: 26803 - DNA, 384 bp, Glycine max
  Clone ID: LIB3051-095-Q1-K1-E11
cccacgcgtccgcccacgcgtccgcccacgcgtccgaaagcctccaaaaccaacccgagcggggcgcgatggcgtgggccctccaaaggcgatgactagcaggttctggtgcagcgtaaatcgaatgcgagagttttgacactaaacaggactaaacagttgaatgccctctctttttatatggtttctcggctacttgaaattttttctgaagatgagaaagattctgatattaaattggttgtcgtgaaaggaaatggaagggctttttgtgctggtggtgatgttgcagctgttgctcgtgattgaagtaaaggtgactggaggtttggtgcaaaattttttcaaagtgaaattaaattggattacttgatggcaacatat

SEQ ID NO: 26804 - DNA, 361 bp, Glycine max
  Clone ID: LIB3051-024-Q1-K1-F10
tgaatccaaaaccctagccctcactctgaccaccattttttcaattctggagctatgtttcagggataatagggcagggatgtacaaagaacgagagcgaggtggtgtttccgtttccgcctctaaatccgaggatcggaagcgaatcaacgacgttctcgataagcacttggaacgatcctctccttccacttcccgccccatcaacaccgcttccaagaattccaacctccaagtggaggaatctgagacggagagtgaagagtctgatgttagtggctctgatggggatgacacctcttggatctcgtggttctgtaatctaagagggaatgagttcttttgtgaggtggatgatgat

SEQ ID NO: 26805 - DNA, 431 bp, Glycine max
  Clone ID: LIB3051-031-Q1-K1-C8
gggaatgagttcttttgtgaggtggatgatgattacatacaggatgactttaacctgtgtggattgagcagtcaagtgccctactttgattatgcccttgatttgattctcgacgttgagtcatcccatggtgacatgttcacggaggaacagaatgagttgattgaatcggcggcggaaatgctttatggtatgattcatgctcgatatgtgttgaccagcaaaggaatggctgccatgcttgacaaatacaagagctatgattttggtagatgcccaagagtttactgctctggacagccctgccttccagttggtcaatcggacattcctaggtcaagtactgtgaaaatatactgccctaggtgtgaagatctttactatccgcgttccaagtatcaaggcaacattgatggagcttactttggaac

SEQ ID NO: 26806 - DNA, 440 bp, Glycine max
  Clone ID: LIB3051-078-Q1-K1-F7
ctgaaacggagagtgaagagtctgatgttagtggctctgatggggatgacacctgttggatctcgtggttctgtaatctcagagggaatgagttcttttgtgaggtggatgatgattacatacaggatgactttaacctatgtgggttgagcagtcaagtgccctactatgattatgcccttgatttgattctcgacgtcgagtcgttccatggtgacatgttcacggaggaacagaatgagttgattgaatcagcggcagaaatgctttatggtctgattcatgccagatatgtgtagaccaagcaaggaatggctgccatgcttgacaaatacaagaactatgaatttggcagatgcccaatgagttactgctcctgacaggcctggctttcagttggtcaatcagacattcctaggtcaagtactgtgaaaatatac

SEQ ID NO: 26807 - DNA, 435 bp, Glycine max
  unsure (1)..(435): unsure at all n locations
  Clone ID: LIB3051-061-Q1-K1-B4
cgggtggagccacgcgtgcgcccacgcgtncgtgtgaagcaagtggacttgggcgttgcaagataaataatggaggctgttggcatgaggctcaaaatggacatgcattttctgcttgtttggataatggaggggtcaaatgccagtgtcccacagggtttaaaggtgatggtgtaaaaaattgtcaagatatagatgaatgcaaagagaagaaggcttgtcagtgccctgactgtagctgcaagaatacttggggaagctatgactgcagttgtagtggagatcttctgtatatgagggaccacgatacctgcataagtaaaactggcagtcagggaagatctacctgggctgctttttggttgattttacttggcgtagttatgattgctggtggggcattccttgtgtacaagtacagaataaagcaataca

SEQ ID NO: 26808 - DNA, 374 bp, Glycine max
  Clone ID: LIB3051-013-Q1-E1-G1
aatatatgaagacgagttgagtcacttcgttaatactggcgcacttgatgagctcattcttgccttctctcgagagggacccaccaaggagtatgtacaacataaaatgatggagaaggcttcagaaatttggagcatgatatcacaaggagcttacatttatgtgtgtggtgatgccaagggcatggccagggatgtacaccgcgccctgcacacaattttgcaagagcagggttctctcgatagttccaaggctgagagcatggtaaagaatctacaaactactggcagatatttgcgcgatgtatggtgatgatatctgaatgcaagccgtgggggtgacgaagatattaataaaacatagagttgtggct

SEQ ID NO: 26809 - DNA, 422 bp, Glycine max
  Clone ID: LIB3051-032-Q1-K1-A11
attgcctctcagagaagtctccttgaggtcatggctgaatttccatcagccaaacctgcaattggtgtcttttttgcagcagttgctcctcgcctgcagcctagattttattcgatctcctcatctccaagaatggtgccaaacagaattcatgttacctgtgcattagtacatgagaaaatgcccaccggaaggattcacaaaggagtgtgttcaacatggatgaagaattctgtaccattggagaaaagccaggactgcagttgggctcctatttttgttaggacctccaactttagactcccttctgataataaagtgcctataatcatgattggtcctggcactggattggctcctttcagaggtttcttgcaggaaagattagctctgaaagaaggaggagctgaactcggcccctc

SEQ ID NO: 26810 - DNA, 391 bp, Glycine max
  Clone ID: LIB3051-058-Q1-K2-C1
ctcacctgctggaaaggatgaatattcagagtgggtgattgcctctcagagaagtcgccttgaggtcatggctgaatttccatcagccaaacctccaattggtgtcttttttgcagcagttgctcctcgcctgcagcctagattttattcgatctcctcatctccaagaatggtgccaaacagaattcatgttacctgtgcattagtacatgagaaaatgcccaccggaaggattcacaaaggagtgtgttcaacatggatgaagaattctgtaccattggagaaaagccaggactgcagttgggctcctatttttgttaggacctccaactttagactcccttctgataataaagtgcctataatcatgattggtcctggcactggattg

SEQ ID NO: 26811 - DNA, 348 bp, Glycine max
  unsure (1)..(348): unsure at all n locations
  Clone ID: LIB3051-067-Q1-K1-A4
ctcccaattactttgttgcatttcacacaccaacttcccatagaagagagaagagagaagagagctgtccttccatccttcaactcaaatcatcatgcaagactccagctcaatgaagatctcccctctggatctcatgtccgccatcatcaagggcaagctcgacccctccaacgtctcctcctccaccaacgccgccgccgccgccgccttcctcctcgagaaccgcgacttcctcatgctcctcaccacctccgtcgccgtcctcatcggctgcgtcgtcgtcttcatctggcgcagatcctcctnccccaaggccaagcctctcgagcctnctaaacgcgtcgt

SEQ ID NO: 26812 - DNA, 430 bp, Glycine max
  unsure (1)..(430): unsure at all n locations
  Clone ID: LIB3051-092-Q1-K1-H3
agaagcttcccgaaatcgaagtcgacgacggcaccaagaaggtcaccatcctgttcggcagtcaaaccggcaccggcgaaggcttcgccaagggcacagcttaagaaggcaaagcgcgataccagaaggccacgttcaaaatcgtcgatatggatgattatgcccgcgatgacgaataatacgaagaaaggttcaaaaaagagactcacgttcttttctttttagctacatatggtgatggtgagccaactgattatgccgcgaggatttattaatgggttacagaggtgaagttgagactgttcccgtgggcataaaggntgagagcttatgtgttgactttgtgtgcttttgtggaggatttaagggggtgagaaaggagaaaggtggcttcagaatcttcactatggtgtgtttggccctggaaaca

SEQ ID NO: 26813 - DNA, 439 bp, Glycine max
  Clone ID: LIB3051-070-Q1-K1-D11
cttttctccatggatggataatgggtcaaagccaagttggtgttccttcaatgcttcctcacgtgggtgctagtcgtgacaatctatcccaacagattggttcttcttcttacataatggcatctaatcattccacttctaatgttgatgcagcgatgccatcttcagcaatacctgtcagcatcagcataccgggttcttcaatgagatcaggtttacggaatcacttttcacaatcccgtgtacctgtatctgaatctggcaatcttgctgcttctattaataccccacatgatggatttgatatgcaaaccatcgtaagtcgaattcagtcagaacttgccacatcagtggctgcaacagctgcagagttgccttgcactgtgaagttaaaagtgtggtcacatgacataaaaaatccctgttccccacttaatgc

SEQ ID NO: 26814 - DNA, 410 bp, Glycine max
  Clone ID: LIB3051-093-Q1-K1-F11
ctgcgggttagcttggggaattttctgtttttcactattctagctgttctggtggttggtgtgaaaacccagagggatccccgggatagtatgcaccatggaggttggatgatgaaaattatctgctggtgccttctggtaatctttatgtttttcgttccaaatgagatcatcagcttctatgaaacaatatcaaagtttggctcgggcatgtttcttcttgttcaagtcatgctcttgttggattttgttcatggatggaatgacaaatgggttggatatgatgaacaattctggtacattgctctatttgttgtttcccttgtttggtatgtggcaacatttgcattctcaggagttctctttcacttctttacgccatctggacaagactgtggactcaatgtctt

SEQ ID NO: 26815 - DNA, 281 bp, Glycine max
  Clone ID: LIB3051-071-Q1-K1-G5
gaggaattcaacggactcaacgttggattcgcgctcgacgaggggcaggcctcgccgggcgaggaatttagggttttctactccgatagggttccgtggaacgtgaagattagggctaaggggaggcccgggcatgggtcgaggatgtatgatgggagtgcggtggagaatttgatggagagcgtggaggtagtgagtaggttcagggtgagccagtttgatgtggtgaaggcctggatagctttgaatggtgaggttgtgtcggtgaatccgttttatgt

SEQ ID NO: 26816 - DNA, 419 bp, Glycine max
  Clone ID: LIB3051-078-Q1-K1-C10
gcaaacataacttgcaggaatggcttcaatgaataaccaaaaagaaattgatctggttgggggccaatctcttctgtacatgcagctatatgggcacctaagacctatgtgtcttaagtgggctgttcaactaggtattccagacataatacagaaccatgccaaacccatttctctttctgacttggtctctactcttcaaattccaccagctaacgctgattttgtgcagcggttcatgctcttcttggcacacaatggaatctttgagatccatgagagccaagaagatcatgaactaacatatgctctaacccctgcatcaaagcttcttgtcaatagtagtgatcattgtctatctgcaatggttctagcgtttaccgatccacttccgaacgttaaataccatcacttggggg

SEQ ID NO: 26817 - DNA, 434 bp, Glycine max
  Clone ID: LIB3051-059-Q1-K2-D9
gactagttctagaacgctcaccattgtggcttgtctaggtcttcaatcgaactcgccaggaacggaactttctcagattgacacacaccatgaaggaaagtggtttcgagaataatgatacaaagcaagctgctgctgatgtgttgtttctatattcaaaatttgcaatggcatgcattggatgtaaggctcgtccatgtgatttgaggtttcatttgatgaaggagatttcaggtatgccctcttctctaaatagggagtcaccacagaatgcagcatctcctgatgcaatgggtgagtcatccagcacaggaacagcaagacttgatagaacagacagttttcgtgcactctagttgagagtggactgtgaccatgtttttggttggggctgtggcatagtaggtgtttgtgtcttggtaaaagcacttttt

SEQ ID NO: 26818 - DNA, 407 bp, Glycine max
  unsure (1)..(407): unsure at all n locations
  Clone ID: LIB3051-048-Q1-K1-E8
aaaacattattctcgaattagggttttccactgatctccgagcacacaccactactctgttcctcagattcaacaccaccttgcgtggcgccaatgggaaaagccttcgacatcggagccgttccgttcaacgccgacgggtggggtccgccggacaacgcgacctcaggcagcaacaacaacaacctccctctgaacgtccccttcgcccccttctcccgctccgacaaattgggccgcatcgccgactggacccgcaacttcaacaatccgacccgctccaagaacccccgccgatgccgttttcgacttcgccaacgacgactccttccccgcctccgccgacgacgacgcctccttccgcctcgtcgacggaaagcccccgccgngccccaaattcggcccca

SEQ ID NO: 26819 - DNA, 436 bp, Glycine max
  Clone ID: LIB3051-069-Q1-K1-G12
cccacgcgtccgctccttcatcttcctcatccacatggaaatctccaacctcctcttgaggaagattctcatcaacgaaatagtcatggacgaaacaaagcctaacacacctcaatacaacaagctcgatcacatgatctcttcagaaatggtcactcttgtggtcttcaaaatcgcatacttcactctgctcctcatattctccctcctctccacctcggcagtggtctacaccatcgcctccatctacaccgcaaaagacgtgacattcaagagggtcatgagtgttgtccctaaagtgtggaagaagctcatgttgacctttctatgggcctttgctgctttcttcggttacaatatcatgactgggctaggtatggtcttggccatagtcacaattgggttaagtagtggtgggcttgcggttttggtttcg

SEQ ID NO: 26820 - DNA, 445 bp, Glycine max
  Clone ID: LIB3051-087-Q1-K1-C9
cccacgcgtccggctgattgggcagtgaacactaaggtggacatgcgcttcaacgttaagaatgcatattggttaagtgacagggtcagggagaagattttgcaaacggagaaaaaccgtattaacaaggatggggagcttgtgatttcttcaaccaaaactagaacgcagaaggataacattgaggatgctttggcaaagcttcagataaacaaaccggtggaagaatgcagcttaggatggtgacttggtggtagacatatctcttcctcatttctgtattcttgtattgtactcagacattataattcaaatttgaagatttctgttgttggctatttttttttattttcttatgagttagagtagcatcttaatggaaaatggaatatatcttggaggagtttgtacagtggttccttattgtcttctccgctactcattg

SEQ ID NO: 26821 - DNA, 411 bp, Glycine max
  Clone ID: LIB3051-043-Q1-K1-G10
cttcggcaaaggacatggatcggataaaagggccatggagtcctgaagaggacgaagcgttacggaggttggttcagacttacggccctaggaactggtccgttataagcaaatccattccgggtcggtctgggaaatcgtgccgcttgcggtggtgcaaccagctgtctccggaggtggagcgccggcctttcacggcggaggaagacgaggcgatcctgaaggctcacgccaggttcgggaacaagtgggccaccatcgcgcgcttcctcaatggccgcaccgacaacgccatcaagaaccattggaattccaccctcaagaggaagtgctccgagcctctctccgagcctcggcctctgaagagatccgccaccgtttcgggtagtcaatccggatccgatttgagcg

SEQ ID NO: 26822 - DNA, 429 bp, Glycine max
  unsure (1)..(429): unsure at all n locations
  Clone ID: LIB3051-117-Q1-K1-A6
tcgnccacgcgttcgtccacgcgttcggtttcgttccgtttcaatggggagcgaagagcagaacggcgaattctacctgcgttactacgtcggtcacaagggcaagtttggtcacgagttcctggagttcgagtttcggccagaccgcaagcttcgctacgccaacaacttcaacttccaaaacgacaccattattcgcaaggagggttacctaacccccggcggtcttcgcgagtgccggcgcatcatcggcgagagcgagattatgaaggaagatgattacaactggcccgaaccggatcgggtggggcggcaggagctcgagattgttatggggaacgagcacatttcgttcaccacgtccaagattgggtctcttgttgatgttcaaagcaatgcttgaccccgaggtcttcgcatcttttacta

SEQ ID NO: 26823 - DNA, 347 bp, Glycine max
  Clone ID: LIB3051-053-Q1-K2-B11
gtcgcagcggcgcccttttttttttttctttctcttctctgaatccatttactttgtgtggaagtcaatatgagtcttaagggatttttcgagggtggtgtcgcttccatcgtcgcaggctgcaccactcacccactcgacctcatcaaagttcgaatgcaacttcaagaaacccacactctccgcccagcctttgcctttcacgcttccactccaatgcctcctccgccgccctccggccccatctccgtcggcctccgcatcgttcagtcggagggactcgccgctcttttctccggcgtctccgccaccgtcctccgccagacgctctactccaccacccgcat

SEQ ID NO: 26824 - DNA, 375 bp, Glycine max
  Clone ID: LIB3051-005-Q1-E1-H3
agcacagattttgatcatgtataccgaacaatgtccttcagtcggccaacaaacctcttaaatactacagctgctggcacttcatcttctgttccaacgtttcgtggtacaaattctgcagaagggatgcccgagttatctgaggcagacatggttgtgtttcttggtgattttaattatcgacttgatgacatttcttatgacgaagcaagagattttgtttctcaaagatgctttgattggcttagagaaagggaccaacttcgagcagaaatggaagctgggaatgtcttccaaggaatgcgtgaagcaattataacatttcctcccacatacaagtttgaacgggcacaagttggtttggcacggtatgat

SEQ ID NO: 26825 - DNA, 420 bp, Glycine max
  unsure (1)..(420): unsure at all n locations
  Clone ID: LIB3051-011-Q1-E1-H3
ttcattgttttgttttaactgtttcgaatccctgcgcttgcttanggaggaaccgttgaagtggattgacccagtactgctttcaatttgctgctgaaggaaagggttgggatgggttgtgacttttccaagtacacagtgtgctgcacgggttacggagcaagatggtccggctgctgaggctcaggttgatggtggaaacgaagacaatgttgttgagggcgttgacttgccgcggtttcatgaattcacaattgaacagcttaagagggctacatccggatttgccattgaaaatatagtttctgaacatggagaaaaggctccaaatgtggtctataaagggaaacttgataatcagatgcgaattgctgtcaaacggttcaacagaaatgcttggcctgaagcgcaaccattttt

SEQ ID NO: 26826 - DNA, 439 bp, Glycine max
  Clone ID: LIB3051-019-Q1-E1-H11
aaattagtccaaaaaaaaccccattggataacaaacccccgtttgggccaatgccgttgcctagagccgagggacatatcagctatggtggagcgcttaagcccggtgaaggtgatgccattgcacagtatgttcaacaagggaagcgtattccgcgaagaggagaagtgggtctttctgcggaggagattcagaagtttgagagccttggttatgtgatgagtggtagtaggcatcagaggatgaatgccattcgtattaggaaagaaaaccaggtttatagtgctgaggataagcgcgctttggctatgtttaactatgaagagaaggctaaaagggagcacaaggttatggctgatttgcagcgcctcgtgcagcggcacattggccaggatgttggcccaactcatgatccttttgctgcaaaagcctctgatgg

SEQ ID NO: 26827 - DNA, 358 bp, Glycine max
  Clone ID: LIB3051-019-Q1-K1-H11
gtttgagtctcagaagaaacccgcattggataacgaacccgcggttgggccagggccgttgcctagagccgagggacatatcagctatggtggagcgcttaggcccggtgaaggtgatgccattgcacagtatgttcaacaagggaagcgtattccgcgaagaggagaagtgggtctttctgcggaggagattcagaagtttgagagccttggttatgtgatgagtggtagtaggcatcagaggatgaatgccattcgtattaggaaataaaaccaggtttatagtgctgaggataagcgcgctttggctatgtttaactatgaatagaatgctaaaagggagcacaaggttattgct

SEQ ID NO: 26828 - DNA, 411 bp, Glycine max
  Clone ID: LIB3051-004-Q1-E1-G1
gactttatgaagtatgctcaagatgaggaagctgctgatgatcaagaggagacaggatggaagtacattcatggggatgttttccggtttccaaagttcaagtctttcttttcagcagcccttggttctggtactcaattattcacacttacaatcttcatttttatgcttgcactggttggtgtgttttatccatataaccgaggcgctttatttactgcactggtggtcatatatgctctcacatctggcatcgctggctacactgctacttccttctatattcaacttgaagggactaattgggttaggaacttattgctgacaggatgcctcttttgtggccccctattccttatgttctgtttccttaacacagttgcgattgcttatagtgcaactgctgccctg

SEQ ID NO: 26829 - DNA, 403 bp, Glycine max
  Clone ID: LIB3051-029-Q1-K1-H11
gaaagatgggaaaattactcaatgtggaaaatataccgatcttcttaatagtggtgctgattttatggaacttgttggtgcacacaaaaaagctttgtctacactagattcattggatggagcggcagtatctaatgaaataagtgtgttggaacaagatgtaaacgtctccgacacgcatggttttaaagaaaaagaggctagcaaagatgagcaaaatggtcaaacagacaataaaagtgaactacaaggccagcttgttcaggaagaagaaagagagaaaggtaaagttgggttttcagtctattggaaatgtatcacaacagcatatggaggagctcttgtaccattcatattgttggctcagattctttttcaagctcttcaaattggaagtaattat

SEQ ID NO: 26830 - DNA, 425 bp, Glycine max
  Clone ID: LIB3051-030-Q1-K1-H11
agtcagtccaagttggatgacgagcagtggctagcttattggatcatctattcgttcctgacccttacggaaatggttcttcaacctatcttagagtggataccaatttggtacgatgtgaaactattgacggtggcatggctggtgttaccccagttcgcaggagctgcgtacttgtatgaaaggttcgtgagagagcatataaggaaatacataacggagaaggagtatctctatgtcaaccaccagcaacaaagcaaaaagtctcccaataacgggggcaaggccaagaagttcgttgaattcgtcacacccaagaaaggggatcaggaggtgtattgagttggcaattggacggtgccgagaagtgtagaggtttttaactgaggatcttcgtattggtctttgaatcaactttcctttaa

SEQ ID NO: 26831 - DNA, 217 bp, Glycine max
  unsure (1)..(217): unsure at all n locations
  Clone ID: LIB3051-006-Q1-E1-G2
gcgtccaatggaattccattaggttgggatgaacgtgctgtgacatcagattctggaggactgggtaatcgaagcagaggagccattttccaagggtttcccaatattgaccatactcaggatttcgtgagagaggatatcataggatcgctccgttggctgcgccacgaggtgggcggtccggnatttgcgatttgattttggagaggggttttca

SEQ ID NO: 26832 - DNA, 377 bp, Glycine max
  Clone ID: LIB3051-006-Q1-K1-G2
atggaattccattaggttgggatgaacgtgctgtgacatcagattctggaggactgggtaatcgaagcacaggagccattttccaagggtttcccaatattgaccatactcaagatttcgtgagaaaggatatcataggatggctccgttggctgcgccacgaggtgggcttccaggattttcgatttgattttgtaaaggggttttcaccaaaatatgtgaaagaatatattgaaggagcaaagccattgttttgtgttggggagtactgggattcttgcaactacaagggttctaccttggactattaccaaaatagccatttacagctaataatcaattggaatgatggcactggacaacttttaactgcattt

SEQ ID NO: 26833 - DNA, 378 bp, Glycine max
  Clone ID: LIB3051-039-Q1-K1-H10
gttatacatcgcgagcggtcccctattcttatattccatattcctggttcacttcatgcgtgattcctattcctctgattttttctcctttttctctctactaatattaatgcatcctacgctctttccttctcagatcaacctggtaactgcgttggtactgaattccttaatcgagtccagtattcataatctttgagttgatatgggcaactggagcagtgaacgtcatcaaaccactcaacaaagtgatctcggtgcaattttgcgtgatggaaaagaagtacttcttcaagcattcaactgggagtccaacaaatacaactggtggaataatttagaaggcaaagtttctgacatagctaaagcaggatttac

SEQ ID NO: 26834 - DNA, 434 bp, Glycine max
  Clone ID: LIB3051-039-Q1-K1-H11
cccacgcgtccgcgattctcctttatcctcaaattccatattcctggttcacttcatgcgtgattcctattcctctgattttttctcctttttctctctactaatattaatgcatcctacgctctttccttctcagatcaacctggtaactgcgttggtactgaattccttaatcgagtccagtattcataatctttgagttgatatgggcaactggagcagtgaacgtcatcaaaccactcaacaaagtgatctcggtgcagttttgcgtgatggaaaagaagtacttcttcaagcattcaactgggagtccaacaaatacaactggtggaataatttagaaggcaaagtttctgacatagctaaagcaggatttacttcagtctggttgccaccaccaacccactccttctcacctgaaggttatactccgc

SEQ ID NO: 26835 - DNA, 434 bp, Glycine max
  Clone ID: LIB3051-040-Q1-K1-H3
caaaaagatcaagttgaccttcttcattatgatctttgcctctgttcactttgtactgtctcacctgcccaacttcaactccatttctggtgtatctctggcagcagcagttatgtccttgagttactctacaattgcctgggcagcttctgctcataagggtgttcaagagaatgtagaatatggttacaaagctaagagtacatcaggaacagtctttaacttctttagtgcccttggggatgttgcttttgcctatgcttggacacaatgtggtgttggaaatccaagcaacaattccatctacaccagagaaaccatccaagggtcctatgtggagaggagatgttggtgcttacatagttgtggctttatgctacttcccagttgcccttattggttactggatgttcggcaatacagttgaagataac

SEQ ID NO: 26836 - DNA, 322 bp, Glycine max
  Clone ID: LIB3051-043-Q1-K1-H3
ctttgctttggcactcatcttgcatgaaaagttcactgttcaagagattttctgggcattttcaatatacttggaggcagttgcaatattaccccaggtggttttggtgcaaaggaatggaaatgtggacaatttgactgggcaatacatattctttcttggtgcatatcgggcattttacatcctgaactggatataccggtatctgactgaaccacattttactagaaggatagcttgggtctcaggtgttgatcaaacagctttgtatgcagaattcttctactattacttcatcagctggaagaacaatttcgaactg

SEQ ID NO: 26837 - DNA, 384 bp, Glycine max
  Clone ID: LIB3051-043-Q1-K1-H4
ccgacccacgcgtcccgttcgatcaaaacactcatcttgcatgacaagcagactcactaagagattttctgggcagtgtcaatatacttggaggcagttgcaatattaccccagttgcttttgctgcatatgactggaaatgttgacaatttgactggtcaatacctattctttcttggtgcatatcgtgcatttcacatgctgaactggatctaccggtatctgactgagccaccttttactagatggatagcttgcgtctgacgtcttgttcacacagcttagtatgcagatttcttctactattacgtcatcagctggacgaacactacgaatctgaaggtgcctgcctgaattatctcaagttgttttggaatttagacc

SEQ ID NO: 26838 - DNA, 347 bp, Glycine max
  Clone ID: LIB3051-045-Q1-K1-H11
ctagatcgcgagcggccgctcgcgatctagaactagtcttgggtggacatttgacagtgcagaaactaacaagttaataaatgcattagggaactgcttgttgaccttcaggcagtataagcagagctgggaagggctccaacggcgagggatgacgcaggatcttagttgggacaatgctgctcagcagtatgaggaggttcttgttgctgctaagtaccaatggtaaattcttggcttctactctacctaagcagactgatcaatatggagtgctctcatgctgagtgatatcaaggtctgtgcagggaaaggacttggtcaagttgttaaaaccttcatgttgc

SEQ ID NO: 26839 - DNA, 380 bp, Glycine max
  unsure (1)..(380): unsure at all n locations
  Clone ID: LIB3051-046-Q1-K1-H12
ctagatcgtgagcggtcgctcgcgatctagaactagtcttgggtggacatttgagagggcataaactaacaagttaataaatgcattatggaactgcttgttgaccttcaggcaatataagcagagctgggaaaggctccaacggcgaaggatgacgcaagatcttagttgggacaatgctgctcagcagtatgaggaagttcttgctggtgctaaataccaatggtaaattcttggctagtactctacctaagcagactgatcaatatggagtgctctcatgctgagtgatatcaaggtctgtgcagggaaagggacttggtcaagttgttaaaaccttcatgttgcaggtcctggaggaacattnttggccctaaact

SEQ ID NO: 26840 - DNA, 436 bp, Glycine max
  Clone ID: LIB3051-102-Q1-K1-B4
tccgctacttggattcattggaaggctggatcaacagaaaggcattgatctcatagccggggcggttccttggatagtgggccaggatgtgcagctagtcatgttgggaactggaaggccggacttagaagatatgcttaggcagtttgagtcccaacaccgtgacaaagtcagaggatgggttggcttttcggtcaagatggctcaccggataacagcaggtgcagacatattgctgatgccatcaagatttgagccatgtggattgaatcaactctatgccatgaattacggaacaattccagttgtacatgctgtcggtggattgagggatacagtgaagccttttaatccatttgaagagtcgggccttgggtggacatttgacagtgcagaaactaacaagttaataaatgcattagggaactgcttgttg

SEQ ID NO: 26841 - DNA, 275 bp, Glycine max
  Clone ID: LIB3051-047-Q1-K1-H3
tgcctctggacattgaatttgacttacaggatctggttgtggacttgcgtcccaatatggttgggtacacttctatcgaggaagtgaatgccgctctagtagaactcgatgaacatgatcggattgactctgctgataaggtcaccactgaaaaacatgctggcactgagaagcctttaattacgaccactttcactactgcagaggctggcaatggacaaagcattgataatggtaccgtacaaaatgaagtgcaagatgatcatgaccgtgag

SEQ ID NO: 26842 - DNA, 402 bp, Glycine max
  Clone ID: LIB3051-049-Q1-K1-H11
gtttgtttgttcaaactattttcttctttttttctctgacgcgtggaaatgatatgcacgcacgcttctgtgggagaggaagtaggaaatagcagagtttagactttagactttagagtcagtgtacgcagaagagtaaaatcgattggcgatgatggagttgaaagagattcagagactcgaaggccacaccgataaggtttggagcttggcctggaacccgaccaccggtcacgccggtatcccactcgtcttcgcttcttgcagcggcgacaaaaccgtccgaatctgggagcagaacctctgctctgggctttgggccttgacggcggttctggatgaaacgcacacttgaactggtcgatcttgggcttggtcaccgtcgggtaagctattggccac

SEQ ID NO: 26843 - DNA, 369 bp, Glycine max
  unsure (1)..(369): unsure at all n locations
  Clone ID: LIB3051-112-Q1-K1-E9
ctgcaattgaaagttatcagcagtcaactaatcgactgctcattttgggattcagtggaggtttaacagaaccagttgagaaaacaggtgatcaaattaaagaaatggaactgaaggttcatccaaaattgagacaacctttgacagcactatgcagtgatccaaataccacagttgttgtgctcagtggaagcggtagacaagtcctagatgataacttcaaagaatacgacatgtggttggcagctgaaaatggaaatgttttacatncttcanagggtgnagtggatgactacantgccagagcatctgaatatggaatgggttgatagtgtgaagcatgtntttgagtacttcacagaaagaaca

SEQ ID NO: 26844 - DNA, 444 bp, Glycine max
  Clone ID: LIB3051-112-Q1-K1-E10
tgaacttcaattccgggctcgacgcactcgtacgctgcaattgaaagttatcagcagtcagcttttcgactgctcattttgagattcaggggagctttaacagaaccagttgagaaaacaggtgatcaaattaaagaaatggaactgaaggttcatccaaaattgacacaacctttgacagcactatgcagtgatccaaataccacagttgttgtgctcactggaagctgtagacaagtcctatatgataactacaaagaatacgacatgtgggtggcagctgacaatggaatgtttttacatacttcaaagggtgaatcgatgactactatgcctgagcatctgaatataaaatgggttgataacgtgaaacatgttactgagtacttcacagaaagaacaccttcgtcacattttgtttattaataacgggaaacttcactt

SEQ ID NO: 26845 - DNA, 341 bp, Glycine max
  unsure (1)..(341): unsure at all n locations
  Clone ID: LIB3051-048-Q1-K1-G1
cttcgagatacccgactacaccgncgacgtcgtcgccaccggcgccctccgcctcctcgaggccgtccgttcccacatcgccgcctccggccgctcccacatccgctactaccaagccggctcctccgagatgttcggcgccacccctccgccgcagtccgaaaccacccccttccacccccgctccccctacgccgcctccaaatgcgccgcccactggtacaccgtgaactaccgcgaggcttactccctcttcgcctgcaacggcatcctcttcaaccacgagtccccccgccgcggcgagaatttcgtgacccgcaagatcacgcgggccgtgggcc

SEQ ID NO: 26846 - DNA, 290 bp, Glycine max
  Clone ID: LIB3051-036-Q1-K1-F2
gaagttgaccaattcattagtcccaaccgttggaggaagcttggcattgctatgattccgaataggtttggtatatcctttacaccaaagcttatgaaccaggcaggtgctctggttcaagtctatacggatggaactgttttagttacccatgggggtgtagaaatggggcaaggtttgcataccaaagttgcccaaattgctgcttcagctttcaacatccctcttagttctgtcttcatatcagatactagtaccgacaaggttcctaatgctttagcaacagcagc

SEQ ID NO: 26847 - DNA, 450 bp, Glycine max
  Clone ID: LIB3051-065-Q1-K1-H3
cccacgcgtccggaaatggggcaaggtttgcataccaaagttgcccaaattgctgcttcagggttcaacatccctcttagttctgtcttcatatcagatactagtaccgacaaggttcctaatgcttcagcaacagcagcttctgcaagttctgatatgtatggagcagcggttttggatgcatgtgagcaaataatggcacgcatggaacctattgcttcacagcataacttcaactcatttgctgagctagttggtgcatgctatgcagaacgaatagacctttctgcccatggattttatattactcctgatattggttttgattggacgacgggtaaaggaaaacctttcagatatttcacttatggggctgcatttgctgaggttgaaattgacaccctgactggagattttcacaccagagtggcaaacgtatttttggatcta

SEQ ID NO: 26848 - DNA, 340 bp, Glycine max
  Clone ID: LIB3051-006-Q1-K1-E3
gagaagcatgtaatgacttgatggcatattctttaattttgtcttgttgttgctatacttgctgcgtaaggaggaagcttcggaagatgttgaacatcacagggggatttattgatgatttcctctctcatttgatgtgttgctgctgtgcccttgtgcaagaatggagagaagtggatatccgtgggcttagtggttctaataccaatacaagcccttcaccctctcagtacatggaatcttatctaacaaatgagattatcatttggatgttggggattcaaggttccttgaagatcatatgataatataggctatattgctattagaattcttacat

SEQ ID NO: 26849 - DNA, 176 bp, Glycine max
  Clone ID: LIB3051-058-Q1-K2-G9
cggacgcgtggggcttggctctaatgggtttcatcttaaataaaaacagactctggagcgatgtcaaaatctaagactgcaattttgtcaatgtttcttatcttcatttaatagacaatcaaatgaaaatccttccttatgattgagagaaagaacttctgattaaaatttgtcac

SEQ ID NO: 26850 - DNA, 394 bp, Glycine max
  Clone ID: LIB3051-012-Q1-E1-G9
agcattaggatctcatgcgcctgggcacggcggtatgggggcattgcttgctggtggtgctgctgcggcagcagctgcgtatggggctcaccatgtttcccatggccatcatggatatggtgcatatggaggatatggacacatgccccatgggaaattcaaacatcatggcaagttcaagcatggaaagttcggcaagcatgggaaatttaagcatgggaagtttggcaagggtatgttcaagaagtggaagtgatgatattatattaattttctgtacatacaaaccgcgattctggatgctgctgcacattgcttttataataaactctactttgtttgatgtccatctatattttggtggaactctagtattttttttatagtcaaagat

SEQ ID NO: 26851 - DNA, 417 bp, Glycine max
  Clone ID: LIB3051-012-Q1-E1-G11
acccaagcgtcaggttcaaggtggcatgcacctgggaaccggcggatgggagcattgcttgctggtggtgctgctgcagcagcaactgcgtatggggctcaccatgtttcccatggccatcatggatatggtgcatatggaggatatggacacatgccccatgggaaattcaaacatcatggcaagttcaagcatggaaagttcggcaagcatgggaaatttaagcatgggaagtttggcaagggtatgttcaagaagtggaagtgatgatattatattaattttctgtacatacaaaccgcgattctggatgctgctgcacattgcttttataataaactctactttgtttgatgtccatctatattttggtggaactctagtatttttttttagagtcaaagatgtatcatcccg

SEQ ID NO: 26852 - DNA, 391 bp, Glycine max
  Clone ID: LIB3051-045-Q1-K1-H7
gtaccagtcccggattgaccgatggcatccacgcctaacgtccacgcgtcccctgacgcgtagggttttcatgttctgtccctgtgatgaatggaacaggatttattgagattgaggaccaaagtttgagtagcagctttattcctttcattgttgtggacgaggatgtttgctcagaaatctgtacacttgagcctcttctacaattaagtgaaactgatccagatattgaaggggcatgaaaaatcaaagccttaaattaagccatggatcttattcatgacacgggttggcttcttcacagaagccagttgaacacaaggatggtttataatgtggatctatttccattgaaacagttcaagtggctcatttagtctcccatggatca

SEQ ID NO: 26853 - DNA, 420 bp, Glycine max
  Clone ID: LIB3051-062-Q1-K1-G1
ggatctctttccattgaaacggttcaagtggcttattgagttttccatggatcatgattggagggcagcagtgagaaaactgttgaacctactgcttgatggaactgtaaatacaggagatcatccttccttgtatctcgcgctttcagagatgggtctccttcacaaagctgtaacgagaaacagcaagcagttagtggagtgtcttttgagatatgttcctgagaatatttctgataaactaggacctgaagacaaggcactggttgatggcgagaatcagaccttcttgtttagacctgatgttgttggtcctgctggtttgacaccactccatatagcatccgggaaagatggttctgaggatgtacttgatgctatgactaatgatccttgcatggtgggaattgaatcatggaa

SEQ ID NO: 26854 - DNA, 414 bp, Glycine max
  unsure (1)..(414): unsure at all n locations
  Clone ID: LIB3051-111-Q1-K1-H6
acgcccacgcgtccgcccacgcgtccgaaacggatgggttcacatcagggtgcagcatcagatggccttcatttttaatggtcaagttgtcatagatacctccttacctttcagaagtaataattatagcatgatttcgactgttagtccaattgctgcaccagcatcaaagagagctcaattttctgttaagggtgtcaacctgatacgccctgccactaggttaatgtgtgctttagaagggaaatatctggtctgtgaagatgctcatatgtcaatggatcaaagctccaaagagcctgatgaacttcagtgtgtccagttttcatgctctgtccctgtgatgaatggaagaggatntattgagattgaggaccagggtttgagtagcagcttttttcctttcattggtgt

SEQ ID NO: 26855 - DNA, 376 bp, Glycine max
  Clone ID: LIB3051-019-Q1-E1-E11
ataagaaatccgcaaaatttttgggaataaaggttggcaacttcgaaaattaacaaaatttcgaaccgaatttgttgcccaaattcccggctgcaaatttgaaaattgagatcttccttctcttgattcctaatgttgtaaaattgtaaaataaagatactgggttataaggtgtgagaatttagatcatttgctttaatttgatttgtttattttcccaggtaacgtctccttatggaaataaccttcaccacaatgaaaatgccacgcaaggtcaatttgcatttacaacagcggagagtgggaactatgtggcatgcttttggatggatggtaaacatcaagaagaagcaactgtaagccttgactggaaaac

SEQ ID NO: 26856 - DNA, 408 bp, Glycine max
  Clone ID: LIB3051-019-Q1-K1-E11
tgaagaaatctgcatactttttggtattaaagttggacacttctgacattaggcaaatgtctgagctgatttgttgctcacattccctgctgcagatttgagaattgagatcttccttctcttgattcctaatgttgtaaaattgtgaaataaagatactgggttataaggtgtgagaatttagatcatttgctttaatttgatttgtttattttcccaggtaacgtctccttatggaaataaccttcaccacaatgaaaatgccacgcaaggtcaatttgcatttacaacagcggagagtgggaactatgtggcatgcttttggatggatggttaacatcaagaagaagcaactggtagccttgactggaaaacaggaatttatgccaatgattgggagtctgttgc

SEQ ID NO: 26857 - DNA, 380 bp, Glycine max
  Clone ID: LIB3051-113-Q1-K1-C7
atcttggcttcagagtaggaaggataagatagttcatatctacatggctggggatagctggggtgggaacattgtgcaccatgttgccctcaaagccatggagtcgggaattgaagtgtttgggaatatactgctcaacccattgtttggcgggcaagaaagaacagagtccgagaagcgtttagatgggaggtattttgttggagttaaggatcgagactggtattggagggcttttcttcctgaaggggaagatagagaccaccatgcatgcaacccgtttggccccaagggcaaaagccttgaagggataacctttcccaagagccttggggtggttgctggtttaagacctggtcaggactggcagttgggttatg

SEQ ID NO: 26858 - DNA, 359 bp, Glycine max
  Clone ID: LIB3051-024-Q1-K1-E10
cctacgaggatgacaatgccgttcatcttgttgtggagctttgtgagggcggggagctcttcgaccgcatcgtggcgcgaggccactacaccgaacgcgccgccgccgccgtcaccaagaccatcgtcgaagtcgttcagatgtgccacaagcaaggtgtgatgcatcgggatctcaagccagaaaactttttgtttgcaaataaaaaggaaactgcggctttgaaggctatagattttgggttgtcggtgttctttaaaccaggggaaaaatttaatgagattgttggaagtccatattacatggctcctgaggtattgaagctaaattatgggccataagtggatatctggaatgct

SEQ ID NO: 26859 - DNA, 413 bp, Glycine max
  Clone ID: LIB3051-072-Q1-K1-A9
gacccacgcgtacgcccacgcgtccgccgagatccgctgccggtgcatcaagggaagcaagaggatagagtttgcgctctgtttttcaaatgcacaaagcgcagatctctgtgatataacggaatacaggaaaatcaaagaccaggatgaagttagagatgcgggcgttgaggacgtccgaaaatcattcttgctgtcagtcccagataacgatttgagtgctgaggcataaaccaaaattgacagccatacggagaaagtaaagtggaagctcatgtcagttgttacacttgcattgactgtccttactagttcgcaagccattctaatcgtttggtccaagagagctggcaagtatgagtatagtgtcactactgctaactttatggtggagactttaaaatgtgctatat

SEQ ID NO: 26860 - DNA, 454 bp, Glycine max
  Clone ID: LIB3051-028-Q1-K1-E3
aatttgtgcgctgggctctgcaacctactggttatttcaagagttggcatattggtgtccgtgttaaaagttccaaaaagatggttgcctttataacaggtgttcctgctagaatccgagttcatgatgaggttgttcatatggcagagatcaattttctgtgtgtccataaaaagcttctaacaaagaggcttgctcctgtcatgatcaaagaggtcaccaggaaggtgcatctggaaaatatgtggcaggcagcctacactgccggagtagttctttctacacctatagcaacttgtcaatactggcacagatctttgaatcccaagaagctaactgatgttggtttttctcggcttggtgcacgaatgacaatgagtcgaaccatcaagctttacaagctaccagaatcaacaatcaccccagggtttaggaagatggaaattcatgatgt

SEQ ID NO: 26861 - DNA, 377 bp, Glycine max
  Clone ID: LIB3051-063-Q1-K1-A10
ggaacccagtgccacctcatcaccaacaagtacggtttggttcatattgctgctggagatttacttagggcagaaattgccactggaagtgataatggaaagcgagccaaacagtatatggagaagggacagttggtccctgacgaaattgttgtgatgatggttaaggagcgtctcttgaaaccagattcgaaagagaatggttggcttttggatggatatcccaggagcttatcacaggccactgcacttgaggctcttggctttcggcctcatatttttcttcttcttgaggtttctgaagatgttcttgtggagagagtagttggacggagattagatcctgttaccggcaagatatatcacttgaagtattc

SEQ ID NO: 26862 - DNA, 435 bp, Glycine max
  Clone ID: LIB3051-087-Q1-K1-H3
cagggcagttggatttccacagatggcaaatgctgcagccattgcagctgcctttgggggaggtctacctcctggaataactgggacaaatgacaggtgtacagttcttgtatcaaatcttaatcctgatagaattgatgaggataaactattcaacctgttctctatttatgggaatattgtgagaattaaacttctccgaaataaaccagatcatgcacttattcagatgggagatggttttcaagcagaattggctgtacactttctgaaaggagccatgttgtttgagaaacgattagaggtcaacttctccaagcatccgaacataacccaaagtgctgacacacatgaatacatcaattcaaatctcaatccgttcaaccgtaacgcaaccaaaaactaccggtactgctgcttcccaacaaagatgat

SEQ ID NO: 26863 - DNA, 432 bp, Glycine max
  unsure (1)..(432): unsure at all n locations
  Clone ID: LIB3051-034-Q1-K1-F7
cccacgcgtccgctccagggaaacaacctgagaaagtgtgcacctcggtcaaaaaacggtgccggcactcgtatctgtgacaccgtgttcaattcggatccaaaaatctgatttatcgggtctcttcccaactcccccacctccaaccaacttccaccagtagtaaacagaaatacaagcataagcaaaagaagacccgcgacacatcgcaacatcgtatcatgtctgcaacaaacgtccccaaagtgctgttacaactacaaccaccctgcaaatcgaacccactctgcgtgccggtgataggactcggcaccgncgcggtccacaacgacggtgacacggtgaaggctgcagtcatagaggctatcaaactcggttacagacacttcgacaccgcggcacagtacggatcggagcaagctcttggagaag

SEQ ID NO: 26864 - DNA, 463 bp, Glycine max
  Clone ID: LIB3051-034-Q1-K1-E3
ctaacaccgtcctctcttggcgttctggcgtggaaaaggacccggatgaagtgctgcagtcccacactgtttataccaatgtttccaaaggggttcttgccaagtccaaggatttaatttcagcttttggcaccgatgaccactccaaaatttgcttagatattttaaagaaaggggagcttcaggtagctgggaaagagagggaatcattgttatcgagtcagttcaaggatattgcgaccattgtgatgcacaagacttacaatcctgagactcaacgtccatacactatcagtatgattgaacgcctcatgcgggaaatccattttgcttgtgatccacacagcaccttcaagaagcaagctctggagttaattcaagagcttcagaagcacttccctataaaacggtgtccgttgagaatacgtgctactgctcctgatgaccaggtgcctgaactttt

SEQ ID NO: 26865 - DNA, 455 bp, Glycine max
  Clone ID: LIB3051-081-Q1-K1-G1
cctcaccttagttgatcgtgttctcaggatgaagtccaactatgctgccagtggaatacgaacgctgcgtggaagctgtcttactgatactgatgggttgaagcgtaagctggcaaggaagctctctgtgaatgaagatggggacgggtcagaatgggaggtgggtgaatgccttggaatgtggtggaggcctgattttgaaacattaatgtatcccttcattccacctaatgtaaaaaagccaaaggagtgtaccaaagtcttccttgtgaagctgccagagagtagaaagttcattgtgcctaaaaacatgagggtgcttgcagttccgttgtgccaagttcatgaaaatcacaagacatatgggcaaattatatcaggggtcccacagctgctgtcaaaattctctttcaacatgatagaatcttgatacctgattgcaacctattttatca

SEQ ID NO: 26866 - DNA, 400 bp, Glycine max
  Clone ID: LIB3051-023-Q1-K1-G2
aaacaaacaaaacagccaccgtcatactcaagaagaagaagaagaagaaagtggttggagaggttggtggcaaacatggggatgcgcgacctcgtttcgggcgctgcggcatgtggcgactcttcttcttcttcctccgcaaaccctctcgcttccctcgccaacgcccttattggctcttcctccaaaactccggaaaggttgaaggagattcccacatccactcccactgaccctacatcccaattttactccacagctcttcccgccaatcagcttcccggcaccgaactctatgagcctctattgaatgccaactctcatgcttcggaatttttgcataagttccctggcaccaccggccttgatgagacgtgggatgagatacaacctgatgggg

SEQ ID NO: 26867 - DNA, 443 bp, Glycine max
  Clone ID: LIB3051-082-Q1-K1-G1
gacagaccaaagcaaacaaacaaaacagccaccgccattccaattcgaagaagaatagtggttcaagagtttgttggcaaccatggcgatgcgcgacctcgtttctggtgccgcggcatgtggcgactcttcttcttcttcctcaaaccctctcgcttccctcgccaacgcccttattggctcttcgtccaaaactcaggagaggctgaaggagattcccacatccactcctactgaccctgcttcccaattttactccacagctctccccgccaatcagcttcccggctccgaattcgataagcctctattgaatttaaactcccaggcttcggagtttttgcataggttccgtggctccactggccttgaggagacatgggatgagatacagcgtgatggggcggctgcccaaatgcgccaactgccaccggggattcaac

SEQ ID NO: 26868 - DNA, 427 bp, Glycine max
  Clone ID: LIB3051-039-Q1-K1-E11
caaggttcatggagccaacttcctcgtggaaagacacacgcgcacgctcctctgccacgcgtgccagtcgcccacgccgtggaaggcctccggcgccgccctcggaaacaccgtctcgctgtgcgagagatgcgccggcggaaccaccgaacaaggtcaagagagccaaggaggcaatgacgacgacatagacaccgacatagacaccgacgatgaggatgactacgatgagagcgaggacgaggttgccgccgacgaggaggacggagacaaccaggttgtcccttggtcctccgagccgccgccaccagccccgagctcttccagcagcgaagaatcggttagccggtgcaacaacgtggacgaggtttcgaccacattgaaacgccgtcgccaggaggacaatgattttcagggttggaattcg

SEQ ID NO: 26869 - DNA, 432 bp, Glycine max
  unsure (1)..(432): unsure at all n locations
  Clone ID: LIB3051-087-Q1-K1-G1
cacctctcattttcccacgacccattttcatttttccaaaaagatctcaactttgcttcagactagagcactccctctttttacgttcccgtttcatgggcatctcttggaatcgggaaccatagacatcgccatggaaaaggacaagtctcacactcacagctttcttcacagtatcgtcaaacacttcaaattcggttcaccgaaagagcgaaacaatgaagctgacgtacaccaaatggctgcacaggagcagaagatctttgcctacgaaaccttgacagctgcaactaagaattntagtgctattcataagctnggtgagggaggttttggaccagtctacaaggggaagctgaatgatgggagagagattgctgtgaagaagttatcacacacgtcaaaaccaagggaagaaggagttcatgaatg

SEQ ID NO: 26870 - DNA, 449 bp, Glycine max
  Clone ID: LIB3051-025-Q1-K1-D9
aaccattgttcgttgtggcagtagcaaaacaacacctttttgaaacccgaggttcagagagaaaagaaacattttccaaattaatggggcgttggatgaaaccagaggtttaccctctattggctgcaatgacctttgttaccggcatgtgtgtgttccaactaacaagaaatgtgctcgggaaccctgatgttaggattaacaaaactcggagaagcatggcagtgttggagaacagagaagagggagagaaatatgctgagcatggcctgaggaagttccttcgtactcgaccaccagagattatgccaaccatcaaccacttcttcagcgaggataaatgaaagagtgtcacacgtagtagaataccaaaataattcaacttatggaagaaaaatcaaagtttctaaatctgtcaagcagcttgcatatgaaccttgtcatattac

SEQ ID NO: 26871 - DNA, 408 bp, Glycine max
  Clone ID: LIB3051-032-Q1-K1-G7
gttcgttgtggcagtagcaaaacaacacctttttgaaacccgaggttcagagagagaagaaacattttccaaattaatggggcgttggatgaaaccagaggtttaccctctattggctgcaatgacctttgttaccggcatgtgtgtgttccaactaacaagaaatgtgctcgggaaccctgatgttaggattaacaaaactcggagaagcatggcagtgttggagaacagagaagagggagagaaatatgctgagcatggcctgaggaagttccttcgtactcgaccaccagagattatgccaaccatcaaccacttcttcagcgaggataaatgaaagagtgtcacacgtagtagaataccaaaataattcaacttatggaagaaaaatcaaagtttctaaatctg

SEQ ID NO: 26872 - DNA, 366 bp, Glycine max
  Clone ID: LIB3051-043-Q1-K1-F1
cccacgcgtccgcgttgtggcagtagcaaagcaacacctttttgaaacccgaggttcagagagaaaagaaacattttccaaattaatggggcgttggatgaaaccagaggcttaccctctattggctgcaatgacctttgttaccggcatgtgtgtgttccaactaacaagatatgtgctcgggaaccctgatgttaggattaacataactcggagaagcatggcagtgttggagaacacagaagagggagagaaatatgctgagcatggcctgaggaagttccttcgtactcgaccaccagagattatgccaaccatcaaccacttcttcagcgaggttcaatgaaagagtgtcacacgtagtag

SEQ ID NO: 26873 - DNA, 385 bp, Glycine max
  Clone ID: LIB3051-050-Q1-K1-B8
gaaacattttccaaattaatggggcgttggatgaaaccagaggtttaccctctattggctgcaatgacctttgttaccggcatgtgtgtgttccaactaacaagaaatgtgctcgggaaccctgatgttaggattaacaaaactcggagaagcatggcagtgttggagaacagagaagagggagagaaatatgctgagcatggcctgaggaagttccttcgtactcgaccaccagagattatgccaaccatcaaccacttcttcagcgaggataaatgaaagagtgtcacacgtagtagaataccaaaataattcaacttatggaagaaaaatcaaagtttctaaatctgtcaagcagcttgcatatgaactttgtcatattacg

SEQ ID NO: 26874 - DNA, 410 bp, Glycine max
  Clone ID: LIB3051-091-Q1-K1-G1
gcttaatcgaactattcagattctaaaaaatgagttggtggtgggctggagcaatcggtgctgccgggaagaaattcgaggaagaggaaccgccgcgaagcttacagagcgtgggcctggtgatcggcgtgacgggcatcgtgggcaacagcctcgccgagatcctccctctcgccgacaccctcgccggtccatggaaggtctacggcgtcgcacgccgcccccgtccgccgtggaacgccgaccatcctgtctagtacatccagtgcgacgtttacgatcccgccgacgccgaagccaaactcttcggcctaaccgacgtcactcacgtcttcttcgggtcgtggaccaaccgctccaccgaagcagaaaaccctgcgaagttaacggcgctatgttacagaacgtgc

SEQ ID NO: 26875 - DNA, 371 bp, Glycine max
  Clone ID: LIB3051-019-Q1-E1-D12
cacgcgtccacatgcccaatccaacaaccgctacgtctttgacacacatggcgaccctcttgaaactgacgatgaatattacatcaggccggccataacagacaacggagggcgtttcacattgatcaacagaaacaggtcgtgccctttgtacgtcggtctcgaaaacaccgacacaccgcagggctacccgatgaaattcaccccttttgccaacaaggacgacgacgataacgtgagggtgaacacggacttgaaagtgacactggtgcaagtttccacaacgtgtgtgcaatccaccgaatggaagttgggttggaatgacacgaggaatggaaggaggctcatcgtcactgggcgagataatggga

SEQ ID NO: 26876 - DNA, 403 bp, Glycine max
  Clone ID: LIB3051-019-Q1-K1-D12
cttgcccaatccaacaaccgctacgtctttgacacacatggcgaccctcttgaaactgacgatgaatattacatcaggccggccataacagacaacggagggcgtttcacattgatcaacagaaacaggtcgtgccctttgtacgtcggtctcgaaaacaccgacacaccgcagggctacccgatgaaattcaccccttttgccaacaaggacgacgacgataacgtgagggtgaacacggacttgaaagtgacactggtgcaagtttccacaacgtgtgtgcaatccaccgaatggaagttgggtgaaaatgacacgaagagtggaaggaggctcatcgtcactgggcgagataatgggatacaaagtgcaggtaactattatagaatagtggaaacagaaa

SEQ ID NO: 26877 - DNA, 337 bp, Glycine max
  Clone ID: LIB3051-079-Q1-K1-D6
cttttcatggcaacattatcccttgcccaatccaacaaccgctacgtctttgacacacgtggcgaccctgttgaaactgacgatgaatattacatcaggccggccataacagacaacggagggcgtttcacattgatcaacagaaacaggtcgtgccctttgtacgtcggtctcgaaaacaccgacacaccgtcaggctacccgatgaaattcaccccttttgccaacaaggacgacgacgataacgtgagggtgaacacggacttgaaagtgacactggtgcaagtttgcacaacgtgtgtgcaatacaccgaatggaaattgtgtgagaatgaca

SEQ ID NO: 26878 - DNA, 347 bp, Glycine max
  Clone ID: LIB3051-101-Q1-K1-G1
cgaaaacctatcaaggtcatgatgaacatgaggccattaaccgccgtctacaacaaggcgatccgggatctttgcaatcgagaactcggccaccttcccccaaggaatttcgctctccgtcttggcgcctccgaggatcttgtccttcgacttgaattactgaggaatctgcaaaaacacagaggttgtgtcaacactgtgagcttcaatgcagatggtgacactctagtctccggttccgacgattggggggttattctctgggactgggaaactggccgcattaaactctacttccattctggtcattctaacaatgttttccaggccaagttcatgccctactc

SEQ ID NO: 26879 - DNA, 455 bp, Glycine max
  Clone ID: LIB3051-101-Q1-K1-G9
tcaggtttcaggttcttatcatcactgtctctgtggtttccttctttgtagccgtaggtggttgcatgtacgtgcttccaagccttagccgcgcgtttttcaatggccaagttcccttattatctgaacataacagcaacggatcagtgagagaatgtgatgtctttgatggaagctgggtgcaggttaaagatcacaccttgtacaatgccacagagtgtccttttgtggaacgaggattcgattgtttagggaatgggaggggtgacagggattatcttggttggaggtggaagccgaggagttgtgatattccaaggtttgatgtgcgtggtgtgttggaaatgttgagaagcaaaagggttggttttgttggtgattcaatgagtaggacgcagtgggagtctcttgattgtatgctcatggctggtgttgaagataagaggggtgtttat

SEQ ID NO: 26880 - DNA, 425 bp, Glycine max
  Clone ID: LIB3051-050-Q1-K1-E3
cccacgcgtccgctacgtgtttgctcttagcactattttagatcttatatgctttggttatcaaccaaatgaagacattagagatgccattgacgccttaaagaccgcagatatggataaacaagatttagatgatgatgagaaaggggaacaacaaaatttaaatatagcacgaaatatttgttctatcctaaaacaagttgatccaattagaaccaactattggatttggcgcaagagcagacttcctctatcagcttagtaaccaaagtaattaaagggcaactctgggttatgtgtaacctagtttattgaaactggatgtttatttattattattttttatgttgtcatgtatctgtttgtgcaaatttatctttttgtcatgccattactggcatttgagtgtaaggattgaaagccat

SEQ ID NO: 26881 - DNA, 443 bp, Glycine max
  unsure (1)..(443): unsure at all n locations
  Clone ID: LIB3051-097-Q1-K1-A5
cacgcgtccgggattnnntatatcttttaatggagtattttcctggtggagatatgatgacattgctgaggcggaaggatatactaacagaagatgaggccaggttctatgttggggagactgtcctagccatagagtcaattcataaacataattatatccacagagatatcaagcctgacaacttgctgctagatagaaatggccacatgaaattatcagattttggattatgtaaaccgctagactgcagtaatcttcaagaaaaggacttctctgttggaattaacagaagtggagcccttcaaagtgatggacgtcctgcagctcctaatcgaacccaacaggaacaactgcagcattggcagaaaaatcgacgaatgcttgcctattctacagttggaacacctgattatatggcttcagaagttcttctgaagaaa

SEQ ID NO: 26882 - DNA, 417 bp, Glycine max
  Clone ID: LIB3051-108-Q1-K1-G1
cccacgcgtccgcttttttcaggttgaacatgtcaaagctgagagaaatctacttgctgaggttgacagcaattgcattgttaaactttattgttcctttcaagatgaggagtatttatatctcataatggagtatctacctggtggagatatgatgacattgctgatgcggaaggatatactcacagaagatgaggccaggttctatgttggggagactgtcctagccatagagtcaattcataaacataattatattcatagagatatcaagcctgacaacttgctgctagatagaaatggccacatgaaattatcagattttggattatgtaaaccgctagactgcagtaaccttcaagaaaaggacttctctgttggaatgaacagaagtggagcccttcaaagtgatgggcg

SEQ ID NO: 26883 - DNA, 428 bp, Glycine max
  Clone ID: LIB3051-040-Q1-K1-D1
cccacgcgtccgcccacgcgtccgtttccattcccgtttaaaccctagcagagggttttagctcgcgccacacgaagcttctccatgatccatttcgaaggcgcattctaagccatggctgcttcaaagttaacctcatgcgtggcggtaacttccgcgcggtggtttccatgtccgccttctccgatcgtgcctacgccgattcttacttccgactccctttcttctcctctaaaccttccaatgaaccctcgccgccgaaccagacctccgactccaagtccgagcctccgccgcccgatgaacctaacaaatcgggtggcttcgacccggaatccttagaaagaggagccaaagcactccgtgaaatcaatagttctccctacttcaagcagctgttcgatttaatgcgaaaacaggaggaaact

SEQ ID NO: 26884 - DNA, 443 bp, Glycine max
  Clone ID: LIB3051-047-Q1-K1-A7
ggaaaagaaagtccttgatctcatattagtcccaagtggtttccttgtgttgttggcttaccatttctggcttctccaccaagtcatgaaacaacccaccaaaacagtcattggtgtcaatgcaatcaatcgccgtttctgggtccaagccatgatggaggatgcgtccaagaatgggattctagctgtgcaatcattgaggaacaacataatggcatcgacccttttggcatccacagctataatgctgagttccctcattgctgtgttgatgagcagtggcaatgagagaaaaaccgtggtttctgaggtttttggggatagaactgagcttggtttgtccataaagttcttttccatattggtgtgtttcttgttggcatttttgctgaatgtgcagtccataagatactatagccatgcaagcatcttaatcaacgtgc

SEQ ID NO: 26885 - DNA, 415 bp, Glycine max
  unsure (1)..(415): unsure at all n locations
  Clone ID: LIB3051-033-Q1-K1-G9
tccacacccaacattctcacaagtcacagccaaacaccatttcattaattcttgcagaatattgcttagttttgttttatctgaatttggaaacagcttttgaatggctttttcaagagttgcactgctaatatgcacggtcgggtattttgtgattgcctctgccggcaatttccaccaagattttgatatcacatggggagatggtcgggctaagatactcaacaatggagagcttctcactctgtcacttgacaaagcctctggctcgggtttccaatccaagaacgaatacctttttggcaaaattgacatgcaactcaaactagtccctggcaactctgctggcaccgtcactgcctactatgtaagcatataatcatattctaccttactatactntaatctaagtcat

SEQ ID NO: 26886 - DNA, 405 bp, Glycine max
  unsure (1)..(405): unsure at all n locations
  Clone ID: LIB3051-059-Q1-K2-F7
cacacccaacattctcacaagtcacagccaaacaccatttcattaattcttgcagaatgttgcttagttttgttttatctgaatttggaaacagcttttgaatggctttttcaagagttgcactgctaatatgcacggtcgggtattttgtgattgcctctgccggcaatttccaccaagattttgatatcacatggggagatggtcgggctaagatactcaacaatggagagcttctcactctgtcacttgacaaagcctctggctcgggtttccaatccaagaacgaatacctttttggcaaaattgacatgcaactcanactagtccctggcaactctgctggcaccgtcactgcctactanttgtcttcaaaaggagcgacatgggatgagattgactttg

SEQ ID NO: 26887 - DNA, 443 bp, Glycine max
  Clone ID: LIB3051-064-Q1-K1-E11
gcgcgacattctcataatcaaataccatttcattcattcttacatattgcttaattttatctggattttgaaagaccttctgaatggctttttcaagagttgcattgttaatatgcactgtaattgggtattttgtgattgcctctgcgggcaatttttaccaagattatgatatcacttggggagatgggcgtgctaagatactcaacaatggcgagcttatcactctgtctcttgacaaagcctctggctcgggtttccaattcaagaacgaatacctttttgataaaattgatatgcaactcagactaggttcaggcaactctgcttgcaccgtcacatgctactacttatgtccataaggatcatcatggtatgagactgactatgaattcttgggtaatatgatcagtgagccatacatgcttcacaccaacgtgttc

SEQ ID NO: 26888 - DNA, 379 bp, Glycine max
  unsure (1)..(379): unsure at all n locations
  Clone ID: LIB3051-045-Q1-K1-D9
gttcatggaccactcattgttattggcatgatttctcagtatcaaggaaagaagggtgggacgccatcaaaataccctggactattggagaaactcttagcatagagccaaacagtgtctggctttttcctggtgcaatatggtcacttgtggcaagaacatcttgacagactatttaatctttactcttcaggaaagctaaaggctgctattgatccaaagaaatttataggcctgcattctgctgcagacgctgctgaatatctccattcaggcaaaagtgttgggaaggttgtcgtctccgtggacccaagctntcttactcaagtggccaaattgtgaatcaacccatgtcaaatgacctcacagattatattat

SEQ ID NO: 26889 - DNA, 353 bp, Glycine max
  Clone ID: LIB3051-066-Q1-K1-E11
cttttattctgatgggagtggtcttcccatgccatacactgtgacagttctgaagcatggtagcgtgagagatctttgccaagcattatgcactgcatgctgcttgaagagtgatgaaatgcttttgcttgcagaggtttatgagcataagatttatcgatatctagagaatccgatggaaccattaaattcaattaaagatgatgaacatattgggggctatcgaatcaaaagtggagccaggaaaacgaaagttgaaataatgcatcgatggctggataatatgaagggtggagacaggaagctctttgggaccccgttggtactggtttggaggaaaatcctcaatttgg

SEQ ID NO: 26890 - DNA, 329 bp, Glycine max
  Clone ID: LIB3051-049-Q1-K1-D1
tcgcttcagtcatttgaaaggatcttgtttcttgtggagaatgcacattggttttatgaaggtaatgccgtataaaataatccatctctgaagtcattaaatctgaaggagttcacttctttattgttcaatagctgtgatgtttttcagccttatgtggcccatatagatgatattttcaaggacttcacttcctataaggttcgagttcctgtaactggggcaataattcttgatgaaacatatgaaaggtgcttgctagtgaagggatggaaaggtacaagttggagtttccctcgtggaaaaaagagcaaagacgaagaagatca

SEQ ID NO: 26891 - DNA, 357 bp, Glycine max
  Clone ID: LIB3051-010-Q1-E1-A9
agaaaatacacattacattactaagtctttgttcatttgagtagtagtgatggctagcctcaaggttgcatgtgtggttgctgtgatgtgcatggttgtggtggccatgagtgctgcacccatggcacaggccgcaatcacgtgcgggcaggtcgccggcgacatgtctccgtgcttcagttatcttcgaagcggcggaaaaccgtcgcaggcctgctgcaacggagtgaagtccctcagcagcgcggcgaagaccaccgccgaccggcagggggcgtgcagttgcctgaaaaaccttgccaataatatgggacaaaatttgaatgccgggaacgcaacctctctccctggcaaatg

SEQ ID NO: 26892 - DNA, 371 bp, Glycine max
  Clone ID: LIB3051-095-Q1-K1-G12
caagaatttccattgcatgcaaagcaaatacgcattatattactagttttaatttgtttggtcgtttgcttctgtctttgattaatgatgactagctttaaggttgcatgtgtggttgcgatgatgtgcatggttgtggccatgagtgttacacccatggcacaggccgcaatcacgtgcgggcaggtcgccggcgacgtgtctccgtgcctcagttatcttcgaagcggcggaaaaccgtcggacgcctgctgcaacggagtgaagtcgctcagcggcgcggcgaagaccaccgccgaccgccaggcagcctgcaattgcctgaaaaaccttgccaataatatgggacagagtttgaatgccggcaacgc

SEQ ID NO: 26893 - DNA, 378 bp, Glycine max
  Clone ID: LIB3051-070-Q1-K1-E3
gtgcctttaaagggttgaggattaaggtgaagaacccttctcttaggaggttggttagcggtgcctttgctggggcggtttcacggaccactgtggcgcccttggagacgataaggactcatttgatggtggggggtagtggcaattccactggggaggtgttcaggaatatcatgaagactgatgggtggaagggcttgtttaggggtaatttcgttaatgtgattcgggtttgttctggcaaggccattgagctatttgcttatgatactgttaacaagaacctcttgtcaaagccaagggagcagcccaaacttcctatttcagcatcattgatagcaagtgcttgtgctggagtttgtacaactttatgcactt

SEQ ID NO: 26894 - DNA, 354 bp, Glycine max
  Clone ID: LIB3051-072-Q1-K1-E3
gtggatgggagagaagtatttgttgcatttctttgactatgatatcgggcataaaaaatacgtcatatggggtttaactgctgggatcttgattagggctgcatcagttgtgtaccaacggcagccagcttttgtggagcagaaccctaaattcaagcttccacaggatgtatccaaggacactacaataccttgagttcattgtttattgtattttgtccttgatacttgtccttaatcgtgcaaaaaaactcgtagcagccagagttctagaattcatagcaagtgtttatatttactgagaaaggaagagggtactatcccatcacttggaattcatattcctacctattg

SEQ ID NO: 26895 - DNA, 326 bp, Glycine max
  Clone ID: LIB3051-077-Q1-K1-E3
tgcacctgtgaggtctagcaagcaagaacaaattcacaattccattgtgtctactttgcttgggttgatggatggccttgactctcgtgggcaagttgttttaattggagctactaacaggattgatgctattgatggagccttactgcgccctggtagatttgaccgtgagtttaactttcctctgcctggttgtgaggcacgtggtgagatattagacattcacactcgtaagtggaagcattctcctccaaatgagctgaaaaaggaacttgcagctagttgtgtaggttactgtggtgctgacctgaaggctctttgtactg

SEQ ID NO: 26896 - DNA, 326 bp, Glycine max
  Clone ID: LIB3051-081-Q1-K1-E3
ggttgccgaaattaacagagcaagcacgttttgaacaggtgaagagatgcgatgagggtaagctagtagcgggagtgagaagaataggaggatggagaattgggaaacggaggaggttgaaggtgaaagtccccttccggttctggaggctgttgactacagaggtggagcctcggtgagatcgaaatctgggtcatggagatccgctgggtttatcataggtgtggaagtggcggataggattgcatattatgggattcaggggaacctcataacctacctcacgggcccactccatcagactactgccaccgccgccgagaatg

SEQ ID NO: 26897 - DNA, 440 bp, Glycine max
  Clone ID: LIB3051-065-Q1-K1-D1
gccaatctctaggtgtttctgccagcaccttgacaaatatatttaattgctccagtgctcgctgttggagtagtgatgcttacaacccagttcctgggctgatggaaggggtgccctcgtcaggggattataacggagggtttgcatccaagcttatggcaaaagacttgaatctagcagtagaatcagctaagctggctggatgtaaatacccactaacatcacaagcgcaaaagatatatactgagctctgcagcgttggccatgaagccaaagacttttcatgtgcttttcgccattattactctggaattgacgaacctcatgatcagtaaattaagacgttggttgtatgcataaaactgttgtgatcccatgcctagtatatatggcaagaagatcaattgagctcaatgaagttgtagaaacagttgcgagtt

SEQ ID NO: 26898 - DNA, 420 bp, Glycine max
  Clone ID: LIB3051-018-Q1-E1-D6
agcccacgcgtccgggataatcagctatatgcagttgagcatctgactaacatggtgaaaaaatatgacaaggaaaagaacacctggaatgaattggggaggcttccagtcagggcggattcttctaatggttgggggttggctttcaaggtttgtggagagcaacttttggttgtgggtggacaaaggggtccagagggtgaatctattgtgctgagttcatggtgtcctaagtcagggatcagcaatggcaccatagattggcaggtacttggcgtgaaggagcatgtcggggtgttcgtgtataattgtgctgttatgggttgttgagataattttagattgactcaacagaagatgctggtatccacaatctgacttagccttgaagggtgcctccatgttcaatcacctcattta

SEQ ID NO: 26899 - DNA, 417 bp, Glycine max
  Clone ID: LIB3051-062-Q1-K1-F7
cccactcgtgcggaaactattgccaaacatgcatacaccacgaagattgtgctctggctgttttatggatggaaaattctatgtgattggtggcatgtcaagtcctactggttcattgacttgtggcgaggagtctgacctttagacgagaaactggcggataatagagcgtatgtatccatatgttaatggggctgctcaggcacctccacttgtggcacttgtggataaccagttgcatgcggctgagcatctaaccaacatggtgaggaaatatgacacggaaaggaacacctggagtgaatcgggaaggcttgcagtacgtgccgattcttctaatggatggagcctgtctttcaaggctcgtggagagaaacttctgcttgtgagtggacaaaggagtccagaaggtcaagc

SEQ ID NO: 26900 - DNA, 284 bp, Glycine max
  Clone ID: LIB3051-066-Q1-K1-D1
gtcaagtacaactgtttcattaagttgtggagaggagtatgatctcaagacaaggagttggcggaaaatagaggggatgtatccatatgttaacgtgggtgttcaggcacctccacttgtggctgttgtggataatcagctatatgcagttgagcatctgactaacatggtgaaaaaatatgacaaggaaaagaacacctggaatgaattggggaggcttccagtcagggcggattcttctaatggttgggggttggctttcaaggtttgtggagagcaacttt

SEQ ID NO: 26901 - DNA, 459 bp, Glycine max
  Clone ID: LIB3051-066-Q1-K1-D9
gttgttttttccagcatgaaacaggattatgcaagaatttacttcaggaatatgctcagaaagtgaactatgcaatgccaatgtatcagtgcaagaaggatgaaacaccaggtcgagcatcagtattttcatgtacggttgacattggggggattctatatattgggggagcagcaaaaacaaagaaggaagcagagataaaagctgctagaactgctttattagctatccagtcaagtgcatctcatgcttccgaaaaccaggttggccatccacagttgaccgtccttccatgcagaaaaagggcaacaagttctgttgccatagctgatgagaattcaaatcccccaaagcctaagaaagcgcggtttaaaaagaagtcttccaagaggaaaccctctagagataagatgggccaaattcatacttgaaacttgggcattggagaaattatcaatc

SEQ ID NO: 26902 - DNA, 437 bp, Glycine max
  Clone ID: LIB3051-049-Q1-K1-B12
atggatcccccaagagggtcctggtgtgtctgattgagaaggaaattgagtttgaaacagtgcatgttgatctcttcaagggagagaataaggaacctgagttccttaagctgcagccatttggatcccttcctgttattcaagacggtgattatactctctatgaatctcgtgcaataatcagatacttagctgagaagtataaagaccaagggactgacttattgggaaagacaatagaagaaaagggtctagtggaatggcttgaagtggaagctcataactttcacccaccactctacaacttggttattaatgttctgtttgcgccattaacgggggctccttcggaccaaaaagtgatagaagaaagtgataaaaagattgagaaagtgctggatgtttatgaggagaggctgtcaaagagcaagtacttg

SEQ ID NO: 26903 - DNA, 445 bp, Glycine max
  Clone ID: LIB3051-096-Q1-K1-B10
tcgcccacgcgtccgattcaggaaaaaaaaaaaaaaacatggtggtgaaggtgtatggtccaacctatggatcccccaagagggtcctggtgtgtctgattgagaaggaaattgagtttgaaacagtgcatgttgatctcttcaagggagagaataaggaacctgagttccttaagctgcagccatttggatcccttcctgttattcaagacggtgattatactctctatgaatctcgtgcaataatcagatacttagctgagaagtataaagaccaagggactgacttattgggaaagacaatagaagaaaagggtctagtggaacaatggcttgaagtggaagctcataactttcacccaccactctacaacttggttattaatgttctgtttgcgccattaacgggggctccttcggaccaaaaagtgatagaagaaagtga

SEQ ID NO: 26904 - DNA, 431 bp, Glycine max
  Clone ID: LIB3051-070-Q1-K1-D1
gggggaggcttaattatggtcggtgaaggcatcaatgatgccccagcactagctgctgcgactgttgggatagttcttgctcaccgagctagtgcaactgccatcgctgttgcagatgtattgttgcttagagaaagcatttctgcagtgccattttgtattgccaagtctcgccgaacaacttcactgattaaacaaaatgtggctttagcattgacgtccattctcatggcttcccttccatcagttttgggatttctgccattgtggttaacggttcttttacatgaaggtggaaccctgcttgtctgtctcaattccgtacgtgctctgaatgaaccatcttggtcctggaagcatgatatattccatttgattagcgagattaaatctagactcctgtctctcaagacaaatatcacgggctcaaa

SEQ ID NO: 26905 - DNA, 447 bp, Glycine max
  unsure (1)..(447): unsure at all n locations
  Clone ID: LIB3051-081-Q1-K1-D7
ccttttggaaggaaatatgtggaggttctcaatagttctaaagctgattctgctattagccgaggatgtacaaagtctgaaattcctcagaaggtgttggaatctttgtttaatattcccaaaagcactgaacatgacaaagataccatgaattggagaaatgtagtaaagaaaatccagtctttgggacctgngttcaatgtttctccgcatgttgcagaatctcagcaacatacgtgtgctaagggagatgaatatcatgtgtttagggaagattcaaagcagcaatgggattcagtgaaatcttattatacgaaagctgcaacagcatataccaaacgggaacgagcttatgctgcatatctttctgaccagggtaaagaacaaactagattagctcagaaagcagacactaaggccagccatgacatatttattgctagaaac

SEQ ID NO: 26906 - DNA, 432 bp, Glycine max
  Clone ID: LIB3051-066-Q1-K1-E12
cccacgcgtccgtgataatccatcttcaagatcttttaggaaacaaatgggctgcaatagctggatactttcaaaagggaacagccaatggcttaaagaactatgggacacccattttggaaaagaagctgaagaaaatgcaagtaggttgtgaaagtggtagctttgggagaaaggttttcagcctcaaagcaaatccctagaggccagtgggaaagaaagctccaaactgatatccaaatggcaaagagagccctcagtgaagctctttcaccagagaagccatcttggaatttatctgcctcaaactcaaacccttcagatagtagcagctccttctcttccacaaaaccaacaacaacacaaactgtgtgctatgccctaagtgctgacaacataactagaatgctaaagggttggatgaaaaaccca

SEQ ID NO: 26907 - DNA, 264 bp, Glycine max
  Clone ID: LIB3051-072-Q1-K1-D2
gggaagttctatcttttggatccacatgcttaacttaactggatcacattggctatgttaaggatgggctgcaatagcttcatgcgctgccacagagaacagacaatgacataaagaactattggaacacccatttgagaaagaagctgaagaagatgcaagtaggttgtgaaggtggtagctttggagaatggttttcagcctcaaggcaaatccctagaggccatgttgaaagaaggcttcaaactgatatccaaatggcaa

SEQ ID NO: 26908 - DNA, 481 bp, Glycine max
  Clone ID: LIB3051-077-Q1-K1-D1
aaaaggatgaagggaacgttgtggcagttcaagcacaagatgacacacatgagcatctgtcaagcgagacgtggcaatgcagataccacagtgacaccagaggtgaagaaaactgggaaggttgtccctaaaaaacaatcaaagacccccacgtctgaaaagcgagacaatacagctgattccagtaaaacagaaacaaagtctgacaaagatgacaaaaaggaagaaagagttactggtgaaaaaagtggggcaaagacagacaagctgaaagcctctgataaagatgttaccaatgtaaaggggaaagtgaaagatggggacaagtcaaaagatgagaaagtaacccaagatagggatggaaaggactagtccaaaagcaaatctagtaaggaagtgaaagacatgaggaagtctaatgaacctcctcgacaccctggatttattcttcaaacaaaatggaccaaagattctaaaatac

SEQ ID NO: 26909 - DNA, 443 bp, Glycine max
  Clone ID: LIB3051-105-Q1-K1-G4
ggaagtctaatgaacctcctcgacaccctggatttattcttcaaacaaaatggaccaaagattctaaaatacgttctttgtcattgtcactggattcattgctggattatacagataaagatgttgaagaatcaaatcttgagctttcattgtttgctgaatcattttatgaaatgcttcagtttcaaatgggttctagaattttgacatttcttcagaaactgcgcataaaatttgtgatcaaaagaaatcagaaaaagaggcagagggaagatgagcaagagaaggatgatgtaaaaaaatctcctgttaagcgtcaaaagggaaatgatccttcagtgaagaatgagcccacaaatatggacacgttaaatccaaccctactagatgatgagaaagctgttgctaggaatgataactctagtaataaggaggatgatgtg

SEQ ID NO: 26910 - DNA, 394 bp, Glycine max
  Clone ID: LIB3051-012-Q1-E1-H9
agcagaggggttaggaagcgaccatggggacgctacgccgcagaaataagagacccatggaagaagacacgtgtctggctgggcacattcgatactcccgaggaggccgccctcgcctacgatggcgccgcccgctccctccgcggtgccaaggccaagaccaacttccctccggcgccgcccctctgcctcgacctcaacgtcccttcctccgatcaccgctggccccaccacgtccccccccgcagcctcgtcctcagcgacttcctccacaccgccgttctcagagatatcgacccgccccaacaacctttcccacccgccgccgcagtagctcaccgaaatccccacggcggagctatgcccgttggcggccgggttcaagtgatggaag

SEQ ID NO: 26911 - DNA, 355 bp, Glycine max
  unsure (1)..(355): unsure at all n locations
  Clone ID: LIB3051-013-Q1-E1-C3
agttagtgttctctcctttcattaacgttgtgttgggtttgctagtgtacttggttttcattatggcgtcttcttcagcctctcgtgagggacactacagaggagttaggaagcgaccatggggacgctacgctgcagaaataagagatccgtggaagaagacacgtgtctggctgggcacattcgatactcccgaggaagccgccctcgcctacgacggcgccgcccgctccctccgcggcgccaaggccaagaccaacttccctccggcgccgcctctctgcctcgacctcaacgtcncttcctccgatcaccgctggccccacgtcccccctcgcagcctcgtcctcagcga

SEQ ID NO: 26912 - DNA, 296 bp, Glycine max
  Clone ID: LIB3051-075-Q1-K1-A10
cggccagccgacaatcacgggaggttatgtggtgtccctccacttttatatacacaacaacaacggcacacatactagtcatttgttgttgtgttctcctttcattaaggttgtgttgtgtttgttgggcttcgttactgtactttggtttcattattatggcgccgtcttcttcagcttctgcttctcgtgagggacactacagaggggttaggaagcgaccatggtgacgctacgccgcagaaataagagacccatggaagaagacacgtgtctggctgggcacattcgatact

SEQ ID NO: 26913 - DNA, 436 bp, Glycine max
  Clone ID: LIB3051-087-Q1-K1-D1
gctttcttcttttcctttgtcaattgagaattgttcctctcttccattcgtgtacccgcagaagaatcatgacgagttcctctgctgccgctcgcaagaatctgagtaagattgcctgcaataggctccagaaagagctcgtggagtggcaggtcaatcccccaactggtttcaagcacaaagtcaccgacaatctccagaggtgggtggttgaagtcactggagctcctgggacactttacgctaacgagacctaccagcttcaggtcgattttcctgagaattacccgatggaagctcctcaggtgatattcttgcatccggctccgctgcatccccatatctacagtaacggccatatttggttagatatattgtatgattcatggtcccctgcgatgacagttagttctatctgcatcagtattctctcaat

SEQ ID NO: 26914 - DNA, 278 bp, Glycine max
  Clone ID: LIB3051-095-Q1-K1-C2
ccccacttgtttcaagcacaaagtcacagacaatctccagaagtgggtggttgaagtcactggagctcctgggacactttacgctaatgagacctaccagcttcaggttgattttcctgagaattacccaatggaggctcctcaggtgatattcttgcatccggctccgctgcatccccatatctacagtaacggccacatttgtttagatatattgtatgattcatggtctccggcgatgacagttagttctatctgcatcagtattctctcaatgc

SEQ ID NO: 26915 - DNA, 415 bp, Glycine max
  Clone ID: LIB3051-091-Q1-K1-D1
acgccacgcgttcgaccacgcgtacgtccactcgtcctagaatcttcctgagcgaacttatggatcagtgcttattccacttctgccagacgataatagagctggcgaaacaactcgcaaagggttttattcgtatgatgataaacgcaaggctagtcctgatcctgaattgaagaactatattgagaaggctaggagcatttctggtgtctccggagatccaaagcttgccaaattacaagaaaaggatatcatatagatgatattctttcctgcggtgaatgaggcttgtcaggtccttgatgaacgtatcgcattcaaagcagcaggaccttgatatttcttctatcatgtggcaatgggttttttcccccttacaaggggggcatgcattcatatatctgggcttgattct

SEQ ID NO: 26916 - DNA, 450 bp, Glycine max
  unsure (1)..(450): unsure at all n locations
  Clone ID: LIB3051-101-Q1-K1-D9
caaaccccaacatctctcgatgcagagcacccctccgacaacgaccagcacatgggcttgcgggcgcggagcctgagcggagagtctcgggcggagcaagcgtgggcccattggaccaagctgggccggcccaggttcatagtggccccgatggtcgacaactcggagctgcctttccggatgctgtgccgcaagtacggtgcccagggcgcgtacacgcccatgctccattcccgcattttcaccgagaccgaaaagtataggaacgaagagttcaccacttgcaaggaggatcgaccgttgtttgttcaattctgtgccaacgatccggatgtgttgttggaagctgcacgcaaggtggaacgtttttgcgattatgttgatattaatcttgggtgtcctcagcgcattgctaaacggngatactatggtgccttcttgatggataac

SEQ ID NO: 26917 - DNA, 385 bp, Glycine max
  Clone ID: LIB3051-101-Q1-K1-D10
caaaccccatcatctgtcgatgcatagcaccccttcgacaacgaccagcacatgggctggggggcgcggatcctgagcggagagtctcggtcggagcaagcgtgggcccattggaccaagctgggccggcccaggttcatagtggccccgatggtcgacaactcggagctgcctttccggatgctgtgccgcaagtactgtgcccagggcgcgtacacgcccatgctccattcccgcattttcaccgagaccgaaaagtatatgatcgaagagttcaccacttgcaaggaggatcgaccgttgtttgttcaattctgtgccaacgatccggatgtgttgttggaagctgtacgcaaggtggaacgtttttgcgattatgttgata

SEQ ID NO: 26918 - DNA, 440 bp, Glycine max
  Clone ID: LIB3051-027-Q1-K1-E8
cccacgcgtccgctcagcactatcaaccgcgaattgctcaagccttctgcttccgtcgcgctccaccgccactccaacgcgctcgtcgaggtgctgccgccggaggccgactccagcatctcgctcctcagccagtccgagaagcctgacgtcacttataatgacattggaggatgtgatatccagaaacaggaaatccgtgaggctgtggagctaccccttacacatcatgaactatacaaacaaattggtattgatcctcctcgtggtgttttactgtatggaccccctggcactggcaaaacaatgcttgccaaagctgttgctaatcataccactgccgccttcatcagggttgtaagatctgagtttgtgcaaaagtatcttggtgagggtccacgaatggttcgtgatgtatttcgtctcgctaaagagaatgc

SEQ ID NO: 26919 - DNA, 446 bp, Glycine max
  Clone ID: LIB3051-108-Q1-K1-D11
cccactccaccaccaaaccctattcagcatttcccccaatttcccctcacaccatgggctgctccgcgatggtgttggacccgaaaccgtcgtcggagccaccgccgttcctcgcgtcgacaaaatccgactacctccaaggcggcttcagcggcagcgacgccacggcctccgacgaggacgacctctacagccgcctcaagaccctgcagcgccagcttgagttcatcgacatccaggaagagtacgtcaaggacgagcagaagaatctcaagcgcgagctccttcgcgcgcaggaggaggtcaagcggatccagtcggtgccgctcgtcatcggccagttcatggaaatggtcgaccagaacaatggcatcgttggatccaccaccggatccaactactacgtcagaatcctcagcaccatcaaccgcgagcttctcaagccc

SEQ ID NO: 26920 - DNA, 425 bp, Glycine max
  unsure (1)..(425): unsure at all n locations
  Clone ID: LIB3051-050-Q1-K1-H3
caccacacaaaaaaagcaaaaacagagagtaacaactgttactcacacacgccatgggtaaatgaatggtttttgagcaacagcagttaaaagagaaaagggattcagcgaagatgacatcggttggtgtggcaccaacttcgggtttgagagaagccagtgggcatggagcagcagctgcggatagattgccagaggagatgaacgatatgaaaattagggatgatagagaaatggaagccacagttgttgatggcaacggaacggagacaggacatatcattgtgactaccattgggggtagaaatggtcagcccaagcagactataagctacatggcaaagcgtgttgtanggcatggatcatttggagttgtcttccaggctaagtgcttggaaaccggtgaaactgtggctatcaaaaag

SEQ ID NO: 26921 - DNA, 372 bp, Glycine max
  Clone ID: LIB3051-070-Q1-K1-E8
ggtaaatgagtggtttttgagcagaagcagttaaaagagaaagggattcagcgaagatggcatccgttggtgtggcaccaacttcgggtttgagagaagccagtgggcatggagcagcaggtgttgatagattgccagaggagatgaacgatatgaaaattagggatgatagagaaatggaagccacagttgttgatggcaatggaacggagacaggacatatcattgtgactaccattgggggtagaaatggtcagcccaagcagactataagctacatggcatagcgtgttagatggcatggatcatttggagttgacttccaggctaagtgcttggaaactggggaaactgtggctattaaaaaggttc

SEQ ID NO: 26922 - DNA, 461 bp, Glycine max
  Clone ID: LIB3051-102-Q1-K1-A10
cccacgcgtccgaaatgagtggtttttgagcagaagcagttaaaagagaaagggattgagggaagatgacatcggttggtgtggcaccaacttcgggtttgagagaagccagtgggcatggagcagcaggtgttgatagattgccagaggagatgaacgatatgaaaattagggatgatagagaaatggaagccacagttgttgatggcaatggaacggagacaggacatatcattgtgactaccattgggggtagaaatggtcagcccaagcagactataagctacatggcagagcgtgttgtaaggcatggatcatttggagttgtcttccaagctaagtgcttggaaactggtgaaactgtggctatcaaaaaggttcttcaagacaagaggtacaagaaccgggagctgcaaacaatgcgccttcttgaccacccaaatgtcgttgctttgaaacac

SEQ ID NO: 26923 - DNA, 431 bp, Glycine max
  unsure (1)..(431): unsure at all n locations
  Clone ID: LIB3051-113-Q1-K1-F12
nccacgcgtccgcttatattcatcgttgtattggagtctgccatcgggatatcaagcctgaaaagctattggtcaatccacacactcaccaagttaaattatgtgacttggaagtgcaaaggttttgggtaaaagcgaaccaaatatatcatacatatgttctagatactatagagcacctgagctcatatttggcgcaactgaatatacttcagccattgacatctggtctgttggatgtgttttagctgagctgctgcttggacagnctctgttccctggtgagagtggagttgatcaacttgttgagatcatcaaggttctgggcactccaacaagggaagagattaagtgcatgaaccctaattatacagaatttaaattcccacagattaaagcacatncatggcacaagatcttccattagcgca

SEQ ID NO: 26924 - DNA, 467 bp, Glycine max
  unsure (1)..(467): unsure at all n locations
  Clone ID: LIB3051-090-Q1-K1-G4
ctggcttggttgggggattgggtttaacaccaagctgcaacattggcgagggaggtattgcagttgctgaggctgtacatggttcggcacctgatattgctggaaagaatttggcaaatccaactgctttactgctaagtggtgttacaatgttgcgccatttgaacctccatgacaaagcagaacagattcaaaaagccatcctgaacacaattgcagaagggaagtaccgaacagctgacctcggtggcagttcaaagacaactgaattcacaaaggcaattattgatcatctttagattttggttttggagtcagcaagaaattcttgcttatgattntgattttcagtcaattntctatttattaacccaattaatccgaaagagtgggattacctcagcttaaaggaaaactcacccatgtgtgtgacattttacaaccaaagacatggaatgggcaggctt

SEQ ID NO: 26925 - DNA, 415 bp, Glycine max
  Clone ID: LIB3051-096-Q1-K1-F10
gccacgcgtgcgcatctccataatgaagtgcgatgttgatatcatgcaggacctgtatgggtgcattgttctctcaagaggaacaaccatgttccctggcattgctgtcagaatgagcaaggaaatttctgcatttgcacccagcaacttgaagatcaaggtttttgcaccacctgagagaaaatacagcgtctggatcggtggatctatcttggcatctcttagcaccttccaacagatgtggattgctgaggctgaatatgacgaatctggtacatccattgtgcacagaaagtgcttctaaactgtttcgattgatacggttattgaaaggcaagacttctatcattacgatttgtctggaatcaatgcattgcatactgtaaccctttgattctagcttttggtatccttt

SEQ ID NO: 26926 - DNA, 429 bp, Glycine max
  Clone ID: LIB3051-069-Q1-K1-H4
gttaacaacacttttgtcttcgttccattatctagttctcaattctcttcaccctttgccgctgagtgaaatgtgtagtcttgaagcggaaagaacaacagtatgattggcatcatgagacccttcatggattctctgcccatacacttacgatctaagatacacatgccctgatgatgtttacattaaagttcactactgaggaatatgccattctgatctccatcagattaaaaatgatcttgtcatgtccaactatcccatggtcccaggacatgaagtggtcggtgaggtactggaggtgggatcaaacgttagcaggttcagagtgggagagttggtgggagttggactcctcgtaggttgctgcaaaaactgccagtcatgccaacaagacattgagaattactgcatcaagaagatctggtc

SEQ ID NO: 26927 - DNA, 350 bp, Glycine max
  Clone ID: LIB3051-062-Q1-K1-F9
tcggattgcaagaggaaaagaagaagagaataggcttcaccgaaatcaatttcccacagaagcaaacagatcgttggagttggaaaacaaaacaagagaaaatgggtggacgcaagtgtttgttaacgttggtgttgagtttggtgttgatgatgagtatggcataggcgcaatctggtactagcgcatactgcgcccaggagctaattccatgcctggactaccttaatggcacgatcaacccaccaagctcctgctgcgaccctctgaaacgaacagtgcaaaacgaactcgcctgcctctgtaacatctacttctgccctggccttcttcaaagcgtcaatgtcact

SEQ ID NO: 26928 - DNA, 348 bp, Glycine max
  Clone ID: LIB3051-105-Q1-K1-D8
cccacgcgtccgggcagagtcacattcaccgggctttctttcctcctcttattttgggtatctatgctgtttaattaggaaggtggttctttatccttcggagcctctactatgttgaagttatctttgtatttccacacgttgattattcggtgatcatatgattgtattttcttttcactttttttcttctttagagacctctgattcaattgagtaaaaagtttatttaaacgaaaaaaaaaaaaaaaaaaaaaaaaacaaaaaaaaaaaaaaaaaaaaaaaaaaaaaaaacaaaaaaaaaaaaaaaaaaaaacaaaccaataaaaataaatcgggataagaaat

SEQ ID NO: 26929 - DNA, 285 bp, Glycine max
  Clone ID: LIB3051-003-Q1-E1-G5
cacacgcgtccggtactttcttgcgaaacagaacggcgaaggggcaaacacaacttttttgtttttgtgtacagcgagagagaaagaaatgttggggatggtcagcagttccgtggtgtcggcgccggaggagctgctggctgccggcagcagaacgccgtcgccgaagacgacggccgggaagctgctgaaccggttcgtggagaacaaggcggcagcggtgtcgctgcatgtgggagagcacgtgcagttggcgtacacgcaccacaacgagtcagcgtggca

SEQ ID NO: 26930 - DNA, 450 bp, Glycine max
  unsure (1)..(450): unsure at all n locations
  Clone ID: LIB3051-004-Q1-E1-H11
ggtaaggttcctctttattggggaatcacagctgatggatatgtagcatttgctgatgatgcagatttgcttaaaggttcttgtggcaagtcacttgcttctttccctcaagggtgtttctactctacagcagttggaggattgagatgctatgagaatccaaagaataagattactgcaatacctgctgatgaagaggaaatctggggtgcattcttcaaggtggaagggtcagcagtccttgcaggcacagagtaaaagattcattttcaaataaagtaccgtgtgatgtattaatggagtaatgtgtttatgtgcttgtgacggtaaggcttgcatgcggggccatgtaaatacctttaatgataactatgagaagaatgtgactggtagtagagtttatcatggtgttcattagctangattttctctgtttctcttgtacagttg

SEQ ID NO: 26931 - DNA, 246 bp, Glycine max
  Clone ID: LIB3051-024-Q1-K1-D6
ttctgatcaagctggtaaggttcctctttattggggaatcacagctgatggatatggagcatttgctgatgatgcagatttgcttaaaggttcttgtggcaagtcacttgcttctttccctcaagggtgtttctactctacagcagttggaggattgagatgctatgagaatccgaagaataagattactgcagtacctgctgaggaagaggaaatctggggtgcattcttcaaggtggaagggtc

SEQ ID NO: 26932 - DNA, 340 bp, Glycine max
  Clone ID: LIB3051-029-Q1-K1-E7
tgtactttcttgcgaaacagaagggttaaggggcaaacacaacttttttgtttttttgtagagcgagagagaaaaaaatgttggggatcttcagcagttccgtggtgtcgccgccggaggagctggtggctgccggcagcagaacgccgtcgccgaagacgacggcggggaagctgctgaaccggttcgtggagaacaaggcgtcggcggtgtcgctgcaggtgggagaacacgtgcagttggcttacacgcaccacaacgagtcaccgtggcatcccagatcatttgctgttaaggatgagatattctgcttggttgagggggctctagacaatttggg

SEQ ID NO: 26933 - DNA, 430 bp, Glycine max
  Clone ID: LIB3051-037-Q1-K1-A7
cttttgacaggatcaatatggtaaggtacctctatattgcggaatcactgatgatggctacgtagcattcgccgatgatgcagaattgcttaaaggtgctcgtggcaagtcacttgcttctttccctcaacgatgtcactactctacagctgttgcaggattgatgtgctatgataatcctaaagataatattactgcaggtcctgctaatgaggaagaaatctggggagcgactctcaaggtggaagggccagcagttgtcctactcagacaatagattttcctttctgctggtgagatgccatatgatgattagtggaggagactgctaaaggcatacatgatggccaatgtaactaaatggcatggggagtgatcactgtaattgggaaatattatgggtgtaactctgatcattagatagagaatt

SEQ ID NO: 26934 - DNA, 376 bp, Glycine max
  Clone ID: LIB3051-046-Q1-K1-B2
cccacgcgtccgctggtgaatgcgtagaaaaggaaaataaagaaattagcgtgaaaaatgttgggggtgttcagcagctccatagtgtcgccgccggaggagctcgttgccgccggcagccgtacaccgtcgccgaagatgacggcggctgcgctgcggaagtggttcgaggagaagaacccctgcgcagtgtcagtggatgtcggagagcatgtccagctcgcttatacccaccagaacgagtcgccgtttcagcccagatcctttgctgtgaaggatgacgtattctgcttgtttgacggagcccttgacaatttgggcaacttgagacaacaatatggattggccaagtcaaccaatgaagtattgttggtca

SEQ ID NO: 26935 - DNA, 391 bp, Glycine max
  Clone ID: LIB3051-046-Q1-K1-B3
cccacgcgtccgatggagaatgcgtagaaaaggaaaataaagaaattagcgtgaaaaatgttgggggtgttcagcagctccatagtgtcgccgccggaggagctcgttgccgccggcagccgtacaccgtctcccaagatgactgcggcggcgctgccgaagtggatcgaggagaagaacccctacgcagagtcagtggaggtcgcagagcatgttcagctcgcttatacccaccagaacgagtcgccgtttcaacccagatcctttgctgcgaaagatgaggtattctgcttgtttgagggagcccttgacaatttgggcaacttgagacaacaatatggattggccaagtcaaccaatgaaatattggtggtcattgaggcttacaaag

SEQ ID NO: 26936 - DNA, 294 bp, Glycine max
  unsure (1)..(294): unsure at all n locations
  Clone ID: LIB3051-046-Q1-K1-C3
cccacgcgtccgctggngaatgcgtagaaaaggaaaataaagaaattagcgtgaaaaatgttgggggtgttcagcagctccatagtgtcgccgccggaggagctcgttgccgccggcagccgtacaccgtcgccgaagatgacggcggcggcgctgcggaagtggttcgaggagaagaaccccttcgcagtgtcggtggaggtcggagagcatgtccagctcgcttatacccaccaaaacgagtcggcggttcagcccagatcctttgctgggaaggatgaagtattctgcttg

SEQ ID NO: 26937 - DNA, 386 bp, Glycine max
  Clone ID: LIB3051-046-Q1-K1-D6
ggaaaataaagaaattagcgtgaaaaatgttgggtgtgttcagcagctccatagtgtggccgccggaggagctcgttgccgccggcagccgtacaccgtcgccgaagatgacggcggcggcgctgcggaagtggttcgaggagaagaacccctccgcagtgtcggtggaggtcggagagcatgtccagctcgcttatacccaccagaacgagtcgccgtttcagcccagatcctttgctgtgaaggatgaggtattctgcttgtttgagggagcccttgacaatttgggcaacttgagacaacaatatggattggccaagtcaaccaatgaagtattgttggtcattgaggcttacaaagcattgcgtgacagagcaccctaccct

SEQ ID NO: 26938 - DNA, 375 bp, Glycine max
  Clone ID: LIB3051-054-Q1-K2-E3
cccacgcgtccggtcggtggaggtcggagagcatgtccagctcgcttatacccaccagaacgagtcgccgtttcagcccagatcctttgctgtgaaggatgaggtattctgcttgtttgagggagcccttgacaatttgggcaacttgagacaacaatatggattggccaagtcaaccaatgaagtattgttggtcattgaggcttacaaagcattgcgtgacagagcaccctaccctgctaatcacgttgttggccatctcagtgggagctttgctttcatagtttttgacaaatctacttctaccctctttgtggcctctgatcaatatggtaaggtacctctatattggggaattactgctgatggctacgt

SEQ ID NO: 26939 - DNA, 416 bp, Glycine max
  Clone ID: LIB3051-087-Q1-K1-H12
gttctagatcgcgaggggccgccctttttgtttttttgtagagcgagagagaaaaaaatgttggggatcttcagcagttccgtggtgtctccgccggatgagctggtggctgccggcagcagaacgccgtcgccgaagacgacggcggggaagctgctgaaccggttcgtggagaacaaggcgtcagcggtgtcgctgcaggtgggagaacacgtgcagttggcttacacgcaccacaacgagtcaccgtggcatcccagatcatttgctgctaatgatgagatattctgcttgtttgagggggctctagacaatttgggcagcctgagacaacagtatggactggcctagtcagccaatgaagtggttttggtgattgaggcttacaaagctttacgtgatcgagcaccataccc

SEQ ID NO: 26940 - DNA, 444 bp, Glycine max
  Clone ID: LIB3051-112-Q1-K1-C7
gggagctttgctttcatagtttttgacaaatctacttctaccctctttgtggcctctgagcaatatggtaaggtacctctatattggggaattactgctgatggctacgtagcatttgccgatgatgcagaattgcttaaaggtgcttgtggcaagtcacttgcttctttccctcaaggatgtttctactctacagctgttggaggattgatgtgctatgagaatcctaaaaataagattactgcagttcctgctaatgaggaggaaatctggggagcgactttcaaggtggaagggccagcagttgtcgtagccagacaatagattttcctttctgctggtgagatgccatatgatgattagtggaggagactgtaaaaggcatccatgagggccaatgtaattaaatggcatggggagtgatcactggaattgggaaatatt

SEQ ID NO: 26941 - DNA, 409 bp, Glycine max
  Clone ID: LIB3051-029-Q1-K1-H5
gagagagatgtcatcatcttcagacctggacaggcaaatagagcagttgaagaggtgtgagcctcttaaggagtctgaagtgaaggcgctttgcctcaaagccatggaaatccttgtcgaagagagcaacgttcaaagggtcgacgcccctgtcaccatatgtggtgatattcacggtcagttttatgacatgaaggagcttttcaaagtaggaggggattgccccaaaactaactatttgtttctgggggattttgttgatagagggttttactcggttgaaacgtttctgcttctgctcgctcttaaggtgaggtatccggatcggataacactcattaggggaaaccatgaaagccgtcagatcacccaggtgtatggattctatgatgagtgccttcgaaaatat

SEQ ID NO: 26942 - DNA, 438 bp, Glycine max
  unsure (1)..(438): unsure at all n locations
  Clone ID: LIB3051-105-Q1-K1-G10
ggagaaagcaaggtgggaaggatgtacttgttccactgagagagcttgaagatgtcattgttcccccatccccagtgacgtttcctgaagatcatgagacctgnaatgttcagttgtttagatccattgatggtggggctgcttttgggttcccggagactcctgaagatgctgccagagctggtcttattagtgggaaggataatatcattgatcgtagcattcaagatgcttatattaatgctattcgacgtgcaaagaacttcatctatattgaaaatcagtatttccttggaagctcttttgcctggagtgctgatgatattaagcctgaagacattggtgctttgcatctaatcccaaaggaactttcactcaagattgttagtaagattgaagctggggaaaggtttgctgtgtatgttgtagtcccaatgg

SEQ ID NO: 26943 - DNA, 437 bp, Glycine max
  Clone ID: LIB3051-096-Q1-K1-H3
ctcctgcacgcaaagtagcaaacttccctggttatggctatggagaacgccgggaatttggaggcggccatagaacaagtgctgaatgcggagaagcaagcgaggctcgccggcgacgtcgccgccaccagaaacgccgtcactgaaattttacggatgtgcttcgaagcgcgtgcctggaaaaccctcaatgaccagattgttctcttgtccaaacgccgtggccagcttaagcaggctgtgacagcaatggtccagcaggctatgcaatatattgatgagacaccagatcttgaaactcgtatagaactcatcaaaatcttgaacagtgtatctgcaggaaagatatacgttgagattgagagagctcggttgatcaagaaacttgcaaaaatcaaggaagaacaaggacttatagctgaagctgctgatttgat

SEQ ID NO: 26944 - DNA, 440 bp, Glycine max
  Clone ID: LIB3051-102-Q1-K1-H3
cggacgcgtggggagagaagtagcaagaatccttaatgacatatttgagattcctgatatgcccttgaaggcaagaaaatttgtggtgaaggtgtgtgatgtggtgactcgtagagctgctcgattggcagctgctggtattgttggtatcctgaagaagattggtagggacgggagtggtggcatcacaggtggacggagtagaagtgatatgaaaatgagaagaacagttgtggcaattgaagggggattgtattctaaatatgcattgcttacggagtacttgcgtgaagctctaaatgaaatattgggagaagatattgccaagcacgtaattctaaaggtcaccgaacatggatccggcattggggctgcactgcttgctgcctcttattcatcctaaactgtggatagagggtacacctgctattaaaatatat

SEQ ID NO: 26945 - DNA, 419 bp, Glycine max
  unsure (1)..(419): unsure at all n locations
  Clone ID: LIB3051-107-Q1-K1-H3
cttagcttaatttcgccaaatcaaccaaagacaaaaaaaaagaatccaaaggaacagaagagaaagcttgaagctatggggaacaccatgggaaggagtaaaaaggccaaggtgatgaaggtggatggagagacgttgaagctgaaaacaccagcgagagcaaacgacgtcgtaaaggactacccgggccacgtgcttctggactccgaagcggtgaaacatttcgggcttcgggccaaacctcttgagccgtaccaggaactgaagcccacaaagatttactttctcgttgagttacccaagattcagcccgaagaggaaaaaacggcgctaccgaggagggtgcgatccagtgggatacgcggcatgaacgcctncgataggctccagcttctcatgctctccaaacgctccgtttc

SEQ ID NO: 26946 - DNA, 418 bp, Glycine max
  Clone ID: LIB3051-005-Q1-E1-E4
gattcccaaacttttttactttttattccctttttctcactatacaatacaaatacacattcaacaattttcgattcaagttcaaagccatcgacgagtgttgaggaagaataacaatgggaatgatagtggattttgaaaatgaccaaaacgacgccgttctggttccgccccctaacttcgccatggttgaagactgcgttttccgatccagcttccccaccccttccaatttcccctttctccaaaccctaaaccttcgctccatcatatacctgtgccccgagccttatccggaagaaaatctcgagttcctccgctcgcagaatattcgcctctttcaatttggaattgaggggaaaacggacgtttctatgcctgttctcaaagattctatcatggatgcactggaagtttt

SEQ ID NO: 26947 - DNA, 440 bp, Glycine max
  Clone ID: LIB3051-111-Q1-K1-G1
cccacgcgtccgatcgggtctctctgtctctctcggatcatcaaaatcagaaagaattgggggaatggagaacaaccagcaacaaggcgctcaagcccaatcgggaccgtaccccggcggcgccggtggaagtgcaggtgcaggtgcaggtgcaggcgcggccccgttccagcacctgctccagcagcagcagcagcagctgcagatgttctggtcgtaccagcggcaagagatcgagcacgtgaacgacttcaagaaccaccagctccccttggcccgcatcaagaagatcatgaaggccgacgaggacgtccgcatgatctccgccgaggcccccatcctcttcgccaaggcctgcgagctcttcatcctcgagctcaccatccgctcctggctccacgccgacgagaacaagcgccgcacccttcagaaaaacgaca

SEQ ID NO: 26948 - DNA, 369 bp, Glycine max
  Clone ID: LIB3051-003-Q1-E1-H7
atgctttcatcggtttggcggttttccttatattgccggtcacacccgagtcagtaggagcaagagaggaagatgaattcagtggtcctattaaaagtggagaagaagcggcagagcctctgttaaggcaagagactccagttgaggagaaagaagcagttgggttcatagaagcatggaaaattccgggggttgctccctttgctctctgtctgttttttgccaaattggtcgcatataggtttctctattgggtcccattctatgttagccacacagcaattgatgggaaatatctatctagtgagacatcaggaactctatccactttatttgatgttggacgggtgctgggtggaattctagccg

SEQ ID NO: 26949 - DNA, 417 bp, Glycine max
  Clone ID: LIB3051-005-Q1-E1-F1
aggaacatggaccctaatcacctcttcttcacgcatttccgcgatggtgctattgcctcacgcattgagggccaacacagaggagctcttccttctgttattgtgattggtgctggaatatctggacttgcagcagcacgaagtctctatgatgcatcttttaaggtgactgtactggagtcacgagataggcttggtggtcgcattcatactgacttctcatttggctgtccagttgacatgggagcctcatggctacatggagtttgtaatgagaatccattggctccattgatacgtggcctggggctttcattatatcgtaccagtggtgacaactctgtcttatatgaccatgacttggaaagttatatgctttttaacatcgatggtaagcaagtccacaacagatggtca

SEQ ID NO: 26950 - DNA, 380 bp, Glycine max
  Clone ID: LIB3051-025-Q1-K1-H1
cccacgcgtccgaattgtgctagataggcacccagaactaaggcaacaaggacttgcccatgaagtgctacaatggtttatatgcagaatggaagcttggtttgctgctgatgcagatatgatttcactgaaaacctgggatcaggaacatgtcctgtctggtggtcatggactcatggtgcaaggatatgatccaatcataaaagttcttgcaaaagatattgacatatgcttgaaccaaagggtgaaaatgatatctagtggttacaacaaggtaatggtcacggtcgaggatggcaggaactttgttgctgatgctgctatcataactgttcctattggaatcctaaaagccaatttaattcaatttgaaccaaaac

SEQ ID NO: 26951 - DNA, 421 bp, Glycine max
  Clone ID: LIB3051-010-Q1-E1-H11
aaggaatgcaaggaaagtgtagtgatggagagagagagcgaaaaggcgaaaccgcacttgatcttcgcgtacggcacgttgaagcgaggctttccgaaccactatctgatggaggagttgaggagcaaagacgacgccgttttgcttggcagctacgtgacgaacgagccttatccgctggtgtgtgggccccacgggatcccatacctgatcaaactacccgggtcggggcatcgcgtgaagggcgaggtctatgccgtgtcggaggaggcggtggttgtgctggacgagttcgaaggcgtgagcgcggggtattacgagcggttagcggtgacggcggcggaggaagaaggaagggggaaaggtggaggcggaggcgtattggggacacaggagattcggtgaagtgttgtggaagatg

SEQ ID NO: 26952 - DNA, 414 bp, Glycine max
  Clone ID: LIB3051-088-Q1-K1-B6
gttgtgtacagagagagagagagagagagagagagagagagagagaggctgctatggggaacagagctatgttaaccttgctactactcctcttcttctcgaccaatttggttccttccgcccttgctatctggctgacgttacccaccactggcactaagtgcgtctccgatgaaatccaacacaacgtcgtcgttttggccgactacgtcgttatccccagtgatcacgcccacaacctcaccatcgccgtcaaggtgacatcaccgtatggaaacaatcttcatcacaaggagaacacaacacatggtagtattgcatttacaactcaagaggctgggaactaccttgcatgcttctgggtggatagccctagtcaaggagttggtgaagttaatgtaaaccttgattgga

SEQ ID NO: 26953 - DNA, 449 bp, Glycine max
  Clone ID: LIB3051-028-Q1-K1-H7
gctgttctttgcatcaccaaatctggggaggttctaaattatcaggcattcactgatgctaaggggatatacacagtggccgagacaatgccggagagtgatcgttgggatgcatgtcttgcccgaccaatcagtagtttccatgagcaatgcactcaacttggtgaaggcagcattggggttaaattcagttacaatcatccatcaggacattcacacactgtcaggacctttgtttatcgacccaccagtgttccaacttactgcatttgatatatactaatgagtatatgaatctgagagtgtctatgcttgattgaactagtgcaaaactaatgagtatatgagcatattttatttatactatatgtatgtgtagtggtgttccggcatgtatttctatagagcttagtcaaagtaagcatgagacgtttaagtaactgtaaatg

SEQ ID NO: 26954 - DNA, 436 bp, Glycine max
  Clone ID: LIB3051-088-Q1-K1-E3
gagcgagtcagagttgggagagccccttacacgacttttacctctcggtctgggtcttctatatcttggaaagcaggacagtgttgaggcaactgccgaagtttcaaagactttcaatgaaaaaattagaaagtactgtgacatgacactcttatcatgtgcctatgctggaactggaaatgttctcaaggttcaaaatctgttgggtcattgttcacaacatcttgataaaggtgaaactcaccaaggtcctgctgtgcttggaattgctatggtagctatggctgaagaattgggacttgagatggcaattcgatcattagaacatcttctacaatatggagagcagaatattcgccgagcagttcctttggcccttggtctactctgtatatcaaatccaaaggtcaatgttatggatacgttaagcagactt

SEQ ID NO: 26955 - DNA, 453 bp, Glycine max
  Clone ID: LIB3051-091-Q1-K1-C10
acgaacatgttctacaatatggagagcagaatattcgccgagcagttcctttggcccttggtgggctgtgtatatcaaatgcaaaggtcaatgttatggatacgttaagcagacttagccatgatactgattcggaagtagctatggcggcagctatatgcttgggtctaataggtgctggaacgaacaatgctcgaattgctggcatgcttcgcaatctttcaagctattactacaaggataccagccttctattctgcgtgcggattgcccaaggtcttgtacatttgggaaagggcttattaacccttaatgcatatcattccgatcgcttcctactatcaccgacagcacttgctggattaattaccatgttgcatgcttgcctagacatgaaagctattgtgctgggaaaatatcactatgttctctactttctcgttttggcaatgc

SEQ ID NO: 26956 - DNA, 407 bp, Glycine max
  Clone ID: LIB3051-032-Q1-K1-H7
gaaaaattggaatggttaccagaagggtttgaggagagaattttaggtcaaggaaggggtttgatcataagaggttgggcaccccaagtgatgattttggaccatgaatccgttggagggtttgtgacacattgtgggtggaactcagtattggagggggtgtgtgcaggggtgccaatggtgacatggccaatgtacgcagagcaattttacaatgctaagtttttgacggacatagttaagattggggtgagtgtaggcgttcaaacgtggattgggatgatgggaagggaccctgtgaagaaggaaccggttgagaaggctgtgaggaggatcatggttggagaggaggcagaggaaatgaggaacagagcaaaagagcttgctcgaatggcaaagcgtgctgt

SEQ ID NO: 26957 - DNA, 440 bp, Glycine max
  Clone ID: LIB3051-026-Q1-K1-G9
ggatggggccttggcttcgccttttgaaaaaccttgcccaagctcataatcttgtccctgaatttgagattactttagaggccactcaccatggaccgttgaccaataagccaaccatgtttttggagattggtagtactgaagactattggaagagacaggatgctgctcaagttatggcacagttagtatgggaaggacttggacttggaggtgtgtcagatgtaggaaactggagcagggagaatgataacaagaaaatccttcttgggataggtggtggacattatgcacctcggcatgtggatgtagtattgaaagataatgtatgggtgggtcacctactttctggatattcgctgccaatggaagatccaaaccagtcaaaaggagaaaaaaatgtggagattggtggaacatggagacagtctataaaagct

SEQ ID NO: 26958 - DNA, 462 bp, Glycine max
  Clone ID: LIB3051-068-Q1-K1-D2
cccacgcgtccgaaaaccttgcccaagctcataatcttgtccctgaatttgagattacttgagaggccactcaccatggaccgttgaccaataagccaaccatgtttttggagattggtagtactgaagactattggaagagacaggatgctgctcaagttatggcacagttagtatgggaaggacttggacttggaggtgtgtcagatgtaggaaactggagcagggagaatgataacaagaaaatccttcttgggataggtggtggacattatgcacctcggcatgtggatgtagtattgaaagataatgtatgggtgggtcacctactttctggatattcgctgccaatggaagatccaaaccagtcaaaaggagaaaaaaatgtggagattggtggaacatggagacagtctataaaagctgcatatgaagccacttattctgcatttcctggtggtg

SEQ ID NO: 26959 - DNA, 447 bp, Glycine max
  Clone ID: LIB3051-038-Q1-K1-H7
cccacgcgtccgggcaaaaataccaagctgtcttatcctttggaaaaattcagctctgatatttctgggagaagctttcacaatggccgtttcatacagagaatgcgagaaaaggcttcgtctcttccaaatgtaaaattagaacaaggaactgtcacatctctacttgaagagaaaggaaccatcactggggtgcactacaaaatcaaaagtggacaagagttcacagcaaaggctcccctcaccatagtatgtgatggttgtttttccaacttgaggcgttctctttgcaatcctaaggttgacgttccctctcattttgttggtctggtcttggagaattgtaatcttccatatgcaaatcatggtcacgtcatcttaagtgatccttcacccgttttggtttatcccatcagtagcactgagattcgctggtttggttgatgt

SEQ ID NO: 26960 - DNA, 378 bp, Glycine max
  Clone ID: LIB3051-038-Q1-K1-H8
cccacgcgtccgggcaaaaataccaagctgtcttatcctttggaaaaattcagctctgatatttctgggagaagctttcacaatggccgtttcatacagagaatgcgagaaaaggcttcgtctcttccaaatgtaaaattagaacaaggaactgtcacatctctacttgaagagaaaggaaccatcactggggtgcactacaaaatcaaaagtggacaagagttcacagcaaaggctcccctcaccatagtatgtgatggttgtttttccaacttgaggcgttctctttgcaatcctaaggttgacgttccctctcattttgttggtctggtcttggagaattgtaatcttccatatgcaaatcatggtcacgtcatc

SEQ ID NO: 26961 - DNA, 423 bp, Glycine max
  Clone ID: LIB3051-032-Q1-K1-G9
atatctctatctctctctctcttcatatgaatgcaaacatggcatcttcaccaaccttaataccctttctcctcatcttcttcctcttccacttccaccgttcctcctccctccccctctccgtggagaaccccgaagatgacgtcatagtctcgtcgccgaagggaaccttcaccgcagggttcagccccgtgggggagaacgcgtactccttcgcgatatggttctctacgcaagcgacgacgaagaccgttgtgtggatggcgaaccgcgatcaaccggttaacgggaaacggtccacgctttcgctcctcaagacggtgaacctcgttttaaccgacgcgggacagttcgatgtctggtccaccaacacgctctcctcgaagacgcttgagctgcatttgttcgacaccggcaacctcg

SEQ ID NO: 26962 - DNA, 364 bp, Glycine max
  unsure (1)..(364): unsure at all n locations
  Clone ID: LIB3051-107-Q1-K1-E3
tgaacaacaaccacactctctacaaaattgatggtcccaccgacgagcgggtgccgcaatgggaggccatgaacggcggtgccaccaccgccaccttccgatccatcctcgacaagcccctcaaccagctcaccgaggatgacatttctcagctcactcgcgaagactgtcgcagattcctcaaagaaaaagggatgcgcaagccttcctggaacaaatcgcatgcgatccaacaggtcatttccctgaaagcgctgctggaaccttccgacgatgatactcctnctnctaccggcatgcaccaccggagtcatgctccttcccctacacctcaacctcaatctcaagtgaattcgactgaacc

SEQ ID NO: 26963 - DNA, 433 bp, Glycine max
  Clone ID: LIB3051-106-Q1-K1-G12
cccacgcgtgcgctctttggctttccaaagaaaatttattattgtcttttgcacaattcaggggcaaaaccggatctacttcttcaaccgcgtcattcatttcaaccttcaagctacggaagagcgatgaactcatgatattgattagcatctaaaaatgtttattcttcgtcaccatacaaatctcgctatagtcctcactatcttcatagcttgcacaacaagagcacaaaacctcaccacctgcaatggcaaatgcggggagcacacccttcagttcccttatggcttctcccaaggttgtccaatccagcttgactgttccaacgaccaagtccaacttcgcagcgaattcagcgaatctctggtccaaaacgtaacatacagcaacatattcgtaaatctgcctgcaaaatgcaaccgtaccatggaa

SEQ ID NO: 26964 - DNA, 393 bp, Glycine max
  Clone ID: LIB3051-111-Q1-K1-E11
cccacgcgtccgacagacttctaattccaactgcatctgccagatatttggagaatgggcttcagatgattgaattccttggaagagtagtgggtaaagctctatatgaaggaatattacttgattactctttctcccatgtctttgtacaaaagctattgggacgatatagctttcttgatgaattatcaacacttgatccagagctatacaggaaccttatgtatgtcaagaattatgacggtgatgtcaaggagctctctcttgatttcacagttactgaagaatcattgggcaaaaggtatgtggtggaacttaaatctggtggcaaagatatttctgtgacaaatgagaacaagatgcagtacatacatgcaatggcagactacaaac

SEQ ID NO: 26965 - DNA, 355 bp, Glycine max
  unsure (1)..(355): unsure at all n locations
  Clone ID: LIB3051-044-Q1-K1-H7
aagaaaagcacgttaaagattgtaataatttgtaaaaactatggctagcgatggcagcgaagagtttaggctagtgtcaccggcgttcagcaacgaggggaagttacctcggaactacactgacgagggccagggtgcgaaaaagaacatatcccctccgttggagtggtacaacctgccggaggggaccaagaccctcgccctcgtcgtggaggatatcgatggatccgattcagatgggcccatcatgccatggacccactgggtcgtcgcaaacatcccggccacggtgaagggcctgccggagggattctccggcaaggctgccgagatgggcggngattacgcgacgatc

SEQ ID NO: 26966 - DNA, 368 bp, Glycine max
  Clone ID: LIB3051-111-Q1-K1-E3
ggaggagtggcgttgccagtgacattcgcgtacccatgtttcatgtggcttaagacaaaggggcggaagaagtatagtgccatgtggtggctcaattggttcttggggacattgggagtggctttgagtgccatattggttgcggctagtttatatgtcatcattgatactggtgttaatgtgagctttttcaatcctcagtagtctcacatatagagtgggaaaatgtactaggaaaatgatgttgggaggtaattaattagtaagagaattgctaaggttttctttctttctttttttgagaaattcaaatttgtgaccccactttgtagttctaaaaaaaaaacaaaaatgcaaacatgcataat

SEQ ID NO: 26967 - DNA, 439 bp, Glycine max
  unsure (1)..(439): unsure at all n locations
  Clone ID: LIB3051-048-Q1-K1-H11
ggagaacgaaaccttcatatgcacggtccccatgtttcacatatacggcctggtcgccttcgccacggggcttctggcttccggctccaccatcgtcgtgctctccaagttcgagatgcacgacatgctctcctcgatcgagaggttccgcgccacttacctcccgctcgtgccgcccattctggtggccatgctcaacaacgccgccgctatcaagggcaagtacgatatcacgtcgctgcattcggtgctctccggtggggctccgttgagcaaggaggtcatagagggctttgtggccaagtatcccaacgtcaccatccttcagggttatggtttgacggaatccaccggcgttggggcctccaccgactccttggaggagagtcgaaggtacggcacggcggngctcttgtctccggccacccaggctatgatc

SEQ ID NO: 26968 - DNA, 423 bp, Glycine max
  Clone ID: LIB3051-107-Q1-K1-D3
cccacgcgtccgcccacgcgtccgattgcctttccatctccccttccgttcgcggcgccggaggtgtcaccgaccccaacaccgcccgctccaagggttacggcttcgttaagttttctgatgagaatgaacggaaccgcgccatgactgaaatgaacggcgtttattgctccaccaggcccatgcgtattagtgctgctacgcccaagaaaaccaccggtgcttatggtgcacccgccgcgcctgtgcccaaacctgtgtatccggttccggcctatacttcgcctgttgttcaagttcaaccaccggactatgatgtcaataatactaccatttttgttggtaatttggatcttaatgtgtcagaggaggagctgaagcaaaactctctgcaatttggggaaattgtttctgtcaaaattc

SEQ ID NO: 26969 - DNA, 406 bp, Glycine max
  Clone ID: LIB3051-050-Q1-K1-G8
gtgcgggttccaagcacgactaaaatcaccgtcatttttctcacaccgacagtttcaaaaggcaaaggaagagttcgcatgaatcatggtggagattcacgaagaaatcaacccctttgatcaagaagaaaatgaagacattggagaggaagaaatcgactatgaccagcttaagaagcggatgtggaaggatcggatactgctgcagaagatgaaggagaaacggcccaaagaagagccagtccaagaagcaaaacaagaagcatctaggcggaagaagatgtcaagagcgcaagactcggtcctcaagtacatgatgaagattatggaagtttgcaatgctcaaggttttgtgtatgggattgtccctgaaaagggaaagccagtgactggttcttctgacagc

SEQ ID NO: 26970 - DNA, 377 bp, Glycine max
  unsure (1)..(377): unsure at all n locations
  Clone ID: LIB3051-067-Q1-K1-H7
ctgagttctatcaatctgtgaaaattggcattgtacaatatatgatactgaagatgatgtgtgcaatagtggcaataattcttgaatcttttggggtttatggagaggggaagtttgaatggaaatatgggtatccttacttggcactagttcttaactttagtcagacatgggccctatattgccttgtacagttctatgctgttattaaagataagttgaaaccaatcaaaccattggcaaagtttctaacttttaagtcaattgtcttactgacatggtggcaaagtgtggctgttgcattactttcttatatgggagcttttaggggatcattggctcangagttgaaagcacgtattcaagactacatcatc

SEQ ID NO: 26971 - DNA, 463 bp, Glycine max
  Clone ID: LIB3051-077-Q1-K1-H2
ggcaagatgagtttgttaaaaagcaggattggaagaatcctttgagtgtgggaaaatgagtatgtacggtagggatccgtggggaggcccgctggagattcacgccaccgactccgccacggacgacgagcgcagccggaatctccaggagctggaccgaggcgctttagacgagacccaacagagctggctcttgggcgccggagaacagaaaaagaacaagaaaacctacgtagaccttggctgcatcatcgtcagccgcaagctcttcatctggaccctcggcaccctcgccgtcttcgccttcctctccgccttcatcactctcatcgtcaaaaccgtcccccgccaccaccacaagcccccccctcccgacaactacaccatcgccctccacaaggccctcctcttcttcaacgcccagaaatccggaaagctccctcggcacaacaatgtttcctgg

SEQ ID NO: 26972 - DNA, 374 bp, Glycine max
  unsure (1)..(374): unsure at all n locations
  Clone ID: LIB3051-063-Q1-K1-H11
ccggtcgtgcagaatcacctgaagcaggtttattttactctgtgttttgccgtggttgctgcggctgtcggggcttaccttcatgtcctcttgaacattgggggttttcttactacagtggcatgcatgggaagcagcttttggttactctccacacctccttttgaagagaggaagagggtgactttgttgatggccgcatcactgtttcagggttcctctattggacccttgattgatttggctattcatatcgatccaagccttatctttagtgcatttgtgggaacagctttggcctttgcatgcttctcaggagcagctttggttgcaaggcgtanggagtacctgtaccttggtggcttggttcttct

SEQ ID NO: 26973 - DNA, 447 bp, Glycine max
  Clone ID: LIB3051-108-Q1-K1-A12
ctggattgtccatccttctctggttgcactttgcttcttccatctttggaggttcaacagctctctttaagtttgagttgtactttgggcttttggtgtttgtaggttacattgtagtagacacccaagaaatagttgagagggcacacttgggcgatctggactatgtaaagcatgccttgaccttgtttaccgatttggttgcagtttttgtccggattcttgttattatgttgaagaattcggctgagaggaatgagaagaaaaagaagaggagagattgattttcttaccaatctgctcagttaacacttcaactcccttggactgtaatacttaaaacagctgtctatacagtgttgttcacttgttaagcttgctccaactgtgcagtttagtcgtttggttgctttatatcagtagtacactagtacatgttgacatgtt

SEQ ID NO: 26974 - DNA, 426 bp, Glycine max
  Clone ID: LIB3051-032-Q1-K1-E11
cggacgcgtgggcgacagagacaacatagctctcaaaggacttgcaaagttcttcaaggaatcaagtgaagaagaaagagagcatgccgagcagcttataaagtatcagaacattcgtggtggacgagtggtgctgcacccaatcacaagtcctccctcggaatttgagcattcggaaaaaggggatgccttgtatgccatggaactagctttgtctttggagaagttgacgaatgagaaacttctgcacgttcacagtgtggcagaacgtaacaatgatcctcaattggcagacttcattgagagcgagttcttgtatgagcaggttaaatcgattaaaaagattgcagagtatgtggctcaactgagattagttggaaagggtcatggtgtgtggcactttgatcaaaagcttcttcacgatga

SEQ ID NO: 26975 - DNA, 437 bp, Glycine max
  Clone ID: LIB3051-072-Q1-K1-G5
ctggtactgtttttccaagacagaggcggatgagcaggccttggactttgccaaaagaactggccttgatgtggtaagcatttgcccttcccttgttctcgggccaattttacagtcaaccactgttaatgcaagtagcctggctctcctcaaacttttaaaaggtgtcaactcaatggagaataagatccgttggatagtcgatgtacgagatgtagctgatgcaatacttttggcttatgagaagcttgaggcagaagggagatacatatgccattcacataccatcaagacacgggatatgctggagaaactaaagagtatatatcccaactacaaataccctgcgaagtatactgaagtggatgattacataagtttcagctcagagaaactgcaaaggttgggttggaaatacaggtcactggaggaaacac

SEQ ID NO: 26976 - DNA, 431 bp, Glycine max
  unsure (1)..(431): unsure at all n locations
  Clone ID: LIB3051-037-Q1-K1-E7
agaagatgaacacgaagttgtctgatgtatctgctgagccggagcatgtaactgaagattgtcagtctgatttctttccaatgcttcgttctggagcttgtactgatattggattccggtcaaatatggaagatgcatatgtttgtgttgacaattttatggaggattatggactcaagaaccatatagacggacccagtgctttctatggggtatttgatggacatgggggaaagcatgctgctgactttgcttgtcttcatctgccaaagttcattgttgatgacaaagatttccctagagatattgaaaggatagttgcttcagcatttctgcaagcagacaatgcctttgcagaagcttgctctctggatgccgcacttgcatctgggaccactgcattagctactctngttataggaagtttctga

SEQ ID NO: 26977 - DNA, 447 bp, Glycine max
  unsure (1)..(447): unsure at all n locations
  Clone ID: LIB3051-103-Q1-K1-H12
gcacaagtgagggaggttgaaggcggcgtgagaagcatgttggacatcaacctattcagggaggagaagggccacaaccctgaattcatccgcgaatcccagcgccgtcgtttcgccagcgtcgaagtcgtcgacgaggtcatcaatctcgacaaagaatggcgaaagcgtcaattcgagttggagaatctccgcaaagaatttaacaagatcaacaaggaagtctccaaactcaagcgtgctggcgaggatgcaactaagttcatcagtgaatcagaggaaaccaagaaatcgataggggagaaagaggttgaagttcgggaaactctgaatctcttgaattccaagttggaaactattggaaacctcgtncacgattccgttccaattagccaggatgaggccaacaatgttgtcgttagatcgtggggaagagaagagagtgga

SEQ ID NO: 26978 - DNA, 430 bp, Glycine max
  Clone ID: LIB3051-042-Q1-K1-E11
gccagaagaacctctgttattcgcgctctcactcacgacgttgatgaagtttacggcctctgtgatccagataaggataacctgtgcctctatggacatccaaatgaggcctgggaagtaactctgccagcggaggaagttccgccagagctcccggagccggctcttggaatcaattttgctagggatggcatgaaccgcagggactggctttctctggttgctgtccacagtgattcatggttggtttctgtggccttttaccttggggctcgtcttaaccgcaatgaaaggaaacgattatttagcttgatcaatgatcttccatctgtttttgaagttgtgactgacaggaaaccagttaaggacaagccaactgcggatagtggaagcaagtctaggggaagtgccaagagatctaccgatgggc

SEQ ID NO: 26979 - DNA, 366 bp, Glycine max
  Clone ID: LIB3051-043-Q1-K1-F10
aaaaaaaaaaaaaaaaaaaaaaaaagggcggcccggacgcgtgggcggacgcgtgggcggacgcgtgggtggccttttacctcggggctcgtcttaaccgcaatgaaaggaaacgtttatttagcttgatcaatgatcttccatctgtttttgaagttgtgactgacaggaaaccagttaaggacaagccaactgcagatagtggaagcaagtctaggggaagtgccaagagatctagtgatgagcaagttaaaagcaacccaaagtttgtagatgagggttatgaggaggatgaagatgagcataatgaaacactttgtggaagctgtggcggaaattacaatgctgatgagttttggatttgct

SEQ ID NO: 26980 - DNA, 441 bp, Glycine max
  unsure (1)..(441): unsure at all n locations
  Clone ID: LIB3051-113-Q1-K1-A8
ccgaggtaaccgcccccactttttttctaatgcagaatatttctctctctctctttccctgtttatcgtcctctttcagattcaccctcgttttccctctttcgcataaataaataaataaatataaacaccatgagcgttcctccgccgtctacggcggcgatgtggacgccgttcacggcagcgcagtggcacgagctggagcaccaggccctcatcttcaagtacctcaaggcgggtctctcggttccccctgacctccttctccccattcgcaagagcctccaattgatatcgtctcacccatcgatggggtattatgggaagaagatagaccctgaaccgtgtcggtgcatgagaaccgatgggaaaaagtggaggtgttcgagggatgcacaccctgacttcaagtactgcgaccgncatatgatacgacgtcgt

SEQ ID NO: 26981 - DNA, 403 bp, Glycine max
  Clone ID: LIB3051-064-Q1-K1-E7
ggacaatacaataagagtatggaaccttgaaaccttgcagtgtttacagacactaacagagcacacatctgttgtgatgtctgttctctgctgggaccaattccttttatcttgttcattggataaaacagtgaaggtatggtatgctactgaaagcggaaacttggaagtgacatatactcacaacgaagaaaatggtatacttaccctatgtgggatgcatgattcacaaggcaaacccattttgctgtgcgcttgcaatgataatactgtgcacctctatgatctgccatcatttgcagagagaggcaagatattgacaaaaaaagaggtacgagcaattcagatagggcctaacggcatattcttcactggtgacggtactggtgaaagtagagtgtgg

SEQ ID NO: 26982 - DNA, 271 bp, Glycine max
  Clone ID: LIB3051-066-Q1-K1-E7
cccacgcgtccggtttaagtctgcttgatcctacttatgcaagcaagtatataccaatcatggctagtgttagtgagcatcagccacctacttggccttcatactttatggatatcaatgtcttggcattcctcgttccagctggcattattgcatgcttttctcccctatctgatgcaagctcctttgtggtactttatattgttacgtcggtatacttttctggagtcatggttcgcttgatgcttgtacttgctccagcagcatgtat

SEQ ID NO: 26983 - DNA, 428 bp, Glycine max
  Clone ID: LIB3051-010-Q1-E1-G11
aatgatgcagcaccagcccgagctcatgttcgagacactcaagcaccgcgcgcaggagtatgtcagccacgacaacgcagcagcgcttctggctgctggccttgctcgcacctttgacagaatgccttatctgctgtctctgtcttcctttgtggctgacgatgttgccgctgctgttcctgctgctcaagatctgggggagcagtggtcttattaatggatgtgcttcaattcaaatagtctcgcactagtcatcattccctttgtttctgttgcttgcttggttgttcttcttcttcttgttgatcgtcgtggtcgttgaggtcttcaattttttttttattattattccgttttcgctgtttttagttttgtcctggatgcaatgcaggataaagacagggtcagtcagttattgttctctgcat

SEQ ID NO: 26984 - DNA, 466 bp, Glycine max
  Clone ID: LIB3051-070-Q1-K1-H6
cccacgcgtccgcccacgcgtccggggagaggctgcgcagatctactgcgagctggttcggctcggggcgaacatgcgagtcatcgatattggaggtggactgggcatagattacgacggttccaaatcttgtgactcagatatttctgttgagtacggtctcgaggagtatgctgcagcggttgttcacgcggttcagtgtgtgtgcgaccgaaggtccgtgaaacaccctgtcatctgcagcgagagtgggagagccatcgtgtctcatcattcggtcttgattttcgaggcggttggcaccagcagcacaaacggcggaggagctcccccggcattgtcagcgcattacctggcggaggagctgtcggaggactacggatatctctcggagctggcgttccgaggggactatgaaacgtgcctggtgtacacggaggagatgaaagagccgtgcgtggagcag

SEQ ID NO: 26985 - DNA, 279 bp, Glycine max
  Clone ID: LIB3051-044-Q1-K1-B4
aagagagagaaagtagagagagagacacacacaactcccacaattgcggtgcctaaccttaatttcaggacacttcgaagctaccaggaccaattgttgttgttcttccctttttgtgctttttgattcagagatttttggttttcgtttttttttttcacaaggagaaagttcggtgtctttaagttgaataacttgttgggacatatttgatttggcgctttttcttttggtgcttgcctcatgggaaacagtgaggaagagaaatctgttaaaact

SEQ ID NO: 26986 - DNA, 422 bp, Glycine max
  Clone ID: LIB3051-047-Q1-K1-D12
acgcgttcgactacgcgtccgctttccctcgatttttaagagagagaaagtagagagagagagaaacacaactgctttgccaaaccttaatttcatggcacttccaagctaacaggaccagttgttgttccctttatgtgttgattgattcagcgatttctggttttcggaacttttctttctttgttacaaggagagttcgatgtctttaagttgaataacttgttgggacatatttgactcggtgcttttcttttggtgcttgcctcatgggaaacagtgaggatgagaaatctgttaagactggaagcccttcttcttcacctgcaacaactgatcagaccaaccaacctaatattcatgtctatcctgattgggctgccatgcagtattatgggccaagagtcaacatttcaccatac

SEQ ID NO: 26987 - DNA, 468 bp, Glycine max
  Clone ID: LIB3051-068-Q1-K1-E7
gatgtctttaagttgaataacttgttgggacatatttgactcggtgcttttcttttggtgcttgcctcatgggaaacagtgaggatgagaaatctgttaagactggaagcccttcttcttcacctgcaacaactgatcagaccaaccaacctaatattcatgtctatcctgattgggctgccatgcagtattatgggccaagagtcaacattccaccatacttcaactcagctgtggcttcaggtcatgctccacacccatacatgtggggaccaccacagcctatgatgccaccttatgggccaccttatgcagcattttattcgcatggaggggtttatactcaccctgcagttgctattgggccacacttacatggtcaaggagtttcatcttcacctgctgttgggactcattcaagcatagaatcaccaaccaaattatctggaaatactgatcagggtttaa

SEQ ID NO: 26988 - DNA, 422 bp, Glycine max
  Clone ID: LIB3051-111-Q1-K1-D6
gattaagaactggaactacactgggttgattgatgcaatccacaatggtgaagggaaatgcgggactgccaaggtgttctgtgaagaggagctagttgaagcaattgccacagccacaggacacaagagagactccttatgcttcattgaggtgattgttcacaaggatgacaccagcaaagaattgcttgaatggggctcacgagtctctgctgccaatagccgtccccccaatcctcagtaaacttcagatgtcggcctatgattaaattgctgcaattgccctttagctctatgaaattgagaatcatttgagatgttgtccttgtaagaaatttacctttgttaatggcttgaaatatttatgcaaaactgagtccccacttgtttgtgtaaattctttcacttgagataaaaatata

SEQ ID NO: 26989 - DNA, 390 bp, Glycine max
  unsure (1)..(390): unsure at all n locations
  Clone ID: LIB3051-016-Q1-E1-H12
tcccantcccattcctaatcctcctttccctctcctctccgctcctccaattccccccaaactttctccctccgccgcttcgccgccgcctctctcgcttgccctccaccgccgccgccgcccctcgacgccatggcccagaaaatcggaaagtccacgcgccgccccggtgcctcctccaaggcccgcgtctatgccgatgtcaacgtcgttcgccccaaggaatattgggactacgagtccctcaacgtccagtggggggagcaagatgattatgaggtggtgagaaaggtgggtacggggaaatacagtgaggtgttcgaaggtgttcactgcaccgacggtgagaaatgtgtcattaagattcctgaaaccgtgaagaagaagaag

SEQ ID NO: 26990 - DNA, 423 bp, Glycine max
  unsure (1)..(423): unsure at all n locations
  Clone ID: LIB3051-025-Q1-K1-H5
ctttcccattcccattcctattcctcctttccctctcctctccgctcctccaattgcccccaaactttctccctccgccgcttcgccgccgcctctctcgcttgccctccaccgccgccgccgcccctcgacgccatggcccagaaaatcggaaagtccacgcgccgccccggtgcctcctccaaggcccgcgtctatgccgatgtcaacgtcgttcgccccaaggaatattgggactacgagtccctcaacgtccagtggggggagcaagatgattatgaggtggtgagaaaggtggttagggggaaatacagtgaggtgttcgaaggtgttcactgcaccgacggtgagaaatgtgtcattaagatcctganacccgtgaagaagaagaagatcaagagggaaatcanaatattacagaat

SEQ ID NO: 26991 - DNA, 441 bp, Glycine max
  Clone ID: LIB3051-069-Q1-K1-A11
cccacgcgtccggcgagaaagcgaagacagccatggcgtcgtttcttcaatcgtttgtggaggggaagaagaactggttcgccgctcagcacatgaaatccctctccaaacgcctccgcaaatatgggctccgatacgacgatttgtacgatccttactacgatctggatgtgaaggaggcgctgaatcggcttccgaaagaggtggtggacgctcgccacgcgcgtcttaaacgcgccatcgatctttccatgaagcacgagtacctccctgacaatctgcagtcaatgcaaacaccattcaggggctaccttcaggatatgctgactcttgtgaagagagagagagcagaacgtgaagcattgggaggtttgcccctatatcaacgatccattccttgagtgcatcaagtatttcatgaaggtattttgattgaagtgg

SEQ ID NO: 26992 - DNA, 303 bp, Glycine max
  Clone ID: LIB3051-044-Q1-K1-E1
ggaaccaataaatgaacaagcagtagcaaatatgtatgctgcaatgaggtctgagctcagccaaatttactccaaaataactgaactggagatggaagttagtgagcacacattggttaccaatgccattcaaccacttgaccaatctagacgatgctatcgtatgattggaggggtgcttgtggagagaaccatcaaagaagtcttgcctgctgtgcagcgaaataaagaaaggctctaaaaagttgtggcaaggcttaacgaggcgttggaaaagaagaaaaagggaatttctgagtttga

SEQ ID NO: 26993 - DNA, 436 bp, Glycine max
  Clone ID: LIB3051-096-Q1-K1-A8
gttcaaaataaatagttatcaaagttagttttttttttcttttccctaaagagttaggctctattggaccgtacgattaagatcgttcggtgaaattgatcacgctggtgccgcataccctagcgttcctgttattctattgtggctgaaacaaaacagtgttgaacggcgaggtagaacgacgacccccttctgcgttttgaccttcaatctcaatcatggccaaagctgaaggtggcaaggaaccaataaatgaacaagcagtagcaaatatgtatgctgcaatgaggtctgagctcaaccaaatttactccaaaataactgaactggagatggaagttagtgagcacacattggttaccaatgccattcaaccacttgaccaatctagacgatgctatcgtatgattggaggggtgcttgtggagagaaccat

SEQ ID NO: 26994 - DNA, 430 bp, Glycine max
  Clone ID: LIB3051-025-Q1-K1-D4
accacgcgtccgtccacgcgtccgttttcctttgcctgtgcgtgtgaaagatcgcagcaactccaccaccatcacaacaggaccgtaaccgatttccaaggttgagttatttgctggtctaacttaaccatactgtctattttgactcctgagattgctagtgagtcatggggcatagacatttatatagctcatctccaatatttgagggtgaacctgaccagaactggaatcatatgcatatggatcaacaatatgtgaaccatggtaggagtaccactttcagacaatggttctttaatttatcctttggaaaatatgtccatagatagcattctttttcattctaatggaaccactgccccagggtcaaccggttttccttcaacaggtctaacattgaagcaccccctcatcaaacagatgtatc

SEQ ID NO: 26995 - DNA, 390 bp, Glycine max
  Clone ID: LIB3051-015-Q1-E1-C8
agcccacgcgtccggctatctctcaggacaatggtcttgtgccaatcgttgagcctgaaattcttcttgatggagaccacccaattgagaggacgctggaagtggctgagaaggtctggtcagaagtctttttctatttggctgaaaacaatgtcctttttgagggaattttgctcaaacctagcatggttacacctggggctgaacacaaggaaaatgcttctccagaaaccattgccaaatatactctaatcatgcttagaagaagagttcctcctgctgtccctggaatcatgtttttgtctggtggacaatctgaagtggaagcaacactaaatcttaatgcaatgaaccaaagtcccaacccatggcatgtttcattctcatatg

SEQ ID NO: 26996 - DNA, 441 bp, Glycine max
  unsure (1)..(441): unsure at all n locations
  Clone ID: LIB3051-110-Q1-K1-C4
cccacgcgtccggagccatggtaccatttccctcataaaattctctcttcctttttggggtgtcctattccaagcttcaatcttttctctcttctcacagccttcttcactcacaggaggtgaagatgtcgactccggctaggaagagactgatgagggattttaaaagattgcaacaagatcctcctgctggcatcagtggggctccccaagacaataatattatgctttggaatgctgttatctttggcccagatgacaccccttgggatggaggtacgtttaagttgacacttcagtttacagaggattatcctaataaaccacctactgtgcgctttgtttctcgaatgtttcatcctaacatttatgcggatggcagtatatgcttggacattntacaaaatcagtggagccctatatatgatgtagctgcaattc

SEQ ID NO: 26997 - DNA, 434 bp, Glycine max
  unsure (1)..(434): unsure at all n locations
  Clone ID: LIB3051-103-Q1-K1-G3
caagaacataagggaaccacagcggcggtaacagaagaacaagcagagaatgggtcgagtgagaacgaagacggtgaagaaatcctctcggcaggtgatagagcgtcactactcgcgcatgaccctggacttccacacgaacaagaagcttctggaggaagtggcgataatcccgtcgaagaggctaaggaacaagatcgcggggttctcgacgcacctgatgaagcgcatccagaagggccctgtgcgcggcatctccctcaagctccaggaggaggagcgcgagagccgcatggacttcgtccccgacgtctccgccatcaacaccgaccacatcgaggtcgacaaggaaaccctcgacatgctccactccctcggtatcaacgacatccccggcatcacccaggttgatcctgtncctgttcagcagaact

SEQ ID NO: 26998 - DNA, 459 bp, Glycine max
  Clone ID: LIB3051-086-Q1-K1-D1
cggacgcgtgggtggcaaaccccggcagcagagcctgcgaaagctgattgggaattggcattggtagagactgctagcaatttgtcaaagcagaaggcagctttaggtggtgggttggatcctctattgttgactggtatgtatgatcaaggaatggtgaggcagcatgtcagcactacccaactgagtggtgggagtgcaagcagtgtggcattgccgggaccagggaagactccggttttggctctccccgccccagatggatctgtgcagccggttaatcaggatccatttgctgcatcgctgagtgttccaccaccatcctatgtgcaaatggctgatatggagaagaagcagcacttgcttgtgcatgagcagcatgtgtggcatcagtatgcaagggatgggatgcaaggtcaatctagcttggccaaactgaatggcgctggatactatgcc

SEQ ID NO: 26999 - DNA, 424 bp, Glycine max
  Clone ID: LIB3051-086-Q1-K1-G5
cccacgcgtccgcccacgcgtccgggttgaggtgagaagggaagggatgtggagggcaacttggagcacagcagcgattccctccgacgaggaacctagcgaatcctcctcctcgtcctccttctccacctctctcttcaatttctcttctggaaacccgagaatcgaggagacccgtggcctcatgcatctcttcccagacgacactccttctactctacccgttggacggaagcctctcgttagcgttgccggcgtcccaaatcacatgacctatgcggatttctgccagttctgtggttccttcattcagcacatgctagagatgcgcatagtcaggatggatgggatggaggatcagtacagtgttttagttcgctttgacgatcaagactccaccgacagcttctacaagcactacaat

SEQ ID NO: 27000 - DNA, 370 bp, Glycine max
  Clone ID: LIB3051-072-Q1-K1-A1
ttctaaggcaaattccacaagtgccccacaatcttgtgcaattgtgcctaatgaaacttgcgtacagaatgagcgtgagctgaaacgggagaggagaaaacaatctaaccgtgaatctgctagaaggtccaggctgaggaagcaggccgagactgaagaattggcacgaaaagttgatatgttaactgctgagaatgtgtccctgaagtcagaaataattcaactgactgaaggttctgagcagatgaggatggaaaattctgcattgagggaaaaactgagaaatactcaactgggacaaagggaagagataattttgagtagcatcgagagtaagagggctgcacctgtaagtacagaaaacttggta

SEQ ID NO: 27001 - DNA, 440 bp, Glycine max
  Clone ID: LIB3051-098-Q1-K1-B9
acccacgcgtccgcccacgcgtcttcagactttgaaatatcacttatttctctctggctgtgatttgcgattagggaaaggcgataacaaatctggtcctctctggtctaaaaaatgtcactgaaagagggttctgggtcatgggggctgctcaaggtctgcagaaactggtgtcacttactgttacttcctgcaggggaataactgatacaagcatagaagccattggtaagggttgcatcaacctgaagcagttgtgccttcaccggtgttgctttgtttctgacagtggattggtagcattcgccaaagctgcagtatctcttgagagcttgcagctggaggagtgcaacaggttcactcaatctgggattattgttgcccttgcaaacatcaaaaccaaattgaaaactctttcccttgtgaagtgcatgggagtc

SEQ ID NO: 27002 - DNA, 300 bp, Glycine max
  Clone ID: LIB3051-112-Q1-K1-H11
cccacgcgttcgatctctctcaaggattgccctcttgttggggatcatggagtgtgtaggctgttggcgtcggcttcgaacttgtcgagggttaagcttcagactttgaaaatcacagatttctctctggctgtgatttgccattatggaaaggcgataacaaatctggtcctctctggtctaaaaaatgtcactgaaagagggctctgggtcatgggggctgctcaaggtctgcagaaactggtgtcacttactgttacttcctgcatgggactaactgatacaagcatataagccatt

SEQ ID NO: 27003 - DNA, 431 bp, Glycine max
  Clone ID: LIB3051-096-Q1-K1-G5
gcgtcaagagaagatagatgagattatataccctgaaatatcttcatttctgatgctgaggagggataatgataggcatgtgaggcgagctgctgttttggctctcagcacatttgcacacaataagccaaatctcatcaaggggcttcttcctgatctgctgcctcttctatatgatcaaactattgttaagcaagagctcataaggacagttgatcttggtcctttcaagcatattgtggatgatggacttgaattgaggaaggcggcttttgaatgtgtagacacattactggatagttgccttgatcaagtgaacccgtcatcattcattgttccttatcttaaatctggtttggatgatcattatgatgttaaaatgccatgccacctgatactctcgaaactagctgacaagtgtccttctgcag

SEQ ID NO: 27004 - DNA, 394 bp, Glycine max
  unsure (1)..(394): unsure at all n locations
  Clone ID: LIB3051-016-Q1-E1-A2
tgacaaacccattagagagataccaaaaacttgggctaagcgagtctctaccgaaaacctacagatacccaattgcgtgcagagagctaagctttattctgagggaagcttttcatcaattccccaaaaatttgcaatccatcgtcttccaagacaccctctccgccttccgtctcctcccagaaatacagactcagagtgctgtttcagcagtccacttcctccttcagagtgtagaagcagcactaccaaagcaaaaaaagaatgtggctgtaacagaatttaagcatgcaatggttgctcataagaggcgctgtaaagctcaccaggtagagaaaggttcattgccattgccacaagatattcctgtgctcactttcagttttcntgatat

SEQ ID NO: 27005 - DNA, 449 bp, Glycine max
  unsure (1)..(449): unsure at all n locations
  Clone ID: LIB3051-084-Q1-K1-E11
gattactttaggcatttgcgagaaattgggggacaggatgctgatagagaagatgaaggggacagaaatggtgctcgaattgctagaaggcctcctggacaagttaatcgtaacatcaacaatggtgaggggaatggtgaagatgctggtggagtgcaaggaattgctggggcaggtcaagtaattagaagaaatgctgaaaatgttgctgcaaggtgggagatgcaagcagcacgacttgaggcacatgtcgagcagatgttcgatggtctggatgatgctgatggagcagaagatgttccctttgatgaacttgttggcatgcatggtccagtttttcatttggttgaaaatgcatttactgtgctggcaagcaatatgattttccttggtgttgtaatctntgtgccattttcattgngccgatcatactccattatctatcctgg

SEQ ID NO: 27006 - DNA, 413 bp, Glycine max
  Clone ID: LIB3051-018-Q1-E1-A2
aggcatgcttgagttgccaactttaagtttgtcaatttccgtgctgcttggttggttgcaattgcaagtgaacaattggctagtgtgtactagttttgaatcacaatggcagaggatgatggttacacgaaagatggaacagtcgattactgtggaaatccagctaataaaaaggaaactggaacctggaaagcctgcccctatatcttaggaaacgaatgttgtgagagattggcttattatgggatgagcacaaacctggtgctttatttcaagaaccggctaaatcagcatagtgctactgcttccaagaatgtctctaattggagtggaacttgctatatcacaccattgattggggcatatttggctgattcctaccttggaagatattggacaattgctgttttttc

SEQ ID NO: 27007 - DNA, 415 bp, Glycine max
  Clone ID: LIB3051-005-Q1-E1-G11
accacgcgtccggtccgtagtgaagtgttcccattatcatccggtgcattccacgtgtgtccgtgagtccccaccggcgccgtaaccactctccgccgtggcctccaccattaatggaccaaatcccctaaacatccttctcccaattccgaatccatggctcgctcttctctccacgcgctctccaccattctcttcctactacgcttgttgttatctccttccacacacgcccttaaactccccttccgagtcaacgatgttctccccgttctcccccacggaatctcctggcccctcctcaacaacctccacagcgccgtcgacttgctcccttccttcgtcggcgccgtcacgcccgacaacggttcccttcagtggaagggcgcctgcttttacgataatcaagcctccc

SEQ ID NO: 27008 - DNA, 426 bp, Glycine max
  unsure (1)..(426): unsure at all n locations
  Clone ID: LIB3051-035-Q1-K1-D12
gcccactaatgtgccaagctcgagagtctaaaattcaaatcctagcttgggttaacttagatatgagttctctatttttaattttccttatccttcttgttgccgatggggtccttgtccgaggaagtataaatattacagaaataagcttcgatcaaaactatgaggttacgtggggtgataatcatgttgtctccttaaaccaagggaaagaaattcagctcacaatggataactcttcaggatccggttttggatccaagatgtcatatggctctggactattccatttgaggatcaaagtaccagataggaattctgctggagttgtcacagcttactacttaacttcacaaggaagaagtcatgacgagttagactntgaattcttgggcaatagagaagggaagccatatagattacaaa

SEQ ID NO: 27009 - DNA, 394 bp, Glycine max
  Clone ID: LIB3051-050-Q1-K1-B12
aatgtgccaagctcgagagtctaaaattcaaatcctagcttgggttaacttagatatgagtgctctatttttaattttccttatccttcttgttgccgatggggtccttgtccgaggaagtataaatattacagaaataagcttcgatcaaaactatgaggttacgtggggtgataatcatgttgtctccttaaaccaagggaaagaaattcagctcacaatggataactcttcaggatccggttttggatccaagatgtcatatggctctggactattccatttgaggatcaaagtaccagataggaattctgctggagttgtcacagcttactacttaacttcacaaggaagaagtcatgacgagttagactttgaattcttgggcaataga

SEQ ID NO: 27010 - DNA, 436 bp, Glycine max
  Clone ID: LIB3051-088-Q1-K1-E11
cccacgcgtccgccactaatgtgccaagctcgagagtctaaaattcaaatcctagcttgggttaacttagatatgagttctctatttttaattttccttatccttcttgttgccgatggggtccttgtccgaggaagtataaatattacagaaataagcttcgatcaaaactatgaggttacgtggggtgataatcatgttgtctccttaaaccaagggaaagaaattcagctcacaatggataactcttcaggatccggttttggatccaagatgtcatatggctctggactattccatttgaggatcaaagtaccagataggaattctgctggagttgtcacagcttactacttaacttcacaaggaagaagtcatgacgagttagactttgaattcttgggcaatagagaagggaagccatatagattacaaa

SEQ ID NO: 27011 - DNA, 421 bp, Glycine max
  Clone ID: LIB3051-005-Q1-E1-G3
aggtggtaatacaagagaggtgcttcataaattcagtgtggatctcccaaagaaacatggaagaggagggcaatctgctctgcgttttgcccgtcttcgcatggagaagcgtcataactatgtgcggaagacggccgagcttgctacccagttctatatcaatcctgctaccagccaacccaatgtttctggattaatactggctggttcagctgatttcaagactgaacttagtcagtcagatatgtttgatcctcgacttcaggcaaaaatactcaatgttgttgatgtctcctacggaggcgagaatgggtttaatcaggctattgaactctctgctgaaattctgtccaatgtgaagtttatccaggagaagcgattgattggaaaatactttgaggaaatcagccaggatactggg

SEQ ID NO: 27012 - DNA, 427 bp, Glycine max
  Clone ID: LIB3051-093-Q1-K1-E11
ggcataatgagggagcttctacttgatttctatacaagttctggaaatagggagcccgagaatataatcatattcagggatggtgttagtgagtcccagttcaatcaagttttgaacattgaacttgatcaaattatcgaggcttgcaagtttttagatgaaaagtggaatcccaagtttttggtgattgttgctcaaaagaaccatcatactaaattctttcaacctggagctcctgacaatgttcctcctggaacggtaattgataacaaaatttgtcatcctcggaattatgatttctacatgtgtgcacatgctggaatgattggtactagcatgcctacacactaccatgttctgttagacgagattggcttttcacctgatgatctacaggagcttgtgcattcattatcatatgtgtatt

SEQ ID NO: 27013 - DNA, 297 bp, Glycine max
  Clone ID: LIB3051-036-Q1-K1-A2
cgacttggttatgtcggtgttgtaaatcgcagtcaggaggattttcaaatgaaccgcagtgtagaggatgctcttgatgctgaagagaattttttgcgcaatcgtcctgtatacaatggtttagcatatagttgtggtgttcctgaactagcaaagaagttgaaccagattctggcacaacatataaaggctgtgctacctgagctgagagcacgtataagcacttgactagttgctgctgcgatagagcatgcaggctatggagagatcaccgagtgcaatgctgtcatggtgcac

SEQ ID NO: 27014 - DNA, 457 bp, Glycine max
  Clone ID: LIB3051-106-Q1-K1-E7
ggggaagcagagcatatcattggagcctggtggtcagtttgaacttagtggagctcctgttgaaaccttgcatcagacttgtgctgaagttaattcccacctttatcaggttaaagctgttgctgaggaaatgggaattggatttttggggattggtttccagccaaagtggggaatcaaagacatacctataatgccaaagggaagatacgacatcatgaggaactacatgcctaaagttggctctcttgggcttgacatgatgttcaggacatgcactgtgcaggtcaatctggactttagttctgaagctgacatgatcaagaaatttcgtgcaggccttgctttgcagccgatagcaacggctctttttgcaaattcaccctttaaagagggaaagccaaatggttttgtcagtatgagaagccatatttggactgatactgataaggaccgc

SEQ ID NO: 27015 - DNA, 441 bp, Glycine max
  Clone ID: LIB3051-047-Q1-K1-A10
caagttcggtgattgacgatgtcgggcttgaagcttggcacgactgcttccatctacgttcgaacagcgaaaaccaaaagcaaacccctcttatcatggagaagcccaccccaacacccccgcagccgcaggtacatgctttccccttccaaaaatcaaatcctagggttcacacctagaaacaaattgccatgctattctttgggaagggctggtcttgtcacagattttggttcgtcagtgccccaacctcaacctcaacctcagccaaagccagagccagaaccagaacctgaaccttgcaaattgcttacgttgccaacaattgtgactctaggccgtgtcgccgatgtcccacttattgatgctactatctacatggacggttggcgtggaactgctgctactaccagcattttcgtcgctgcatcaatcactgat

SEQ ID NO: 27016 - DNA, 409 bp, Glycine max
  Clone ID: LIB3051-107-Q1-K1-E5
caataaaggaaaagaaaaaagagaaatagtactgggaagaaatgttcataccacatgggtagaagtcacagagcccgaggcagatgacgagatcactggggaccgggaagctcatatggcaagtgtgttggccagatacaaaagagccttgactgaaaggacaaagcaccatttaggctacccctataatttggatttcgattatggtgcactcacgcaacttcagcacttttccataaacaaccttggagatccatttattgaaagcaactatggtgtccactcccggcagtttgaagttggtgttttggattggtttgcccgattgtgggaactggagaaaaatgagtactggggctatataacaaactgtggtacagaaggcaatctccatggcatcctagttggg

SEQ ID NO: 27017 - DNA, 452 bp, Glycine max
  Clone ID: LIB3051-047-Q1-K1-A2
cttgggcgaaaccctaatctccccccttcacccttcgtacaccgcgtcgcatctacttccatcttctctcagatccaatctccgattcttgcttcactatcacaagcaaacatgtctgcggctttggatatgaccctcgaagatataattaagaacaacaagaaatcttccctcgccaacaccaggggccgaggccgagcctcgggacccggacccgctcgccgcctccccaaccgtgccgccaatcgcgccgcaccgtatgccgctgccaaggcgccggagacagcttggaaacacgatatgtacgcgaaccagccagtggccgcggcgtatccaggtggtcgagcgtcttccatcgaaacagggactaagctctacatttccaatttggattatggcgtttccaatgatgatattaaggaagtgtttcttgaagttggcgacgtgaaacg

SEQ ID NO: 27018 - DNA, 384 bp, Glycine max
  Clone ID: LIB3051-059-Q1-K2-F2
tattattcctcttccatctctattctccataacacccaccacaccacttgtgaaaaacgtcattaatatcacacactgacatgtatctctgagctccaatccaatacaagaccacaccttgtcgtgtcggacgaaccttggtgtctgtttttttttttttttttcattattttctccgaagagatgaggaagggcagaggtggaggcgcctcggcggcggcggtggatgtgaacggatccattttaaaggagcctcggtaccggggcgtgaggaagagaccgtgggggagattcgccgcggagatcagagacccgttgaagaaagccagggtttggttgggaaccttcaattctgccgaggatgctgctcgtgcctacgacgcc

SEQ ID NO: 27019 - DNA, 398 bp, Glycine max
  Clone ID: LIB3051-043-Q1-K1-A10
cccacgcgtccgcctacttctacttcccccctttgctctcaaaccttatcacctaatgcttatcctcccaaaccagaaaaccatgtctacctccgcagcttccctcgcactcccaaccctcactctccgaacccgacaacctctatgttctccccaatgcttctcctcgtccctctccctcacacccaacaacaaacccatttccatttctgctgtttttctcaaaccaacaactctgtcgtcgtctcgcttcgttccccacgtcgtggtgtcgtcggatttggggcaggaggaggacaccttcagtgacggagacggccccagcttctcccccgaccttaagctctttgtcgggaaatcttccgttcaacgtcgacagcgcgcagctcgcggagctc

SEQ ID NO: 27020 - DNA, 386 bp, Glycine max
  unsure (1)..(386): unsure at all n locations
  Clone ID: LIB3051-049-Q1-K1-A2
gcaacctttgctgtggtagtggaagcacacanagagcacaacgttacatatagtaactgtggcgagagtgggtagaatgaaacttggttcagaagggtttgaagtgtctatgcagggacttgggtgcatgggcatgtctgcattctatggtcctcctaagccagagcccgatatgattgcactcatccaccacgccgtccaaagcggtgtcacttttcttgacacttctgatgtctatggccctcacaccaatgaactccttctgggaaaggctttgaagggaggggttagaaagaaggttgaattggctaccaagtttggaatcagctatcctgaagggaaatgggagatccgtggtgatccagcatacgtgagggatgcttgtg

SEQ ID NO: 27021 - DNA, 401 bp, Glycine max
  Clone ID: LIB3051-014-Q1-E1-B12
agtacggcctcttgctccagtaattcctagacctagaactggggctgctttgtccagcacctcaagggttgaatttttggacacaaacaaggtagtggcaggtcctaagtttcaacctttgaggtgcaacctcagggagaggaattgggggctgaaagtgagtgcccctttgagggttgcttccattgaagaggagcaaaagagtgttgatttaaccaatgggactaatggggttgagcatgagaagcttccagaatttgaccctggtgctccgccaccattcaacttggctgatattagagcagccattccaaagcattgctgggtgaaggacccttggaggtccatgagctatgtggtgatggatgtgattgctgtcattggtttggctgctgctgctg

SEQ ID NO: 27022 - DNA, 401 bp, Glycine max
  Clone ID: LIB3051-043-Q1-K1-G11
caaagacacattctttcagcctcccttcaacacccttttggcccttcattcttccaagtctcaaatcgaagctcgaagacctgcgaagaacaaagggttgtttaaattctgtgtggttgttgttggaggttgaaatacaagttgccgcctcaagtgtgtgttaatcttaaatttcacaagcaagttgtatttttggagtattgtattatatgaccaaatattttagtgttttaggactagatattttgcttctggtggcaatttttctcttctccttctggttctcatcttttgtgttcttctttggttctcacctttctgaagatttttccatcttaattcctggaagcaccaagaaccttgaccaaataattaaccttttttttcttctaatttttctg

SEQ ID NO: 27023 - DNA, 407 bp, Glycine max
  Clone ID: LIB3051-008-Q1-E1-F1
aatctatcgaaagaaaagagaaagcgaatcggagaagaagaaaaatggggttggctttgttagcttcgaaggccgtgagacccacatcaaggctcctcttcggttcccaaaaccctagcaccttcctcctccgaaccatcgtctccaagccccagcttcggaatcccgaagccaccgccgcgcatccggagcagccgccgcctgccgatctcccgccgcggactccgctcgccggcgcccgcgtccacttcccaaaccccgaggactccatcgaggttttcgtggacggctaccccgtgaaaatccccaagggaatgaccgttcttcaagcctgccaagtcgccggcgtcgacatcccgaggttctgccatcacagcagactctccatcgccggcaattgccgcatg

SEQ ID NO: 27024 - DNA, 325 bp, Glycine max
  Clone ID: LIB3051-045-Q1-K1-G11
cacgacactgagcatcagcaatggcaagcgcaagtgttggtaaagaactgacgctgtagtcgtattggaggagctgttgctcccaccgagtccgaatcgctctcaaccatcaagggcttacatacgaatacaagcccgtcaatctgctcaagggagaacaatctagccctgagttactccagctcaatcctgttggttgtgtccccggtctagtggatgaccacgatgctctctatgactctttcaccattattatgtattcggaagatacagtatcctgacaatcctttgctccctcatgatatttacaagagagcaatcaatt

SEQ ID NO: 27025 - DNA, 479 bp, Glycine max
  Clone ID: LIB3051-075-Q1-K1-A8
cgctctcaacctcaaagggcttaaatacgaatacaagcccgtcaatctgctcaagggagaacagtctcgccctgagtttctccagctcaatcctgttggttgtgtccccgttctagtggatgaccacgttgttctctatgactctttcgccattattatgtatttggaagataagtatcctcacaatcctttgctccctcatgatatttacaagagagcaatcaatttccaggctgctagtgttgtttcctcaacaatacaacctcttcataacttgagtttactgaactacattggggagaaagttggccctgatgaaaaacttccttgggcccaaagtataattagaagaggctttaaagcactggaaaagctattgaaagaccacacaggaagatatgcaactggagatgaagttttcctggcagatattattttagcacctcagttacatgcagcatttaggagattcaacattc

SEQ ID NO: 27026 - DNA, 394 bp, Glycine max
  unsure (1)..(394): unsure at all n locations
  Clone ID: LIB3051-013-Q1-E1-F9
agcttagtccaaaacctcacacgactccctttgttgcgttgtgtttcctttcgccgaaaccctcgctcgcaacttctacagaatccctttcaccatggatattgaggaggacatccgttctttacagctcgattcagcagaagacaataatggggtggtaaatgcagaggatggaaggccanaagaagttgagaaatctgataagatggatgaagatccaaagcaggatgttgaggctgagccaaaggctgttgaggctgagccaaaagtgaaggataaggaggttccttctgttcaagatgaagaagatgaaccagagattgacaaaagacacttgaatgttgtntttattggtcatgttgatgctggtaagtctacaactgggaggcagata

SEQ ID NO: 27027 - DNA, 379 bp, Glycine max
  unsure (1)..(379): unsure at all n locations
  Clone ID: LIB3051-079-Q1-K1-F8
gtaaaaagatagagcgatctggaaaatcaataagttctcctccagggttgttttttcagcatgcangtcatagggataaagttgttgacttccattggaatgcatatgatccatggacgattgttagtgtgtctgatgactgtgaaagtactggaggagggggaacgttgcagatatggcgcatgagtgatttgatctacagaccagaagatgaggttttggccgagctggagaaattcaaatctcatgttgtggcgtgtgcttcaaagactgaaaaatgacatacgtcgtaggcaaaaatgagttatattattattgcttgtgtatttaatttaacatttgcngtggatgtttcatggcattttaaaaccattcatgt

SEQ ID NO: 27028 - DNA, 369 bp, Glycine max
  Clone ID: LIB3051-066-Q1-K1-G3
ctcagaccatgcctccgtggtctccatgaacttatttgtggcacttctttgtggttgtattgggcttggccatcttcttgaggagaatcggtggatgaacgagtctatcactgctcttttgattggtgtttgcactggcatagtcattttgctgtttagtggtggcaaaagctcgcatattcttgttttcagtgaagatcttttctttatataccttctgccgcctataatatttaatgccgggtttcaggtgaaaaagaagcagttttttgtaactttcatgaccataatgtggttggggcctttggccccataaaattctggacccatattacctttgggggcacaccaaatttttagaaggttgat

SEQ ID NO: 27029 - DNA, 441 bp, Glycine max
  Clone ID: LIB3051-067-Q1-K1-G3
ggtaaaaagacattgtattccaggggagtcacaatccagtttagaaatgatgaggagagtgcagccgtccattgtgtagttcaacagtggaagaaggaagtaaatgctcaagaaggaaatggacgaaatggaactattacaacttctaaaagcaaatttgatgataagatagagtcatcatcttctaaaatgtattttcattattatggacaacttctgcatcagcaaaatatgttgcaggactatgtgcggacagggacctatcatgctgctgttcttgagaaccgtactgatttcattggtcgtgttgtagttgatgtgggtgctggtagtggtattttgtcattatttgctgctcaggctggtgcaaaacatgtttatgctgtggaagcatctgaaatggcagaatatgcacggaaacttataactggaaacccaaca

SEQ ID NO: 27030 - DNA, 439 bp, Glycine max
  unsure (1)..(439): unsure at all n locations
  Clone ID: LIB3051-038-Q1-K1-A12
cagaaagcaacactggaaattaagagagctgatggtaatgaggccatcattgctgaagaggcatataaaggggtagattgcaaagatggaggcccttttggtgctgttatagttcataatgatgaaatagttgctagttgtcacaacatggttctgtgtaacacagacccaactgctcatgctgaggtgacagcaataagagaggcttgtaagaagcttaagcagatagaacttgcagattgtgaaatatatgcttcttgtgaaccttgccccatgtgctttggtgcaatccacctttctcgaataaagaggttggtttatggagcgaaggctgaggcagcaattgctattgngtttgatgatttcattgcagatgcactgcgaggtactggattctatcagaaagcaacactggaaattaagagagctgatggtaatg

SEQ ID NO: 27031 - DNA, 439 bp, Glycine max
  Clone ID: LIB3051-071-Q1-K1-C8
cccacgcgtccgccaagttaataggtctttatatttagttgttgacatcaacaaagtgatggaggaagttaatgtggttcaaaccaagaatggaactgttgcagtagcttctgcgtttgctggacataaggaagctatacagcaaagggaccacaaatttttaagaattgctgttgaagaagcctataaaggggtagactgtgaagatgggggtccctttggtgctattatagtatgtaatgatgaaatagttgctcgatgtcacaacatggttctgaggaacacagaccctactgctcatgcagaagtcactgttataagaaaggcttgtgaaaagttaaaccagatagaactttcagactgtgaaatatatgcttcttgtgaaccttgccctatgtgctttggagcaattcacctttaacgagttaaaaggttggtt

SEQ ID NO: 27032 - DNA, 424 bp, Glycine max
  Clone ID: LIB3051-038-Q1-K1-F1
aaaactagtattttcttagccacacgtactcttccacaatgtcttcctcaaagctcttcaccacttttcttttctcactaaacttagctctccttctccaaacatcttttggagccgaccctctcttccatttctgttcaaattctgagaacttcacagccaacagtccctatgaatcaaacttgaaaacactcatcaactcactcatctacaagaccccttcaactgggtttggtgttggctctgtgggccaataccaaaaccaaaaggcatatgcgcttgccctttgccgcggcgacgtgtcggccctagagtgcaaaacttgtgtctctgaggcacccaaagaaatcctcagtcgctgtccatacaacaaaggtgccatcaattggtacgactattgcatgttcaagtacttggacactga

SEQ ID NO: 27033 - DNA, 406 bp, Glycine max
  Clone ID: LIB3051-001-Q1-E1-A6
agctcacctttcccttggcgacgccgtgagaaacgaaaagcgaacaaaaaaaaaacagagtggggtgggaggcacacgcacaaacgcagagtcagaatctccaatcttcaatcggagacaaagctagctcgaacgaacgaagtagagtagtgtgctacgaaaaatgtggcggtgcatcgcacgtggtctccgtggacctgcttccaccagatccacctccaatcactcacttggatctcaactttctagattcttctctagtggggcgaactcctcgtacaccgtggtggatcatacttatgatgctgttgtcgtaggagctggtggcgcgggattgagagctgctattggactttcagaacacgggttcaatactgcttgtattaccaagctcttcccaactcgt

SEQ ID NO: 27034 - DNA, 409 bp, Glycine max
  Clone ID: LIB3051-001-Q1-E1-A12
cgacgtgagcggttcgctgcccgcgacgttgtgagaagtccactgaaccttatcattaagaagaaggagaagcccaaaatgggaacaatggagagcttgaagttcttggtgtcttcaaagtacatcagagatcttgccactttagtggttgcttatggaatcagcatcaatcttgttgaggttacctggaagtctaagctcaaagctcagtttcctagtcccaacgagtactcttcttttatgggtgacttctcaactgcaactggaattgccacattcacaatgatgcttgtcagccaatttatatttgacaagtatggatggggagttgctgccacgatcacccctacagtcctgcttctgacaggagttggtttcttttctcttatattgtttgggggcccgcttg

SEQ ID NO: 27035 - DNA, 410 bp, Glycine max
  Clone ID: LIB3051-001-Q1-E1-B6
agaagaaaacctaagcttagaattagaaacaaagaaaagaagaaaggaaagaattgatcgttgaaaatgcagggaggaaagaaagcgggagagtccattaaggaaacagctacaaacattggtgcttctgccaaggctggcatggagaagaccaaggccactgtccaagagaaggcagaaagaatgacagcacgtgatccggtgcaaaaggagttggcaacccaaaagaaagaggcaaagatgaaccaggcggagctggacaagcaggcggcgcgtcagcataacacggcggccaaacagtccgccaccacggctgggcacatgggacatggccaccacaccaccggaaccgggactggaaccgccacgtattccaccaccggggaatatggtcagcccatggggggccc

SEQ ID NO: 27036 - DNA, 388 bp, Glycine max
  unsure (1)..(388): unsure at all n locations
  Clone ID: LIB3051-001-Q1-E1-B8
gcgtagtgcaaatggggtagatgaaagcaaatattggcgtggtggctatggcgactatggtggttggcgtggtggtggttggcgtggtggctatggaggctggcgtggtggctatggtggtgggcgtggtggctatggtggctggcgtggtggctatggtggtgggcgtggtggctacggaggttggggtggtggctttggccctaacgaacataatgaggctgggattgatgctagccctcacaactaagaaggaaacttgctaaagcttatataggatttaagttatcgtaataaataaaacttcattggaagggtagttataatagatgtggagatcnttcttcgctctggtcatataaaggaataatacttttctattaatttc

SEQ ID NO: 27037 - DNA, 408 bp, Glycine max
  Clone ID: LIB3051-001-Q1-E1-B10
gaaattgtgaaggaagtttcttcctatttgaagaaagtaggatacaaccctgacaagattccttttgttcctatatctggttttgagggagacaacatgattgagaggtccacaaaccttgactggtacaagggtcctactctgctagatgcacttgaccagatctctgagcccaagaggccttctgacaagcccctcaggctaccccttcaggatgtgtacaagattggaggaattggaactgtgcctgtgggacgggttgagactggtgtcttgaagcctggaatggtggtgacttttgcaccaactggactgacaaccgaagttaagtctgtggaaatgcaccatgaagctctcacagaggctcttcgcggtgataatgttggattcaatgttaagaatgttgct

SEQ ID NO: 27038 - DNA, 378 bp, Glycine max
  Clone ID: LIB3051-001-Q1-E1-D6
agcccacgcgtccgctgaaaatgagttccaaggttttgcttgttctacttatgttcttggccactatacttctgatctcctctgaggttgcacccgatgatgcatacgagaattttgacaaaatagatgggaagcctagtgcagatggggtagatgaaagcaagtattggcgtggcggctatggtggcggctatggtggtggttatggaggtgggcgtggaggctatggaggtgggcgtggaggctatggagggggacgtggtggatatggcggcggacgacgtggctatggtggcgggcgtggtggctatggcggcgggcgtggtggcgggcgtggtggctatggtcctaatgaacataacgatgctggggttgatg

SEQ ID NO: 27039 - DNA, 400 bp, Glycine max
  Clone ID: LIB3051-001-Q1-E1-D10
cccacgcgtccgcccacgcgtccgcccacgcgtccgcccacgcgtccgcccacgcgtccgcacacaactactacaagtacttccctacaagcagaaccaacaacaactatggcacgttatcaaaagcactacgatgatcatggtcacaaggttgacgagtatggcaacgttgagaagcacaccgacgaatacggcaacccagtacatgctgctactgtcacctatgtagccaccagaactgctgctggtggttacagtgatgacattaagaggcaacatgataccaccaatgcctacggagtagacactggtagacagcattctagtggtggctacgatggagacactaatagacatcaaggaactactggtggctatgatgctgacaccaatagacatc

SEQ ID NO: 27040 - DNA, 404 bp, Glycine max
  unsure (1)..(404): unsure at all n locations
  Clone ID: LIB3051-001-Q1-E1-E1
agcccaagcgtccgcccacgcgtccgatttcctctcagaaccctcgatcactcccacgcgctcctatatcctctccttcaccgtcgctctctccaacgatcacaacaacatcgtcatcccatggcaaacgccgcatctggtatggcagtccatgatgactgcaagttaaggtttttggagctgaagacaaagaggacacaccgtttcatagtttttaagattgaggagcagcagaagcaggtcattgtggagaagcttggtgagccagcccaaggctatgaagatttcactgccagccttcctgctgatgagtgccgttatgctgtttatgattttgagtatctgactgaagggaatgtcnctaaaagcagaatttttttcattgcatggtcncctgacacatc

SEQ ID NO: 27041 - DNA, 387 bp, Glycine max
  Clone ID: LIB3051-001-Q1-E1-F5
agaaaagctcgtggaattgctagcaatggcgaggatcaaggtttacgagctgaggcagaagacgaaggctgatctgctgaatcaactgaaggacctgaaggcggagcttgccttgcttcgtgttgctaaggtcaccggtggtgcccctaacaagctttccaagataaaggtggtgaggttgaacattgcccaggttttgacggtgatttctcagaagcagaaggctgcgttgagggatgcctacaagaataagaagtacttgcctctcgatctccgccctaagaagaccagggctattcgcaggaggcttactaagcaccaggcatcattgaagacagagagggagaagaagaaagagttatatttcccactaaggaaatatgctat

SEQ ID NO: 27042 - DNA, 404 bp, Glycine max
  Clone ID: LIB3051-001-Q1-E1-G10
agcccggatggttcggttctccgtgctcagttacctggcaggccaactcgtgattctctatttgtggatccagccagagataggactagcttgctcaaaatatggaacctgaacaaatgctctggagttgttggtgtatttaactgccaaggtgctggatggtgcaagatagagaagaaaacccgcatccatgatacatctcctggtacactcaccgcctctgtctgcgcctctgatgttgacctcatcacacaagtagcaggtgctgaatggcttggagatacaattgtttatgcttacagatcaggtgaggtgattcggctaccaaaaggggtttcaattccagtgacactaaaagttctggagtttgagcttttccacttctgtccaatccaagaaatagc

SEQ ID NO: 27043 - DNA, 402 bp, Glycine max
  Clone ID: LIB3051-001-Q1-E1-H5
gcttcttgttgttggaaagaaaccctagcaagcggaacaatggcagacgttgaggtcgatgtggcggctgcagcagcagcagggcagccgaagaagagaacgttcaagaagttcagtttcaggggcgtggatctcgatgcgcttctggacatgtccaccgatgaactcgtgaagatgttcagtgctcgcgcacgtagaaggttccagagaggcctcaccagaaagcccatggccttgatcaagaagcttcgcaaagcgaaaagagaagctccaccaggtgagaagccagaacctgtccgcacccacctccgcaacatgattattgtgcctgagatgattggtagcattattggagtgtacaatggcaagacctttaatcaggttgaaatcaaacctgagatg

SEQ ID NO: 27044 - DNA, 376 bp, Glycine max
  Clone ID: LIB3051-001-Q1-E1-H6
atctgagggagaggagagcattttcatttttcaacttgagagaagaagagaaggggaaaaggaaaaaaaggcaaaatgggtaaggatctgagcgatgagcaagtgtcttcaatgaaggaagctttctctttattcgacacagacggtgacggtcggatcgcgccgtcggagctggggatcctgatgaggtctctgggagggaacccgactcaggcccaactcaaagccatcgtggccgaagagaacctcacggctcccttcgacttcccccgattcctcgatcttatggccaaacacatgaaacccgaacccttcgatcgccaactccgcgacgccttcaaggtcctcgacaaggactccaccggcttcgtcgccg

SEQ ID NO: 27045 - DNA, 408 bp, Glycine max
  unsure (1)..(408): unsure at all n locations
  Clone ID: LIB3051-001-Q1-E1-H10
gctgatgacccttggttgcctccatgagaagcatcttgaggagcttcttgaatattttcgctttgggctgtggtgggttccccttggggttgcttcttcaaatggtcatggatctggtttgcacacatttgtcctatatttgggaccccacataacactgtttacattaaaagccgtgcaatgtggccgagttgatttgaaaagtgctccatatgatacgacacaattaagtagaagtgcttcttggcttgataaaaactgttctgagtttgggccaccattattccagtcagtatatgattcacaggttccgcttagcatcattttgcctcaagttcagctggaggctattctatggggtattggaacagctatangggagcttcctccttactttatctccagggc

SEQ ID NO: 27046 - DNA, 448 bp, Glycine max
  Clone ID: LIB3051-002-Q1-E1-A5
caaactagaagtattattattcttccatttccattaaaaagaaaatatcataaatgggtattttcacattcgaggacgaaatcacctcccctgtggctcctgctactctttacaaagctctagttacagatgccgacaacatcatcccaaaggctcttgattccttcaagagtgttgaaaacgttgagggaaatggtggccctggaacaatcaagaagataactttcgttgagggtactaactcactcactaatcactagattcatttcattattattccatctctacctatctatatgttgcaatgtatgaatggacagatggagaaaccaagtttgtactgcacaagatagaagcagttgatgaggcaaacttgggatatagctacagcgtagtgggtggtgctgcgttgccagacacagcggagaagatcacattccactccaaa

SEQ ID NO: 27047 - DNA, 391 bp, Glycine max
  unsure (1)..(391): unsure at all n locations
  Clone ID: LIB3051-002-Q1-E1-A11
ccgtccgaccacgcaaccggttcaggttccgcctcagaatgcgatgccaggtcccaacggtggtggtggtgccggtggtgctggaaaccagttcgtaacgacgtcgctttacgtcggagatctcgacccgaacgtcacggacgcgcagctctatgacttgttcaaccaattggggcaagtcgtgtccgttagggtttgcanggatttgaccagccggagatcgctcggttatggttatgtcaactttagcaaaccgcaagaagctggtaaagcaatggatggtctgaacttcaatcctcccaataacaaggccaaccgtaataagtaatcgcaacgtgatcccagtatccgttaaagtggacaaaggaatatatttaataagaatttgggt

SEQ ID NO: 27048 - DNA, 402 bp, Glycine max
  Clone ID: LIB3051-002-Q1-E1-B11
agaaaacctaagcttagaattagaaacaaagaaaagaagaaaggaaagaattgatcgttgaaaatgcagggaggaaagaaagcgggagagtccattaaggaaacagctacaaacattggtgcttctgccaaggctggcatggagaagaccaaggccactgtccaagagaaggcagaaagaatgacagcacgtgatccggtgcaaaaggagttggcaacccaaaagaaagaggcaaagatgaaccaggcggagctggacaagcaggcggcgcgtcagcataacacggcggccaaacagtccgccaccacggctgggcacatgggacatggccaccacaccaccggaaccgggactggaaccgccacgtattccaccaccggggaatatggtcagcccatgggg

SEQ ID NO: 27049 - DNA, 353 bp, Glycine max
  Clone ID: LIB3051-002-Q1-E1-B12
accacgcgtccgcttttgctttgagatggcaaagtcgaagaatcacacagcacacaatcagtcctacaaggcccacaaaaacggcatcaagaaacccaagaggcatcgccacacttccaccaaagggatggatcccaagtttctgaggaatcacaggtacccaaggaaccacaccaggaaaattggtgaaacagccaccgaggaaaattgaaatggcactttctaacggacccattagggtttttatacgcacattttttgggaaaaactttgtgtgaactcaactttcaccagtataattaatttgtttacagaaaatgcagtacttatatcccaaacaaaaaacaagcaac

SEQ ID NO: 27050 - DNA, 434 bp, Glycine max
  unsure (1)..(434): unsure at all n locations
  Clone ID: LIB3051-002-Q1-E1-D11
ccacgcgtccggataaacttctccactatgcactcatcgatctctccaaaaagcatggccccttattctctctctccttcggctccatgccaaccgtcgttgcctccacccctgagttgttcaagctcttcctccaaacccacgaggcaacttccttcaacacaaggttccaaacctctgccataagacgcctcacttacgacaactctgtggccatggttccattcggaccttactggaagttcgtgaggaagctcatcatgaacgaccttctcaacgccaccaccgtcaacaagctcaggcctttgaggacccaacagatccgcaagttccttagggttatggcccaaagcgcagaggcccagaagccccttgacgtcaccgaggagcttctcanatggaccaacagcaccatctccatgatgatgctcggc

SEQ ID NO: 27051 - DNA, 289 bp, Glycine max
  Clone ID: LIB3051-002-Q1-E1-E3
acagattccaaaccaggattgaggaagccagtgttcaccaaggtcgatcagcttcgtccagggaccagcgggcacactttaactgtgaaggtggtcgatgctaagatggtgatgcagaaaggtcgttctgatggtcctcaatcccgccaaatgcgaattgctgaatgtttggttggtgatgagactggaatgatcatattcactgccagaaatgatcaagtggatatgatgaaagacggtgctactgtgaccctgcgcaatgccaaaattgacatgttcaaaggatcaa

SEQ ID NO: 27052 - DNA, 381 bp, Glycine max
  Clone ID: LIB3051-002-Q1-E1-E9
gagaaacatggcttccttaagctccttagtgctgctccttgcagctctaattctatcccctcaagttcttgcaaactatgagaatcccccagtgtacaagcctcccactgagaaaccaccagtttataagcccccagttgagaagcctcctgtttacaaacctccagttgaaaaccccccaatttataagcctccagtagagaagccaccagtgtacaagcccccagttgagaaacccccagtttataagcccccagttgagaaaccaccagtgtacaagcccccagttgaaaaaccaccagtgtacaagcccccagttgaaaagaccccagtgtacaagcccccagttgagagaacaccagtgtacaagcccccagttga

SEQ ID NO: 27053 - DNA, 204 bp, Glycine max
  Clone ID: LIB3051-002-Q1-E1-F1
gcgtccgaatcctatatcttttatgagagctacaggacaaaagccacaacgcatcatattttatatggatggtgtgagtgatggacagttttatcaggttctactgtttgagcttgatgctattcgaaaggcatgtgcatccctggaacccaattatcagcctcctgtgacttttgtggtggttcagaagcgtcaccacacaag

SEQ ID NO: 27054 - DNA, 399 bp, Glycine max
  Clone ID: LIB3051-002-Q1-E1-G12
ttccattctctctgtgtatttccctacctctcccttcaagatgcagatcttcgtcaagaccctcaccggcaagaccatcacccttgaggtggaaagctctgacaccatcgacaacgtcaaggccaagatccaggacaaggaaggaatccccccggaccagcaacgtctcattttcgccggaaagcaacttgaggacggccgtacccttgctgactacaacattcagaaggagagtactcttcacctcgtcctccgtctccgtggtggcatgcagatcttcgttaagacactcaccggcaagaccataaccctagaggttgaaagctccgacaccatcgataacgtcaaggccaagattcaggacaaggaaggtatccccccggaccagcaacgtctcat

SEQ ID NO: 27055 - DNA, 402 bp, Glycine max
  unsure (1)..(402): unsure at all n locations
  Clone ID: LIB3051-002-Q1-E1-H10
ctaaaatagagactgtatttatcctgagggaaattgaggggcanggtgataataacagtaacagggatgagtgatatcatttcatttcagagggattaattattgttttatttttaagtgtggagtgctgtgcaggtcaaggcccttttacttgttcgtccggttgttcccatcttctctctcgtaccaatcaaatcacacttttgtgttgtgttgggaaaccctaaaccccgttttcggtgagatcgagatcgatcgaacatggatgaggagtacgatgtgatcgtgttgggcacgggtctcaaggagtgcattctcagcggtcttctctccgtcgatggcctcaaagttctgcatatggatangaacgactattacgggggagaatccacttcgctcaat

SEQ ID NO: 27056 - DNA, 458 bp, Glycine max
  Clone ID: LIB3051-003-Q1-E1-A7
acttgttcttcacatcatcctcatcatcttcttcaatcagttgactcttcgttcctccctctattctttcggatggagcccatggacatcgttgggaaggccaaggaagacgcttctcttcctaaagcgacaatgacgaaaattattaaagagatgttgcccccggacgtgcgtgtcgccagagatgcacaggatttattgatcgagtgttgtgtcgagtttataaaccttgtctcgtcagagtccaatgaagtctgtaacaaagaagaaagaaggacgattgcaccggagcacgtgttaaaggctttaggggttcttggatttggcgagtacattgaggaagtttatgcagcatatgaacaacacaagttggaaacaatgcaggattctttaaaaggtgcaaagtggagcaacagagctgagatgactgaggaagaagcattggctgaacagcaaag

SEQ ID NO: 27057 - DNA, 316 bp, Glycine max
  Clone ID: LIB3051-003-Q1-E1-B1
tcagcgtcgtcactgtttgtgtgtgtatcacgtgcagctaccaacgatggtgaagggtcgtcaaggagagcgcgtcagactctacgtgaggggtacaatccttggatacaaaaggtccaagtccaaccagtacgcagacacatccctgatccaaattgagggagtgaacaccacagaagaagtacgatcgtatgctggcaacaaaatggcctatatctacaaggctaaggtgaaaaaggatggaagccattacccctgcacattgggcaaggttaccaagcctcacggcaactcacctgagcacgttttaaatgct

SEQ ID NO: 27058 - DNA, 418 bp, Glycine max
  Clone ID: LIB3051-003-Q1-E1-C9
cccacgcgtccgactagtcatcataatattatatgctggttctagggcaactactagtccttgctatggctcatacaagctctatatggcaactcctagtggagaaacttccatcttgggtatgatcttctctggttctacagctttgacctggtttccataagctgatgcatgcactccaagtgctgctctacctgatggatcaaggttgttagaccaagcagcatcccactcaacagcttttgctgtgctacatgcaacacttggtcctccaggaacagtgagccttgctgagttctgagggaagaacctctcaaatatcattctatagtggtatgcttcattggtggttggtgtgttgaaggggaaaatgttggcagcattgaccatcagtctgtcagttacaatgtttcccagg

SEQ ID NO: 27059 - DNA, 328 bp, Glycine max
  Clone ID: LIB3051-003-Q1-E1-E1
gacacagctgcgaattagttcatcctttcccaagccagccaagcgaggcatgctctcaatttttgaaattacttgcatagatagagcatcatggccatgatgaaacgtgctgcttcctcttcggttcgctcgctactttcctcatcctccaccttcaccagaaaccttcatgcctcaggtgaaaagaagaaaattgtggcggtgttctacaaagggaatgggtatgctaaattgaaccccaatttcgtggggtgtgttgatcgagcattgggtatacgtgagtggctggaatcacagggtcatcagtacattgtcactgatgacaaag

SEQ ID NO: 27060 - DNA, 324 bp, Glycine max
  Clone ID: LIB3051-003-Q1-E1-E5
acaattgccatttcaatccccagtttcttcttcaacgtcctcttacgagcagatcccaattctccttcccagtttcaaaccctaattccctcattcccatggcctcagaagagcccactgtcgcggtggaacccgctcgcgaacctgccaccgccgagcctcccccggaggagaaggaggagcccaaacctgaggccagggctaagaaaaccaaggaacccagacctaaaaaggtttccagagcacgcaagcctcccacgcatccttcctacgaggagatgattaaacacgcaagtacctcgctgaaggagatagacggttcga

SEQ ID NO: 27061 - DNA, 358 bp, Glycine max
  unsure (1)..(358): unsure at all n locations
  Clone ID: LIB3051-003-Q1-E1-G1
attccaatatattccattctctctgtgtatttccctacctctcccttcaagatgcagatcttcgtcaagaccctcaccggcaagaccatcacccttgaggtggaaagctctgacaccatcgacaacgtcaaggccaagatccaggacaaggaacgaatccccccggaccagcaacgtctcattttcgccggaaagcaacctgaggacngccgttacccttgctgactacaacattcaaaaggagaatactcttcagctcgtcctccgtctccgtggtggcatgcagatcttcgttaagacactcaccggcaagaccataaccctagaggttgaaagctccgacaccatccataacgtc

SEQ ID NO: 27062 - DNA, 340 bp, Glycine max
  Clone ID: LIB3051-003-Q1-E1-G2
cccacgcgtccgcccacgcgtcggcccacgcgtccgcacaaactagaagtattattattcttccatttccattaaaaagaaaatatcataaatgggtattttcacattcgaggacgaaatcagctcccctgtggctcctgctactctttacaaagctctagttacagatgccgacaacatcatcccaaaggctcttgattccttcaagagtgttgggaacgttgagggaaatggtggccctggaacagtcaagaggataactttcgttgaggatggagaaaccaagtttgtactgcacaagatagaagcagttgatgaggcaaacttgggatatacctac

SEQ ID NO: 27063 - DNA, 368 bp, Glycine max
  Clone ID: LIB3051-003-Q1-E1-G7
atttctggcgtaggaggtgttctcttcaaggtttatatagttggtgatgctataaaggttgtaaggcggttttcgttacctgatgttagcaactgggaactctccaaagatgctggtatagatcgctttccaagggtttcttgtgctgcagcttctgcggatgatgcagatctggatcctactgttgccggtaagtttgtattcttgaccaaggctttctatagacctttacgttttcagacttaagacaggttttctcattctcccccctcgggaaggggaaaatagcatccttagaaaccaggtcctgtcgctgccattcacaaacataagaaaaacgagttcctggttggttcgcctgagttgat

SEQ ID NO: 27064 - DNA, 411 bp, Glycine max
  Clone ID: LIB3051-003-Q1-E1-G9
accacgcgtccgccctttctttctttccgatcccaccgtcaaacttgtcattctatatgctttgcagggtccattgaatatgtctccgtcgttggatcttcctcccaagggtggcttcagttttgatctatgccgaagaaacgcaatgcttcaaaacaagggcctcaaagccccaacctttctcaaaactggcaccactattgtcggtttagttttccagcatggtgtcattcttggtgctgatactagggcaactgaaggacctatagtggctgataaaaactgtgagaaaattcattatatggcacccaacatatattgctgtggagcaggcacaactgctgatacagacgctgttacagacatggttagctcaaagctgcaattacatcgctaccatactggtcgaga

SEQ ID NO: 27065 - DNA, 432 bp, Glycine max
  unsure (1)..(432): unsure at all n locations
  Clone ID: LIB3051-003-Q1-E1-G11
gagaaaagttagggttcacaacttttccttttccttttgcttgcgaatctgaatcaaataatcaatcatccattcattattcatcatgtcgtcggcgaagaaaatcacgctgaagagttcggacggcgaggctttcgaggtggaggaggcggtggcgctggagtcgcagacgataaagcacatgatcgaggacgactgcgccgacagcggcatccctctgccgaacgtgacgagcaagatcctggcgaaggttatcgagtactgcaagaagcacgtcgaggccgcgaatcccgaagacaaaccctccgaggacgatctcaaggcctgggacgctgaattcgtcaaggtcgaccanngcacgctcttcgatctcatcctggctgctaactacttgaacatcaagagcctgctggaccttacatgtcaaactgt

SEQ ID NO: 27066 - DNA, 351 bp, Glycine max
  Clone ID: LIB3051-003-Q1-E1-H2
aattttactttgtgaaacagggtaactttgaccttgttggaaacaaccttcccgtcttctttgtacgtgatggcatgaagtttccagatatggttcatgctcttaaacccaatcccaagaagcacatccaggagaattgggggatccttgacttcttctctcactttccagaaagccttcacatgttcacctttgtagttgatgatttgggtgtcgcacaagattacaggcatatggatggttttggagttaagacatacacactgatcaacaaggctgggaaagcagtgtatgtgaaatttcactggaagaccactagtggtataaagtgtctattggaggaggaggcca

SEQ ID NO: 27067 - DNA, 441 bp, Glycine max
  unsure (1)..(441): unsure at all n locations
  Clone ID: LIB3051-004-Q1-E1-B5
gttggtgtagctagcgagggagggatatagggggaagcgtttattcattcattaagatggcatcggagcttcaattgcccccaggcttcagattccatccaacggaccaggagctggtgttgcactatctctgccgtaaatgcgcgtcgcagcctatcgccgttcccatcatcgccgaaatcgacctctacaaatacgacccctgggacctacccggattggcttcctacggagagaaagagtggtacttcttttcaccacgggaccggaaatacccgaacggttccaggccgaaccgggcggcgggaaccggttactggaaggcaaccggggcggataagcccattggccaccccaaaccggttgggataaaaaaagctttggtgttttacgcanggaaagctccgaaaggggacaagagcaattggatcatgcacgagt

SEQ ID NO: 27068 - DNA, 405 bp, Glycine max
  unsure (1)..(405): unsure at all n locations
  Clone ID: LIB3051-004-Q1-E1-D12
cccacgcgtccggatgaaggcattaagctagttgttgaggcgatatgcgctggaatatttaatgacctaggaagtggaagtaatgttgacgtttgtgtgataaccaagggacacaaggatatctcaggaaccaccttctaccaaatcctcgtacctatgtcaatccaaaaggctttgatttccccaaaaagacagaggtcctcttaacaaagattaccccgttgaaggagaaggtggaagtgattgaaggagatgctatggaagagtaacaatcgttccaaaaaatatttggtgtttgagtataaaacttgattgtgcaatggctgtgatatttagttattgtactttcacaactttggctttcattaccanaaattatgtgaatttaattagattgtgcaaaaa

SEQ ID NO: 27069 - DNA, 314 bp, Glycine max
  Clone ID: LIB3051-004-Q1-E1-E2
attgttaacgttacatggaagtccaagctcaaagctcagtttcctaatcccaatgagtactcttcattcatgggtgacttctctaatgcaactggaattgccacattcacaatgaagcttgtcagccaaattatatttgacaagtattgatggagaattgctgccacaatcacccctacagtcctgcttttgacaggaattggattcttttcgcttacattgtctggaggcccgcgtgcaactggacctgcaagtccttgaatgaatcacatctaactgcagtataagtgggtgctttgcataacatatttatc

SEQ ID NO: 27070 - DNA, 370 bp, Glycine max
  Clone ID: LIB3051-004-Q1-E1-E12
gaagatggtgtcaggttctggaatctgcgcaaagcgagtggtggtggacgctcgccaccacatgttgggtcggctagcgtccatcgtggcgaaagagcttctgaatgggcagaaggttgcggtggtgcgctgcgaagagatttgcatctccggcggtctggtgaggcagaagatgaaatacttgagattcctccgcaaacgcatgaacaccaaaccctcccatggccctatccacttccgcgccccagccaagatcttctggcgcaccgttcgtggaatgataccacacaagacaaagcgtggggaagctgctcttgctcgtttgaaggtttatgaaggaatccctcctccatatgacaagaccaagaga

SEQ ID NO: 27071 - DNA, 356 bp, Glycine max
  Clone ID: LIB3051-004-Q1-E1-F3
acgcgtccggtggggattggtggacagagagaagcctggggagtataattggggagggtacgtggaactcatggaaatggcgaagaagcatggcctcaacgtgcatgctgttatgtcatttcaccaatgtggccgtaacgtcggagactcttgcactattcctttgcccaaatgggttgtggaggagattgataatgaccacgatcttgcatatactgatcaatggggaagaagacactatgaatatatatcacttcgatgtgatactttgccggtgctcaaaggacgatccccagttcactgttatgctgatttcatgcgtgcattcatagacactttcatacaacgccttcctg

SEQ ID NO: 27072 - DNA, 436 bp, Glycine max
  Clone ID: LIB3051-004-Q1-E1-F6
cccacgcgtccgcccacgcgtccgattccaatatattccattctctctgtgtatttccctacctctcccttcaagatgcagatcttcgtcaagaccctcaccggcaagaccatcacccttgaggtggaaagctctgacaccatcgacaacgtcaaggccaagatccaggacaaggaaggaatccccccggaccagcaacgtctcattttcgccggaaagcaacttgaggacggccgtacccttgctgactacaacattcagaaggagagtactcttcacctcgtcctccgtctccgtggtggcatgcagatcttcgttaagacactcaccggcaagaccataaccctagaggttgaaagctccgacaccatcgataacgtcaaggccaagatccaggacaaggagggtatccccccgggacagcaacgtctcatct

SEQ ID NO: 27073 - DNA, 367 bp, Glycine max
  Clone ID: LIB3051-004-Q1-E1-F10
tttgtttccttgggtgctgcatgcactttcactcgaagaaccttgaagcgagtctgggccacagcaaccagcgacaacaactcaatcagctagggttgctttgcttgctatcttgttggaggattttctgttcaagagaagatggtaactagaattgtggatcttcgttcagacacagttacaaagccaactgaagcaatgagagctgctatggcaagtgctgaagttgatgacgatgttctaggctatgatccaactgcttttcgcttagaaacagagatggcaaagacaatgggcaaagaagctgctctttttgttccatctggcactatggggaaccttgtatctgtacttgttcattgtgatg

SEQ ID NO: 27074 - DNA, 418 bp, Glycine max
  unsure (1)..(418): unsure at all n locations
  Clone ID: LIB3051-004-Q1-E1-G4
attcaagggaagctaagatttggaacaatgtgtttgagaaagctgagaaggtagcaggcatcgaaagaggaagcataagggcaactgttctgatagaaacacttcctgcagtgtttcaaatgaatgaaattttgtatgaactgaaggaccattcagtgggtttgaactgtgggcgttgggattacattttcagttatgttaagaccttccaagctcatccagatcgcctcttaccagatagggtcctagttggcatgactcaacacttcatgaaaagttattctgatcttctcatcaggacgtgccacaggcgcggcgtgcatgctatgggaggaatggcagcgcagattccaatcaaagaagatccagtggctaacgaagtagcactggaacttgtaaggaangacaagcttagaga

SEQ ID NO: 27075 - DNA, 363 bp, Glycine max
  Clone ID: LIB3051-004-Q1-E1-G12
caatcatcaacacagagctgagtgtgttgctctgtgaatccaccttcttcttccattggaggaccatttcctcctggaatagaaatactaccacacttttcttttttcacttctctaagttgctaagttaattgctccttcattttttcactcttcgttctcgcgtacccgtgtcacggtaactcgtggtgaagtgttcgaaaatgactgtcacacctaagatctcagttaacgatgggaaacttgttgtccatggtaagaccattctgactggagtgccagacaacgttgtgctgactccaggttctggaaggggtcttgtgactggtgcttttgttggtgccacagcttcacacagcaaaa

SEQ ID NO: 27076 - DNA, 382 bp, Glycine max
  Clone ID: LIB3051-004-Q1-E1-H3
aaatccaacaaccttatttttgtgtctggtgttcttggccttgttcccgagacagggaagttcgtatctgatgatgttgaagaccaaactgaacagcttcttaaaaacatgggggaaattcttaaagccggtggtgctagctactcgtccgttgttaagacaacaattatgttggctgacttgaaggactttaagaaggtcaatgagatctatgctaaatacttcccttcacctttccctgctcgttcaacttatcaagtagctgcattgccattggatgccaagattgaaattgagtgcatagcaactatataagcaccaagagtaatagtatatctggctccttcagcaaacttggttaataacacgggaagggacatat

SEQ ID NO: 27077 - DNA, 441 bp, Glycine max
  unsure (1)..(441): unsure at all n locations
  Clone ID: LIB3051-004-Q1-E1-H5
accacgcgtccgctcccttcttccttgtctctttctcttctcaacaacatgcagatcttcgtcaagactttgactggcaagaccatcaccctcgaggtcgagagtagcgacaccatcgacaacgtcaaggccaagatccaggacaaggaaggtatccctcctgaccagcagaggttgatttttgctggtaagcagctggaagatggtcgcactcttgctgattataacatacacaaggaatcaacacttcacttggtcttgaggctcangggaggaaccatgattaaagtgaagactctaactggaaaagaaattgaaattgacattgagccaactgatacaatcgaccggatcaaggaacgcgttgaagaaaaagagggaattccacctgtgcagcagagactcatatatgcaggtaaacagcttgctgatgacaaaaca

SEQ ID NO: 27078 - DNA, 342 bp, Glycine max
  unsure (1)..(342): unsure at all n locations
  Clone ID: LIB3051-004-Q1-E1-H12
taatcactaactgaatattcgatcggagatgtctgccgccgccgaagaagctaacgctcccgccgtcgaaaagccggttgaggangtgaaagcgccgaaccccgcgaaggagaagaaacctaaggctccgaaggaaaagaagccaaaacaggccaaaacagcttcacatcctccatattttcagatgattaaggangctttgatcgctttgaacgagaaaggaggatcgagtccttatgcgatagcgaagtacatggangagaagcacaangcggtgctccctgcgaatttcaagaagattctaagtctgcaactaaagaaccaagctgcgagaaggaaact

SEQ ID NO: 27079 - DNA, 423 bp, Glycine max
  unsure (1)..(423): unsure at all n locations
  Clone ID: LIB3051-005-Q1-E1-A10
atcgaggtaggaggcagaggcgcggagaagatgtggttcaccctctcaaggtctctctggaggacctttatctcgggacttctaagaagctctccctctccagaaatgtcatatgctccaagtgcactggtaagggttctaagtctggtgcttcgatgaagtgtgctggttgtcaaggaactggtatgaaggtttctataagacatcttggcccgtccatgattcagcagatgcagcatgcttgcaatgaatgcaagggtactggagaaaccatcaacgacagagatcgctgcccacagtgcaagggagaaaaggttgtgcangagaaaaaagtccttgaagttattgtggaaaagggaatgcagaacgggcagaagaatacattccctggcgaagctgatgaagcgccagacacaattactg

SEQ ID NO: 27080 - DNA, 425 bp, Glycine max
  Clone ID: LIB3051-005-Q1-E1-B12
agaaagattcgaaacgaagaaagaaagcgttgtgaagaatggcggaagagggacaagtgatcggtgtccacagcgtagaggagtggaaggaacatctcaagaagggagaagagtccaagaaattgattgtggtggattttactgcttcttggtgcggtccatgccgtttcattgccccaattcttgcagagtttgctaaaaagttgccgaatgtcaccttcctcaaggtggatgtggatgaattggagactgtttccaaggagtggggaattgaggctatgccaaccttcctgttcttgaaagaaggcaagctggtggacaaggttgtgggtgccaagaaagaggagctgcaattgacaatagccaaacatgccgcaattgctgctgcttgaagtgccatatgaatatgttaagaataatagact

SEQ ID NO: 27081 - DNA, 412 bp, Glycine max
  unsure (1)..(412): unsure at all n locations
  Clone ID: LIB3051-005-Q1-E1-C7
acgtacgctcttcttctcttgcggctagggttttagcgcagcttcttctagatttaaggaagatgggtaaggaaaaggttcacatcagtattgtggtcattggccatgtcgactctgggaaatccactaccactggtcacctgatttacaagcttggaggcattgacaagcgtgttattgagaggtttgagaaggaagctgctgagatgaacaagaggtctttcaagtatgcctgggtgctggacaaacttaaggctgagcgtgaaagaggaatcaccattgatattgctttgtggaagtttgaaacaacaaagtattattgcacagttattgatgcgcctggacatanggatttcattaagaatatgattactgggacatcncaagctgactgtgctgttcttatcattga

SEQ ID NO: 27082 - DNA, 437 bp, Glycine max
  Clone ID: LIB3051-005-Q1-E1-C10
aacacactaagttctgaaaaatgagttccaaagtttttcttattctacttatgttcatggccactatacttttgatctcctctgaggttgcacccgatgatgcataccagaattttgacaaaacagatgggaagcgtagtgcaaatggggtagatgaaagcaaatattggcgtggtggctatggcgactatggtggttggcgtggtggtggttggcgtggtggctatggaggctggcgtggtggctatggtggtgggcgtggtggctatggtggctggcgtggtggctatggtggtgggcgtggtggctacggaggttggggtggtggctttggccctaacgaacataatgaggctgggattgatgctagccctcacaactaagaaggaaacttgctaaagcttatataggatttaagttatcgtaataaataaaac

SEQ ID NO: 27083 - DNA, 437 bp, Glycine max
  unsure (1)..(437): unsure at all n locations
  Clone ID: LIB3051-005-Q1-E1-C11
agtgagaaacaaagaaaggaaataattgatctttgaaaatgcagggaggaaagaaagctggagagtccatcaaggaaacagctgcaaacattggtgcttctgccaaggctggcatggagaaaaccaaggccactgtccaggagaaggcagaaagaatgacggcacgtgatccgatgcaaaaggagttggcaacccagaagaaagaggcaaagatgagccaggcagagctggacaagcaggcggcgcgtcagcataacacggcggcgaagcaggctgccacggcagggcacatgggacaacccatggggacccatcagacgtcagctatgcccggtcatggaaccggacagcccacgggccatgtcaccganggagtggtgggctcacaccctattggaaacaacagaagcccgggttggactgctacggcccataat

SEQ ID NO: 27084 - DNA, 400 bp, Glycine max
  unsure (1)..(400): unsure at all n locations
  Clone ID: LIB3051-005-Q1-E1-D1
agctccttctcaaactagtagtattattcttccattcataatgggtgttttcacattcgaggatgaaatcaactcccctgtggctcctgctactctttacaaggccctagttacagatgccgacaacgtcatcccaaaggctcttgattccttcaagagtgttgaaaacgttgagggaaatggtggcccaggaaccatcaagaagatcactttccttgaggatggagaaaccaagtttgtgctgcacaaaatagaaagcattgatgaggcgaacttgggatacagctacagcgtggttgggggtgctgcattgccagacacggcggagaagatcacattcgactccaaattggttgctggtcncaatggaaggtctgctgggaagctcactgtcaaatac

SEQ ID NO: 27085 - DNA, 412 bp, Glycine max
  Clone ID: LIB3051-005-Q1-E1-D5
acgtgccaacttcacatctcaagtcattatcatgaaccaccctggccagattggaaatggatacgcaccggtgcttgattgccacacttctcacattgctgtcaagttttctgaaatcttgaccaagattgacaggcgatctggtaaggagcttgagaaggagcccaaatttttgaagaatggtgatgcaggtatggttaagatgattccaaccaagcccatggtggttgaaactttctctgagtatcctccccttggtcgttttgctgtgagggacatgcgtcaaactgtggctgtcggagtcatcaagagtgttgagaagaaagaccccaccggagccaaggtcaccaaggccgctgccaagaagaagtgattgcatttgggcaattttgctagcacatgtgatcatcat

SEQ ID NO: 27086 - DNA, 403 bp, Glycine max
  Clone ID: LIB3051-005-Q1-E1-D7
acggcaaagcagagccaagaagaagaagaagaaaaccaacataatcaacaacaacaacaacaaaaagcttgcaaattagaagaatcttcagttaaaagggaagaagaacacacaagaagaaagagaagaagaaacgcgcgcgaatgaagggagaattagagttgccacctgggttcagatttcaccccactgatgaagaattggtgaatcactacttgtgtaggaagtgcgctggtcaaccaatcgcggttcccgtcatcaaagaggtcgatttgtacaagtttgatccatggcagcttccagaaattggtttttacggcgagaaagaatggtacttcttttctcctcgggaccggaaatacccgaacggttcacggccgaaccgcgccgccggaagccgcta

SEQ ID NO: 27087 - DNA, 361 bp, Glycine max
  Clone ID: LIB3051-005-Q1-E1-E1
agcacacaccctattggaaccaacagaggcccgggtgggactgctacggcccataatacccgtgcggggggaaacccaaatgattatgggtatggaactgggggtacttacaattaaataatgatgatttagaaaaggaaagctacgacccataagaaggtttagttaagagtatgacttttgttgtggttatcttcttgtttggttatctttttgtttgtgtctccttttctctccatttttgttgtggagaattgggtgtggttacacgacagtgttttcacttctactaggtgcaagcattctgtgtcgtgatgttgtattccttcgtttcaatgaataaataaaatcgtggttgtgc

SEQ ID NO: 27088 - DNA, 410 bp, Glycine max
  Clone ID: LIB3051-005-Q1-E1-E5
cccacgcgtccgctttgatggaaattttccagtggattcttggttaccaatttttgtgaattgtctttatcctgtaagtcaattaccttcagaagctgtcgttgtaaatgttacatgtggtagtggacgtggtggtttacccaccactgcttggattagttctgcagttaacaatcgctcctcagatatcaacaaaaagattcgcacagcacttgggaaaggtaagaaaattgtttttcttactagagttgatccttttccagtagctttactggctgttctttttggcgttaagaatgaaattctgagttctaacgccactaaccctatgctgacgcgacttcttgagaactgtaagagtctcaaatatctggttgatgagtgtccttttgcatttgtgaactagtgtg

SEQ ID NO: 27089 - DNA, 409 bp, Glycine max
  Clone ID: LIB3051-005-Q1-E1-E8
cccacgcgtccgattccaatatattccattctctctgtgtatttccctacctctcccttcaagatgcagatcttcgtcaagaccctcaccggcaagaccatcacccttgaggtggaaagctctgacaccatcgacaacgtcaaggccaagatccaggacaaggaaggaatccccccggaccagcaacgtctcattttcgccggaaagcaacttgaggacggccgtacccttgctgactacaacattcagaaggagagtactcttcacctcgtcctccgtctccgtggtggcatgcagatcttcgttaagacactcaccggcaagaccataaccctagacgttgaaagctccgacaccatcgataacgttaaggccaagattcacgacgaagaaggtatccccccggacc

SEQ ID NO: 27090 - DNA, 425 bp, Glycine max
  Clone ID: LIB3051-005-Q1-E1-E12
cccacgcgtccggcaattcactctgtacaattcttcgttcgttctctgcagttatatcctttttgagcttcaatggcggacgctgaaaccttcgctttccaggctgagatcaaccagcttctaagtctcatcatcaacacattctacagcaacaaggagattttcttgcgtgaactcatcagcaatgcttctgatgctttggataagattcgattcgagagcttaaccgacaagagcaagctcgatgctcagccagagctcttcattcgtcttgtgcctgacaaggataacaagactctttccattattgacagcggcattggaatgaccaaagcagatttggtgaacaacttgggtaccattgcgaggtccgggaccaaggagttcatggaggcgttgcaggccggtgctgatgtcagcatgat

SEQ ID NO: 27091 - DNA, 411 bp, Glycine max
  Clone ID: LIB3051-005-Q1-E1-F9
aataaaaccaaatactttgcgtgcaaaaccatcacatcatcggcaacagtgacagtaacggtggaagagagaaaggattcgctctcctcaatccttatataagctccagcgacccaatttcttctcttatcgatttgattgtttctgagtaatggcttcgtcgcgagtagatctggatgggaaccccataaagcccatcaccatttgcatgattggcgccggtggcttcattgggtcccacctctgcgagaagctcatgtcggagacccctcacagtgtcctcgccttggatgtctacaatgacaagattaaacacctcttggaaccccacacgctcccttgggcctctcgcatccagttccatcggctcaacatcaagcacgattcccgttccgaaagcctcatcaaaat

SEQ ID NO: 27092 - DNA, 403 bp, Glycine max
  unsure (1)..(403): unsure at all n locations
  Clone ID: LIB3051-005-Q1-E1-F10
aggaagagtgcgaaagaaagatcgttctcgatgacagaggggaacggtgacaaaactctgcgaaagatcgcagacgcattcaatgaccttgcaaacgttttcaccgattctcagagcgcagaagcagaggtcaaggttgctcccttctctcatgcctgctctctcgtctcccctctcttcggttgcttgggcgtcgccttcaagttcgccgaaatggattacgtcgccaaggttcatgatctggcanaggcgtccaagtctattcagaatctgcagtctctgattgagctggatgtgcaagctaacactgttaggaaaggaggtagccatacgcggaatctgctcagagtgaagcgcggacttgacatggtcagagtgctctttgagcagattctagttacag

SEQ ID NO: 27093 - DNA, 410 bp, Glycine max
  unsure (1)..(410): unsure at all n locations
  Clone ID: LIB3051-005-Q1-E1-G7
agcccacgcgtccgcaaactagtaatattaatcttcgaatccattttattattcataatgggtagtttcacatttgaggatgaaaccacctcccctgtggctcctgctaccctttacaaagctctacttacagatgccgacaacgtcatcccaaaggctgtcgaagccttcaggagtgttgaaaaccttgaggggaacggtggccctggaaacatcaagaagatcactttcgttgaggatggagaaagcacgtttgtgttgcacaaaatagaatcagttgatgaggcaaacttgggatacagctatagcgtanttggtggagttgggttgccagacacagtggagaagatcacattcgaatgcaaattggctgctggcgccaactgaaggtctgctgggatgctaactgt

SEQ ID NO: 27094 - DNA, 422 bp, Glycine max
  Clone ID: LIB3051-005-Q1-E1-G8
acgaccaaagcagatttggtgaacaacttgggtaccattgcgaggtccgggaccaaggagttcatggaggcgttgcaggccggtgctgatgtcagcatgatagggcagttcggtgtggggttctactctgcttaccttgttgcagagaaggtcattgttaccaccaagcacaatgatgatgaacagtacatttgggagtctcaggctggtggctctttcactgttactagggacactgatggcgagcaactcggaaggggaaccaagatcaccctcttcctcaaggaagatcagttggagtacttggaggagaggagaatcaaggatcttgtgaagaagcactctgaattcattagttatcctatttacctttggactgagaagacaccgagaaagagatcagcgatgatgaagatgatgaa

SEQ ID NO: 27095 - DNA, 414 bp, Glycine max
  unsure (1)..(414): unsure at all n locations
  Clone ID: LIB3051-005-Q1-E1-H5
agcccacgcgtccgcccacgcgtccgaagaaaagtcaaagacaatgtcagggatcattcacaagattgaggagacccttcatgtgggaggccacaagaaggaggaggagcacaagggtgagcagcaccatggtggagaatacaaaggggagcatcatggtgaacacagtactgaatacaaaggagagcatcatgttggtgagcacaagccggagcaccatggaggagaagagcacaaagaggggttcctagacaagatcaaggacaagatccacggcgaggagggtggcgccaccgccgagggcgagaagaagaagaagaagaaggagaagaagaagcatgaacatggccatgacagcagcagcagcagtgacagtganntagatatctcccactgctgcatcacctatatacc

SEQ ID NO: 27096 - DNA, 383 bp, Glycine max
  Clone ID: LIB3051-006-Q1-E1-A2
agtaacttcatcaataatcgcagaagcagtttccggtgcatctcatcgtcttccaaaatgaacgacgcagatgtctcgaagcaaatccagcagatggtgcgtttcatccgccaggaagctgaggagaaagccaacgagatctctgtatctgccgaagaggaattcaagatcgagaagctgcagttggttgaagccgaagagaagaagatcaggcaagaatacgaacgcaaagagcgccaagtcgaaattcgcaagaagattgagtactcaatgcagctgaatgcttcccggattaaagttcgtcgggctcaagatgacgtgatcacttccatgaaagaggctgcatccaaggaacttttgaatgtcagtcatcagcatgatga

SEQ ID NO: 27097 - DNA, 358 bp, Glycine max
  Clone ID: LIB3051-006-Q1-E1-A3
gggtcgggcacgcgtccggttcaaactaagttctgaaaatgagttccaaggttttgcttgttctacttatgttcttggccactatacttctgatctcctctgaggttgcacccgatgatgcatacgagaattttgacaaaatagatgggaagcctagtgcagatggggtagatgaaagcaagtattggcgtggcggctatggtggcggctatggtggtggttatggaggtgggcgtggaggctatggaggtgggcgtggaggctatggagggggacgtggtggatatggcggcggacgaagtggctatggtggccggcgtggtggctatggcggcgggcgtggtcgcgggcgtggtgg

SEQ ID NO: 27098 - DNA, 172 bp, Glycine max
  Clone ID: LIB3051-006-Q1-E1-C7
acccacgcatccacgttgctgttcatagtgatacatggttacttgcccttgccttttattttggagccagatttggatttgataaaactcagaggaatcgactattcggtatgatcaatgaactagcaccgagagttcaagttgttacagcgcggaaacaggttagagagaa

SEQ ID NO: 27099 - DNA, 311 bp, Glycine max
  Clone ID: LIB3051-006-Q1-E1-G5
agaggatgaaatcaactcccctgtggctcctgctactctttacaaggccctagttacagatgccgacaacgtcatcccaaaggctcttgattccttcaagagtgttgaaaacgttgagggaaatggtggcccaggaaccatcaagaagatcactttccttgaggatggagaaaccagagtttgtgctgcacaaaatagaaagcattgatgaggcgaacttgggatacagctagagcgtggttgggggtgctgcattgccagacacggcggagaagatcacattcgactccgaattgcgggctggtcccaat

SEQ ID NO: 27100 - DNA, 239 bp, Glycine max
  Clone ID: LIB3051-006-Q1-E1-H4
gcgtccgaatttacgatcaatttgaaagaacttatccatttcttgcaattttagttgtgtacccataactccatgcatgcaactcgttgagctatctcaataaatgccgtttgtatgtgttagtatttagatttatataccttttcggcatgtttcgctgctattgttgtggactatgtgttccgtgtaatccaattaattaagagggagagtattaaattaggaagtaacgagagttt

SEQ ID NO: 27101 - DNA, 435 bp, Glycine max
  Clone ID: LIB3051-006-Q1-E1-H9
agaaatttcactggaagaccactagtggtataaagtgtctattggaggaagaggccattaaggtgggaggagccaaccacagccatgccactcaagaccttcatgattcaattgctgctggtaactatcctgagtggaaactgttcgttcagacaatagatcctgagcatgaagacaaatttgactttgaccctcttgatgttactaagacttggcctgaggacattatacccttgcagcctgttggtcgcttggtcctgaataaaaacatagataatttctttgctgagaatgaacaacttgcattttgccctgccattgtggttcctggtgtatactactcagatgataagatgcttcagaccaggatattctcttatgctgattcacaaaggcacagacttggaccaaactatctgcaacttcctgctaatg

SEQ ID NO: 27102 - DNA, 434 bp, Glycine max
  Clone ID: LIB3051-006-Q1-K1-A2
cgtatcttcatcaataatcgcagaagcagtttccggtgcatctcatcgtcttccaaaatgggcgacgcagatgtctcgaagcaaatccagcagatggtgcgtttcatccgccaggaagctgaggagaaagccaacgagatctctgtatctgccgaagaggaattcaatatcgagaagctgcagttggttgaagccgaaaagaagaagatcaggcaagaatacgaacgcaaagagcgccaagtcgaaattcgcaagaagattgagtactcaatgcagctgaatgcttctcggattaaagttcttcaagctcaagatgacgtgatcagttccatgaaagaagctgcatccaaggaacttttgaatgtcagtcatcaccatgatgatcatgtgtatagaaaccttctgaaagatctcattgttcagtgtttgctaag

SEQ ID NO: 27103 - DNA, 278 bp, Glycine max
  Clone ID: LIB3051-006-Q1-K1-A3
gttcatactaagttctgaaaatgagttccaaggttttgcttgttctacttatgttcggggccactatacttctgatctcctctgaggttgcacccgatgatgcatacgagaattttgacaaaatagatgggaagcctagtgcagatggggtagatgaaagcaagtattggcgtggcggctatggtggcggctatggtggtggttatggaggtgggcgtggaggctatggaggtgggcgtggaggctatggagggggacgtggtggatatggcagcgga

SEQ ID NO: 27104 - DNA, 425 bp, Glycine max
  Clone ID: LIB3051-006-Q1-K1-B2
acaagacttagaatgcgatgagcaaaaatagacctcaattccgaattcagagatagcacgcgaccaggagaagccatggctactcaatccccttcacctcagaacctaggtggtgaaattgagcaaacagaaaatgtagatcagcataataggggagaagagcttggtaaacagagttcagacacatcggtgtttgtgaactcagagccattgcgtgaggaacaaattcagaatgctgtgaaatttctgtcgcacccgaaagttagaggttctcctgtcatccacagacgatcgtttctggagaagaagggccttacgaaggaggagattgatgaagcctttcggcgtgtgcctgattcacctccaagtgtgcagacagctggcataaatcaagatggacaattgaagccatcatcaaacattta

SEQ ID NO: 27105 - DNA, 419 bp, Glycine max
  Clone ID: LIB3051-006-Q1-K1-B12
gcgatagctgataagagagataccaacaagaaaagaaaaaaagaagagttgagattccgtttgaagaaaagatggcatcccataggcaaagctatgaagctggtcaaactaagggccgaactgaggaaaagacgaaccagacgatgggcaatattggagagaaggctcaagctgcaaaggagaagacccaggaaatggcccaagctgcaaaggagaagacccaacaaacagcccaagctgccaaggacaagacttgcgacacttcccaagcggcaaaagagaagacccaacagaatacaggagctgctcaacaaaagacctcaaagatgggccagtccacgaaggaatcggcccagtcagggaaggacaacacccaaaggttcctgcaacagacaggggaaaaggtgaagggcgcaacc

SEQ ID NO: 27106 - DNA, 378 bp, Glycine max
  unsure (1)..(378): unsure at all n locations
  Clone ID: LIB3051-006-Q1-K1-D11
gttcactcctcttctcttgccgctacggaattaccacatcttcatctagctttaacgagagataggctcagataaggttctcctcatccttgctgtcattccccatctcaactcctcagnctccactaccaccctatcacctgacacactagctctgcaagcatagacacacttcgaactgatacgtgtaaataggtagctgcttacacgcacccgaggcccttgaactctgcctgggtgctcgactgacctgcggcttagcgattacgaggaatcaccattgatattgctttgtggaagtttgaaacaacaaagtattattgcacagttattgatgcgcctggacatacggatttcatttataatatgaatactggg

SEQ ID NO: 27107 - DNA, 392 bp, Glycine max
  Clone ID: LIB3051-006-Q1-K1-F5
aaattagttcattctctttgcgcagttccctacctctcctttcaagatgcagatctgcgtcaagaccctcaccggaaagaccatcacccttgaggtggaaagctctgacaccatcgacaacgtcaaggccaagatccaggacaaggaaggaattcccccggatcagcaacgtctcatcttcgccggaaagcagctcgaggactgccgtaccctcgccgactacaacatccataaggagtcaacccttcaccttgtccttcgtctccgtggtggcatgcagatcttcgtcaagactctcactggcaaaaccataaccctagatgtcgaaagctctgacaccattgacaacgtcaaggccaagatccatgacaaggagggaatccctccatacc

SEQ ID NO: 27108 - DNA, 335 bp, Glycine max
  Clone ID: LIB3051-006-Q1-K1-G5
cgaggatgaaatcaactcccctgtggctcctgctactctttacaaggccctaggtacagatgccgacaacgtcatcccaaaggctcttgattccttcaagagtgttgaaaacgttgagggaaatggtggcccaggaaccatcaagaagatcactttccttgaggatggagaaaccaagtttgtgctgcacaaaatagaaagcattgatgaggcgaacttgggatacagctacagcgtggttgggggtgctgcattgccagactctgcggataagatcacattctactccaaattggttgctggtctcaattggaggtctgcttggaagcttattg

SEQ ID NO: 27109 - DNA, 331 bp, Glycine max
  Clone ID: LIB3051-006-Q1-K1-H9
aaattcactggaagaccactatggtataaagtgtctattggagaagagccattaagtgggaggagccaacacagccatgccactcaagaccttcatgatcattgctgctggtaactatcctgagtggaaactgttcgttcagacaatagatcctgagcatgaagacaaatttgactttgaccctcttgatgttactaagacttggcctgaggacattatacccttgcagcctgttggtcgcttggtcctgaataaaaacatagataatatctttgctgaaaattaaacacttgcattttgccctgccattgtggttcctggtgtatactac

SEQ ID NO: 27110 - DNA, 185 bp, Glycine max
  Clone ID: LIB3051-007-Q1-E1-B10
agtgacggtggtgatggaggctggagaaactagggcttgatgtcgttgattaaggtttatgattatgctcagtaattttagttgtgtttgagtttgagtatctttatggttttgtgtcaccgtggttcttgtttttgaccaatatatctggttgtttatagtcgatttaatgaaatgataatcag

SEQ ID NO: 27111 - DNA, 381 bp, Glycine max
  Clone ID: LIB3051-007-Q1-E1-C10
acgcgtccaccacgcgtccggttttgttagttcacacactaagttctgaaaaatgagttccaaagtttttcttattctacttatgttcatggccactatacttttgatctcctctgaggttgcacccgatgatgcataccagaattttgacaaaacagatgggaagcgtagtgcaaatggggtagatgaaagcaaatattggcgtggtggctatggcgactatggtggttggcgtggtggtggttggcgtggtggctatggaagctggcgtggtggctatggtggtgggcgtggtggctatggtggctggcgtggtggctatggtggtgggcgtggtggctacggacgttggggtggtggctttggccctaacgaacataa

SEQ ID NO: 27112 - DNA, 419 bp, Glycine max
  unsure (1)..(419): unsure at all n locations
  Clone ID: LIB3051-007-Q1-E1-E10
agcgagatagaagcgtaagcagcggctaccctaacctcgtcttcctctctactaatttcagctatggccgacgaagctgtggttgttccagatcccacccagatcgatgtcaagctctttaaccgctggagcttcgaggatattgaggttactgacatttcactggctgattacattggagttgcggcatccaagcacgccacatatgttcctcacaccgccggaaggtactccgtgaagcggttcaggaaggcgcagtgccccattgttgagaggctcaccaactctctcatgatgcacggtagaaacaatggcaagaaactcttggctgttaggatcatcaagcatgctatggagattattcatttgttgactgaccaganacccattcaggttattgttgatgctgtcatcaacag

SEQ ID NO: 27113 - DNA, 230 bp, Glycine max
  Clone ID: LIB3051-007-Q1-E1-F5
agtttattcatctaccgtcgggagggaggggatgaccacggcgccccgtgcgcccggcctcctcgtcctcgcgacaaacgcagaccccggcgcttcgtgcgccaaggaactcacgtctgtgaagtgcgactcccgggggcccggagacggtgtcccgcgggagtcgtcagggagcatcgtttacagacaatgagtctccggggcggatggtccggggcttgcatcgatga

SEQ ID NO: 27114 - DNA, 272 bp, Glycine max
  Clone ID: LIB3051-007-Q1-E1-H6
caatcgtagccgtcgcactctgtgttttcagcgccgtctccgatctccgacaatggcgacccaaatgagcaagaagagaaagttcgtagctgatggagtgttcttcgctgaactgaacgaggttctgacaagagagttggccgaggacggttactccggcgtggaagttagggttacgccgatgcgcaccgaaatcataattagagccaccagaacccaagctgttctcggtgagaagggaaggagaataagggaacttacctctgtggttc

SEQ ID NO: 27115 - DNA, 323 bp, Glycine max
  Clone ID: LIB3051-008-Q1-E1-A8
agcatccatgatacatctcctggtacactcaccgcctctgtctgcgcctctgatgttgacctcatcacacaagtagcaggtgctgaatggcctggagatacaattgtttatgcttacagatcaggtgaggtgattcggctaccaaaaggggtttcaattccagtgacactaaaagttctggagtttgagcttttccacttctgtccactccaagaaatagctccaagtatatcatttgcagcaatagggctactggatatgttcaacactggacgagcagtggagcatgttgagattcataaccgagcagcaacgaaaacaat

SEQ ID NO: 27116 - DNA, 462 bp, Glycine max
  Clone ID: LIB3051-008-Q1-E1-B1
gggtcgaggcacgcgtccaaccaaatcaatcaaattctttgagttgaacacaggggccaagattccttctcttgggttagggacttggcaagctgaacctggtgttgtagctgaagctctcaccacagccattcaggttggatacaggcatattgactgtgctagtgcgtataagaatcaagcagagattggttctgctcttaagaagctttttgatgatggtgtggtgaagcgtgaggacttatggatcacttccaaactctggtgttcagatcatgcaccagaagatgtgccaaaagcattggataaaacattacaggaattgcaacttgactatcttgacctctatctgatccactggccagtccgcatgaaaagtggaacatttggactcaataaagaatatcttgagcaaccagacattcccaatacatggagagcaatggaggcactctatgactc

SEQ ID NO: 27117 - DNA, 437 bp, Glycine max
  Clone ID: LIB3051-008-Q1-E1-D8
atccacccacgcgtccgaccgggacaaacctgctcagcaagaacaaggacaagataaacctgctcagcaagaacaaggacaagatgagcaagaaaaaggaaaagatgagctttgaaagggagctgttcctcacatgggatatagacacaaagttacatgtgggctgcacacccttttgtatctcgttatcagaatttagtgaaccttaggtgctacctatcttcctttgatcttcttttcttttcggttttcttttatgtatggtttacttaataaaaacgggagcttttgcttggtgtagtagagtttagtgcagggaaaggtgtagctgggattcgagttaaattaatggatgtttttagatcacccagttaaaaaagaagacgagattcagaatggtacaacatttgctaaagattgaaaaataaaagggcggc

SEQ ID NO: 27118 - DNA, 421 bp, Glycine max
  unsure (1)..(421): unsure at all n locations
  Clone ID: LIB3051-008-Q1-E1-H12
cagccgtccgaccacacgtccgcctttttttttttttttttttttttttttttttttttttttttttttntttttttttttttttttttttgtaaggattgctcatctttattataatttattattgatgaagtgagatacagatatatcataagtctcacaattatatgggaaaaggaaagaagaaaggaaagactggatacattggaaggcaacttaagttgagaacagagtgattggataagtctccaagcaagaaagtgatgacaagtaagttgaagaggattagttgcaatcctgatgtggcaggaagccagaacagccttgagatcgatggtttaactcgctttgctgttgaagaacacaacaaaaaacagaatgcccttttggagtttgaaaaggtagtaagtgcaaaacagca

SEQ ID NO: 27119 - DNA, 433 bp, Glycine max
  unsure (1)..(433): unsure at all n locations
  Clone ID: LIB3051-009-Q1-E1-A9
acgcaaccacccacgcgtccggttcattctctttgcgcagttccctacctctcctttcaagatgcagatcttcgtcaagaccctcaccggaaagaccatcacccttgaggtggaaagctctgacaccatcgacaacgtcaaggccaagatccaggacaaggaaggaattcccccggatcagcaacgtctcatcttcgccggaaagcagctcgaggacggccgtaccctcgccgactacaacatccagaaggagtcaacccttcaccttgtccttcgtctccgtggtggcatgcagatcttcgtcaagactctcactggcaaaaccataaccctagaggtcgaaagctctgacaccattgacaacgtcaaggccaagatccaggacaaggagggaatccccccnagacagcaacgtctcatcttcgccggaaag

SEQ ID NO: 27120 - DNA, 356 bp, Glycine max
  Clone ID: LIB3051-009-Q1-E1-E3
acggacggcggccctttttttttttttttttaaaaaattataacgttaatcgtccattttatatttcgtacaattcgtgtggttttactttcataataaacatcactctaaagtaatttaggattaataatctgataaataatataaagttctattattcataatttggagtacaaagcaacattttccccccccctttttccatccatgatactcttatctttgccatataactgcaaagtgtaaacaaaagcttgaaatgaagaagctaagagcaacccttgcaataatttgtaatctataactacattttgagcacctcttatttagcatatactcaatacatctcctgacat

SEQ ID NO: 27121 - DNA, 196 bp, Glycine max
  unsure (1)..(196): unsure at all n locations
  Clone ID: LIB3051-009-Q1-E1-E8
gctggttgtcaaggaactggtatgaaagtttctataagacatcttggcccgtccatgattcagcagatgcagcatgcttgcaatgaatgcaagggtactggagaaaccatcaacgacagagatcgctgcccacagtgcaagggagaaaaggttgtgcangagaaaaaagtccttgaagttattgtggaaaaaggaa

SEQ ID NO: 27122 - DNA, 387 bp, Glycine max
  unsure (1)..(387): unsure at all n locations
  Clone ID: LIB3051-009-Q1-E1-F2
agcgaagaggcgcagccgtagcagtaactcgtggaattgctagcaatggcgaggatcaangtttacgagctgaggcagaagacgaaggctgatctgttgaatcagctgaaggacctcaaggccgagcttgccttgcttcgtgttgctaaggtcaccggcggtgcacctaacaagctctctaagatcaaggtggtgaggttgaacattgcccaggttttgacggtgatttctcagaagcagaaggccgcgttgagggatgcctacaagaacaagaagtacttgcctctcgatctccgccctaagaagaccaggccattcgcangaagcttactaagcancaggcatcattgaagaccgagagggagaagaagaaagagttatatttcc

SEQ ID NO: 27123 - DNA, 345 bp, Glycine max
  Clone ID: LIB3051-009-Q1-E1-F3
atccctcccttcttccttgtctctttctcttctcaacaacatgcagatcttcgttcaagactttaactggcaagaccatcaccctcgaagtcgagagtagcgacaccatcgacaacgtcaaggccaagatccaggacaaggaaggtatccctcctgaccagcagaggttgatttttgctggtaagcagctggaagatggtcgcactcttgctgattataacatacaaaaggaatcaacacttcacttggtcttgaggctcaagggaaggaacatgattaaagtgaagactctaactggaaaagaaattgaaattgacattgagccaactgatacaatcgaccgga

SEQ ID NO: 27124 - DNA, 353 bp, Glycine max
  Clone ID: LIB3051-009-Q1-E1-G2
cccacgcgtccggaagaagaaggatgtggcacgaggcgaggaggtcggagaagaaggtccacgacatgatggacgcggctcggaagagagcgcaacgacgcgccgtttacctagccaagaggcgcggcgatcctcagcaatctattcagctcgtcggctttcgaagccgaacctatcgcgacgacgctctctaccaagccacgcaagattagcaaggcctgataccttggaatgggaaacaagatgtattgattgacagatttgatgggcgtgctctccttgaattcaatcgcgattctaaccacaagcgcgtcccggaaaagtctgaagaagaagaagagttagaagagttt

SEQ ID NO: 27125 - DNA, 311 bp, Glycine max
  unsure (1)..(311): unsure at all n locations
  Clone ID: LIB3051-009-Q1-E1-G4
ctgaattgtgtgaatcgaaaactaaacattgctattgtaaaagttgcaaatgcctataaacaccctaatattattgcagaatttatagctggacaattaaagaatagagtttcgtttcgtaaagcaatgaaaaaagctattgaattaactgaacaggcgggtacaaaaggagttcaagtacaaattgcaggacgtatcgacggaaaagaaattgcacgtgttgaatggatcagagaaggtanagttcctctaaaaaccattcgagcgaaaatcgattattgttgctatacagttcgaactatttatggggt

SEQ ID NO: 27126 - DNA, 439 bp, Glycine max
  Clone ID: LIB3051-009-Q1-E1-G5
gttagttcacacactaagttctgaaaaatgagttccaaagtttttcttattctacttatgttcatggccactatacttttgatctcctctgaggttgcacccgatgatgcataccagaattttgacaaaacagatgggaagcgtagtgcaaatggggtagatgaaagcaaatattggcgtggtggctatggcgactatggtggttggcgtggtggtggttggcgtggtggctatggaggctggcgtggtggctatggtggtgggcgtggtggctatggtggctggcgtggtggctatggtggtgggcgtggtggctacggacgttggggtggtggctttggccctaacgaacataatgaggctgggattgatgctagccctcacaaccaagaaggaaacttgctaaagcttatatatgatttaagttatcgtaataaat

SEQ ID NO: 27127 - DNA, 343 bp, Glycine max
  unsure (1)..(343): unsure at all n locations
  Clone ID: LIB3051-010-Q1-E1-A8
attcaattagttcatactaagttctgaaaatgagttccaaggttttgcttgttctacttatgttcttggccactatacttctgatctcctctgaggttgcacccgatgatgcatacgagaattttgacaaaatagatgggaagcctagtgcagatggggtagatgaaagcaagtattggcgtggcggctatggtggcggctatggtggtggttatggaggtgggcgtggaggctatggaggtgggcgtggaggctatgganggggacgtggtggatatggcggccgaccaagtggctattgttgccggcgttgtggctatgccggccggccttgtggcgggcc

SEQ ID NO: 27128 - DNA, 419 bp, Glycine max
  Clone ID: LIB3051-010-Q1-E1-D3
atccactatactgatgaggctcttgtagctgctgcacagctgtcctacaagtatatcagtgatcgatttttgccagacaaagctatcgatttgattgatgaagctggttcacgagtccggcttcaacatgcacagttacctgaagaagcaagagaacttgacaaggaggtgaggcagattattaaggagaaagaagaagctgttcgcaaccaagactttgaaaaggctggagagctacgtgatagagagatggatcttaaggcacagatctcaacacttgtagagaaaggcaaggagatgagcaaggcagagactgaggcacgggatgaaggtcctattgtgactgaagctgacatacagcatattgtctcatcctggactggtattcctgttgagaaagtctcaacagatgaatctga

SEQ ID NO: 27129 - DNA, 430 bp, Glycine max
  Clone ID: LIB3051-010-Q1-E1-E9
gaaatctgaaagggagaatgaattgaaacaacgatttgagcagagcatgaaagaagctgctgataaatatcaaggcgcaaacttgtatgtaaaaaatttagatgatagcattggtgatgaaaaacttaaggagctgttctccccttttggtaccattacctcttgcaaggttatgagagacccaaatggcttaagtcgtggatcgggttttgttgcattctcgactcccgaggaggcatctagagcactcctggagatgaatggcaaaatggtggtaagcaaacctctgtatgtgactctagcccaaaggaaagaagataggagagctagactgcaggctcagtttgctcaaatgcgacctgttggaatgccaccatctgttggtcctcgtgtgccaaatgtatccccaagtggtccaggtattggtcaa

SEQ ID NO: 27130 - DNA, 420 bp, Glycine max
  Clone ID: LIB3051-010-Q1-E1-E11
cccacgcaaccaacaatctgaaagggagaatgaattgaaacaacgatttgagcacagcatgatagaagctgctgataaatatcaaggcgcaaacttgtatgtaaaaaatttacatgatagcatgggtgatgaaaagcttaaggagctgttctcgccttttggtaccattacctcttgcaaggttatgatagacccaaatggcttaactcgtggatccggttttgttacattctctactcgctaagatgcatctatatcactcttggagatgaatggcataatggtggtaagcaaacctctgtatgtgactctaccctatatgaaagaagatacgacagctacactgcacgtacagtttgctcaaatgcgacctattggcattccaccatcggtcggtcctcgtgtgccaatgtatctccc

SEQ ID NO: 27131 - DNA, 426 bp, Glycine max
  Clone ID: LIB3051-010-Q1-E1-G1
acgcgtccgatcgacagatgcagatcttcgtcaagaccctcaccggcaagaccatcacccttgaggtggaaagctctgacaccatcgacaacgtcaaggacaagatccaggacaaggaaggaatccccccggaccagcaacgtctcattttcgccggaaagcagcttgaggacggccgtacccttgctgactacaacattcagaatgagagtactcatcacctcgtcctccgtctccgtggtggcatgcagatcttcgttaagacactcaccggcaagaccataaccctataggttgaaagctccgacaccatcgataacgtcaaggccaagattcaggacaatgagggtatccccccggaccagcaacgtctcatcttcgccggaaagcagctcgatgactgccgcatcctcgccgactacaaca

SEQ ID NO: 27132 - DNA, 366 bp, Glycine max
  Clone ID: LIB3051-010-Q1-E1-G3
accaagcgtccgcccacgcgtccggtgagggtgcatgagtggtaatcgggatgtttttgttgcacggctccatgcttgcgcatgcaacgtgtgacatgcatccttttcattgtcaccttagccttcgtggcttaggtgctgacgattggttcctgtgttgcctacctaccaaacggtattcgtgtggctagtcagacccattccatccaggcctctttgttggggacgctggaggatttcaaagtcccacacgtgaaccacgttagtcgtccatcataacggcttcctgtggcacacgtgtggtgattgttctctcggatgcggtgcatgcagtgaacgtgggtggtctagtgccccacattgttc

SEQ ID NO: 27133 - DNA, 417 bp, Glycine max
  Clone ID: LIB3051-010-Q1-E1-G4
gtccgcccacgcgtccggtgagggtgcatgagtggtaatcgggatgtttttgttgcacagctccatgcttgcgcatgcaacgtgtgacatgcatccttttcattgtcagcttagccttcgtggcttatgtgctgacgattggttcctgtgttgcctacctaccaaacggtactcgtgtggctagtcacagtcattccagctaggcctctttgttggggacgctggaagatttcagagtcatacacgtgaaccacgttagtcgtccatcataacggcttcctgtggcacacgtgtggtgattgttctctcggatgcggtgcatgcagtgaacgtgggtggtctagtgcccccacattgttccttaagatcggttgtctcggatgaaccttgccctggcgcttgctttttcaacgcgat

SEQ ID NO: 27134 - DNA, 428 bp, Glycine max
  Clone ID: LIB3051-010-Q1-E1-G12
aaagaaagagaagaaaagagtggaatcgaagacgaagacgaagatggaggacgcatcagcatcaaagttcatcccacaccaaatcggaggggtccaaaacgacgtgcttcgatttggtctccatggagtcaagagcgacatcgttggttcccaccctcttcaatcttcactccaatctacaaggagaatggatgaagcgatgaagaagcaatgcaaagttaacctgtacggaactgcttttcccctgaaggaggagcttgacaggcaaatcctgtctaggttccagcggcctcctggaccaattccatcttcaatgctgggtttggagactgttacaggaagtgttgatcactttggttttgaggattgtctaaatgacccccgtgagtcagagactttccggccattggacatgcatcatgggatgg

SEQ ID NO: 27135 - DNA, 378 bp, Glycine max
  Clone ID: LIB3051-010-Q1-E1-H4
tcaaatccagcagatggtgcggttcatccgccaggaagctgaggaaaaggccaacgagatctctgtctccgccgaagaggaattcaatatcgagaagctgcagttggtcgatgccgacaagaagaagatgaggcatgaatacgaacgcaaagagcgctaagtcgatattcgcaagaagattgggtactcgatgcagctgaatgcttctcggatcaaagttcttgaagctcaagatgacttgatcagtgccatgaaataagctgcatccaaggaactgttgaatgtgagtcagcatcatcatttgaagtctactgagtcatcatcatcatgagtacagaaaccttctgacagatcccattagtcagtgtttgcttagac

SEQ ID NO: 27136 - DNA, 421 bp, Glycine max
  unsure (1)..(421): unsure at all n locations
  Clone ID: LIB3051-011-Q1-E1-E2
acgcgtccgcccaagcgtccggtaactttttgattcctaaattctccaaaattccaaattccaaattccttaagggaaaaaaaatgtttggtttttaattaatttggccggaaaaagccagggttcctgccaaccgaatcgatttgggaaacgacgtactcttgcgtcggcgtgtggcaacacgatcgtgttgaaatcatagccaacgatcagggtaacagaactaccccatcctacgtggctttcaccgacacagaacggttgatcggcgatgcngccaagaccaggtcgctatgaacccaccaacaccgtttttgatgctaaacgtttgattggaaggcctttttccgatgcatcagttacaggtgacatgaaattgtggccgttcaaggtgattcctggcccctgctgagaaacctat

SEQ ID NO: 27137 - DNA, 394 bp, Glycine max
  Clone ID: LIB3051-011-Q1-E1-F1
acgcgtcagcagtatacaagcccccagttgagaaacccccagtttataagcccccagttgagaaaccaccagtgtacaagcccccagttgaaaaaccaccagtgtacaagcccccagttgaaaaacccccagtgtacaagcccccagttgaaaaaccaccagtgtacaagcccccagttgagaagcccccagtttacaagcccccagttgagaagccaccagtttacaagcccccagttgagaagccaccagtatacaagcccccagttgagaagcctccagtgtacaagccaccagtagagaagctccaggttacaagccaccagtagagaaacctccagtttacaagcccccagtggagaaaactcctatttacaagccacctgttgagaag

SEQ ID NO: 27138 - DNA, 301 bp, Glycine max
  Clone ID: LIB3051-011-Q1-E1-F4
acgcgtcaaattcacctcactcaaactcgggattacagaaaccaacaacagttcctgccacgaaggttcacggaagttgccggaaactgcacttgggttgtttgggttaaccttggttctgcaacttccttctcacaccaagtgcaaaatcaaaagcaattcgccacctcccaacacctccaagcccaaagccccgtcgtcccttcattggccaacttcacctcttaaaagataaacttctccactaagcaatcatcgatccccccaaagagcatggccccctacttcccgcccctccttc

SEQ ID NO: 27139 - DNA, 429 bp, Glycine max
  Clone ID: LIB3051-011-Q1-E1-F8
agcccacgcgtccgcaacaacaactatggcaagttatcaaaagcactacgatgatcagggtcgcaaggttgacgagtatggcaacgttgagaagcaaaccgacgaatacggcaaccctgttcatgctgctagtgtcacctatgtagccaccagaactgctgctggtggttacagtgatgacattaataagcaacatgataccaccaatgcctacggcgtagacactggtagacagcattctagtggtggctacgatggtgacactaataaacatcatggaactactggtggctataatgatgacaccaatagacatcatggaactaccggtgtctatggtatagacaccgataggcaacaacatgggactactggtggctatgccggtgacactggtaggcaacatgggaacatcggtggcccttacta

SEQ ID NO: 27140 - DNA, 415 bp, Glycine max
  Clone ID: LIB3051-011-Q1-E1-F11
gcgtcagcccacacgtccggcacgctgctgccaaggttttcagccatcctgatgttgttgctgaagtgccatggtacggtattgaacaagaatacaccttgttgcagaaagatatccaatggcctcttgggtggcctgttggtggtttccctggacctcagggtccatactactgtggtgttggcgctgacaaggcttttggccgtgacattgttgacgcacactacaaagcctgtatttatgctggcatcaacatcagtggaattaatggagaagtgatgcccggtcagtgggaattccaagttggaccttcagttggaatctcagctggtgatgagatttgggcagctcgttacatcttggagaggatcactgagattgctggtgtggtggtttcctttgaccccaagccaat

SEQ ID NO: 27141 - DNA, 412 bp, Glycine max
  Clone ID: LIB3051-011-Q1-E1-G4
cgcgtcaacccaaacgtccgattttcagacgaacaatggcaggtaagggttcgacgtgcttcctcctcgagtttgctcattctcgccatcctccgtttcaaattgccgctgaggaatcatccgaaaaagaattcgtgctcacaatggattactccaactttcacgaaaatgttcagaagccacgatttcatcgccctcgagttctaagccccaaggggttgccactggtataaaccttccacccgagtatgacaaaaccggctccaacctgaattatcaagattcccccggttgttttgccaaaatttgaggcaaataagggaatgatcaatgacgtgcatctcaatatgatgttaggggatacccaacaattaagattctgagaaatgggggacagaatgttcaggaatac

SEQ ID NO: 27142 - DNA, 410 bp, Glycine max
  Clone ID: LIB3051-011-Q1-E1-G8
agcaggactcggtatcgctcgccaacgtcaagccattgtggatggactgagggacagtgtgcttgctttctctgagaacgtgcctgggacaacagctaaagatgtcatggacatggtgctggtgactcaatactttgacaccatgaaagagattggagcatcttcaaagtcctcatctgttttcataccacatggtcctggcgcagttaaggacattgccatgcagattcgggatggtctgcttcaggccaccacttcacagaattaagctttcctggagttgtaaataacaaatagtagcgtgccagattttttttcagtaaatgcttttcttgtttgaacttaaaatgtctgcatctttactcttatattggatagattcatggcagtgtctatttttatgcgtgtaa

SEQ ID NO: 27143 - DNA, 393 bp, Glycine max
  Clone ID: LIB3051-012-Q1-E1-C12
agagagtagtgagtagtgagagggaggaagcagaagtgaagcgatgaatgccccagatcgttacgagcgtttcgtcgtccctgaaggcacaaaaaagttttcttatgagatggacacgaagatcatcaatgcgtcatccttcaccatcgagtaagaggagcacactatcaacaacatcctccgcatctgcacagagaccccaatgtcttgattgtcagatacaagcttcctcatgctcttcaatacaaaattattgtcagggttagcgtcttttccttattactactactactgccttctttcaatttcatggaatagtttaggttttagttctaagctatttcgaccatatagttagttagggttaaagaataagacccaaatcctactttt

SEQ ID NO: 27144 - DNA, 430 bp, Glycine max
  Clone ID: LIB3051-012-Q1-E1-E1
cttcatcgctgagaagagatgcgctcctctaatgctccgtttggcatggcactctgctggaacttacgacgtgagctcgaagaccggtggtcccttcggaaccataaagcacccctccgaactcgctcacggcgctaacaacggtcttgacatcgctgttaggcttttggagccactcaaagcggagtttcctattttgagctacgccgatttctaccagttggctggcgttgttgccgttgaggtcaccggtggacctgaagttcccttccatcctggaagagaggacaaacctgagccaccaccaagagggtcgcttggccgatgccactaagggttctgaccatttgagagatgtgtttggcaaagctatggggcttagtgagcgagatatcgttgctccgtcggggggtcagactattggagctgc

SEQ ID NO: 27145 - DNA, 277 bp, Glycine max
  Clone ID: LIB3051-012-Q1-E1-E4
cgttgccattctcatcctcttctttctctctctaccattgccatggatccctacaagcaccggccatccagcgccttcaattctcccttctgggacacaaattccggtgctcctaattggaacaacaactcctccttaaccgttggggccagaagtccaattctgctggaagattatcaacctgtggagaagcctgcaaattttgatagggaacgtttcccaaaacgtgttgttcaaggcaagggggctagttcaaaaggtttccttgaagtcaccc

SEQ ID NO: 27146 - DNA, 418 bp, Glycine max
  Clone ID: LIB3051-012-Q1-E1-E12
cggctcgacccaagcgtcagagaaaacctaagcttagaattagaaacaaagaaaagaagaaaggaaagaattgatcgttgaaaatgcagggaggaaagaaagcgggagagtccattaaggaaacagctacaaacattggtgcttctgccaaggctggcatggagaagaccaaggccactgtccaagagaaggcagaaagaatgacagcacgtgatccggtgcaaaaggagttggcaacccaaaagaaagaggcaaagatgaaccaggcggagctggacaagcaggcggcgcgtcagcataacacggcggccaaacagtccgccaccacggctgggcacatgggacatggccaccacaccaccggaaccgggactggaaccgccacgtattccaccaccgggggaatatggtcagccca

SEQ ID NO: 27147 - DNA, 419 bp, Glycine max
  Clone ID: LIB3051-012-Q1-E1-F10
ccggctcgacccaagcgtcaggtgttttgttagttcacacactaagttctgaaaaatgagttccaaagtttttcttattctacttatgttcatggccactatacttttgatctcctctgaggttgcacccgatgatgcataccagaattttgacaaaacagatgggaagcgtagtgcaaatggggtagatgaaagcaaatattggcgtggtggctatggcgactatggtggttggcgtggtggtggttggcgtggtggctatggaggctggcgtggtggctatggtggtgggcgtggtggctatggtggctggcgtggtggctatggtggtgggcgtggtggctacggaggttggggtggtggctttggccctaacgaacataatgaggctgggattgatgctagccctcacaactaag

SEQ ID NO: 27148 - DNA, 399 bp, Glycine max
  Clone ID: LIB3051-012-Q1-E1-G10
agcccacgcgtccgcccacgcgtccggagagagaggttttgacgcaacacactttcactgagaaaggatctctatctaccaaggagcagaataaaacccttctctctggtaagtgaataagagaatggcttcagatcggaaacttcacactttcgaggaggtggcaaagcacgaccagaccaaggattgctggctcatcatttctggcaaggtgtatgatgtcacccctttcatggaggatcatcccggaggtgatgaggttttgttatctgcaacagggaaagatgcaaccaatgattttgaagatgttggacacagtgattctgctagagatatgatggaaaaatactacattggtgagattgattcatcaactgtaccactaaaacgtacctacat

SEQ ID NO: 27149 - DNA, 356 bp, Glycine max
  Clone ID: LIB3051-012-Q1-E1-H3
attcaagggcatctccttctcaaaatagtagtattattcttccattcataatgggtgttttcacattcgaggatgaaatcaactcccctgtggctcctgctactctttacaaggccctagttacagatgccgacaacgtcatcccaaaggctcttgattccttcaagagtgttgaaaacgttgagggaaatggtggcccaggaaccatcaagaagatcactttcctttgaggatggagaaaccaagtttgtgctgcacaaaatagaaaacattgatgaggcgaacttgggatacagctacaacgtggttggggggtctgcattgccaagacacggcggggaaagatcacattcgac

SEQ ID NO: 27150 - DNA, 404 bp, Glycine max
  Clone ID: LIB3051-013-Q1-E1-B9
agcaaaaccggttccaaggtcggagagtacgcagattacgcttctcagaaggccaaggaaacaaaagatgcaacgatggaaaaagctggagagtacacagattatgcttcgcagaaagcgaaggaagcgaagaagacgaccatggagaagggtggagaatacaaggattactctgcggagaaagctaaggagagaaaagatgctactgtgaataagatgggagagtataaggactatgctgcggagaaagccaaagaggggaaagatgctactgtgaataaaatgggagagtataaggactatgctgcggagaaaacgaaagaggggaaagatgcccactgtgaatagatgggagagtataaggattacactgcggagaaggcgaaagaggggaaagatacgac

SEQ ID NO: 27151 - DNA, 400 bp, Glycine max
  Clone ID: LIB3051-013-Q1-E1-D6
acccacgcgtccgcatcgctgatcaaacttcaaaccctagctaggatttcaaggtacacttaacgatggcttcaaaacgcattactaaggagttgaaggatctgcagcaggaccctcctgtttcctgcagtgctggccctgttggtgatgacatgtttcattggcaagctacaattatgggtccaactgacagtccttatgctggtggtgtattcctggtgaccattcacttcccaccagattatccatttaagccaccaaaggtttccttccgaaccaaggtatttcaccctaacataaacagcaatggaagtatctgtctggacattctgaaagagcagtggagtcctgcccttacagtttccaaggtgctactttcaatttgctccctgctgacaga

SEQ ID NO: 27152 - DNA, 441 bp, Glycine max
  Clone ID: LIB3051-013-Q1-E1-H1
accacgcgtccgcccacgcgtccgctcgtttctggtccaaattcattgatgataaggtttttggtgctgcatggaaatccgttttcacagctgatgagaaagagcgtgagaagaatgttgaggaagcaattgaggctctgcagtttcttgagaatgagataaaggacaagaagttctttggaggagaggagattgggttggtagatattgctgctgtctacatagcattttgggtccctatggttcaagaaattgcagggttggagttattcacaagtgagaaatttcctaagctccacaattggagccaagaatttttgaaccatccaattgtcaaagaaagtctgccccctagagatcctgttttcccctttttcaagggtctctatgaaagcctttttggttcaaaatagatttgatgatgtggtgtgagacttagta

SEQ ID NO: 27153 - DNA, 382 bp, Glycine max
  Clone ID: LIB3051-013-Q1-E1-H10
cgacgtaagcgtatagatgattatgctctggatttgatttcctctcaaattgcagaagcacgagattcagagccgccgccatcaacggcaaggaccgctcctcctcgtccctcttagccgccgccaaggactcccgctccgcctccgtcaccgcccctatctccaagaattccaacgcttccgacgaggaatctgaaacagacagcgaggagtctgatgttagtggctccgacggagatgacacatcgtggatctcgtggttctgcaatttgagaggaaatgaattcttctgcgaggttgatgacgattacatccaggacgacttcaacctgtgtggattgagcagtcaagtgccttactatgattatgctctggatttgat

SEQ ID NO: 27154 - DNA, 401 bp, Glycine max
  Clone ID: LIB3051-014-Q1-E1-B11
cgacccacacgtacgcccacgcgtccgctcactttcatttctacatccctggctctgttccgtcgatgacgatggcgtttagggtgcgaaaccctgacctccgctttctcattcttctctctctcttgtccatcacttccgccaaggtcttcttcgaggagcgtttcgatgacggatggggaaatcgttgggttaaatcagattggaaaaaagatgagaacctggctggggagtggaaccacacctctggccaatggaatggagacgctaacgacaaaggtattcaaaccagtgaggattacagattctacgctatttcagctcagtaccctgaattcagcaacaaggataagacactagtcttccaattttctgtcaagcatgaacagaagcttgactgc

SEQ ID NO: 27155 - DNA, 375 bp, Glycine max
  Clone ID: LIB3051-014-Q1-E1-F8
aatcagaagaagatcactttcgttgaggatggagaaagcaagtttgtgttgcacaaaatagaatcagttgatgaggcaaacttgggatacagctatagcgtagttggtggagttgggttgccagacacagtggagaagatcacattcgaatgcaaattggctgctggtgccaacggagggtctgctgggaagctaactgtcaaataccaaaccaaaggagatgctcagcccaacccagacgacctcaaaattggcaaagtcaagtctgatgctcttttcaaggccgttgaggcttaccttttggccaatcctcattacaactgatccaatattcaacttaattatcatcagtgtcttgcttatcatatacaagag

SEQ ID NO: 27156 - DNA, 307 bp, Glycine max
  Clone ID: LIB3051-014-Q1-E1-G10
gttttctttcgcttgttcgtttgtttaattcaataaaggaaattaggcatgaccctcttgttgagtatgctctgcctatttgaaaatttccacacctcttttaattgtcgtaatgatgtgtgaagtgtgtgttattttaaaaaaaaaaaacaaaaaaaaaaaaaaaaaaaaagaaaaagaaaagggcggcagatcaaaaagagttaaaactaaggtaagcatgcatacgaaatcaaaaatcttcgatagtgtaaactagtctcaattgacaggcattcgttttacaccgatcttgattgggaaaaac

SEQ ID NO: 27157 - DNA, 294 bp, Glycine max
  Clone ID: LIB3051-014-Q1-E1-H4
aaatttccgcctcctcccaatcccggaaccccccaatcaacatggtgaacgttccgaaaacaaagaagacatactgcaagagtaaggagtgcaggaagcacaccctgcacaaggttacccaatacaagaagggtaaagatagcattgctgcccaaggaaaacgccgttacgatcgcaaacaatctggttatggcggacaaactaagcccgtcttccacaagaaggctaagaccaccaagaagattgttctgaagttgcaatgccagggtttcaagcatgtctcccaacacgcta

SEQ ID NO: 27158 - DNA, 381 bp, Glycine max
  Clone ID: LIB3051-014-Q1-E1-H11
cgacccacgagtacgcagctatacttgttccttttgaaggttagaagtgctacaatacaaacaatggcagctactcaggaagatgtgaagcttttgggtattgtgggaagcccatttgtgtgcagggtccagattgcccttaagttgaagggagttgaatacaaatttttggaagaaaatttgggcaacaagagtgatctgcttctcaaatacaaccctgttcacaagaaggttccagtgtttgttcacaatgagaagcccatagcagagtctcttgtgactgttgaatacattgatgagacatggaagaacaaccccatcttatcttctgatccttaccatagagccttggcccgtttctggtccaaattccatgatgat

SEQ ID NO: 27159 - DNA, 400 bp, Glycine max
  unsure (1)..(400): unsure at all n locations
  Clone ID: LIB3051-015-Q1-E1-A3
gaggcacgcgtcaacccaaacgtccggtgacgctggaacttcatccaagctgttgatcaagggaggcaccgttgtcaatgctcaccaccaacaggttgccgatgtttatgtcgaagatggtatcattgtttccatcaaatccactattatggttggagatgaggtgactgtcatagatgccactggcaagtttgtcatgccagggggcaccgatcctcacacccacctagagtttgaatttatgggtacagaaactgtagatggcttcttcggtggtcaggctgcagcattagctggtgggacaacaatgcacattgactttgttataccacgtaaaggaagtttaacggctggtattgaagcctatganaagaaggcaaggaagtcttgcatggattat

SEQ ID NO: 27160 - DNA, 402 bp, Glycine max
  Clone ID: LIB3051-015-Q1-E1-A5
agcccacgcgtccgctcaaaagtgatattcttaagaatcctgttgtcacagagattgcagagagattggggaagacaccagcacaagttgcccttcgatggggcttgcaagcaggtcatagtgtgcttcctaagagcactaatgagtccagaatcaagggaaattttgatatctttgactggtctattcctcaagatttgatgaccaagatctctgaaattaagcaggaaaggctagttaaggccagtttttttgttcacgagacctatggtgcctataggagcattgaagacttctgggatggtgaactctgagcaatatgcatctttgagacgttgaaaaatacattgctcctagagcaaatttattctgccttatacccactagttgtagtgattcaag

SEQ ID NO: 27161 - DNA, 402 bp, Glycine max
  Clone ID: LIB3051-015-Q1-E1-C1
gcgtcaggcagaggctaccctaatcctctcctcttcctctctactaatttcagctatggccgacgaagctgtggttgttccagatcccacccagatcgatgtcaagctctttaaccgctggagcttcgacgatattgagtggcgacatccaagcacgccacgtatgtgcctcacaccgccggcaggtactcggtgaagcggttcaggaaggcgcaatgccccattgttgagaggctgaccaactctctcatgatgcacggtagaaacaatggcaagaaactcttggctgttaggatcatcaaacatgctatggagattattcatttgttgactgaccagaaccccattcaggttattgttgaagctgttgtcaacagtggtccacgtgaagatgcaacaaga

SEQ ID NO: 27162 - DNA, 413 bp, Glycine max
  Clone ID: LIB3051-015-Q1-E1-C5
gacccaagcgtcagcccacgcgtccgcgctctgtttctgtctctgtgtttgcggctgaggattccgaacgagcgaccttcttcgtttctcgcaaagtttaagtcatcatgggtaaggaaaagactcacatcaacattgtcgtcattggacatgtcgactctgggaagtcaactaccactggtcatttgatctacaagcttggaggtattgacaagcgtgtgattgagaggttcgagaaggaggctgctgagatgaacaagaggtcattcaagtatgcctgggtgcttgacaagctcaaggctgagcgcgaaagaggaattaccattgatattgctttgtggaagtttgaaaccaccaagtactactgcacagtcatcgatgcccccggacatcgtgactttatcaagaacatg

SEQ ID NO: 27163 - DNA, 389 bp, Glycine max
  unsure (1)..(389): unsure at all n locations
  Clone ID: LIB3051-015-Q1-E1-C11
acgcgtcagggagaaatcatgcaacctgactgggacatgttcatagttacaccagcagcagattatcaggcctgcagctcgtgcaattggtggatgtcctatttatgttagtgacaagccaagcaatcacaattttgatcttcttaagaagctggttctcccggatggttcggttctccgtgctcagttacctggcaggccaactcgtgattctctatttgtggattcagccagagataggactagcttgctcaaaatatggaacctgaacaaatgctctggagttgttggtgtacttaactgccaaggtgctggatggtgcaagatagagaagaaaacccgcatccatgatacatctcgtggtacactcancgcctctgtctgcgcct

SEQ ID NO: 27164 - DNA, 293 bp, Glycine max
  Clone ID: LIB3051-015-Q1-E1-D2
gcgtcagtctcaatctcaatctattattattattcctcaattaataatgggtgttttcatattcaatgatgattacatatcccctgtggtccatgcaaatcttgacaaggttttagttacatatctcgacaacatcttcccgatggcacatgattccttcaagagtgttgacaatgtttacggaaatagtggcacaggatacatcacgaatatcactttccttgaggatagataattcaagtttgtgctgcatagaatagaaagcattgatgacgctaacttgggatacattt

SEQ ID NO: 27165 - DNA, 406 bp, Glycine max
  Clone ID: LIB3051-015-Q1-E1-D7
gacccaagcgtcaggagaaacatggcttccttaagctccttagtgctgctccttgcagctctaattctagcccctcaagttcttgcaaactatgagaatcccccagtgtacaagcctcccactgagaagccaccagtttataagcccccagttgagaagcctcctgttgacaaacctccagttgaaaatcccccaatttataagcctccagtagagaagccaccagtgtacaagcccccagttgagaaacccccagtttataagcccccagttgagaaaccaccagtgtacaagcccccagttgaaaaaccaccagtgtacaagcccccagttgaaaaacccccagtgtacaagccgccagttgaaaaatcaccagtgtacaaacccccagttgagaagcccccag

SEQ ID NO: 27166 - DNA, 412 bp, Glycine max
  Clone ID: LIB3051-015-Q1-E1-E8
ggctcgacccaagcgtaaggttcattctctttgcgcagttccctacctctcctttcaagatgcagatcttcgtcaagaccctcaccggaaagaccatcacccttgaggtggaaagctctgacaccatcgacaacgtcaaggccaagatccaggacaaggaaggaattcccccggatcagcaacgtctcatcttcgccggaaagcagctcgaggacggccgtaccctcgccgactacaacatccagaaggagtcaacccttcaccttgtccttcgtctccgtggtggcatgcagatcttcgtcaagactctcactggcaaaaccataaccctagaggtcgaaagctctgacaccattgacaacgtcaaggccaagatccaggacaaggagggaatccccccaaaccagcaacg

SEQ ID NO: 27167 - DNA, 355 bp, Glycine max
  Clone ID: LIB3051-015-Q1-E1-G11
tagcgtcacgaattctagggccgcaggacgtctaagagacgacacggtggttcggcggggaacaagttccggatgtcgctgggtctgccggtggcggcgacagtcaactgcgccgacaatacggcggcgaagaacctctacatcatagcggtgaaagggatcatcgggcgtttgaaccgtctcgcctccgcttgcgttggcgacatggtgatcgccaccgtgaataacgggaaacccgatctgatgaagaacgttttgccagctgtcattgttccccagcgcaagccatggccccgaaatgacggtgtctacatgtatttcgaatataataccggtgttattgtcaatcccaaaa

SEQ ID NO: 27168 - DNA, 421 bp, Glycine max
  Clone ID: LIB3051-015-Q1-E1-H2
acgcgtaagtgaaagaatcaagagtgttgaaaacgttgagggaaatggtggcccaggaaccatcaagaagatcactttccttgaggatggagaaaccaagtttgtgctgcacaaaatagaaagcattgatgaggcgaacttgggatacagctacagcgtggttgggggtgctgcattgccagacacggcggagaagatcacattcgactccaaattggttgctggtcccaatggagggtctgctgggaagctcactgtcaaatacgaaacaaaaggagatgctgagcccaaccaagacgaactcaaaactggaaaagccaaggctgatgctctcttcaaggccattgaggcttaccttttggcccatcccgattacaactaatcctcttcaacttacttgttaacactttcctggcttttc

SEQ ID NO: 27169 - DNA, 289 bp, Glycine max
  Clone ID: LIB3051-015-Q1-E1-H5
ccccaaggggaaaactcccaaaccaatgaaaaagtgaaagcgaaaattcaggacaaggaaggaatcccaccggaccaacaaagggttatttttgctggcaaacagctagaggatggaaggaccctccctgactacaacatccagaaggagtcaactctgcacttggtgttgcgtcttcgttgggggttttaagctggagctgatttctgtgtgatgttcgatgttggattttcccaaacattttaagaagaaatgtgatgtgtaatgggtctgtaatgaacctttgaaa

SEQ ID NO: 27170 - DNA, 389 bp, Glycine max
  Clone ID: LIB3051-015-Q1-E1-H7
aggcaccttgcagaatcaattttctctctcaatcgtctttcatggctcgtaccaagcaaaccgctcgcaaatccaccggtgggaaggctcctaggaagcaactcgccaccaaggctgcaagaaaatctgcacctaccaccggtggagtcaagaagcctcatcgctatcgtcctggaactgttgctcttcgtgagatccgaaaataccaaaagagcacagagcttctgatccgcaagctcccctttcagcgtcttgttcgtgaaatcgcgcaagacttcaaggtaagttctaaattcaaaaacaaggttttaaatattggttgcggtcctgttgtggtttcattgagaacgttgatattgcagcaaatcactgacattttttgttgatat

SEQ ID NO: 27171 - DNA, 428 bp, Glycine max
  Clone ID: LIB3051-016-Q1-E1-A6
agcccacgcgtccgcacaaacacaaacaaagacaacaaccttgtttgtctgcaatcaaaacctttcaagctggcgttcgagaaccaagacacccctgtccgagaaatcaagcccaagaaccggagaatcatgggtgctggaggccctgatgacgaggacaataggtggccaccatggctgaaacctcttctcaaagagagcttctttgttcaatgcaagcttcacgctgattcgcacaagagcgagtgcaacatgtattgcttagattgtatgaacggtgctctctgctctctctgcctcgcttaccacaaagatcaccgtgctattcagataagaaggtcttcataccatgatgtgattacggttaatgagattcagaaggtgttggacatcacaggggtccaaacctacattatcaacagcgcaag

SEQ ID NO: 27172 - DNA, 405 bp, Glycine max
  unsure (1)..(405): unsure at all n locations
  Clone ID: LIB3051-016-Q1-E1-A8
agcccacgcgtccgcttccatttccattaaaaagaaaatatcataaatgggtattttcacattcgaggacgaaatcacctcccctgtggctcctgctactctttacaaagctctagttacagatgccgacaacatcatcccaaaggctcttgattccttcaagagtgttgaaaacgttgagggaaatggtggccctggaacaatcaagaagataactttcgttgaggatggagaaaccaagtttgtactgcacaagatagaagcagttgatgaggcaaacttgggatatagctacagcgtagtgggtggtgctgcgttgccagacacagcggagaagatcacattccactccaaattggctgctggtcncaatggaggctctgctggcaagctcactgtcgaata

SEQ ID NO: 27173 - DNA, 327 bp, Glycine max
  Clone ID: LIB3051-016-Q1-E1-A9
cgcgtcagctgctattccctacactcctacctaaggagtgtactattatccgcagtttctattctctctagctactttcatgtatgttcaatgctatatatagccttgaattaatgtcaactatgttctaattaatgctatagcttcggtttgtgttaaaaaaaaaaaaaaaaaaaaaaaaaaaaaaaaaaaaaaaaacaaaaaaaaaataaaaaaaaaaaaaaacaaaaaaagaaagaaaaaaaaaaaaaaaaaaaaaaacaaaaaaaaaaaataaaaaaaagaacaattaaaagaaaaacaaaatcataggggggtggttcagaa

SEQ ID NO: 27174 - DNA, 383 bp, Glycine max
  Clone ID: LIB3051-016-Q1-E1-A11
cgcgtcaggcaaaaacgcattgtgtttctctctttccgcggcgtagatctgagcagtttgggaaaccctaactgctctcaccactctctttgctttttttcctctccgatcaacgacctctttcgtcgccctaagtcatggcaggacttgcacccgagggatcacagtttgatgctcgtcaatatgataccaagatgaatgagttgcttacatctgatggacaggattttttcacatcttatgatgaggtttatgacagttttgatgctatgggcttgcaggagaatctcctgagaggcatttatgcatatggttttgagaaccatcagctattcagcagagaggaatagttcctttctgcaaaggacttgatgttatacaac

SEQ ID NO: 27175 - DNA, 219 bp, Glycine max
  Clone ID: LIB3051-016-Q1-E1-B3
tatcgtggtggttgtgaccgtggttacccgcgtggtggtgaccgtggctgatgctgctgtacaaactagggcttgatgtcgttgattatggtttatgattatgctcagtaattttagctgtgtttgagtttgagtatctttatggttttgtgtcaccgtggttcttgtttttgatcaatacatctggttgtttatactccatttactcagttgataatt

SEQ ID NO: 27176 - DNA, 414 bp, Glycine max
  Clone ID: LIB3051-016-Q1-E1-B10
agcccacgcgtccgcccacgcgtccggcaattccccttccgtttcgtttcgatctcaaaacatgttcttcttcgattggttctatggcattctagcttccctcggtctctggcagaaagaagccaaaattctcttccttggtctcgataatgcagggaagaccacacttcttcacatgctcaaagacgagagattagttcagcaccagccgacccaacaccccacttcggaggaattgagcattgggaagatcaagtttaaggcttttgatttggggggtcatcaagttgcccgcagagtctggaaagactattacgcgaaggtggatgcagtagtttacctggttgatgcctttgacaaagagaggtttgcagaatcaaagaaggagcttgatgccttgctttcagatgaatc

SEQ ID NO: 27177 - DNA, 425 bp, Glycine max
  Clone ID: LIB3051-016-Q1-E1-C6
aggagaagtgaatgctgagcttcttgacacccaagtgaatcctgctgtgtgggaaattagtggacacatggttttaaagaggaggaaggattatgatgaggcgtctgaaggcaatgcttggaggcttcttgctgaggtgtccctttctcaagagaggtttcaagaagtcaatgatcttgtttttgaagccattggctgtggtgaattggaggatgtcaatgttcaaagtgtcaaaaaagaagttgatgcagtcagcacaagcgaacaccctactgtggtggtggtggctggttcacaagaatgtgtggttctacagtaacaaggctcttgtattttgaacaaattcagaaaatctgcagtgttttaagaataattgctgaaatgtgtcaccgtttaagtcatactattgccttgtgcttgagcct

SEQ ID NO: 27178 - DNA, 419 bp, Glycine max
  Clone ID: LIB3051-016-Q1-E1-C7
aggcagttgagactgaccaaggccttcacatggtttacatgcatgctgggaccaatccctttgaagtcatcaatcaagctgtcaaggctgtggaaaaacacatgcaaacttttcttcatcgtgagaagaaaaggttgccatcttgtcttgactggtttggatggtgcacatgggatgctttctatactgatgtcacagctgagggtgttgaggaaggcctgaaaagtctatcacagggaggtacacctccacgattcctcatcatagatgatggttggcaacagattgaaaataaagcaaaggatgctactgaatgtttggtacaagaaggagcacagtttgctactaagttgactggtattaaagagaatactaaatttcaaaagaaattacagaacaatgagcagatgtcaggtctg

SEQ ID NO: 27179 - DNA, 440 bp, Glycine max
  Clone ID: LIB3051-016-Q1-E1-D9
tcccgactcgaccaacgcgtcagcccacgcgtccgcccacgcgtccgctctgatcagaattggagtttcacctcagtaatctgcataataaagatgtggtgtattcgaggattacatagattaccaaggtgaatctctaattttgattagagaacaacaccaactatatcaaggttttgttcttttccagttgaggttaccaatactcttgtatgattgtctttgtatgaatgaagatggatgatattggcattgctgttacactgacaatggtttgaatggattttatgcaggcaagccctttgtgaatgtcttgaaggaagctggtgtgcttcctggcatcaaggttgacaagggcacagtcgagcttgctggaactaatggagagaccaccactcagggtctagatggccttggtcagcgttgtgccaagtactacg

SEQ ID NO: 27180 - DNA, 308 bp, Glycine max
  unsure (1)..(308): unsure at all n locations
  Clone ID: LIB3051-016-Q1-E1-H5
ccggccgacccacgcgtcagattattattcttccatttccattaaaaagaaaatatcataaatgggtattttcacattcgaggacgaaatcacctcncctgtggctcctgctactctttacanacctcaatttacaaatgcgaacaaaatcatccaaaaggctcttgattccttcaaaattgttaaaaactttaaggaaaatgttggccctgaaacattcagaaaaataccttcctttaaggatgaaaaaaccaatttggtacggcacagaataaaaccatttaataaggcaaccttggaataaacca

SEQ ID NO: 27181 - DNA, 262 bp, Glycine max
  Clone ID: LIB3051-016-Q1-E1-H8
agctcactcatcaatctcgtttgttctcactaactattacttcatcatgtcgtcgagcacagttggtcaagtcatcaaatgcaaagctgcggtttcatgggaggcagggaagccacttgtgattgaagaagtagaggtggcaccaccacaagctggtgaagtgcgtttgaagatcctctacacctctctttgccacactgatgtttacttctgggaagccaagggccaaactccattgtttcctcgtatatttggtcatgaa

SEQ ID NO: 27182 - DNA, 409 bp, Glycine max
  Clone ID: LIB3051-016-Q1-E1-H9
agcccacgcgtccggctttgtttagatcagaaccagatcgtgttctcttcttccattggcaaacatggcaactcaaatgagcaagaagagaaagtttgtggcggatggagtgttcttcgccgaactgaacgaggttctgacacgtgagttggcggaggacggttactccggcgtggaggttagggttacgccgatgcgcaccgagattatcatcagagccaccagaacccaagccgttctcggtgagaagggaaggagaattagggaacttacctcagtggtgcagaagaggttcaaatttcccgagaacagtgtcgagctttatgctgagaaggtcaacaacagaggcctctgtgccattgctcaggccgagtcgcttcgctacaagcttctcggtggcctcgctgtt

SEQ ID NO: 27183 - DNA, 407 bp, Glycine max
  unsure (1)..(407): unsure at all n locations
  Clone ID: LIB3051-017-Q1-E1-A2
aggaacagtatgtctgggagtcccatgccggtggctcatttactgtgacaagagatacatctggtgagaaccttggtaggggaacaaagataactttgtttcttaaggaagatcaacttgagtatcttgaggaacgccgtctgaaggatttgataaagaagcattctgaattcattagctatccaatttctctctggattgagaagactactgaaaaggagatttctgatgatgaggatgatgaagagaagaaggatgagganggtaaagttgaagatgtggatgaagataaggaaaaggangagaagaaaaagaagaccattaaggaggtatctcacgagtggtcattggtgaacaagcagaagcctatttggatgangaaacctgaagagattacgaaagaagaa

SEQ ID NO: 27184 - DNA, 419 bp, Glycine max
  Clone ID: LIB3051-017-Q1-E1-D12
agcccacgcgtccgcccacgcgtccgcggacgcgtgggctttgcgcagttccctacctctcctttcaagatgcagatcttcgtcaagaccctcaccggaaagaccatcacccttgaggtggaaagctctgacaccatcgacaacgtcaaggccaagatccaggacaaggaaggaattcccccggatcagcaacgtctcatcttcgccggaaagcagctcgaggacggccgtaccctcgccgactacaacatccagaaggagtcaacccttcaccttgtccttcgtctccgtggtggcatgcagatcttcgtcaagactctcactggcaaaaccataaccctagaggtcgaaagctctgacaccattgacaacgtcaaggccaagatccaggacaaggagggaatccccccagaccagca

SEQ ID NO: 27185 - DNA, 224 bp, Glycine max
  Clone ID: LIB3051-017-Q1-E1-E4
cacgcgtcaaggaactccttcgcaaactagtactattattcttccattcataatgggtgttttcacattctaggatgaaatcatctcgcctgtggctcctgctactctttataaggtcctaattacatattcagacaacgtcatcacaaaagctcttgaatccttcatgagtgttgaaaactttgagggaaatggtagttaggaatcatcatgatgatcacttt

SEQ ID NO: 27186 - DNA, 407 bp, Glycine max
  Clone ID: LIB3051-017-Q1-E1-F3
agccaacgcgtccgcccacgcgtccggttcattctctttgcgcagttccctacctctcctttcaagatgcagatcttcgtcaagaccctcaccggaaagaccatcacccttgaggtggaaagctctgacaccatcgacaacgtcaaggccaagatccaggacaaggaaggaattcccccggatcagcaacgtctcatcttcgccggaaagcagctcgaggacggccgtaccctcgccgactacaacatccagaaggagtcaacccttcaccttgtccttcgtctccgtggtggcatgcagatcttccgtcagactctcactggcaaaacataaaccctaaaggtcaaaagctcggacaccattgacaacgtcaaggccaagatccaggacaaggagggaatcccccc

SEQ ID NO: 27187 - DNA, 417 bp, Glycine max
  unsure (1)..(417): unsure at all n locations
  Clone ID: LIB3051-018-Q1-E1-B4
agcccacgcgtccggaagctagtgatcaatcatcaacacagagctgagtgtgttgctctgtgaatccaccttcttcttccattggaggaccatttcctcctggaatagaaatactaccacacttttcttttttcacttctctaagttgctaagttaattgctccttcattttttcactcttcgttctcgcgtacccgtgtcacggtaactcgtggtgaagtgttcgaaaatgactgtcacacctaagatctcagttaacgatgggaaacttgttgtccatggtaagaccattctgactggagtgccagacaacgttgtgctgactccaggttctggaaggggtcttgtgactggtgcttttgttggtgccacagcttcacacagcanaagtctccatgtgtttccaatgggtgtttt

SEQ ID NO: 27188 - DNA, 415 bp, Glycine max
  Clone ID: LIB3051-018-Q1-E1-B11
agcttcaagattcaggtactgcgtttcggaagcagacacagatggctcgtacgaagcaaaccgctcgtaagtccacaggaggaaaggctcctaggaagcagcttgcaaccaaggctgcacgtaagtctgcaccaactactggtggtgtgaagaagccccaccgttatcgtcctggtaccgttgctcttcgtgagattaggaaataccagaagagtaccgagcttttgatccggaagctccccttccagaggctggttcgtgaaattgctcaggacttcaagactgatctgcgtttccagagccacgccgtgcttgcattgcaagaagctgctgaggcataccttgttgggctctttgaggacactaacctgtgtgccattcacgccaagcgtgtaaccattatgcccaaggatat

SEQ ID NO: 27189 - DNA, 425 bp, Glycine max
  Clone ID: LIB3051-018-Q1-E1-C3
gacccacgcgtcagccatctcaaactagtaatatatactattattcatccattccattctatatatttcataatgggtgttttcacattcgaggatgaaaccacctctcctgtggctcctgctaccctttacaaagctctagttacggatgctgacaacgtcatcccaaaggctgttgacgccttcaggagtgttgaaaacgttgagggaaatggtggccccggaaccatcaagaagatcactttccttgaggatggagaaaccaagtttgtgttgcacaaaatagaagcgattgatgaggctaacttgggatatagctatagcgtagttgggggagatgggttgccagacacagtggagaagatcacattcgaatgcaaattggctgctggctccaacggaaggtctgctgggaagctaactgt

SEQ ID NO: 27190 - DNA, 417 bp, Glycine max
  Clone ID: LIB3051-018-Q1-E1-C9
gacccacacgtcagcccacgcgtccgaaaaaaaaccctctctttctctctcttccaaaacctaattttcattttttctcttcaaacaaattttcaaaatgcgtgagatccttcacatccagggtggccaatgcggcaaccagatcggcgccaagttctgggaggtggtttgcgcggagcacgggatcgaccccactggaaggtacggtggggactcagagcttcagctcgagaggatcaatgtctactacaacgaagccagctgcggccggttcgtgccgcgcgcggttctcatggacctcgaaccgggcaccatggacagcgtccggtccgggccgtacgggcagatcttcaggcccgacaactttgtgttcgggcagtccggggcatgaaacaactgggccaaggggcactacac

SEQ ID NO: 27191 - DNA, 409 bp, Glycine max
  Clone ID: LIB3051-018-Q1-E1-F1
agcccacgcgtccggatgctttaatacaattatatcacaatttcatcacagactttgagacgaaaatcaaccttctcaagcttgcacattttgctgttatagtttctcggcagtattctgaaaaagaagctgctgttggttatcttggaggggtcattcagaaacttcaagacactagggagcagcgcatagaagaacctattctttacattaagatgcaaatagcaatattcaagcttgagcaatgtgatcaaaatgaatgcaagaaacttctagaagatgggaagagtacactcgacagcatgacagatattgattcatctgtatatgctagctattactgggtatcatctcagtttcataagacatgccaagaatttgctgagttctacaaaagtgcccttctcta

SEQ ID NO: 27192 - DNA, 411 bp, Glycine max
  Clone ID: LIB3051-018-Q1-E1-G1
aggttacgaatagattatcctaagtctttgggaatagtgctgcaatggcttcaagtcaggaggaggtgacccttttgggagctactggaagcccatttgtgtgcagggttcatattgccctcaagttgaagggagttcaatacaaatatgtcgaagaaaatttgaggaacaagagtgaactgcttctcaaatccaacccagttcacaagaagattccagtgtttattcacaatgagaagtccatagcagagtctcttgtgattgttgaatacattgatgagacatggaagaacaatcccatcttgccttctgatccttaccaaagagccttggctcgtttctggtccaaattcattgatgacaaggtttttggtgcttcatggaaagctgttttcacagctgatgagaaag

SEQ ID NO: 27193 - DNA, 339 bp, Glycine max
  unsure (1)..(339): unsure at all n locations
  Clone ID: LIB3051-018-Q1-E1-H4
ctgcacttcttgatcattcgatttttcccctcaagatgcagatattcgtaaaaactttgaccggcaagaccatcacccttgaggtggaatcctccgacaccattgacaacgtaaaagctaagattcaagacaaggaagggatcccacctgaccagcagagacttatctttgcgggtaaacaacttgaggatggtcgcacccttgccgattacaacatccaaaaggaatcaaacctccatctcgtgcttcgcctcaagggtggcatgcanatctttgtcaagactttgaccgggaagaaacatcaccttgaggtggaatcctcggaacacattgataatg

SEQ ID NO: 27194 - DNA, 423 bp, Glycine max
  Clone ID: LIB3051-018-Q1-E1-H8
gacccacaagtcaggatcaatctctctctctgtctcccaatcaaaacagacatgggtttgaaggaggattttgagcagtatgctgagaaagcaaagactttgccaccgactcaatcaaacgaagacttgcttatcctttatggattgtacaagcaggccaccgttggacctgtcaacaccagccgtccgggaatgttcaacatgagggacagagctaaatgggatgcatggaaggctgttgaagggaaatccaaggacgaagcaatgagtgattacatcactaaggtgaaacagctgctggaagcagccggcatgcctgcttgataacattgtcatgccttgctttcttattctgtgctagaagttcccaacagtttggaaataaacaattgcagtgtttgaagcttttattatcataatctt

SEQ ID NO: 27195 - DNA, 401 bp, Glycine max
  Clone ID: LIB3051-019-Q1-E1-F6
accacgcgtccgcccacgcgtccgcccagacgtctgcaagttgcttggcaaatttgagttatctggaattccacctgctcctacaggtgttccacacatcaccgtttgctttgacattgacgccaacggtatattgaacgtgtctgcagaggacacaatcactggacagaagaacaagattacaattaccatcgacaaatgaaggctttctaatgaggagattgagaagatggtgcatgaagctgagaagtacaacgctgaggatgacgagcataagaagaaagtggaggccaattcgacattggagaattacccctataacatgaggaacacaattaaagatgataagattgcttccaagctgtctgctgatgattacaagaacattgatgatgcaattg

SEQ ID NO: 27196 - DNA, 292 bp, Glycine max
  Clone ID: LIB3051-019-Q1-K1-D10
caaactagtaatattattcttcgaatccattttattattcataatgggtatcggcacagttgaggatgaaaccacctaccctgtggctcctgctaccctttacaaagctctagttacagatgccgacaacgtcatcccaaaggctgtcgaagccttcaggagtgttgaaaaccttgaggggaacggtggccctggaaccatcaagaagatcactttcattgaggatggagaaagcaagtttgtgttgcacaaaatataatcagttgatgaggcaaacttgggatacagctat

SEQ ID NO: 27197 - DNA, 431 bp, Glycine max
  Clone ID: LIB3051-020-Q1-E1-A6
actcagttctctcacacactcattcggtgctccgaatctcagattctagggttagggttcccaatttctccaccgatcagaaaatgagttcaactggtggttctaccaagggcggaaggggcaagcccaaagcctccaaatccgtttcaagatcgcagaaagctggtctccaattccccgttggaagaatcgctcgattccttaaggctgggaaatacgccgagcgtgttggtgctggtgctcctgtgtacctctctgcagtgctcgaatatctcgctgctgatgttttggaattggctgggaatgctgctagggataacaagaagaatcgtattgttcctaggcacattcagcttgctgtgaggaacgatgaggaactgagcaagcttttggggtctgttaccattgccaacggaggtgtcttgccgaac

SEQ ID NO: 27198 - DNA, 434 bp, Glycine max
  Clone ID: LIB3051-020-Q1-E1-A7
aacgaatttctatctatctcttgtttcaatttcaacaacggttactcctttttcgttttgagtttcaatcaagccatcatcatgtctaccgcatcgcaacccaaggccaagaaaacggcgtcgtccaagaagcccctctcccaccctcccttcgccgtgatgatagcagaggcgattgcgagtctgaaagagagaaccggttcgagccaatacgcgataaccaaatacatcgaagggaagcacaaggagttgcctgcaacctacaagaagcttgtcctcgttcatctcaagaaatctgttgctgctggcaagcttgttaaggtgaaaaactcctttaagctcgcaccgactaagcctgctccggttaaggccgctgctcccaaaaagccaaccaaagctgccactaagcccgcttccaagcccaaagctgctac

SEQ ID NO: 27199 - DNA, 263 bp, Glycine max
  Clone ID: LIB3051-020-Q1-E1-C9
acggacgcgtgggttttgttatttgcatctgagattccgattagttaaatgatgttggttttcttagttgtagagaaccttgaatagtatttttgaaattacgaattcaagaaaaaaattaaaaaaaaaaaaaaaaaatgaggagagaaaagagagaaaaataaaaaaaataaaaaaaaaaaaaggaaaaaaaaaagaaaagtgagataaaatgaaagaggaaggtggaagtagaaaaaaaaagggggggtcgcccaaagggt

SEQ ID NO: 27200 - DNA, 444 bp, Glycine max
  Clone ID: LIB3051-020-Q1-E1-D2
acaagccttcgaacaagccttcgttcaaaggaaccaattaaggaaaaagaaaaccaccctgaaaacctcaggaattatcagaacattcccgggggaaaatttgtacttcaccccatcatgaatgtcccctcagaatttgagcatgtggaacagggggatgcattgtatgcaatggaattagctttgtctttggagaagttagtgaatgagaaacttctgaatgtgcacagtgtggcagatcgcaacaatgaccctcaaatggccgacttcattgaaagcgagtttttgtctgaacaggttgaatcaattaagaaaatttcagagtatgtggctcagttgagaatggttggaaagggtcacagtgtgtggcactttgatcaaagacttcttgattaggaagatgctgcttaatcttgaatagccttattattagtcttcatttac

SEQ ID NO: 27201 - DNA, 424 bp, Glycine max
  unsure (1)..(424): unsure at all n locations
  Clone ID: LIB3051-020-Q1-E1-E2
atttgttgcaggcatcacatctgatctcacacgattcggattcggaattttctcgatccctttctgatctgtgatctctgatctgtttgcgttacttgatcttatgatacttgtgttactatatgattcttttattactctcacgccaatagattatcaacgatcgtgagactggaagatccaggggttttggatttgtgaccttcgcctcggagcagtccatgaaagacgccatcgaagggatgaacggccaaaaccttgacggccgtaacatcactgttaacgaagctcagtcccgtggtggcggtggcggccgaggcngtggangtggtggatatggtggtggtcgcggtggtggatatggtggtggtggtcgcggttgtggagggggatacaaccgtatcggtggcggtcgacgctatgg

SEQ ID NO: 27202 - DNA, 433 bp, Glycine max
  unsure (1)..(433): unsure at all n locations
  Clone ID: LIB3051-020-Q1-E1-E7
acactagaagtattattattcttccatttccattaaaaagaaaatatcataaatgggtattttcacattcgaggacgaaatcacctcccctgtggctcctgctactctttacaaagctctagttacagatgccgacaacatcatcccaaaggctcttgattccttcaagagtgttgaaaacgttgagggaaatggtggccctggaacaatcaagaagataactttcgttgaggatggagaaaccaagtttgtactgcacaagatagaagcagttgatgaggcaaacttgggatatagctacagcgtagtgggtggtgctgcgttgccagacacagcggagaagatcacattccactccaaattggctgctggtcccaatggaggctctgctggcaagctcactgtcgnaatacanaccaaaggagatgctcag

SEQ ID NO: 27203 - DNA, 387 bp, Glycine max
  Clone ID: LIB3051-020-Q1-E1-E12
gacccacgcgtacaaccaagcctagaagcgaaatcgcaatcgcaatccagcgaatatgaaggtcgtcgctgcatacttgctcgcagtgttgggagggaatccttccccttctgccgatgacatcaaacacatcctcggcgcagttggagctgaggctgagaatgagttggttgagttgctcttgactgaagtcaagggaaaagacttcaatgagctaattgctagtggaagtgggaagatgtctgcagtgtctggtggctgtgcagcggttgccgttgctgctgcaccagctggaggtgctgctgcagttgctgccgaggcagacgaagaagagaggttcgaagagaaggaggagtctgagtaggatatgggtttcagtttgttcga

SEQ ID NO: 27204 - DNA, 446 bp, Glycine max
  Clone ID: LIB3051-020-Q1-E1-G8
gacccacgcgtcaatatttccctacctctcccttcaagatgcagatcttcgtcaagaccctcaccggcaagaccatcacccttgaggtggaaagctctgacaccatcgacaacgtcaaggccaagatccaggacaaggaaggaatccccccggaccagcaacgtctcattttcgccggaaagcaacttgaggacggccgtacccttgctgactacaacattcagaaggagagtactcttcacctcgtcctccgtctccgtggtggcatgcagatcttcgttaagacactcaccggcaagaccataaccctagaggttgaaagctccgacaccatcgataacgtcaaggccaagatccaggacaaggagggtatccccccggaccagcaacgtctcatcttcgccggaaagcagctcgaggacggccgcaccctcgccgactacaac

SEQ ID NO: 27205 - DNA, 431 bp, Glycine max
  Clone ID: LIB3051-020-Q1-E1-H7
aagtttctaagaactttattaatttttaatactgtaatgcatttgttgttatatcaggtgtctacattttcttttgtctacaaactaattttctttttatttgttacttgaacaggaactccttgcttccgtggatatggaaggcgtaatggagagcgtatgagaaagtctgttcgtgggtgcattgtcagcccagacctctctgttttgaacttggtaattgtgaagaaaggtgagaatgatttaccaggattgactgatgttgagaagccaaggatgagaggcccaaagagagcatccaacatccgtaaactgttcaacctgtctaaggaggatgatgttaggaagtatgtcaacacctaccgtcgtacatttacgacaaaatgaaaaagtgagcacagctcccaagatacgaagactggtcactcctc

SEQ ID NO: 27206 - DNA, 267 bp, Glycine max
  Clone ID: LIB3051-022-Q1-K1-F1
cacaaactagaagtattattattcttccatttccattaaaaagaaaatatcatagatgggttatttcacattcgaggacgaaatcacctcccctgtggcttctgctactctttacaaagctctagttacagatgccgacaacatcatcccaaaggctcttgattccttcaagagtgttgaaaacgttgagggaaatggtggccctggaacaatcaagaagataactttcgttgaagattgagaaaccaagtttgtactgcacaagat

SEQ ID NO: 27207 - DNA, 283 bp, Glycine max
  Clone ID: LIB3051-022-Q1-K1-F2
ccacgcgtccgggtcaagattgggtgggttgcttgttacttatccatcactgagaaaatatcataggtgggtattttcacattcgaggacgaaatcacctccactgtggctcctgctactctttacaaagctctagttacagatgccgacaacatcatcccaaaggctcttgattccttcaagagtgttgaaaacgttgaaggaaatggtggccctggaacaatcaataagataactttcgttgaggatagataaacctagtatgtactgcacaatataaaat

SEQ ID NO: 27208 - DNA, 197 bp, Glycine max
  Clone ID: LIB3051-022-Q1-K1-F4
cgtccgcgacaactactacaagtacttccttataatcaaaaccaacaacaactatggcaaggatcaaaagcactacgatgatcagggtcgcaaggttgacgagtatggcaacgttgagaagcaaaccgacgaatacggcaaccctgttcatgctgctagtgtcacctatgtagcctccataactgttgctggtggat

SEQ ID NO: 27209 - DNA, 209 bp, Glycine max
  Clone ID: LIB3051-022-Q1-K1-G1
cccgcctccacccacgcgtccgattgtttaaacctaattctcattttttcatcgttcgattcttctcctcctaaagaggcagatcttcgtgaaaactttgaccggtaagaccatcacccttgaggtggagtcctccgacaccatcgataacgtgaaagctaagattcatgacaaggaatggatcccaccttaccagcagagacttatct

SEQ ID NO: 27210 - DNA, 348 bp, Glycine max
  Clone ID: LIB3051-022-Q1-K1-H6
gttgccattctcatcctcctctgtctctctctctccaccattgccatggatcctgacaagctccggccatccagcgccttcaattctcccttctggactacaaattctggtgctcctgtttggaacaacaactcctctttaaccgttggagctagaggtccaattctgcttgaggattatcatcttgtggagaagcttgcaaactttgacagggaacgtatcccagaacgtgttgtccatgccaggggagctagtgcaaagggtatctttgaggtcacacatgacatatctcacctgacatgtgcagatttccttcgagcctttggagttcagactctttgtaattgg

SEQ ID NO: 27211 - DNA, 396 bp, Glycine max
  Clone ID: LIB3051-023-Q1-K1-B10
agtcgagcctcccgaagaaaaagcgaaggggccgtcgcacaagacattcagaatcaagaagaagttggcgaagaagatgaggcagaacaggcccatcccctactggatccgcatgaggaccgacaacaccatcaggtacaacgcgaagcgccgtcactggcgtcgcaccaagcttggattctgaggtgcttgctttgcctcgattcagtttatccaattaattagtgttttattttcttgagccaaaaacaatgctttggagtttttaatattttgcattttattccaagactatattgtgtaaagaatttattgtagtaccgttgacgtgagtctatttgcaatttcgagtatttgggcaaaaccaatctggtttgggcagaccttcataatctc

SEQ ID NO: 27212 - DNA, 224 bp, Glycine max
  Clone ID: LIB3051-023-Q1-K1-E2
ccgtaacctcgggaaaaggattggctctgagggctgggcacgggggtcccagtccggaacgcgtcggctgtcggtggactgctcgagctgcttccgcggcgagagcgggtcgtcgcgtgccggtcgggggacggattgggaacgggcccttcggggcctattccctgggcatttaacagtcaactctgatcttgtaccgactaggcgaatccgactggttaatt

SEQ ID NO: 27213 - DNA, 429 bp, Glycine max
  Clone ID: LIB3051-023-Q1-K1-F2
gctccttctaatcccatcccatgtgcttttacttttaatccttttttcaagaaaaagagagcttgttttgtttgtgggaagccaggacattttgctcctcagtgtaggtatagagttatcagaaatggcaatcctcctaaatgatgcaatcctaccccccaagggcattggatagaagactccaagaaaattgggccaaagatgcaagagaaggccctagggttctcatgagtcttagggtagattttgggcccatgggctaagtatgagcttacttatctttgtacatattagattagggtttcattattttttgggccttgtatttagggctctatactgtatggatgataccctagtaatatatgattttttaacccttgtatattatggcacctatactagtttttgtattaggggtggttttgt

SEQ ID NO: 27214 - DNA, 364 bp, Glycine max
  Clone ID: LIB3051-023-Q1-K1-F3
ctttttgattcctaaattctctaaaattcgaaattctaatttcgttaggggaaagagattgggtgtgtgtgagtgagtatggctggaaaaggcgagggtcctgctatcggaatcgatttgggaacgacgtactcttgcgtcggcgtgtggcaacacgatcgtgttgaaatcatagccaacgatcagggtaacagaactaccccatcctacgtggctttcaccgacacagaacggttgatcggcgatgcggcgaataaccaggtcgctatgaacccaacctacaccgcttttgatgcttagcgtttgattggaatgcgtagttccgatgcatcattacaaagtgatcctgaaattgtggctcgtt

SEQ ID NO: 27215 - DNA, 399 bp, Glycine max
  Clone ID: LIB3051-023-Q1-K1-F6
tattatccttccattccgttctacatataatcattcataatgggtgttttcagatgggacgatgaaatcaactcccctgtggctcctgctactctttacaaggccctagttacagatgccgacaacgtcatcccaaaggctcttgattccttcaagagtgttgaaaacgttgagggaaatggtggcccaggaaccatcaagaagatcactttccttgaggatggagaaaccaagtttgtgctgcacaaaatagaaagcattgatgaggcgaacttgggatacagctacagcgtggttgggggtgctgcattgccagacacggcggaaaagatcacattctactccaaattggttgctggtcccaatggaaggtctgctgggaagctcactgtcatattc

SEQ ID NO: 27216 - DNA, 374 bp, Glycine max
  Clone ID: LIB3051-023-Q1-K1-F11
catagcagagcgaccttgaagagctatggctggcggaaagaataagaggatttccaagggaaagaagggtggcaagaagaaagccgctgatccctttgccaagaaggactggtacgatatcaaggccccttccgtctttcaggtcaagaatgttggcaaaaccctcgtctctcgtacccagggaaccaagattgcttctgaaggactcaaacatagagtgtttgaggtctcattggctgatctccaaggagatgaagaccatgccttcaagaagattcgtttgagagctgatgatgttcaagggaaaaatgttctgacaaacttttggggaatggatttcacaactgataagttgaggtccttggtgctgaaat

SEQ ID NO: 27217 - DNA, 183 bp, Glycine max
  Clone ID: LIB3051-023-Q1-K1-H9
acgtagatcgctccgttcgcaaaaagaacggccctaaggttggatgattgggtgctttgccgtatttacaacaagaagggcacgatcgagaaactgcaaccaagcagcgatgttgctcatagccgaaatatcgaatcctcggagatcgaagacaggaagcccgagattctgaatagctgagga

SEQ ID NO: 27218 - DNA, 347 bp, Glycine max
  Clone ID: LIB3051-023-Q1-K1-H11
tcacacttatacaaaattctccaattagggagcttgttgagagttgctgcttggaagaaaggctgtttaatggtcaagattgtgatgtctgggaatgcagcagtcaaaaggagtgattgggcctcattggtacaagtgtttttaacaaacagcaacagtacagagcattttgatgcatgtaagtggacaaaatcagaaccacattcctgggaattgatcttcccaatagaggtatgtggtcctaataatggttttgaaatgtggagttctgagtgggcaaatcaaacttcatggcatttgagtttccttattgacaatcccaaacagtctacagttttagatattct

SEQ ID NO: 27219 - DNA, 262 bp, Glycine max
  Clone ID: LIB3051-024-Q1-K1-A8
ctttgttagttcagaaagtagtccagagaaggacccagttgtgctatggctgaatggtggacctgggtgctggggctttgatggctttgtttacgagcatggaccattcagctttgaggctgcaaattcaaaagggaatctacccactttgcatatcaatccttgcggctggtctaaggtttccgacatgatatatttggactcccctgctggtgttgggctctcttactccaagtaacacaagcgggtatgccgctgggga

SEQ ID NO: 27220 - DNA, 214 bp, Glycine max
  Clone ID: LIB3051-024-Q1-K1-C2
cgagcgtgggctcactgtcaaatacttatcaaaaggagatgctgagcccaaccagagacggaactcaaaactggaaaagccaaggctgatgctctcttcaaagccattgatgcttaacctttagcccatcccgattacaactaatcctctacaacttacttgtcatcactttcttgcttggagacttatccaatcactctgttctcaacttaag

SEQ ID NO: 27221 - DNA, 354 bp, Glycine max
  Clone ID: LIB3051-024-Q1-K1-C9
cactgaattcaaaaacatcgaaagagagaggcatggccgagcaaaccttcatcatgatcaagccagatggcgttcaaagaggccttattggcgagattattagcagatttgagaggaagggtttttacttgaaagggttgaaactcgttactgtggaccgtccttttgctgagaagcactatgctgatttgtctgcaaagcctttctttagtggtttggtggattacattgtctctggccctgttgttgccatgatctgggagggtaagaatgttgttacaactggccgaaagattatcggagccacaaacccatctcaatctgagtcctgaactattcatggtgactttgcta

SEQ ID NO: 27222 - DNA, 288 bp, Glycine max
  Clone ID: LIB3051-024-Q1-K1-D9
aaaattcctgaaccgggacgtggcggctgacgcaacgttagggagtccggagacgtcggcgggggccccggaaagagttatcttttctgtttaacagcctgcccaccctggaaacggctcagccggaggtagggtccagcggctggaagagcaccgcacgtcgcgtggtgtccggtgcgcccccggcggcccttgaaaatcccgaggaccgagtgcctcccacgcccagtcgtactcataaccgtatcatgtctcctaggtgaacaacctctggtcgatggaacaatg

SEQ ID NO: 27223 - DNA, 391 bp, Glycine max
  Clone ID: LIB3051-024-Q1-K1-D12
ccttcaaagtgaggtctctaagtttcactttgtttgcatagggcaacctcctttctctgtgactctgagtatcgtatcgttttattattatttctaattctctcttatcaggtccattgaatatgtctccgtcgttggatcttcctcccaagggtggcttcagttttgatctatgccgaagaaacgcaatgcttcaaaacaagggcctcaaagccccaacctttctcaaaactggcaccactattgtcggtttagttttccaggatggtgtcattcttggtgctgatactagggcaactgaaggacctatagtggctgataaaaactgtgagaaaattcattatatggcacccaacatatattgctgtggagcaagcacagctgctgatac

SEQ ID NO: 27224 - DNA, 381 bp, Glycine max
  Clone ID: LIB3051-024-Q1-K1-E6
gtcctccgtctccgtggtggcatgcagatcttcgttaagacactcaccggcaagagggtaaccctagaggttgaaagctccgacaccatcgataacgtcaaggccaagatccaggacaaggagggtatccccccggaccagcaacgtctcatcttcgccggaaagcagctcgaggacggccgcaccctcgccgactacaacatccagaaggaatcaacccttcacctcgtcctccgtctccgtggtggcatgcagatcgtcgttaagacgcttagcggcaggactattaccctagaagtcggaagctgcgacgccatcgacgaagtgaaggctgagattcaagacaaggagggaatccggggagccagcagaggctgatct

SEQ ID NO: 27225 - DNA, 434 bp, Glycine max
  Clone ID: LIB3051-025-Q1-K1-B11
gatttatgctgagggtgctgaaaatggcttggagttcacaattgtgaggccttttaactggattggacctcgaatggatttcattcctggcattgatggtccaagtgagggtgttcctcgggttcttgcatgctttagcaataatcttctcagaggagagcccctcaagcttgtggacggtggccagtcccagagaacctttgtttacattaaagatgctattgaagctgtcttgctgatgattgaaaaccctgccagggccaatggccacatatttaatgtgggtaacccaaacaatgaggttactgttaggcagcttgctgaaataatgattaaggtttattcaaaggtaagtggcgaacaaactcctgaaacacctaccgttgatgtgagctcaaaagaattttatggtgaaggatatgatgatagtgaca

SEQ ID NO: 27226 - DNA, 437 bp, Glycine max
  Clone ID: LIB3051-025-Q1-K1-B12
attccgttctacatataatcattcataatgggtgttttcacattcgaggatgaaatcaactcccctgtggctcctgctactctttacaaggccctagttacagatgccgacaacgtcatcccaaaggctcttgattccttcaagagtgttgaaaacgttgagggaaatggtggcccacgaaccatcaagaagatcactttccttgaggatggagaaaccaagtttgtgctgcacaaaatagaaagcattgatgaggcgaacttgggatacagctacagcgtggttgggggtgctgcattgccagacacggcggacaagatcacattcgactccaaattggttgctggtcccaatggagggtctgctgggaagctcactgtcaaatacgaaacaaaaggagatgctgagcccaaccaagacgaacttcaaactggaaa

SEQ ID NO: 27227 - DNA, 447 bp, Glycine max
  Clone ID: LIB3051-025-Q1-K1-D11
gttttgttagttcacacactaagttctgaaaaatgagttccaaagtttttcttattctacttatgtgcatggccactatacttttgatctcctctgaggttgcacccgatgatgcataccagaattttgacaaaacagatgggaagcgtagtgcaaatggggtagatgaaagcaaatattggcgtggtggctatggcgactatggtggttggcgtggtggtggttggcgtggtggctatggaggctggcgtggtggctatggtggtgggcgtggtggctatggtggctggcgtggtggctatggtggtgggcgtggtggctacggatgttggggtggtggctttggccctaaccgacattatgaagctgggaatgatgctagccctcacaactaaggaaggaacttgctaaagcttatatagtgattaagttatcgtaataaataaa

SEQ ID NO: 27228 - DNA, 440 bp, Glycine max
  Clone ID: LIB3051-025-Q1-K1-D12
cccacgcgtccggagaaagagaagagagaatcgaaaccctaatttcggaaagatcggcgatgactgcctccaaggatcgcgagaacttcgtctacatcgccaaactcgccgagcaggccgagcgttacgaagagatggtggaatcaatgaagaacgttgcgaatctcgacgttgaactgacggtggaggagcggaatttgctttctgttgggtacaagaatgtgattggtgctcgcagagcgtcctggaggatcctgtcttccattgagcagaaggaagaaacaaaagggaacgagttgaatgcgaagcggattaaggagtacagacagaaggttgaattggagctatcgaacatctgtaatgatgttatgagagtgattgatgagcaccttatcccttcggctgcagctggtgaatccactgtgttttactataagatg

SEQ ID NO: 27229 - DNA, 434 bp, Glycine max
  Clone ID: LIB3051-025-Q1-K1-F7
cccacgcgtccggtactgttctattagttcatactaagttctgaaaatgagttccaaggttttgcttgttctacttatgttcttggccactatacttctgatctcctctgaggttgcacccgatgatgcatacgagaattttgacaaaatagatgggaagcctagtgcagatggggtagatgaaagcaagtattggcgtggcggctatggtggcggctatggtggtggttatggaggtgggcgtggaggctatggaggtgggcgtggaggctatggagggggacgtggtggatatggcggcggacgaggtggctatggtggcgggcgtggtggctatggcggcgggcgtggtggctggcgtggtggctatggtcctaatgaacataacgaggctggggttgatgctaaccctcacaactaagaaggcaactttc

SEQ ID NO: 27230 - DNA, 402 bp, Glycine max
  unsure (1)..(402): unsure at all n locations
  Clone ID: LIB3051-026-Q1-K1-A1
gttattgtgagcaaagaaagatagtgagtgaagtaactgaagagaagaaaaaatgccgtgcctcaacctcagcaccaacgtgtccctcgaaggcgtcgacacctcttccatcctcgccgaagccacctcctccgtcgccagcataatcggcaaacccgaagcctatgtgatgattgtactgaaaggatcagtacccatagcttttggtgggaatgagcagccagcagcttatggagaattggtttccattggtggtcttaaccctagtgtaaacaaggaacttagtgctgcaattgcttcaattctggaaaccaaattgtcaatggccgaagtcgcggttcttcttgaaattctatgacaccaagggttccaacttcngatggnaatggatctacattctga

SEQ ID NO: 27231 - DNA, 431 bp, Glycine max
  Clone ID: LIB3051-026-Q1-K1-A10
gctgttgcttatggtgctgcagtgcaggctgcgattctcagtggcgagggtaatgagaaagtgcaggatcttcttttgttggatgttactcctctatccactggtttggagactgcaggaggagtcatgactgtgttgattcccagaaacacaaccattcccaccaagaaggagcaggtgttctcaacctactctgacaaccagcccggtgtgttgattcaggtctatgaaggtgaacgaacgaggactcgtgacaacaatttgcttggcaaatttgagttatctggaattcctcctgctcccagaggtgttcctcagatcactgtttgcttcgacattgatgccaacggtatattgaacgtgtctgcggaggacaaaaccactggacagaagaacaagattacaattaccaacgacagggcaggctttct

SEQ ID NO: 27232 - DNA, 291 bp, Glycine max
  unsure (1)..(291): unsure at all n locations
  Clone ID: LIB3051-026-Q1-K1-A11
acgaccacgcgtccggtgtatgtccctacctctcccttcaagatgcagatcttcgtcaagaccctcaccggcaagaccatcacccttgaggtggaaagctctgacaccatcaacaccgtcagggccagaatccaggccagggaaggattcccccggacccaccaccgcttaatttcgcccgaaagccacttgaggaccggcgtacccttgctgactaccacattcagaaggagagtactcttcacctcgtcctncgtcttccggggtggcatgcagatcttcgttaagaca

SEQ ID NO: 27233 - DNA, 380 bp, Glycine max
  Clone ID: LIB3051-026-Q1-K1-C10
gaagcgcaagaagaagacctacaccaagcccaagaagatcaagcacaagcacaagaaagtcaagctcgccctcctccagttctacaaggtcgacgactccggcaaggtccagaggctccgcaaggaatgccccaacgccgagtgcggcgccgggactttcatggccaaccacttcgatcgccactattgcggcaagtgtggtttgacctatgtttaccagaaggctgaggcttagggttacatttcgttttttctagtttctggattttggaattttattattagtataatactctgtttttttgtctgtattttggtcgcatattattatgactgcctgaatgttctgccttttcaaaaaaaaaaatataaaacaaaaa

SEQ ID NO: 27234 - DNA, 370 bp, Glycine max
  Clone ID: LIB3051-026-Q1-K1-D3
tcgcccacgcgtccgcccacgcgtccggttcaattacacgattctgagagacacaaaggatgttctggttataactgccagagggagcagtgcggagattataccctttctcaaaacgtgggtgaaccttcccatggccgttgggttcatgttgttgtacacaaagttgtccaatgttttgtcaaagcaagctcttttctacaccgtgattcttccattcattgctttctttggggctttcgggtttgtgttgtaccctctcagcaattatattcaccctgaggcatttgcggacaagcttctcaacatcctcggacctaggttccttggcccctttgcgataatgaaaattggaacctctggttggttt

SEQ ID NO: 27235 - DNA, 432 bp, Glycine max
  Clone ID: LIB3051-026-Q1-K1-E4
cgcaaatatgtttttggtggacatggtgctttctatatgaagatcttggcagaagatgaaccagagaaataccagtcacacttcagcgaatacatcaaacgtgggatagaggctgatggtattgaagcactttacaagaaggttcatgctgccatccgtgctgatcctactctcaagaaatctgataagcagcccccgaaggagcacaagaggtacaacatgaagaagctgacttatgaggagaggaaggctaagtcggttgcacgcgtggcagccatcaactctgctgctgataatgatgaagatgatgagtgaaagttcattgcggatgctgtctcatagctggacaagtagaaaactatgttatttgcctgtactgattattttctatggccaaaatttggatactttttggagtcgagagccttattt

SEQ ID NO: 27236 - DNA, 438 bp, Glycine max
  Clone ID: LIB3051-026-Q1-K1-F6
gtgagaaacaaagaaaggaaataattgatctttgaaaatgcaaggaggaaagaaagctggagagtccatcaaggaaacagctgcaaacattggtgcttctgccaaggctggcatggagaaaaccaaggccactgtccaggagaaggcagaaagaatgacggcacgtgatccgatgcaaaaggagttggcaacccagaagaaagaggcaaagatgagccaggcagagctggacaagcaggcggcgcgtcagcataacacggctgcgaagcaggctgccacggcagggcacatgggacaacccatggggacccatcagacgtcagctatgcccggtcatggaaccggacagcccacgggccatgtcaccgagggagtggtgggctcacactctattggaaccaacagaggcccgggtgggactgctactggccataatac

SEQ ID NO: 27237 - DNA, 442 bp, Glycine max
  Clone ID: LIB3051-026-Q1-K1-F12
cggacgcgtgggcacacacaactactacaagtacttccttacaatcaaaaccaacaacaactatggcaagttatcaaaagcactacgatgatcagggtcgcaaggttgacgagtatggcaacgttgagaagcaaaccgacgaatacggcaaccctgttcatgctgctagtgtcacctatgtagccaccagaactgctgctggtggttacagtgatgacattaataagcaacatgataccaccaatgcctacggcgtagacactggtagacagcattctagtggtggctacgatggtgacactaataaacatcatggaactactggtggctataatgatgacaccaatagacatcatggaactaccggtgtctatggtatagacaccgataggcaacaacatgggactactggtggctatgccggtgacactggtaggcaaca

SEQ ID NO: 27238 - DNA, 444 bp, Glycine max
  Clone ID: LIB3051-027-Q1-K1-A9
gcaagccccactcaaccaccacacctcttctcgttcacgctacccctttctgctcttcttctacctttcaagttttaaaagtataaagatggcagagacattcctatttacctcagagtcggtgaacgagggacaccctgacaagctctgcgaccaaatctccgatgctgtcctcgacgcttgcctcgagcaggacccagacagcaaagttgcctgcgaaacatgcaccaaaaccaacttggtcatggtcttcggagaaatcacgaccaaggccaacgttgactacgagaagatagtgcgtgacacctgcaggaacatcggcttcgtctcaaatgatgtgggactggatgccgacaactgcaaggtcctcgtcaacattgagcagcagagccctgatattggctcaggtgtacacgggcaccttaccaaaaaaccctgagaaat

SEQ ID NO: 27239 - DNA, 453 bp, Glycine max
  Clone ID: LIB3051-027-Q1-K1-B12
gtactgttctattagttcatactaagttctgaaaatgagttccaaggttttgcttgttctacttatgttcttggccactatacttctgatctcctctgaggttgcacccgatgatgcatacgagaattttgacaaaatagatgggaagcctagtgcagatggggtagatgaaagcaagtattggcgtggcggctatggtggcggctatggtggtggttatggaggtgggcgtggaggctatggaggtgggcgtggaggctatggagggggacgtggtggatatggcggcggacgaggtggctatggtggcgggcgtggtggctatggcggcgggcgtggtggcgggcgtggtggctatggtcctaatgaacataacgaggctggggttgatgctaaccctcacaactaagaaggcaactttctaaagcttatatatgggtttaagttatcgca

SEQ ID NO: 27240 - DNA, 446 bp, Glycine max
  Clone ID: LIB3051-027-Q1-K1-C3
cttgtactgttctattagttcatactaagttctgaaaatgagttccaaggttttgcttgttctacttatgttcttggccactatacttctgatctcctctgaggttgcacccgatgatgcatacgagaattttgacaaaatagatgggaagcctagtgcagatggggtagatgaaagcaagtattggcgtggcggctatggtggcggctatggtggtggttatggaggtgggcgtggaggctatggaggtgggcgtggaggctatggagggggacgtggtggatatggcggcggacgaggtggctatggtggcgggcgtggtggctatggcggcgggcgtggtggcgggcgtggtggctatggtcctaatgaacataacgaggctggtgttgatgctaaccctcacaactaaaaaggccactttctaaagcttatatatgggttta

SEQ ID NO: 27241 - DNA, 434 bp, Glycine max
  Clone ID: LIB3051-027-Q1-K1-D1
accagctatacttgttccttttgaaggttagaagtgctacaatacaaacaatggcagctactcaggaagatgtgaagcttttgggtattgtgggaagcccatttgtgtgcagggtccagattgcccttaagttgaagggagttgaatacaaatttttggaagaaaatttgggcaacaagagtgatttgcttctcaaatacaaccctgttcacaagaaggttccagtgtttgttcacaatgagaagcccatagcagagtctcttgtgattgttgaatacattgatgagacatggaagaacaaccccatcttaccttctgatccttaccaaagagccttggctcgtttctggtccaaattcattgatgataagattgtgggtgctgtatggaaatctgttttcacggttgatgagaaagagcgtgagaagaatgtt

SEQ ID NO: 27242 - DNA, 419 bp, Glycine max
  Clone ID: LIB3051-027-Q1-K1-D2
cctagattcagccacagtttcggaggatatagaatatagtcgttcgagatggcccgtacgaagcagactgctcgtaagtccacaggaggaaaggctcctaggaagcagcttgcaaccaaggctgcacgtaagtctgcaccaactactggtggtgtgaagaagccacatcgttaccgtcctggtaccgttgctcttcgtgagattaggaaataccagaagagtaccgagcttttgatcaggaagctccccttccagaggctggttcgtgaaattgctcaggacttcaagactgatctgcgtttccagagccacgccgtgcttgcattgcaagaagctgctgaggcataccttgttgggctctttgaagacactaacctgtgtgccattcacgctaaacgggtaaccattatgcccaagga

SEQ ID NO: 27243 - DNA, 413 bp, Glycine max
  Clone ID: LIB3051-027-Q1-K1-E2
cccacgcgtccgcccacgcgtccgcccacgcgttcggctatacttgttccttttgaaggttagaagtgctacaatacaaacaatggcagctactcaggaagatgtgaagcttttgggtattgtgggaagcccatttgtgtgcagggtccagattgcccttaagttgaagggagttgaatacaaatttttggaagaaaatttgggcaacaagagtgatttgcttctcaaatacaaccctgttcacaagaaggttccagtgtttgttcacaatgagaagcccatagcagagtctcttgtgattgtggaatacattgatgagacatggaagaacaaccccatcttaccttgtgatccttaccaaagagtcttggctcgtttctggtccaatttcattgatgataatattgtgggtg

SEQ ID NO: 27244 - DNA, 384 bp, Glycine max
  Clone ID: LIB3051-027-Q1-K1-E3
cccacgcgtccgcaaaaggagtgattgttcctcattggtacaagtgtttttaacaaacagcaacagtacagagcattttgatgcatgtaagtggacaaaatcggaaccacattcctgggaattgatcttcccaatagaggtatgtggtcctaataatggttttgaaatgtggagttctgagtgggcaaatcaaacttcatggcatttgagtttccttattgacaatcccaaacagtctacagtttttgatattctcttgggaatttctcaagattttgaaattgctgggaatactcttatgccagctttttctgttccacagggctatgccagatcttctgaaaatgcggaatcctttgcatgatctggaatttgtgctgtctt

SEQ ID NO: 27245 - DNA, 432 bp, Glycine max
  unsure (1)..(432): unsure at all n locations
  Clone ID: LIB3051-027-Q1-K1-E10
gcagaactctgcttcttcggattccgatcgcacgcgccgtcaccatggtgaacgttccgaaaacaaagaagacatactgcaagagtaaggagtgcaggaagcacacgctgcacaaggttacccaatacaagaagggtaaggatagcattgctgcccaaggaaaacgccgttatgatcgcaaacaatccggttatggtggacaaactaagcccgtcttccacaagaaggctaaaaccaccaagaagattgttctgaggttgcaatgccagggttgcaagcatgtctcccaacacgctattaagaggtgcaagcactttgagattggtggtgacaagaagggcaagggaacatcactcttctagtttgagaattaggatttagagncttatgtttcagcaatgttggaatgttttgtttctctctggatttttc

SEQ ID NO: 27246 - DNA, 393 bp, Glycine max
  Clone ID: LIB3051-027-Q1-K1-F5
cccacgcgtccgcgtagtgcaaatggggtagatgaaagcaaatattggcgtggtggctatggcgactatggtggttggcgtggtggtggttggcgtggtggctatggaggctggcgtggtggctatggtggtgggcgtggtggctatggtggctggcgtggtggctatggtggtgggcgtggtggctacggaggttggggtggtggctttggccctaacgaacataatgaggctgggattgatgctagccctcacaactaagaaggaaacttgctaaagcttatataggatttaagttatcgtaataaataaaacttcattggaagggtagatataatagatgtggagatctttctttgctctggtcatataaaggattaatgcttttatatt

SEQ ID NO: 27247 - DNA, 383 bp, Glycine max
  Clone ID: LIB3051-027-Q1-K1-F6
atacacttgtactgttctattagttcattctaagttctgaaaatgagttccaaggttttgcttgttctacttatgttcttggccactatacttctgatctcctctgaggttgcacccgatgatgcatacgagaattttgacaaaatagatgggaagcctagtgcagatggggtagatgaaagcaagtattggcgtggcggctatggtggcggctatggtggtggttatggaggtgggcgtggaggctatggaggtgggcgtggaggctatggagggggacgtggtggatatggcggcggacgaggtggctatggtggcgggcgtggtggctatggcttgctgcctggtggcggtcgtggtggctatggtcctaatgaacataa

SEQ ID NO: 27248 - DNA, 435 bp, Glycine max
  Clone ID: LIB3051-027-Q1-K1-F7
ctcaatcctctgtaacttcaaaacatacacctcttctctctgtttctcttcactctctgtctccctccctcttcaactaacatggcaattgaaaaccaagacaccgctgtcagagaaatcaagcccaagaacaggagaatcatgggtgctggagggcctgatgatgaggacaataggtggccaccgtggttgaagccactgctgaaagagagcttctttgttcaatgcaagttgcatgctgattctcacaagagcgaatgcaacatgtattgcttggactgtatgaatggccctctctgctctctctgcctcgcccaccacaaagatcaccgtgcaatccagattaggaggtcctcataccatgatgtgatcagggtctctgagattcagaaggtgttggacatcactggtgtccaaacctacattatcaacagc

SEQ ID NO: 27249 - DNA, 436 bp, Glycine max
  Clone ID: LIB3051-027-Q1-K1-G10
ggcaccttggtccttctatgattcagcatatgcagtatccttgcaatgagtgtaagggtactggagagacaatcaatgacagagacaggtgccaacagtgcaagggagagaaggttgttcaggagaagaaagtacttgaagttgttgtggagaagggaatgcagaatggacagaagattacattccctggtgaagctgatgaagcgcctgatacagtcacaggggatattgtctttgtcctacaacagaaggaacacccaaagttcaaacgaaaggcagatgacctttttgtagaacacacattgtctcttactgaggctctatgtggcttccagtttgtgctgactcacctggatagcaggcagcttctgatcaaatcaaaccctggggaggttgttaagcctgagtcattcaaggcaataaatgatgagggaat

SEQ ID NO: 27250 - DNA, 444 bp, Glycine max
  Clone ID: LIB3051-027-Q1-K1-H5
cccacgcgtccggtggattctgaggatcttcctctcaacatttctagagaaatgctgcagcagaacaagatcctgaaagtcatcaggaagaacttggtcaagaagtgcattgagatgttctttgaaattgctgagaacaaggaagactataacaagttttatgaagccttctctaagaatctgaaacttggtattcatgaggattctcagaacaagacaaaacttgctgaattgctcaggtatcactccaccaagagtggtgatgagatgaccagcctcaaggactatgttaccaggatgaaggaaaggcagaatgacatctactacattactggtgaaagcaggaaagctgttgagaattcccctttccttgaaaagcttaagaagaaggggttcgaggttctctacatggttgatgctattgacgagtatgctgttggtcag

SEQ ID NO: 27251 - DNA, 424 bp, Glycine max
  Clone ID: LIB3051-027-Q1-K1-H10
ccggtgtctgcggtgttggttccatagtaagggccaccgatgttcccatgttgcctaccagtgtcaccggcatagccaccagtagtcccatgttgttgcctatcggtgtctataccatagacaccggtagttccatgatgtctattggtgtcatcattatagccaccagtagttccatgatgtttattagtgtcaccatcgtagccaccactagaatgctgtctaccagtgtctacgccgtaggcattggtggtatcatgttgcttattaatgtcatcactgtaaccaccagcagcagttctggtggctacataggtgacactagcagcatgaacagggttgccgtattcgtcggtttgcttctcaacgttgccatactcgtcaaccttgcgaccctgatcatcgtagtgcttttgataacttg

SEQ ID NO: 27252 - DNA, 451 bp, Glycine max
  Clone ID: LIB3051-028-Q1-K1-A7
tattcttccatttccattaaaaagaaaatttcataaatgggtattttcacattcgaggacgaaatcacctcccctgtggctcctgctactctttacaaagctctagttacagatgccgacagcatcatcccagaggctcttgattccttcaagagtgttgaaaacgttgagggaaatggtggccctggaacaatcaggaagataactttcgttgaggatggagaaaccaagtttgtactgcacaagatagaagcagttgatgaggcaaacttgggatatagctacagcgtagtggatggtgctgcgttgccagacacagcggagaagagcacattccactccaaattggctgctgagtccaatggaggctctgctgggaagctgatggcgaataccaaaccaaaggagatgctcaggccaaccaagaccaactcaaaactggaaaagccaa

SEQ ID NO: 27253 - DNA, 278 bp, Glycine max
  Clone ID: LIB3051-028-Q1-K1-A9
catctgccccactgaatcaccacacctcttttcgatttcgctacccctttctgctctactggtaccggtcaagttttaaaggggtaaagatggcagatacaatcctatttaccttatagtcgatgaacgatggacaccctgacaagctactgcgaccaaatcttcaatgctgtactctacgcttgcctcgagcaggacccagacagcaaagttgactgcgaaacatgcaccatacccaacttgctcatggtcttcgagaaatcactactcaagccaac

SEQ ID NO: 27254 - DNA, 422 bp, Glycine max
  Clone ID: LIB3051-028-Q1-K1-B12
atcactctagctgttgcaaatttctactatttttcaatggcttctgcagatgttgagttccgttgctttgttggtgggcttgcttgggtcaccggcaacgatgccctcgagaaagccttttcaatctacggcgacatcgttgaatcgaaggttatcaacgaccgtgagactggaaggtccagaggattcggatttgtgaccttcgcctcagagcagtcaatgaaagatgcgatcgcaggaatgaacggccaggaccttgacggccgtaacatcactgtcaacgaagctcagacccgcgccagccgtggtggtggtggaggcggtggtttcggaagtggtggtggatacaaccgcggtagcggtggatatggtggtggtggtggcggcggctgatacggtggtcgtcgtgaaggtggatacaa

SEQ ID NO: 27255 - DNA, 443 bp, Glycine max
  Clone ID: LIB3051-028-Q1-K1-C7
ctcacccattttcttcgtagccaaacactctgaaattctcagttatgtcgtggcaagcgtatgtggatgatcacctactgtgtgaaatcgaaggtaaccacctcactcacgccgctatcatcggccaagacggaagcgtttgggctcagagcaccaacttccctcagttcaaacctgaggaaataactgccatcaataatgactttaatgagcctggatcacttgctccaactggattgtatatcggtggcaccaaatacatggtcatccagggtgagcctggtgctgtcattcgagggaagaagggtcctggtggtgttactgtgaagaagaccggtgcggccttgatcattggcatttatgatgaaccaatgacttcaggtcaatgcaacatggtagttgaaagggctttggcgatatctcattgatcaaggtctctaatc

SEQ ID NO: 27256 - DNA, 427 bp, Glycine max
  Clone ID: LIB3051-028-Q1-K1-C11
cacattagttcagtctctaagtgcagcttcctacctatccttacaagatgcagatcttcgccaagaccctcaccggaaagaccatcacccatgaggtggaaagctctgacaccatcgacaacgtcaaggccaagatccaggacaaggaaggaattccgccggatcagcaacgtgtcatcttctccggaaagcatctcgaggacagacgtaccctcgccgactacaacatccagacggagtcaacccttcaccttgtccttcgtctccgtggtggcatgcagaccttagtcaagactctcactggcaaaaccataaccctagaggtcgaaagctctgacaccattgacaacgtcaaggccaagatccacgacaaggagggaatccctccagaccagcaacgtcttatcttcgacggatagcaacttga

SEQ ID NO: 27257 - DNA, 453 bp, Glycine max
  Clone ID: LIB3051-028-Q1-K1-E1
ctagaagtattattattcttccatttccattaaaaagaaaatatcataaatgggtattttcacattcgaggacgaaatcacctcccctgtggctcctgctactctttacaaagctctagttacagatgccgacaacatcatcccaaaggctcttgattccttcaagagtgttgaaaacgttgagggaaatggtggccctggaacaatcaagaagataactttcgttgaggatggagaaaccaagtttgtactgcacaagatagaagcagctgatgaggcaaacttgggatatagctacagcgtaatgggtggtgctgcgttgccagacacagcggagaagatcacattccactccaaattggctgctggtcccaatggaggctctgctggcaagctcactgtcgaataccaaaccaaaagagatgctcagcccaaccaagaccaactcaaaac

SEQ ID NO: 27258 - DNA, 444 bp, Glycine max
  Clone ID: LIB3051-028-Q1-K1-E12
gctaatcttagccacagttctgcaggcattttttgattctgtgggccttctgctcagaggcaatgtagacaagaaggaagcactagagaacttggatctcattctattgtgcattgatgaaattgttgatggcggtatcatacttgaaactgatccaaatgttatagctgggaaagttgctagtaatagtatagattctggagctcctttgtccgaacagactctaagtcaagcattggccacagccagggaacatcttgcaaggtcccttcttaaatgattcatatggcatttcacaatgacggaggaaacttgtctttaggtttctcctataaacgtttataagacagaacctcattgcattctcgagaagtcgaacctggatgacgatgttacttgcgtagtgaaagttaatatcgacatgctaatacaggctattctagc

SEQ ID NO: 27259 - DNA, 460 bp, Glycine max
  unsure (1)..(460): unsure at all n locations
  Clone ID: LIB3051-028-Q1-K1-F1
ctcgaactatcattattcttccatttccattaaaaagaaaatatcataaatgggtattttcacattcgaggacgaaatcacgtcccctgtggctcctgctactctttacaaagctctagttacagatgccgacaacatcatgccaaatgctcttgattccttcaagagtgttgaaaacgttgagggaaatggtggccctggaacaatcaagaagataactttcgttgacgatggagaaaccaagtttgtactgcacaagatagaatcagttgatgaggcaaacttgggatatagctacagcgtagtgggtggtgctgcgttgccagacacagcggataagatcacattccactccaaattggctgctggtcccaatggatgctctgctggcaagctcactgtcgaataccanaccaaacgagatgctcagcccaaccaagaccaactcaaaactggaaag

SEQ ID NO: 27260 - DNA, 447 bp, Glycine max
  Clone ID: LIB3051-028-Q1-K1-F5
gagcttttgtcaattttctattgaccttctcggtggaggaattttagtggacaaaactggagattggatcacacttatacaaaattctccaattagtaacttgttgagagttgctgcttggaagaaaggctgtttaatggtcaagattgtgatgtctgggaatgcagcagtcaaaaggagtgattgggcctcattggtacaagtgtttttaacaaacagcaacagtacagagcattttgatgcatgtaagtggacaaaatcagaaccacattcctgggaattgatcttcccaatagaggtatgtggtcctaataatggttttgaaatgtggagttctgagtgggcaaatcaaacttcatggcatttgagtttccttattgacaatcccaaacagtctacagtttttgatattctcttaggaatctctcaagatttgaaattgctggt

SEQ ID NO: 27261 - DNA, 447 bp, Glycine max
  unsure (1)..(447): unsure at all n locations
  Clone ID: LIB3051-028-Q1-K1-G3
ggatccacatcgttctcttcctctcttctgtcttcttctccttcaacattcccaaacccaaaaaggttttgattggggttaccgagcgaacaggtgttttaacagctacaaaataagtgatttatgatatgatggagtttggtgtgaatttcattcactgattcaacgattaggatcaactgtcattggtttttttgtgttgggactagaaatgtcaatgtcaggatttgaagggcaatgtagtaatgatgagattagagagaggaggtccgatgttgagaactcagaagacgagatgcggtcgttgagaattgngaacttgaataagaaggcgatgaatgcgtcatctagattcactcattctcttaagaatagaaggaaaagggaaatcgattatcgggttccgtccatgtccattgaagatgtaagagatgcgcgggaggagac

SEQ ID NO: 27262 - DNA, 239 bp, Glycine max
  Clone ID: LIB3051-028-Q1-K1-H1
gctacgcaccagtttcactgcatacacttgtgagaaaactctgcagacatgttggtttatcacgacctccttacaggtgatgagcttctatgggactgcttccgttacaatgaaattgataatgggatgctgtgggaagttgaggggaagtgtggagttaagggagcggttggcgttgacattggtgcaaaccctatctgctgaaggtgtagaagatgatggagtcgatgacgcagctg

SEQ ID NO: 27263 - DNA, 344 bp, Glycine max
  Clone ID: LIB3051-028-Q1-K1-H3
gctactcagaagactgttgatggtccatcaaacaaggactggaggggtggaagagctgcttccttcaatataattcccagcagcactggagctgctaaggctgtaggaaaagttcttccagcactgaatggtaaattgactggcatgtccttccgagtccccactgtagatgtgtcagttgttgacctcactgttaggctagagaagccagcaacctatgagcaaatcaaatctgctatcaaggaggaatcagagggcaaattgaagggtattttgggttacacagaacatgatgtagagtctactgattttgttggtgataacatgtctagcatatttgacgc

SEQ ID NO: 27264 - DNA, 457 bp, Glycine max
  Clone ID: LIB3051-028-Q1-K1-H4
cggacgcgtgggcggacgcgtgggcggacgcgtggtcggacgcgtgggcttgttcctccgctcaacaactataataacatctttctctctgcgaacagatcacactatggccaccttaagcgccaaatcagtccatgatttcaccgttaaagatgccaagggaaatgatattaatcttggtgactacaaaggaaaggtccttatcattgtcaatgttgcctcacaatgtggcttgactaattcaaattacactgagctcagtcagttgtatgagaaatacaaacagaaaggtctggaaattctggcatttccatgcaatcagtttggggcacaggaacctggatctaatgaacagatacaagagtttgtttgtactcgcttcaaggctgagtttcccgtttttgacaaggttgatgtgaatggggacaaagctgctccactgtacaagtatctaaaa

SEQ ID NO: 27265 - DNA, 403 bp, Glycine max
  Clone ID: LIB3051-028-Q1-K1-H10
atatcccattctctctgtgtattccccttcctatcccttcaagatgcagatcttcgtcaagaccctcaccggcaagaccatcacccttgaggtggaaagctctgacaccatcgacaacgtcaaggccaagatccaggacaaggaaggaatcccctcggaccagcaacgtctcattttcgccggaaagcaacttgaggacggccgtacccttgctgactacaacattcagaaggagagtactcttcacctcgtcctacgtctccgtggtggcatgcagatcttcgttaagacactcaccggcaagaccataaccctagaggttgaaagctccgacaccatcgataacgtcaaggccaagatccaggactaggagggtatcccaccggaccagcaacgtctcatc

SEQ ID NO: 27266 - DNA, 433 bp, Glycine max
  Clone ID: LIB3051-028-Q1-K1-H12
gcagcaagcatctccttctcaaactagtagtattattcttccattccgttctacatataatcattcataatgggtgttttcacattcgaggatgaaatcaactcccctgtggctcctgctactctttacaaggccctagttacagatgccgacaacgtcatcccaaaggctcttgattccttcaagagtgttgaaaacgttgagggaaatggtggcccaggaaccatcaagaagatcactttccttgaggatggagaaaccaagtttgtgctgcacaaaatagaaagcattgatgaggcgaacttgggatacagctacagcgtggttgggggtgctgcattgccagacacggcggagaagatcacattcgactccaaattggttgctggtcccaatggagggtctgctgggaagctcactgtcaaatacgaaa

SEQ ID NO: 27267 - DNA, 400 bp, Glycine max
  Clone ID: LIB3051-029-Q1-K1-A6
gtcatgactgtgttgattcccagattctacaaccattcccaccaagaaggagcagggattttcgacctattccgacaaccagcctggtgtgttgattcaggtctatgaaggtgaacgtacgatgactcgtgataacaatttgcttggcaaattggagatatctggaattcctcctgctccgagaggtgttcctcagatcaccgtttgctttgacattgacgccaacggtatattgaacgtgtctgcagaggacaaaaccactggacagaagaacaagattacaattaccaacgacaaaggaaggctttctaaggaggagattgagaagatggtgcaggaagctgataagtacaaggctgaggatgaggagcataagaagaaagtgtaggccaaaaataca

SEQ ID NO: 27268 - DNA, 391 bp, Glycine max
  Clone ID: LIB3051-029-Q1-K1-B6
gtcaaggctaagattcaggacatggttggaatccccccagaccagcagaggctgagcttcgccgggaagcagctcgaggacggacgcacccttgctgactacaacatccagaaggagtcaactctccacttggtgttgcgtcttcgtggtggtatgcagattttcgtgaagactcttacgggtaagactattaccctcgaggtggagagctctgacaccattgacaatgtgaaggccaagattcaggacaaggaaggcatcccaccggaccagcagaggctgatttttgctggcaagcagctcgaggatggaaggaccctcgctgactacaacatccagaaggaatcaacccttcaccttgtcctccgtctccgtggggggttttaagctc

SEQ ID NO: 27269 - DNA, 414 bp, Glycine max
  Clone ID: LIB3051-029-Q1-K1-C3
aggtatccaagctggccaaaggagtttatgctaatgttgaacattggatcaatgtggacgggggctagagtagttgctgtgaagaatgacttggcgaagttgcaacttacttcccctgtgtgcactagcaagggtgagaagattgcacttagtcgacgtgttgagaagcattggcgtcttatcgggtggggacaaatccaagctggaatcactcttgatgtccctcccgcccccgatctgagtcgaacactgatcacaagaaacaccagcagctataaaaaactgagatgaatttagatatgtgggaagggaggcaattgttgggaaccatttttgtgaggtggagaagaaaacgttctttgattgttgtcttctatattgttttcacatcgttattggtttattttcccaact

SEQ ID NO: 27270 - DNA, 399 bp, Glycine max
  Clone ID: LIB3051-029-Q1-K1-D8
ccaaaattacggtttttgtcgtagcttgaagaagcagcaatggcgcctaagataacacgcaaggtcagcagaaaccccgaattgataaggggaatcggaaagtactcgaggtcgcagatgtaccacaagaggggcatttgggctatcaaggccaaaaacggtggcgttttacctcgccacgaccgcaaacccaaacctgaaactcccactgaaaaaccacccaaattttaccccgctgatgatgtcaagaaaccccttgtcaacaagcacaaacccaaaccagctaagctcacggctagcattacccccggaacagtgttgattcttcttgctggtagatttaagggaaagagggtagtgtttttgaaacaactaccttctgggttgcttcttgtaaca

SEQ ID NO: 27271 - DNA, 395 bp, Glycine max
  Clone ID: LIB3051-029-Q1-K1-E5
ctttttagggcaaggatgggctttcttaccctgggtcaaggctaatggtgagttgggattttggctcaagaggcttgcagaatggccggacatgatgtatgtcagggtgttggtttggccagcggttcaaagataaaggggatgccccacatttatttccatgacacacatacacacaaactagtaatattattcttcgaatccattttattattcataatgggtattttcacatttgaggatgaaaccacctcccctgtggctcctgctaccctttacaaagctctagttacagatgccgacaacgtcatcccaaaggctgtcgaagccttcaggagtgttgaaaaccttgaggggaacggtggccctggaaccattaagaagatcactttcgt

SEQ ID NO: 27272 - DNA, 269 bp, Glycine max
  Clone ID: LIB3051-029-Q1-K1-E9
atcacgcgaacgcgcgcatgtcctgtactaactagtagtatgattcttccattcataagggctgttttcacattccaggatgaaatcaactcccctgagtctcctgctactctttacaaggccctagttacagatgccgacagcagcatcccaagcgctcttgatcacgacaagagcgtagacaacgtcaagagaaacggcgacccaggaaccatcatgaagatcactttccttgtagattgagagaccaagtttgggctgcacaaaat

SEQ ID NO: 27273 - DNA, 357 bp, Glycine max
  Clone ID: LIB3051-029-Q1-K1-G4
ccgggttgacaccaagccttccgccaacccttccgctaacgcgtccgttacttttccggttttaaacttttctgggggctattatgaaatccttaactcgccagatcgtgcttgtaatcttgccaagcaggcatttgatgaggcaatttccgagcttgacacattgggtgaagagtcatacaaagatagtacattgatcatgcaacttctccgtgacaatctgactttgtggacatcagacatcacggacgatgctggagatgagatcaaggaaacatctaagcaacaaccaggcgaataggcgatggcagttgcgatgtgggtagtgattggatatgtattaccgataatatggat

SEQ ID NO: 27274 - DNA, 403 bp, Glycine max
  Clone ID: LIB3051-029-Q1-K1-G7
cccacgcgtccgcccacgcgtccgcttacgcgtccgcccacgcgtccggcattaagctagttgttgaggcgatatgtgctggtatatttaatgacctaggaagtggaagtaatgttgatgtttgtgtgataaccaagggacataaggaatatctcaggaaccaccttctaccaaatcctcgtacctatgtcaatccaaaaggctttgatttccccaaaaagacagaggtcctcttaacaaagattacaccgttgaaggagaaggtggaagtgattgaaggagatgctatggaagagtaacaatcattccaaaaaaaattggtgtatgagtatgaaacttgattagtgcaatggctgtgatatttgattttgtactttcacaactttggcttttattaccaaaa

SEQ ID NO: 27275 - DNA, 378 bp, Glycine max
  Clone ID: LIB3051-030-Q1-K1-A9
tgtaacttcaaaacatacacctcttctctctgtttctcttcactctctctctccctcccgcttcaactaacatggcaattgaaaaccaagacaccgctgtcagagaaatcaagcccaagaacaggagaatcatgggtgctggagggcctgatgatgaggacaataggtggccaccgtggttgaagccactgctgaaagagagcttctttgttcaatgcaagttgcatgctgattctcacaagagcgaatgcaacatgtattgcttggactgtatgaatggccctctctgctctctctgactcgcccaccacaaagatcaccgtgcaatccagattaggaggtcctcataccatgatgtgatcagggtctctgagattc

SEQ ID NO: 27276 - DNA, 428 bp, Glycine max
  unsure (1)..(428): unsure at all n locations
  Clone ID: LIB3051-030-Q1-K1-A10
gttagttcacacactaagttctgaaaaatgagttccaaagtttttcttattctacttatgtgtcatggccactatactnttgatctcctctgaggttgcacccgatgatgcataccagaattttgacaaaacagatgggaagcgtagtgcaaatggggtagatgaaagcaaatattggcgtggtggctatggcgactatggtggttggcgtggtggtggttggcgtggtggctatggaggctggcgtggtggctatggtggtgggcgtggtggctatggtggctggcgtggtggctatggtggtgggcgtggtggctaccgangttggggtggtggctttggccctaacgaacataatgaggctgggattgatgctagccctcacaactaagaaggaaacttgctaaaggctatataggatttaagtt

SEQ ID NO: 27277 - DNA, 388 bp, Glycine max
  unsure (1)..(388): unsure at all n locations
  Clone ID: LIB3051-030-Q1-K1-A12
gttgccattctcatcctcctctgtctctctctctccaccattgccatggatccttacaagctccggccatccagcgccttcaattctcccttctggactacaaattctggtgctcctgtttggaacaacaactcctctttaaccgttggagctagaggtccaattctgcttgaagattatcatcttgtggagaagcttgcaaactttgacagggaacgtatcccagaacgtgttgtccatgccaggggagctagtgcaaaaggtttctttgaagtcacacatgacatttctcacctgacatgtgcagatntccttcgagcccctggagttcagacgcctgtaattgttcgtttctcaactgtcattcatgagcgtggtagccctgaaa

SEQ ID NO: 27278 - DNA, 373 bp, Glycine max
  unsure (1)..(373): unsure at all n locations
  Clone ID: LIB3051-030-Q1-K1-C4
ttgtgtggcttcgcaatttgtgctgactcagtnggatagccgtcagcttcttattaaatcaaatcccggtgaagttgtgaagcctgattcatacaaggctataaatgatgagggaatgcccatgtatcataggccattcatgaacgggaaactttacattcacttcactggggagtttccagattctctaaaccctgatcaagttaaggccttggaggctgttctgccaccaaagccttcttcacaattgacagacatggagctggatgaatgtgaggaaactacactccatgatgtcaacatggaggaggagactaggatgaagcagcatcaagctcaggaggcttatgatgaggatgatgacatgcctggt

SEQ ID NO: 27279 - DNA, 351 bp, Glycine max
  Clone ID: LIB3051-030-Q1-K1-C11
caagattctaagagagatcttgctgctctttgaagaagggtgtttgcttgattttggagagtgtcgctgctctcagatctcatcaaccttaacctctcatacactactgagaaggtgatcgcagagtacatatggatcggtggatcaggaatggacctgaggagcaaagcaaggactcttccaggaccagttagcgacccttcacagcttcccaagtggaactatgatggttccagcacaggccaagctcctggagaagacagggaagtgattatatacccacaagccattttcagggatccattcagaaggggcaaccatatcttggttatctgtgatacttacacttca

SEQ ID NO: 27280 - DNA, 443 bp, Glycine max
  Clone ID: LIB3051-030-Q1-K1-E2
cccaaattcattttaatcctaattctgcacttcttgatcattcgatttttctcctcaagatgcggatattcgtaagaactttgaccggcaagaccatcacccttgaggtggaatcctccgacaccattgacaacgtaaaagctaagattcaagacaaggaagggatcccacctgaccagcagagacttatctttgcgggtaaacaacttgaggatggtcgcacccttgccgattacaacatccaaaaggaatcaaccctccatctcgtgcttcgcctcaagggtggcatgcaaatctttgtcaagactttgaccgggaagaccatcacccttgaggtggaatcctcggacaccattgataatgttaaggccaagatccaggacatagagggcatcctcccagatcagcagatgctgatttttgccggtaaacaacttgaggat

SEQ ID NO: 27281 - DNA, 380 bp, Glycine max
  Clone ID: LIB3051-030-Q1-K1-F3
ctccgacacaatcgataacgtgaaagccaagattcaagataaggaagggattcctccggatcgacaacgtttgatcttcgccggaaaacaactcgaagacggcagaaccctcgccgattacaatatccagaaagaatcgactctgcatttggtgcttcgtctccgcggagggatgcagatcttcgtgaaaaccctaaccggcaaaacgattacgctagaggtagagtcctctgacacaatcgataacgtgaaagcgaagatccaggataaggaaggtattccaccggatcagcaacgtcttatcttcgccggaaagcagttggaagacggcagaaccctcgccgattacaatattcaaaaggaatcgacgcttcatctgg

SEQ ID NO: 27282 - DNA, 322 bp, Glycine max
  Clone ID: LIB3051-030-Q1-K1-F5
gcgcttattctctcgcattccgtggagatctagtgcttctgctgcaagacctggctggggattagggtttcgattcggaggtagactaagatgttcggaagggctccaaagaaaagcgacagcaccaggtactacgaaatcctcggcgtttccaagaacgcttcgccggatgacttaaagaaggcttacaagaaagccgccattaagaaccatcctgacaaaagcggggatcccgagaagtttaaagagcttgctcaagcctatgaggttcttagtgaccctgagaagcgcgagatttatgatacatatggagaagatgctc

SEQ ID NO: 27283 - DNA, 368 bp, Glycine max
  Clone ID: LIB3051-030-Q1-K1-H3
ctttgatggaaattttccagtggattcttggttaccaatttttgtgaattgtctttatcctggaagtcaattacctccagaagctgtcgttgtaaatgttacatgtggtagtggacgtggtggtttacccaccaatgcttggattagttctgcagttaacaatcgctcctcagatatcaacaaaatgattcgcacagcacttgggaaaggtaagaaaaattttttcttactagagttgatccttttccagtagctttactggctgatctttttggcgttaagaatgaaattctgagttctaacgccgctaaccctatgctgacgcgactttttgagaactgtaagagtctcacatatctggttgatga

SEQ ID NO: 27284 - DNA, 429 bp, Glycine max
  Clone ID: LIB3051-031-Q1-K1-A8
gagcttttgtcaattttctattgaccttctcggtggaggaattttagtggacaaaacgtggagattggatcacacttatacaaaattctccaattagtaacttgttgagagttgctgcttggaagaaaggctgtttaatggtcaagattgtgatgtctgggaatgcagcagtcaaaaggagtgattgggcctcattggtacaagtgtttttaacaaacagcaacagtacagagcattttgatgcatgtaagtggacaaaatcagaaccacattcctgggaattgatcttcccaatagaggtatgtggtcctaataatggttttgaaatgtggagttctgagtgggcaaatcaaacttcatggcatttgagtttccttattgacaatcccaaacagtctacagtttttgatattctcttaggaatctctc

SEQ ID NO: 27285 - DNA, 349 bp, Glycine max
  Clone ID: LIB3051-031-Q1-K1-C4
tccatttgcatttgctctctctcagtttccaagaatcttaagctatgggaaagtcttgtccgaccgtgagcgctgattaccagaatgccgttgagaaggctaagaagaagctcagaggctacatcgctgataagagatgcgctcctctaatgctccgactggcatggcactctgatggaacttacgacgtgagctctaagaccggtgcaacgtacggatctatgatgattcagtacaaactatttcaaaaccttttcgacgttacagacatctaccgtactctgatcatgcctgtcggactcgacgcatatataatcagtttgctcgctgttgaataccgaaactaatg

SEQ ID NO: 27286 - DNA, 430 bp, Glycine max
  Clone ID: LIB3051-031-Q1-K1-C10
tctctgtccccctccgactgcgatcgatcaaggcagcgtctacaatgagaaaggtggagatggctagatacaacgcgctgctgattctcctgctccttctaatacagtgaaaacacagagagaagcactcttctcactaccttttctagatacagaaactcatggcctgagttaatccgaacggcttcgacgattctccggcgactccaacgcacaagctacagttcattcactacaacatattcggaaacctcttctaggttacggccaaataccgtcctccaatcatgcctgtcagacgcggctcgtatggaatcgattgctcgctgttgaataccgagacgaatgagctgatggcggttaagaagatagcgaacgctttctacaatcacatggacgctaagcgtacgcttcgtgagattaaccttct

SEQ ID NO: 27287 - DNA, 392 bp, Glycine max
  Clone ID: LIB3051-031-Q1-K1-C11
cttgtactgttctattagttcatactaagttctgaaaatgagttccaaggttttgcgtgttggacttatgttcttggccactatacttctgatctcctctgaggttgcacccgatgatgcatacgagaattttgacaaaatagatgggaagcctagtgcagatggggtagatgaaagcaagtattggcgtggcggctatggtggcggctatggtggtggttatggaggtgggcgtggcggctatggaggcgtgcgtgaaggctctggaaggtgccgtgctgcaatcatgcctgtcggacgcggctcgtatggaatcctttgctcgctgttgaataccgagacgaatgagctggtggcggttaagaagatagcgaacgctttcgacaatcaca

SEQ ID NO: 27288 - DNA, 432 bp, Glycine max
  Clone ID: LIB3051-031-Q1-K1-E2
ggccaccgttccagggcagctcgtgtgggagatcgtcaagaaaaacaattccttctgggtcaagcagtttggaaggggcacccagagcgtcgaattcagcagagagagcaacaatctctacaacctcaattcgttcaagtactctggtttggcaaacaagaaaactgttactgttcagcctgagggcaaagatcaggctgtgttgttggctacaaccaagacaaagaagcaaaacaagcccgctgcattgctccacaaatctgtgatgaagaaggagttcaggaggatggcaaaagctgttgaaaaccaggtggccaaaaattactacaggcctgatctcaagaaggctgcccttgcaaggttgagtgctgttcacagaagcctcaaagttgccaagtctggtgtcaagaagaggaatagacagggcgtgag

SEQ ID NO: 27289 - DNA, 393 bp, Glycine max
  Clone ID: LIB3051-031-Q1-K1-E3
tccttcgcctttctctctcttcttttaactctctctctgtctctctctacgctttctggtgcgagatccctcaagggatccactaactgaaggagaaatggggttgacattcaccaagcttttcagccggcttttcgccaagaaggaaatgcgaattctgatggtgggtctcgatgcagctggtaagaccaccatcctgtacaagctcaaacttggagagatcgttaccacaattcccaccattgggttcaatgtggagactgtggaatacaagaacattagtttcactgtctgggatgttggtggccaggacaagattcgtcccttgtggaggcactacttccaaaacacacagggtctcatttttgtggttgacagcaacgacagggacag

SEQ ID NO: 27290 - DNA, 426 bp, Glycine max
  Clone ID: LIB3051-031-Q1-K1-E12
gtttaaacctaattctaatttcttaatcggtcgattcttctcctcctaaagatgcagagctgcgtgaaaactttgaccggtaagaccatcacccttgaggtggagtcctccgacaccatcgataacgtgaaagctaagattcaagacaaggaagggatcccacctgaccagcagagacttatctttgcgggtaaacagcttgaggatggtcgaacccttgccgactacaacatccaaaaggaatccactctccacctcgtgcttcgcctcaggggtggcatgcaaatctttgtcaagactttgactggcaagaccatcaccctcgaggtcgaatcctcggacaccattgataatgtcaaggccaagatccaggacaaggagggtatccctccagatcagcagaggttgatatttgctggtaaacaa

SEQ ID NO: 27291 - DNA, 430 bp, Glycine max
  Clone ID: LIB3051-031-Q1-K1-G10
gtttctctctttccgcggcgtagatctgagcagtttgggaaaccctaactgctctcacgactctctttgctttttttcctctccgatcaacgacctctttcgtcgccctaagtcatggcaggacttgcacccgagggatcacagtttgatgctcgtcaatatgataccaagatgaatgagttgcttacatctgatggacaggattttttcacatcttatgatgaggtttatgacagttttgatgctatgggcttgcaggagaatctcctgagaggcatttatgcatatggttttgagaagccatcagctattcagcagagaggaatagttcctttctgcaagggacttgatgttatacaacaggcccagtctggaactgggaagacagcaactctctgctctggaattctgcagcaacttgactatagtg

SEQ ID NO: 27292 - DNA, 352 bp, Glycine max
  Clone ID: LIB3051-031-Q1-K1-G11
gttactctctttccgcggcgtatatctgagcattttgggaaaccctaactgctctcaccactgtctttgctttttttcgtctccgatcaactacctttttcgtcgccctaagtcatggcaggacttgcaccctagggatcacagtttgatgctcgtcaatatgataccaatatgaatgagttgcttacatctaatggacagtattatttcacatcttatgatgaggtttatgacaactttgatgctatggccttgcacgagaaattactgagacgcatctatgcatatggttccgagatgccatcaactattcatcatatactgatagttatcttctgaccggtacttcttg

SEQ ID NO: 27293 - DNA, 407 bp, Glycine max
  Clone ID: LIB3051-031-Q1-K1-H4
cgtcacgcgttcgccaacgcgtccgcttcaattctcccttctggactacaaattctggtgctgctgtttggaacaacaactcctctttaaccgttggagctagaggtccaattctgcttgaggattatcatcttgtggagaagcttgcaaactttgacagggaacgtatcccagaacgtgttgtccatgccaggggagctagtgcaaagggtttctttgaggtcacacatgacatttctcacctgacatgtgcagatttccttcgagcccctggagttcagacgcctgtaattgttcgtttctcaactgtcattcatgagcgtggtagccctgaaaccttgagggaccctcgaggttttgccgtgaagttttacaccagagagggtaactttgaccttgttggaaac

SEQ ID NO: 27294 - DNA, 434 bp, Glycine max
  Clone ID: LIB3051-031-Q1-K1-H5
ctgtgaaggagcagaggagtattattcccgcgccatacttgcagacccggatgacggagaagttctatcacagtatgggaagttagtttgggagctacatcatgaccaagaacgtgcctccagctattttgaaagagcagtccaagcctctcctgaagacagccatgtacaagcagcatatgctagtttcctttgggacacggaggaagacgaggatggtagcaacgaaccacaatgtttgccgccacattctcttcaaggagctatagctactgcaggtgcttgaattggtggtgaagtttgtacgtgcaagagagtgtctcatgatgtaaacaagttcttatattgaagccaatgttgtagctgttgagaaagcagtaaataactgaatgcataaactcatgtgtagtaacactaagacaggcgaccaccct

SEQ ID NO: 27295 - DNA, 430 bp, Glycine max
  Clone ID: LIB3051-031-Q1-K1-H11
gaaaaaataaaaatcaaagagcataatgtcagggatcattcacaagattggggagacccttcatgtgggagggcacaagaaggaggaggagcataagggtgagcaccatgctggagaatacaaaggggagcaccatggtgaacacagtagtgagtacaaaggagagcatcatggtgaacacaaagctggagagtaccatggtgagcacaagccagagcacaaagaggggttcctagacaaagtcaaggacaagatccatggtgagggcggcgccgccgagggcgagaagaagaagaaggagaagaagaagaaggagcatggccatgagcatggccatgacagcagcagcagcagtgacagtgattaaactgctgcatcacctatatatttaaaaggtttatgggaccatagtagcgagggctgtgcctta

SEQ ID NO: 27296 - DNA, 350 bp, Glycine max
  Clone ID: LIB3051-032-Q1-K1-A12
gcgaagaagaagctcagaggcttcatcgctgagaagagatgcgctcctctaatgctccgtttggcatggcactctgctggaacttacgacgtgagctcgaagaccggtggtcccttcggaaccataaagcacccctccgaactcgctcacggcgctaacaacggtcttgacatcgctgttaggcttttggagccactcaaagcggagtttcctattttgagctacgccgatttctaccagttggctggcgttgttgccgttgaggtcaccggtggacctgaagttcccttccatcctggaagagaggacaaacctgagccaccaccagagggtcgcttgcccgatgccac

SEQ ID NO: 27297 - DNA, 415 bp, Glycine max
  Clone ID: LIB3051-032-Q1-K1-C4
tcttcatctttcttcttctcgtttttactttgacggtttctagagagagaaagttggttgtagagagagaaagcgcgctgctgcttcttctgctgctgcttcgacagtgagaagagagagagaagcgctcttctccgtaccgtttctagagagagaaactgatggccggagttaatccgaacggcgtcgccgattttccggcgactccaacgcacggcggacagttcattcagtacaacatattcggaaacctcttcgaggttacggcgaagtaccgtcctccgatcatgcctgtcggacgcggcgcgtatggaatcgtttgctcgctgttgaataccgagacgaatgagctggtggcggttaagaagatagcgaacgctttcgacaatcacatggacgctaagcgtacgcttcg

SEQ ID NO: 27298 - DNA, 405 bp, Glycine max
  unsure (1)..(405): unsure at all n locations
  Clone ID: LIB3051-032-Q1-K1-D3
cccacgcgtccgcccacgcgtccggtttcttttcgtgaaacaaaagaaaacaaaggatgaggttttgtgatgtcgggcatggagaggcttcagaggatgttcgcgggtgcaggtggagcgctgggccatcccccaccggattcccccaccctcgattcctccgagcaggtctacatctcctccctcgcccttctcaaaatgctcaaacacggaagagctggggtacccatggaagtgatgggtctgatgttgggggagttcgtggatgagtacaccgttcgcgttgtggatgtgtatgcgatgcctcagagtgggaccggtgttagcgttgaagctgttgatcatgtttttcagactaatatgcttgatatgttgaagcanactggaaggccggagatggttgtg

SEQ ID NO: 27299 - DNA, 405 bp, Glycine max
  Clone ID: LIB3051-032-Q1-K1-E5
atttttgtgaattgtctttatcctgtaagtcaattacctccagaagctgtcgttgttaatgttacatgtggtagtggacgtggtggtttacccaccactgtttggattagttctgcagttaacaatcgctcctcagatatcaacaaaaagattcgcacagcacttgggaaaggtaagaaaattgtttttcttactagagttgatccttttccagtagctttattggctgttctttttggcgttaagaatgaaattctgagttctaacgccactaaccctatgctgacgcgacttcttgagaactgtaagagtctcaaatatctggttgatgagtgtccttttgcatttgtgaactagtatgtaatattttattcacttaaataaagcgcattactatgtgcaatg

SEQ ID NO: 27300 - DNA, 247 bp, Glycine max
  Clone ID: LIB3051-032-Q1-K1-F4
cccacgcgtccgcccacgcgtccgacactagagtgttggagcattctattgctagctaataatgggcttaataataatggtgagaaagaaaagaatggccaaggtaataaaattctttgagttgaacacaagggccaagattccttctggtgggttaggcacttggcaagctgagcctggtgttgtagccaaagctgtcaccacagacattctggttggatacacgcatattgattgtgctcaaacg

SEQ ID NO: 27301 - DNA, 339 bp, Glycine max
  Clone ID: LIB3051-033-Q1-K1-A9
agcacatcgagggagcaactaaatacctgctctctaagattaaagatttccaatggtttgttggtgagagcatgggtgatgatgcttgcttggtctttgcctactacaaggacggcgctgctgatccaacattcctgtactttgcatatgccttaaaggaggtcaagtgctaagtgacttaatgtaccgagctatctactcattttatctagtttttttttacgttctgtcctaagttacttgaaactttgacctggtattttgattttaatggtgagacgtgtgctactgctacatcataattcccatcaaatttaattatcgatgggttagaatttc

SEQ ID NO: 27302 - DNA, 407 bp, Glycine max
  unsure (1)..(407): unsure at all n locations
  Clone ID: LIB3051-033-Q1-K1-E9
cttcttctcttgcggctagggttttagcgcagcttcttctagatttaaggaagatgggtaaggaaaaggttcacatcagtattgtggtcattggccatgtcgactctgggaaatccactaccactggtcacctgatttacaagcttggaggcattgacaagcgtgttattgagaggtttgagaaggaagctgctgagatgaacaagaggtctttcaagtatgcctgggtgctggacaaacttaaggctgagcgtgaaagaggaatcaccattgatattgctttgtggaagtttgaaacaacaaagtattattgcacagttattgatgcgcctggacataaggatttcattaagaatatgattactgggacatcccaagctgactgtgctgntcttatcattgattcg

SEQ ID NO: 27303 - DNA, 421 bp, Glycine max
  unsure (1)..(421): unsure at all n locations
  Clone ID: LIB3051-033-Q1-K1-G10
cttccattccgttctacatataatcattcataatgggtgttttcacattcgaggatgaaatcaactcccctgtggctcctgctactctttacaaggccctagttacagatgccgacaacgtcatcccaaaggctcttgattccttcaagagtgttgaaaacgttgagggaaatggtggcccaggaaccatcaagaagatcactttccttgaggatggagaaaccaagtttgtgctgcacaaaatagaaagcattgatgaggcgaacttgggatacagctacagcgtggttgggggtgctgcattgccagacacggcggagaagatcacattcgactccaaattggttgctggtcccaatggagggtctgctgggaagctcactgtcaaatacgaaacanaaggagatgctgagcccaacca

SEQ ID NO: 27304 - DNA, 449 bp, Glycine max
  unsure (1)..(449): unsure at all n locations
  Clone ID: LIB3051-034-Q1-K1-A1
cccacgcgtccgcacagttggaaaaaaaaaaaaagttgttcgagatggcacgtacgaagcaaactgctcgtaagtccacaggaggaaaggcacctaggaagcagctcgcaaccaaggctgcacgtaagtctgcaccaactactggtggtgtgaagaagccacatcgttatcgtcctggtaccgttgctcttcgtgagattaggaaataccagaagagtaccgagcttttgatcaggaagctccccttccagaggctggttcgtgaaatngctcangacttcaagactgatctgcgtttccagagccatgctgtgcttgcattggcagaagctgctgaggcataccttgttggactctttgaggatactaatctgtgtgccattcacgcttagcgtgtaactattatgcccaaagatatccagctggcaagaaagattcgtggtgagcgt

SEQ ID NO: 27305 - DNA, 431 bp, Glycine max
  unsure (1)..(431): unsure at all n locations
  Clone ID: LIB3051-034-Q1-K1-A2
cacaaactagtaaatagtaatattattcttcgaatccattttattattcataatgggtgttttcacatttgaggatgaaaccacctcccctgtggctcctgctaccctttacaaagctctagttacagatgccgacaacgtcatcccaaaggctgttgatgccttcaggagtgttgaaaaccttgaggggaacggtggccctggaaccatcaagaagatcactttcgttgaggatggaaaaagcaagtttgtgttgcacaaaatagaatcagttgatgaagcaaacttgggatacagctatagcgtaattggtggaattgggttgccagacacagtggagaagatcacattcgaatgcaaattggctgctggtgccaacggagggtctgctgggaagctaactgtcaaataccanaccaaaggagatgctc

SEQ ID NO: 27306 - DNA, 366 bp, Glycine max
  Clone ID: LIB3051-034-Q1-K1-A9
caagtattggcgtggcggctatggtggcggctatggtggtggttatggaggtgggcggggaggctatggaggtgggcgtggaggctatggagggggacgtggtggatatggcggcggacgaggtggctatggtggcgggcgtggtggctatggcggcgggcgtggtggcgggcgtggtggctatggtcctaatgtacataacgaggctggggttgatgctaacccttacaactaagaaagcgactttctaaagcttatatatgggtttaagttatcgcaatagatataattttatgtgaaggttagtagtaatattagtggaaaactttgtagaggtttaatactgtattttgaattttcttaaaa

SEQ ID NO: 27307 - DNA, 433 bp, Glycine max
  Clone ID: LIB3051-034-Q1-K1-A11
ggagaaaccaagtttgtgctgcacaaaatagaaagcattgatgaggcgaacttgggatacagctacagcgtggttgggggtgctgcattgccagacacggcggagaagatcacattcgactccaaattggttgctggtcccaatggagggtctgctgggaagctcactgtcaaatacgaaacaaaaggagatgctgagcccaaccaagacgaactcaaaactggaaaagccaaggctgatgctctcttcaaggccattgaggcttaccttttggcccatcccgattacaactaatcctcttcaacttacttgtcatcactttcttgcttggagacttatccaatcactctgttctcaacttaagttgccttccaatgtatccagtctttcctttcttctttccttttcccatataattgtgagacttatgata

SEQ ID NO: 27308 - DNA, 424 bp, Glycine max
  unsure (1)..(424): unsure at all n locations
  Clone ID: LIB3051-034-Q1-K1-B10
cttccattcataatgggtgttttcacattcgaggatgaaatcaactcccctgtggctcgtgctactctttacaaggccctagttacagatgccgacaacgtcatcccaaaggctcttgattccttcaagagtgttgaaaacgttgagggaaatggtggcccaggaaccatcaagaagatcactttccttgaggatggagaaaccaagtttgtgctgcacaaaatagaaagcattgatgaggcgaacttgggatacagctacagcgtggttgggggtgctgcattgccagacaccgcggagaagatcacattcgactccaaattggttgctggtcccaatggagggtctgctgggaagctcactgtcaaatacgaaacanaaggagatgctgagcccaaccaagacgaactcaaaactggaaaag

SEQ ID NO: 27309 - DNA, 377 bp, Glycine max
  Clone ID: LIB3051-034-Q1-K1-C4
aagaactttcttataaccaaaaccaacaacaactatggcaagttatcagaagcactacgatgatcacggtcgcaaggtcgacgagtatggcaatgttgagaggcaaactgactaatatggcaacccggttcatgccactagtgtcacttatgtagccaccaaaagtgttggtggctacaatgatgacgctaataagcaacatgatattactggtgtctatcccgagaaagacaccggtagacatcattctggtcgtggttacgacggtgacactaacatgcaccatgatgctactggtgtctatcccggaatagacattggtagagatcatgggactaccggtgtttatggcctatacaccgacagacatcatggaa

SEQ ID NO: 27310 - DNA, 446 bp, Glycine max
  unsure (1)..(446): unsure at all n locations
  Clone ID: LIB3051-034-Q1-K1-D3
cccacgcgtccgcttctctctctctttttcgcctcattccattttcatctatcaatggctccagtagcagcagcatcttcagattcaatcaagccaagagatgtttgcatcgttggtgttgcacgtacaccaatgggtggatttcttggtactctgtcatctctatctgccaccaagctaggctctatagctattgaagctgctcttaaaagggccaatgttgatccatcccttgtggaagaagtattttttgggaatgttcttagtgctaatttggggcaagctcctgcaagacaagctgctcttggagcangaatatccaattcagttatctgcactaccgttaacaaaagttgtgcatcaggaatgaaagctgcaatgcttgctgcacagagtattcaattaggcacanatgatngtgttgtggctggtggtatggaaagcat

SEQ ID NO: 27311 - DNA, 438 bp, Glycine max
  Clone ID: LIB3051-034-Q1-K1-E7
gaagcgtgagatatatgatcagtatggtgaagatgcgcttaaggaaggaatgggtggtggcggtggccatgatccatttgatatcttttcatctttctttggcggtgggagtccctttggatcaggtggaagtagtcgaggtaggaggcagaggcgcggagaagacgtggttcaccctctcaaggtctctttggaggacctttatcttggaacttccaagaagctctccctctccagaaatgttatatgctccaagtgcagtgggtaagtgaattcggagtttggtttggttttgattggtgattagtttttcaagggaagaaatgcttttttagtttttaaagtatgatattgattaatttgatgtagcatggtcctaaattgtggtggcagcctttgttgcaattcttgatattactgggaatttcaaacaaatgt

SEQ ID NO: 27312 - DNA, 430 bp, Glycine max
  Clone ID: LIB3051-034-Q1-K1-E10
tgatatcccagttattccagtagagcctaaaactgtctctgtgcaacctttatttggtgcaggtccagaagggagtggtgaggcaaagctgaaggatggaccaaaacgctgcagcagctgcaacaagcgagttggtttgacagggtttaattgtcgatgtggtgaccttttttgtgctgtacatcgctactcagacaagcataattgcccatttgattaccgcactgctgctcgggatgccatagctaaagcaaacccagttgtcaaggctgagaagcttgataagatctaagatttgaagtcaaagtttcatggcctgagatgaagttatgcataatttcatcatgaaatgatccgagtttccttcacattttatttggtgttcttattatattgttatatgtggtgggtgacttggagttattggaca

SEQ ID NO: 27313 - DNA, 401 bp, Glycine max
  Clone ID: LIB3051-034-Q1-K1-F8
gctgttaaggatttgaagcgtggttatgttgcctcaaactcaaaggatgaccctgcagaggaggctgctaacttcacagcccaagtcatcatcatgaaccaccctggtcagattggaaatggctatgcccctgtcctcgactgccacacttctcacattgctgtcaagtttgctgaactcatgaccaagattgacaggcgatccggcaaagagcttgagaaggagcccaagtttttgaagaacggtgatgctggttttgttaagatgattccaaccaaacccatggttgttgaaactttctccgagtatcctccacttggtaggtttgctgttagggacatgcgtcaaactgttgctgtgggagtcatcaagaacgttgagaagaaggatcctaccggagc

SEQ ID NO: 27314 - DNA, 433 bp, Glycine max
  Clone ID: LIB3051-034-Q1-K1-F9
tttcaatccccagtttcttcttcaacgtcctcttacgagcagatcccaattctccttcccagtttcaaaccctaattccctcattcccatggcctcagaagagcccactgtcgcggtggaacccgctcccgaacctgccaccgccgagcctcccccggaggagaaggaggagcccaaacctgaagccaaggctaagaaaaccaaggaacccaaacctaaaaaggtttccagaccacgcaaccctcccactcatccttcctacgaggagatgattaaagacgcaattacctcgctgaaggagaaaaccggttcgagccaacacgcgattgcgaagttcatcgaggagaagcacaagcagcttccaccgaacttcaggaagcttcttctctaccatttgaagaaacttgtagccgctggaaaactcgtcaaagtc

SEQ ID NO: 27315 - DNA, 430 bp, Glycine max
  Clone ID: LIB3051-034-Q1-K1-F12
gttagttcacacactaagttctgaaaaatgagttccaaagtttttcttattctacttatgttcatggccactatacttttgatctcctctgaggttgcacccgatgatgcataccagaattttgacaaaacagatgggaagcgtagtgcaaatggggtagatgaaagcaaatattggcgtggtggctatggcgactatggtggttggcgtggtggtggttggcgtggtggctatggaggctggcgtggtggctatggtggtgggcgtggtggctatggtggctggcgtggtggctatggtggtgggcgtggtggctacggaggttggggtggtggctttggccctaacgaacataatgaggctgggattgatgctagccctcacaactaagaaggaaacttgctaaagcttatataggatttaagttatc

SEQ ID NO: 27316 - DNA, 393 bp, Glycine max
  Clone ID: LIB3051-034-Q1-K1-G12
cagaaagaaaagaccatcaaagtttcacttcagccttatccggtttagggtttcgggtgttgacccaacctttgacgtatcgaaaccttaagtttcggatcaggtctgagcaatctggttggtagaacctttggtcttagagagtcaagttttatgtctgaattagacgatcaaattcctactgccttcgatccttttgctgatgcaaatgctgatgactcgggtgctgggtcaaaggagtatgtgcatattcgcgtacagcagcgaaatggaaggaaaagcctgacaaccgttcagggattgaaaaaagaattcagctataacaagatacttaaagatgttaagaaagagttctgttgcaatggaacagttgttcaggacccagaactagga

SEQ ID NO: 27317 - DNA, 366 bp, Glycine max
  unsure (1)..(366): unsure at all n locations
  Clone ID: LIB3051-034-Q1-K1-H2
agaaaacctaagcttagaattagaaacaaagaaaagaagaaaggaaagaattgatcgttgaaaatgcagggaggaaagaaagcgggagagtccattaaggaaacagctacaaacattggtgcttctgccaaggctggcatggagaagaccaaggccactgtccaagagaaggcagaaagaatgacagcacgtgatccggtgcaaaaggagttggcaacccaaaagaaagaggcaaagatgaaccaggcggagctggacaagcaggcggcgcgtcagcataacacggcggccaaacagtccgncaccacggctgggcacatgggacatggccaccacaccaccggaaccgggactggaaaccgcacg

SEQ ID NO: 27318 - DNA, 323 bp, Glycine max
  Clone ID: LIB3051-034-Q1-K1-H4
acgcgtctattagttcatactaagttctgaaaatgagttccaaggttttgcttgttctacttatggtcttggccactatacttctgatctcctctgaggttgcacccgatgatgcatacgagaattttgacaaaatagatgggaagcctagtgcagatggggtagatgaaagcaagtattggcgtggcggctatggtggcggctatggtggtggttatggaggtgggcgtggaggctatggaggtgggcgtggaggctatggaaggggacgtggtggatatggcggctgacgatgtggctatggtggcgggcgtggtggctat

SEQ ID NO: 27319 - DNA, 300 bp, Glycine max
  Clone ID: LIB3051-034-Q1-K1-H5
cggacgcgtgggcgccaataggttatcaacgaccgtgagactggaaggtccagaggattcggatttgtgaccttcgcctcagagcagtcaatgaaagatgcgatcgcaggaatgaacggccaggaccttgacggtcgtaacatcactgtcaacgaagctcagacccgcgccagccgtggtggtggtggaggcggtggtttcggaagtggtggtggatacaaccgcggtagcggtggatatggtggtggtggtggcggcggcggataccgtggtcgtcgtgaaggtggataccaccgtaat

SEQ ID NO: 27320 - DNA, 399 bp, Glycine max
  Clone ID: LIB3051-034-Q1-K1-H10
cccacgcgtccggttagttcacacactaagttctgaaaaatgagttccaaagtttttgttattctacttatgttcatggccactatacttttgatctcctctgaggttgcacccgatgatgcataccagaattttgacaaaacagatgggaagcgtagtgcaaatggggtagatgaaagcaaatattggcgtggtggctatggcgactatggtggttggcgtggtggtggttggcgtggtggctatggaggctggcgtggtggctatggtggtgggcgtggtggctatggtggctggcgtggtggctatggtggtgggcgtggtggctacggaggttggggtggtggctttggccctaacgaacataatgaggctgggattgatgctagccctcacaac

SEQ ID NO: 27321 - DNA, 430 bp, Glycine max
  Clone ID: LIB3051-035-Q1-K1-A10
cgataacgtgaaggcaaagatacaggacaaagaggggattccaccagaccagcagaggcttatctttgctgggaagcagctggaagatggtcgtactcttgctgattataatatccagaaggagtccactctgcatttggtgttgaggcttcgtggaggtatgcagatatttgtgaagactctgacagggaagaccattaccttggaggtggaaagctctgatactattgacaatgtgaaagctaagattcaggacaaggaaagtatccctccagatcagcagaagctcatttttgctgggaagcaattggaaaatggtcgtaccttggcagattacaatattcagaaagaatccactttgcatcttgtccttcgccttcgtggtggttgctaaggggaatcccttttatgaagtgttctcatatgtctt

SEQ ID NO: 27322 - DNA, 423 bp, Glycine max
  Clone ID: LIB3051-035-Q1-K1-B12
cctaagtctttgggaatagtgctgcaatggcttcaagtcaggaggaggtgacccttttgggagctactggaagcccatttgtgtgcagggttcatattgccctcaagttgaagggagttcaatacaaatatgtcgaagaaaatttgaggaacaagagtgaactgcttctcaaatccaacccagttcacaagaaggttccagtgtttattcacaatgagaagcccatagcagagtctcttgtgattgttgaatacattgatgagacatggaagaacaaccccatcttgccttctgatccttaccaaagagccttggctcgtttctggtccaaattcattgatgataaggtttttggtgctgcatggaaatccgttttcacagctgatgagaaagagcgtgagaagaatgttgaggaagcaattg

SEQ ID NO: 27323 - DNA, 418 bp, Glycine max
  Clone ID: LIB3051-035-Q1-K1-C9
attattctttcgcaccttcgaaaatcaattttctgtcttctctgcgtctgcttcctgtatcaatcgttttccatggctcgtaccaagcaaaccgctcgcaaatccaccggtggaaaggctcctaggaagcaactcgccaccaaggctgcaaggaaatctgcaccgacaaccggtggagtcaagaagcctcatcgctatcgccctggaactgttgctcttcgtgagatccgaaaataccaaaagagcacagagcttctgatccgcaagctccccttccagcgtcttgttcgtgaaattgcgcaagacttcaagaccgatttgaggttccagagtcacgctgttcttgcgcttcaggaagctgcggaggcttacttggtgggtttgtttgaggacaccaacttgtgtgcgattcacgcca

SEQ ID NO: 27324 - DNA, 435 bp, Glycine max
  Clone ID: LIB3051-035-Q1-K1-D5
aatagatttcgtcagtgttgaaatcacgagaaattcatggctgctccaccggcaagagctcgtgcggattacgattatctcataaaacttctcttgattggcgatagtggtgtcggaaagagttgccttcttctacgattctctgatggttctttcacaactagtttcatcacaactataggcattgattttaagataagaaccattgagcaggatggaaaacggatcaagctccaaatttgggatactgcaggtcaggagcggttccgaacaattacaaccgcttactatcgtggtgctatgggcatattgctagtctatgacgttacagacgaatcttcatttaacaatatcaggaattggattcgtaacattgagcagcatgcttcagacaatgttaacaaagtactggtggggaacaaagctgacatggat

SEQ ID NO: 27325 - DNA, 350 bp, Glycine max
  Clone ID: LIB3051-035-Q1-K1-D8
ttttgctttaccaaattccattttccaattcaaaaccctaactccgttcgaagcaccaaatcgtgatggcaccaaaggcagagaagaagccagcagagaagaagcctgtggaggagaagaaatcgacggtgggagacaaggctccggcggagaagaagccaaaggccggaaagaagcttccgaaggagggaggcgccggcggagaaggtaagaagaagaagagaaacaagaagagcgtggagacatacaagatctacatcttcaaggttctgaagcaggttcaccctgacattggtatctcaagcaaggccatgggaatcatgaacagcttcatcaacgacatcttcgag

SEQ ID NO: 27326 - DNA, 426 bp, Glycine max
  unsure (1)..(426): unsure at all n locations
  Clone ID: LIB3051-035-Q1-K1-D9
ctagttctagatcgcgatctagaactaggttggtgcaaagcatccttcggttcaatttctctctctcagcgctttctgcaatcgaacctttcatctccaaagggatccacaggccgaaggagaaatggggctgacattcacaaagcttttcagtcggcttttcgcgaagaaggaaatgcgaattctgatggttggtcttgatgctgctggtaagaccactatcctgtacaagctcaagctcggagagatcgttaccacaattcctaccatcgggttcaatgttgagactgtggaatacaagaacattagcttcactgtttgggatgttggtggccaggacaagattcgtcccttgtggaggcactacttccagaacacccagngtcttatntttgttgtagacagcaatgatagggacagagttgt

SEQ ID NO: 27327 - DNA, 366 bp, Glycine max
  Clone ID: LIB3051-035-Q1-K1-E6
ggaagctaactgtcaaataccaaaccaaaggagatgctcagcccaacccagacgacctcaaaattggcaaagtcaagtctgatgctcttttcaaggccgttgaggcctaccttttggccaatcctcattacaactgatccaattcgatcttcagtattcagtgatctgcaaagaccttgttttatattatatacaagagttttcttgccttgtgtggagtgttattcaatcactttgagtgtgtggtgtggcttccaattgatgtaacgagtgtttcctttcttatttcctttttccacagaattgtgagagccagttgatgtctttgtatgtcacttcatcaataaatcaatatgttataataat

SEQ ID NO: 27328 - DNA, 426 bp, Glycine max
  unsure (1)..(426): unsure at all n locations
  Clone ID: LIB3051-035-Q1-K1-E11
tacggaggagaatccacttcgctcaatcttattcagctttggaagagattcaggggagatgacaagcctcctccacatttgggcgctagcagggactacaacatcgatatgaaccccaagtttattatggctaatggcaatttggtgcgggttctcatacataccgatgttactaagtatctctatttcaaagctgtggatgggagctatgtgtttaataaaggaaaggttcataaggtgcctgcaaacgacatggaggccttgaagtccccacttatggggctatntgaaaaacgccgggcaccgcagtttttcaattatgtgcaaaactacaacgagagcgatcccaagacccacgaggggatggacttgacaagagtgtctactaaagagttgatagcanaatacggccttgatgataacact

SEQ ID NO: 27329 - DNA, 439 bp, Glycine max
  Clone ID: LIB3051-035-Q1-K1-F7
caagtgtttttaacaaacagcaacagtacagagcattttgatgcatgtaagtggacaaaatcggaaccacattcctgggaattgatcttcccaatagaggtatgtggtcctaataatggttttgaaatgtggagttctgagtgggcaaatcaaacttcatggcatttgagtttccttattgacaatcccaaacagtctacagtttttgatattctcttgggaatttctcaagattttgaaattgctggtaatactcttatgccagctttttctgttccacaggctactgccagatcttctgaaaatgcggaatcctctgcatgatctggaatttgagtcttctttcgctagttcgtttgtttaattcaataaaggaaattaggcatgaccctctggttgagtatgctctgactatttgaaaatttccacacctatttta

SEQ ID NO: 27330 - DNA, 448 bp, Glycine max
  Clone ID: LIB3051-035-Q1-K1-G1
ctcagaatttctatctatctcttgtttcaatttcaacaacggttactcctttttcgttgtgagtttcaatcaagccatcatcatgtctaccgcatcgcaacccaaggccaagaaaacggcgtcgtccaagaagcccctctcccaccctcccttcgccgtgatgatagcagaggcgattgcgagtctgaaagagagaaccggttcgagccaatacgcgataaccaaatacatcgaagggaagcacaaggagttgcctgcaacctacaagaagcttgtcctcgttcatctcaagaaatctgttgctgctggcaagcttgttaaggtgaaaaactcctttaagctcgcaccgactaagcctgctccggttaaggccgctgctcccaaaaagccaaccaaagctgccactaagcccgctttcaagcccaaagctgctactcctaagaaaaag

SEQ ID NO: 27331 - DNA, 307 bp, Glycine max
  unsure (1)..(307): unsure at all n locations
  Clone ID: LIB3051-036-Q1-K1-B1
cggacgcgtgggtccgaactcgctcacggcgctaacaacggtcttgacatcgctgntaggcttttggagccactcanagcggagtttcctattttgagctacgccgatttctaccagttggctggcgttgttgccgttgaggtcaccggtggacctgaagttcccttccatcctggaagagaggacaaacctgagccaccaccagagggtcgcttgcccgatgccactaagggttctgaccatttgaaagatgtgtttggcaaagctatggggcttagtgaccgagatatcgttgctctgtctgggg

SEQ ID NO: 27332 - DNA, 382 bp, Glycine max
  Clone ID: LIB3051-036-Q1-K1-B9
gttagttcacacactaagttctgaaaaatgagttccaaagtttttcttattctactgatgtgcatggccactatacttttgatctcctctgaggttgcacccgatgatgcataccagaattttgacaaaacagatgggaagcgtagtgcaaatggggtagatgaaagcaaatattggcgtggtggctatggcgactatggtggttggcgtggtggtggttggcgtggtggctatggaggctggcgtggtggctatggtggtgggcgtggtggctatggtggctggcgtggtggctatggtggcgggcgtggtggctacggaggttgcggtggtggctttggacctaacgaacataatgaggctgggattgatgctagccctt

SEQ ID NO: 27333 - DNA, 387 bp, Glycine max
  Clone ID: LIB3051-036-Q1-K1-B11
ccgggttgaaccaagccttcggccaagccgtccgttcaaatccgactgaccgaagaaaatattagggtttttgagtgcggtgcggcaatcctagcactttcttttgcagctttcgccgacagcttaattcaccatggctgaccaaaccgagaaggcttttttgaaacaaccaaaagtgtttctaagctcgaaaaaaactgggaagggaaagagacccggaaagggtgggaaccgtttttggaaatccattgggcttggatttaagactcccagggaagccatcgaaagaacctacattgacaagaagtgccccttcactggcaatgtttccatccgtggccgtatcttggctggaacatgtcacagtgctaagatgaacaggactat

SEQ ID NO: 27334 - DNA, 416 bp, Glycine max
  unsure (1)..(416): unsure at all n locations
  Clone ID: LIB3051-036-Q1-K1-F8
ctcgcggcttctttctccaagattaagtttcagtagtaatgggtaaggaaaaggttcacattaacatcgtggtcattggccatgtcgactctgggaagtcaaccaccaccggtcaccttatctacaagctcggaggtattgacaagcgtgtcatcgagagattcgagaaggaagctgctgagatgaataagaggtctttcaagtatgcctgggtgcttgacaagctcaaggctgagcgtgaaagaggaatcaccattgatattgctctgtggaagtttgagaccacaaagtactactgcacagtcattgatgcccctggacatagggatttcatcaagaacatgattactggaacatcccaagctgactgtgctgntcttattattgattccaccactggtggttttgaagctggt

SEQ ID NO: 27335 - DNA, 431 bp, Glycine max
  Clone ID: LIB3051-036-Q1-K1-G4
gtccagactctcattgttgatatagagcctgatgttaatgtcaagagagcaatgaacgagattaacgcagctgctagattgaggttggctgcaaatgagaaggctgaagcagaaaaaatactgcagatcaaaaaagctgaaggagaagcagaatccaaatatctgtcaagactcggtatcgctcggcaacgtcaagccattgtggatggactgaaggacagtgtgcttgctttctctgagaacgtgcctgggacaacagctaaagatgtcatggacatggtgctggtgactcaatactttgacaccatgaaagagattggagcatcttcaaagtcctcatctgttttcataccacatggtcctggcgcaattaaggacattgccatgcagattcgggatggtctgcttcaggccaccacttcacagaatta

SEQ ID NO: 27336 - DNA, 398 bp, Glycine max
  unsure (1)..(398): unsure at all n locations
  Clone ID: LIB3051-036-Q1-K1-H2
gcatcgctcacctttccctttgcgacgccgtgagaaacgaaagcaaacagaaaaaaaaggacagagtggngtgggaggcacacgcacaaacgcagagtcagaatctccattctccaatcggagacaaagcgagctcgaacgaacgaagtagagtagtgtgctacggaaaatgtggcggtgcattgctcgtggactccgtggacctgctttcaccagatccacctncaatcactcacttggatctcacttttatagattcttctctagtggggcgaactcttcgtacaccgtggtggatcatacttatgatgctgttgtcgttggtgctggtggcgcgggattgagagctgctattggactttcagaacatgggttcaatactgcttgtattaccaagc

SEQ ID NO: 27337 - DNA, 385 bp, Glycine max
  Clone ID: LIB3051-036-Q1-K1-H8
gtgaaatgatttgaagcttttaagttgcaatttgaattgtgatgagctgagctgcacagaggaggcatcgcaccgagttaaaaagtactgtctcgaccaggagagaacagcacagcctcttaaaaagcttaccgatctgacagcagctctagctcttaagtgaggaggaaagagaagatggagagaaaaggaagaagaagaagaaggaaaagaaagggctgaaagagaagatcgaggagaaaatagagggtgatcatcatcatcacaaggatgaggacacaagtgtccctgttgagaaagttgaggttgttgaaacagcacatgctgaggaaaagaaagggttcctcgacaagattaaggagaagctaccagggcacaagaagac

SEQ ID NO: 27338 - DNA, 346 bp, Glycine max
  Clone ID: LIB3051-037-Q1-K1-B6
gtgaaagccaagattcaagataaggagggtatccccccagaccagcagaggcttatctgtgctggtaaacagcttgaagatggacgaacccttgcagattataacatccagaaggaatctaccctgcacttggttttgaggcttcgtggtggcatgcaaatctttgttaagactttgaccggaaaaacaataactttagaagttgaaagttctgataccatcgataacgtgaaggcaaagatacaggacaaagaggggattccaccagaccagcagaggcttatctttgctgggaagcagctggaagatggtcgtactcttgctgattataatatccagaaagagt

SEQ ID NO: 27339 - DNA, 435 bp, Glycine max
  Clone ID: LIB3051-037-Q1-K1-C8
ggttgtcaaggaactggtatgaaggtttctataagacatcttggcccgtccatgattcagcagatgcagcatgcttgcaatgaatgcaagggtactggagaaaccatcaacgacagagatcgctgcccacagtgcaagggagaaaaggttgtgcaggagaaaaaagtccttgaagttattgtggaaaagggaatgcagaacgggcagaagattacattccctggcgaagctgatgaagcgccagacacaattactggggatattgtctttgtccttcagcagaaggaacatcccaaattcaaaagaaaggctgaagatctttttgtagagcacattttgtcccttactgaagccttatgtggcttccaatttgtgctgactcacttggatggccgtcagcttcttattaaatcaaatcctggggaagttgtcaag

SEQ ID NO: 27340 - DNA, 426 bp, Glycine max
  Clone ID: LIB3051-037-Q1-K1-D5
cacagcagcaaacatctccttctcaaactagtaatatatactattattcatccattccattctatatatttcataatgggtgttttcacattcgaggatgaaaccacctctcctgtggctcctgctaccctttacaaagctctagttacggatgctgacaacgtcatcccaaaggctgttgacgccttcaggagtgttgaaaacgttgagggaaatggtggccccggaaccatcaagaagatcactttccttgaggatggagaaaccaagtttgtgttgcacaaaatagaagcgattgatgaggctaacttgggatatagctatagcgtagttgggggaaaatggttgccagacacagtggagaagatcacattcgaatgcaaattggctgctggcgccaacggagggtctgctgggaagctaact

SEQ ID NO: 27341 - DNA, 420 bp, Glycine max
  Clone ID: LIB3051-037-Q1-K1-D12
caacttttgcttgtccttttgcttgcgaatctgaatcaaataatcaatcatgcattcattattcatcatgtcgtcggcgaagaaaatcacgctgaagagttcggacggcgaggctttcgaggtggaggaggcggtggcgctggagtcgcagacgataaagcacatgatcgaggacgactgcgccgacagcggcatccctctgccgaacgtgacgagcaagatcctggcgaaggttatcgagtactgcaagaagcacgtcgaggccgcgaatcccgaagacaaaccctccgaggacgatctcaaggcctgggacgctgaattcgtcaaggtcgaccaggccacgctcttcgatctcatcctggctgctaactacttgaacatcaagagcctgctggaccttacatgtcaaactgtagccga

SEQ ID NO: 27342 - DNA, 399 bp, Glycine max
  unsure (1)..(399): unsure at all n locations
  Clone ID: LIB3051-037-Q1-K1-F1
cccacgcgtncggttagttcacacactaagttctgaaaaatgagttccaaagtttttctgattctacttatgttcatggccactatacttttgatctcctctgaggttgcacccgatgatgcataccagaattttgacaaaacagatgggaagcgtagtgcaaatggggtagatgaaagcaaatattggcgtggtggctatggcgactatggtggttggcgtggtggtggttggcgtggtggctatggaggctggcgtggtggctatggtggtgggcgtggtggctatggtggctggcgtggtggctatggtggtgggcgtggtggctacggaggttggggtggtggctttggccctaacgaacataatgaggctgggattgatgctagccctcacaac

SEQ ID NO: 27343 - DNA, 389 bp, Glycine max
  Clone ID: LIB3051-037-Q1-K1-F9
caattcctaattgtttaaacctaattctcatttcttcatcgttcgattcttctccttctaaagatgcagatcgtcgtgaaaactttgaccggtaagaccatcacccttgaggtggagtcctccgacaccatcgataacgtgaaagctaagattcaagacaaggaagggatcccacctgaccagcagagacttatctttgcgggtaaacagcttgaggatggtcgaacccttgccgactacaacatccaaaaggaatccactctccacctcgtgctttgcctcaggggtggcatgcaaatctttgtcaagactttgactggcaagaccatcaccctcgaggtcgaatcctcggacaccattgataatgtcaaggccaagatccaggacaa

SEQ ID NO: 27344 - DNA, 357 bp, Glycine max
  Clone ID: LIB3051-037-Q1-K1-G7
cccacgcgtccggcaaaattctcttccgtttcaggattagggtttcaccgttacagtgaaacatggcaaaaccaaagcgaatctctctgcgtatctttgcgctgctcctcttgatttccacctcttcgtttcagcttctccgcgcttccgatgacgccgatgatgatgcgatcttctatgattcgttcgacgaggattttgaagaccgttgggttgtgtctcagaaagatgagtacagtggtgtctggaaacatgccaagagtgagggacatgatgattatgggcttcttgtcagtgagaaagcaaggaaatatgctatagtaaaagaacttgatgaggccgtgagtctcaaggatg

SEQ ID NO: 27345 - DNA, 417 bp, Glycine max
  unsure (1)..(417): unsure at all n locations
  Clone ID: LIB3051-037-Q1-K1-H3
cccacgcgtccggaagtattattattcttccatttccattaaaaagaaaatatcataaatgggtattttcacattcgaggacgaaatcacctcccctgtggctcctgctactctttacaaagctctagttacagatgccgacaacatcatcccaaaggctcttgattccttcaagagtgttgaaaacgttgagggaaatggtggccctggaacaatcaagaagataactttcgttgaggatggagaaaccaagtttgtactgcacaagatagaagcagttgatgaggcaaacttgggatatagctacagcgtaatgngtggtgctgcgttgccagacacagcggagaagatcacattccactccaaattggctgctggtcccaatggaggctctgctggcaagctcactgtcgaata

SEQ ID NO: 27346 - DNA, 292 bp, Glycine max
  unsure (1)..(292): unsure at all n locations
  Clone ID: LIB3051-037-Q1-K1-H4
aacacaacaaaaaagagaatgcaagtctggagtttgtgaaggtgattagtgcaaaagaacaagtggtttctggcaccttgtactatatcactttggaggcaaatgatggtgtgacgaaaaagggttatgaaactaaggtgttggagaaaccatggttgaacatcanagaggtcaggatttcaagcccatcactgttgctgntaatcctctttcggtgacggtctaacacatagctaggtaattgaagtgactagcttgggccgcagaagtataatatgtatgaactgaataa

SEQ ID NO: 27347 - DNA, 421 bp, Glycine max
  Clone ID: LIB3051-037-Q1-K1-H8
tcggcgccactcgatgtttccatttgcctgcatgcctttggtattgtggggtgtgggtcgtttaatggtgtcaagtcttgcgaacgtgagggtgccttaatggtaatcgggatgtttttgttgcacggctccatgcttgcgcattcaacgtgtgacatgcatccttttcattggcaccttagccctcgtggcttaagtgcttaccattggttcctggggtgcctaactaccaaacggtattcgtgtggctagtcagacccattccattcaggcctctttgttggggacgcttgaggatttcaaagtcccacacgtgaaccacgttagtcgtccatcataacggctttctgtggcacacgtgtggtgattgttctcttcgatgcggtgcatgcagtgaacgtgggtggtctagtgcccccac

SEQ ID NO: 27348 - DNA, 452 bp, Glycine max
  unsure (1)..(452): unsure at all n locations
  Clone ID: LIB3051-038-Q1-K1-A1
cacccagaagaattgaatggccatggaaaatcaaaattttctagagtattgggttttgccactacttatgatgcttttgttgggtcattggatctctgttcaagctgccccttcaccctctctcatcactcaactccctggctttaacgccaatttcccatccaagcactattccgggtatataagtattgatggaaatgctgaaagtgggaagaacctgttctactactntgttagttcagaaagtagtccagagaaggacccagntgtgctatggctgaatggtgaccctgggtgctccagcttgaatggcttggttacgagcatggaccattcaaactttgaggcttgcaaattcaaaagggaatctacncactttgcatatcaatccttacagctggtctaaggtttccaacattatatatttggactcccctgctggtgttgggctc

SEQ ID NO: 27349 - DNA, 305 bp, Glycine max
  unsure (1)..(305): unsure at all n locations
  Clone ID: LIB3051-038-Q1-K1-C1
gcggtttcctttgttggtgttgctgggaactgttttcctggcatcagtttgtgtctcattaaaggtgagagaggatgagaataaccctttctacttgagaagctctaacagcttccaaactctctttgagaaccaaaacggtcgcattcgtctcctccagagattcaacaaacgctccccacaacttgagaaccttcgagactaccggattgtccagtttcagtcaaaacccaacacaatccttctcccccaccatgctgacgccgatttcctnctctttgtccttagcgggagagccatactta

SEQ ID NO: 27350 - DNA, 446 bp, Glycine max
  Clone ID: LIB3051-038-Q1-K1-D6
cccacgcgtccggtgctacaatacaaacaatggcagctactcaggaagatgtgaagcttttgggtattgtgggaagcccatttgtgtgcagggtccagattgcccttaagttgaagggagttgaatacaaatttttggaagaaaatttgggcaacaagagtgatttgcttctcaaatacaaccctgttcacaagaaggttccagtgtttgttcacaatgagaagcccatagcagagtctcttgtgattgttgaatacattgatgagacatggaagaacaaccccatcttaccttctgatccttaccaaagagccttggctcgtttctggtccaaattcattgatgataagattgtgggtgctgtatggaaatctgttttcacggttgatgagaaagagcgtgagaagaatgttgaagaaacatatgaggctcttcagtttcttgag

SEQ ID NO: 27351 - DNA, 438 bp, Glycine max
  Clone ID: LIB3051-038-Q1-K1-D10
cccacgcgtccgcatttgagagatgtgtttggcaaagctatggggcttagtgaccgagatatcgttgctctgtctgggggtcacactattggagctgcgcacaaggagcgttctggattcgagggtccctggacctctaatcctcttattttcgacaactcatacttcaaggagttgttgagtggtgagaaagaaggcctccttcagctaccttctgacaaggcacttttgtctgaccctgtgttccgccctcttgttgagaaatatgcatcggacgaagatgccttcttcgctgattacgctgaggctcaccaaaagctttctgagcttgggtttgctgaagcctaagcaacgttttggggattgttggagaggcacggtgcccataatatttctctcataaattctatggtcatggtttctaatgcgccactgtgg

SEQ ID NO: 27352 - DNA, 441 bp, Glycine max
  Clone ID: LIB3051-038-Q1-K1-E1
ttcggataccgttgtggagccttacaacgctaccctctctgttcaccaacttgttgagaatgctgatgagtgtatggttttggacaatgaagctctctatgacatctgtttcaggactttgaagctcgccacgccgacatttggtgaccttaaccacctgatatctgccaccatgagtggagttacttgttgtctacgtttccctgggcaattgaactctgatcttcgcaagcttgctgtcaatcttatcccattccctcggctccatttcttcatggttgggtttgcgcccttgacatcaagaggatcccagcaataccgtgctttgactgttcctgaattgactcagcaaatgtgggatgccaagaacatgatgtgtgctgctgaccctcgtcacggtcgttatttgactgcttcagctatgttccgtggtaagatgag

SEQ ID NO: 27353 - DNA, 332 bp, Glycine max
  Clone ID: LIB3051-038-Q1-K1-E11
cccacgcgttcgcccacgcgtccgcaattatcttcacaaactagtaatattattcttcgaatccattacattattcataatgggtattttcacatttgaggatgaaaccacctcccctgtggctcctgctaccctttacaaagctctagttacagatgccgacaacgtcatcccaaaggctgtcgaagccttcaggagtgttgaaaaccttgaggggaacggtggccctggaaccatcaagaagatcactttcgttgaggatggagaaagcaagtttgtgttgcacaaaatagaatcagttgatgaggcaaacttgggatacagctatagcg

SEQ ID NO: 27354 - DNA, 367 bp, Glycine max
  unsure (1)..(367): unsure at all n locations
  Clone ID: LIB3051-038-Q1-K1-F4
ggatggtgaaccactttgttcaagagttcaagagaaagaacaagaaggacattagtggaaaccccagagcacttagaaggttgaggactgcttgtgagaaggccaagagaacactttcatcgactgctcagaccaccattgaaattgattctctatacgagggaattgatttctactccactgttactcgtgccagatttgaggagctcaacatggatctcttcaggaaatgtatggagccggtggagaaatgtttgagggatgctaagatggacaaaagaagtgttgatgatgttgtcctttgttggtggttctaccagaattcccaaggttcaacaactgctgcanngacttcttaatggaaaag

SEQ ID NO: 27355 - DNA, 448 bp, Glycine max
  Clone ID: LIB3051-038-Q1-K1-F5
gactcgttcttcttcgtcgttatcttcttcttttgttgtttgtgtgtttgttttttctctcacctgaaaatgtcttgctgcggtggtaactgtggttgcggaagcgcctgcaagtgcggcaacggctgcggaggctgcaagatgtacccagacttgagctacaccgagtcaaccaccaccgagaccttggtcatgggagtggcaccagttaaggctcaattcgagagtgctgaaatgggtgttcccgctgagaacgatggctgcaaatgtggagctaactgcacctgcaacccctgcacttgcaagtgaggtgttggagagctaaagcttcaagcagagatggcccttagaaataatgataaaaactatatgtagtttcaaaacttcaaaattatgtagtatgtattatgttgcactctggtgttttgtgtctaaacaaacaccctta

SEQ ID NO: 27356 - DNA, 396 bp, Glycine max
  Clone ID: LIB3051-038-Q1-K1-G6
atctccagctgcttccttatcagaagcgcttcgccccagagattctcgcttcctctccttcaatccttcttccaacgctattaattacaaaattaacctctccgcttccctccgatccattcactccctccctcttaaaacctccttgcggatcaaatgctccaaacagatgggaatgaagtcctgcaaagaggacagtgcttcatgatctttatgagaaagaagggcagagtccatggtatgataatctctgcagacctgttacagaccttcttcctcttatagcaagtggtgtcagaggcgtcactagcaaccctgcgatttttcagaaagctatctcatcatcgaatgcttacaatgatcagttcagggaacttgtgcaagcagggaaagaca

SEQ ID NO: 27357 - DNA, 434 bp, Glycine max
  Clone ID: LIB3051-038-Q1-K1-G10
cccacgcgtccgcgcaaactcgccgtgtatctcattcccttccctcgtctgcacttcttcatggtgggatttgccccactcacttcccgcggttcccaacagtacagggctctcactgtccctgaattgacccaacaaatgtgggatgctaagaacatgatgtgtgcagctgatcctcgccacggtcgttacttgacagcttctgcgatgttccgtggaaagatgagcacaaaggaggttgatgaacagatgatcaatgttcagaacaagaactcatcgtacttcgtggaatggatccccaacaatgtgaaatccactgtctgggacatccctccaactgggttgaaaatggcatcaaccttcattggcaattctacctctattcaagaaatgttcaagaaggtgagcgagcaattcacggctatgttccgcag

SEQ ID NO: 27358 - DNA, 369 bp, Glycine max
  Clone ID: LIB3051-038-Q1-K1-H3
gttgcagtcactgctttggttagatcagaaccagatcgtgttctcttcttccattggcaaacatggcaactcaaatgagcaagaagagaaagtttgtggcggatggaatggtcttcgccgactgacgaggtctgacactgagtgcggagacggtactccgcgtgaggttaggttacgccgatgcgcaccgagattatcatcagagccaccagaacccaagccgttctcggtgagaagggaaggagaattagggaacttacctcagtggtgcagaagaggttcaaatttcccgagaacagtgtcgagctttatgctgagaaggtcaacaacagaggcctctgtgccattgctcaggccgagtcgcttcgc

SEQ ID NO: 27359 - DNA, 449 bp, Glycine max
  Clone ID: LIB3051-038-Q1-K1-H5
ggatggtcgcacccttgccgattacaacatccaaaaggaatcaaccctccatctcgtgcttcgcctcaggggtggcatgcaaatctttgtcaagactttgaccgggaagaccatcacccttgaggtggaatcctcggacaccattgataatgttaaggccaagatccaggacaaagagggcatccccccagatcagcagaggctgatttttgccggtaaacaacttgaggatggaagaacccttgctgattacaacattcagaaggaatccacccttcacttggtgcttcgtttgagaggtggtatgcagattttcgttaaaactttgaccggaaagaccatacccttggaggtggagagttcagataccatagacaatgtgaaagctaagattcaggacaaggaaggtatcccaccagaccaacagaggcttatctttgccgggaaac

SEQ ID NO: 27360 - DNA, 436 bp, Glycine max
  Clone ID: LIB3051-038-Q1-K1-H11
cccacgcgtccgctcatagctcccactcactttctcgcagaaacgtattgtttttctctctttccgcggcctagatctgagcagtttggaaaccctaactgctctcaccaacgacatcaccactctctccgatcaactacctctttcgtcgccctaagtcatggcaggaattgcacccgagggatcacagtttgatgctcgtcaatatgataccaagatgaatgagctgcttacgtccgatggtcaggatttcttcacatcctacgatgaggtttatgacagttttgatgctatgggcttgcaagagaatctcctgagaggcatttatgcatatggttttgagaagccatcagctattcagcaaaggggaatagttccattctgcaagggacttgacgttatacaacaggcccagtctggaactgggaaaacagca

SEQ ID NO: 27361 - DNA, 445 bp, Glycine max
  Clone ID: LIB3051-039-Q1-K1-A10
gggcttgactgcctacagttcatactaagttctgaaaatgagttccaaggttttgcttgttctacttatgttcttggccactatacttctgatctcctctgaggttgcacccgatgatgcatacgagaattttgacaaaatagatgggaagcctagtgcagatggggtagatgaaagcaagtattggcgtggcggctatggtggcggctatggtggtggttatggaggtgggcgtggaggctatggaggtgggcgtggaggctatggagggggacgtggtggatatggcggcggacgaggtggctatggtggcgggcgtggtggctatggcggcgggcgtggtggcgggcgtggtggctatggtcctaatgaacataacgaggctggggttgatgctaaccctcacaactaagaaagcaactttctaaagcttatatatgggttt

SEQ ID NO: 27362 - DNA, 432 bp, Glycine max
  Clone ID: LIB3051-039-Q1-K1-D9
gacctttgttcactcttctactcttgcttctagggatttagcgcatcttcttctacatttaaggaagatgggttaggaaaaggcccacatcagcattgaggtcattggccatgtctactctgggaaatacactaccactgatcacctaatttacaagcttggatgcattgacaagcgtgttactgagaggtttgagaaggaagctgctgagatgaacactaggtcttatcacgtatgcctgggtgctggacaaacttaaggctgaacgtgaactacgaatccccattgatattgcttcgagtaagtctgaaacatcaacgtattattgcacagatcttgatacacctggacatatggatatgattacgaatatgattactgggacattccaagctgactgtgctgctcttatcatcgattctaccactggtg

SEQ ID NO: 27363 - DNA, 433 bp, Glycine max
  Clone ID: LIB3051-039-Q1-K1-F5
cccacgcgtccgcccacgcgtccggtggacttgccagaaggtgcattgtgcaagtgtcttatgccattggtgtgcctgagcctttgtctgtgtttgttgacacctatggcactgggaagatccatgataaggagattctcaacattgtgaaggaaaactttgatttcaggcctggtatgatctccatcaaccttgatctcaagaggggtggaaataacaggtttttgaagactgctgcctatggacactttggaagagaagaccctgacttcacatgggaagtggtcaaacccctcaagtgggagaaggcctaagtaattcattccactgctctatgctggaagttttttgagcgttgcccttataatatgtctaatatccataactttccacgtctcttactctgtgtgtttctctcctcttcctcctattt

SEQ ID NO: 27364 - DNA, 421 bp, Glycine max
  Clone ID: LIB3051-039-Q1-K1-F7
gctggttcaaatgttactcttcttgcagaccaggtaaaaagatttaagcctcaacttgttgctgttagaaatgagtccctaattgctgaacttaaagaggccttgcatgacgttgaagaaaaacctgagatcatccctggagagcagggaatcattgaggttgctcgtcacccagatgcagtcagtgtagtcacaggaatagtaggctgtgcaggactgaagccaacagttgctgcgatagaagcagggaaatacatagctttagccaacaaagagacattgattgctggaggtccttttgttcttcctcttgctcagaagcataatgtaaaaatacttccagctgattcagaacattctgccatctttcagtgtatccaggggttgccagagggtgcacttaggagagttattttaactg

SEQ ID NO: 27365 - DNA, 438 bp, Glycine max
  Clone ID: LIB3051-039-Q1-K1-G3
cccacgcgtccgagcagcagcagcaagctatggcggaagaaccgaaagttccaccaccttccaatcctacgttgtcgtttgatcctagtcgaacggttggtattatcaagaggaaggccttgatcaaagacttagctgcggtataccatgccgaatgccttgcatactgtcaagagcttttggaacttcaaactaaatgggaagagccatatattgacttaaaaactccagaggaatcaaaaaaggagacagcacgaccctctaaacgtgtaaaaaagttgcgttaggttttcaggtggttgatgcataactcatttagagagcaaaatatgcaccgtcagaggataccttttgcttgctgctggtgtagctgatagtatcagagcacacatttaatgtagtattgatgtacttttcaaatgctactgagacgtcatg

SEQ ID NO: 27366 - DNA, 420 bp, Glycine max
  Clone ID: LIB3051-039-Q1-K1-H1
aaaactgaagctcgaggaagataactacgatgaaacaagaggaatggatgattacgacagcgttgctatcgttgctgtttgtttcatcttttccgccgttgagttacggagttgttcctcctcgtactctgctcaataagctgtcggagggcaaatatctcaacactcaggagctctggttcgaccaaaccctcgatcacttctctccctatgatcaccgacaattccggcaacgttactatgagtttctagactatttccggattcccgatggaccaatttttttggtaataggtggtgaaggtatattgaatggggtagcaaatgactatcttgctgtactggcaaagaagtttggagcagctatggttactcttgaacatcgctactacggaaagagtactccatttaattctttgg

SEQ ID NO: 27367 - DNA, 413 bp, Glycine max
  Clone ID: LIB3051-040-Q1-K1-A7
cccacgcgtccgagaagtcctaggagtgtaaaacagagacgcaaaatgaagacgatcttgtcgtctgagaccatgaatattcccgacggcgtgagcatcaaggttcacgctaaggttatcgaggttgagggccctcgtggaaaactcgtgcgagacttccaccatctgaacttggacttccaacttattaccgacgatggcggtaaaaggaagctcaagattgattcttggttggttctcgtaaaacctccgccgccatccgcaccgccctcagccacgttgagaatttgatcaccggcgtcaccaaaggataccgatacaaaatgagaatcgtgtacgcacattttccgatcaacgctagcattggcaacaacagcaagtccatcgagatcagaaatttcctcggcgagaag

SEQ ID NO: 27368 - DNA, 320 bp, Glycine max
  Clone ID: LIB3051-040-Q1-K1-C2
gccacgcgtccgtccacgcgtccggggaaataatgttaatctcgccgattacaaaggaaaggtccttctcattgtcaatgttgcctcacaatgcggcttgactaattcaaactacacagagcttaaccaattgtatgagaaatacaaagggaaaggacttgaaattctggcattcccatgcaatcagtttggggctcaggaaccaggaactaatgaagagattgtggagtttgcttgtactcgcttcaaagctgagtctcccattttcgacaaggtggatgtgaatggggaacaatgctgctccactgtacaagtttctg

SEQ ID NO: 27369 - DNA, 432 bp, Glycine max
  Clone ID: LIB3051-040-Q1-K1-D9
gaaaaagttagggtttgtaactttgtcttttgcttgcgaatctgaatcgaataataatcaatcaatcatcatgtcgtcggcgaagaagatcacactgaagagttcggacggcgaggctttcgaggtggacgaggcggtggcgctggagtctcagacgataaagcacatgatcgaggacgactgcgccgacagcggcatccctctgccgaacgtgacgagcaagatcctggcgaaggtgatcgagtactgcaagaagcacgtcgaggccgcgaatcccgaagacaaaccctccgaggacgatctcaaagcctgggacgccgatttcgtcaaggtcgaccaggccacgctcttcgatcttatcctggctgcgaactacttgaacatcaagagcctgctggaccttacatgccaaactgtagccgacatgatcaa

SEQ ID NO: 27370 - DNA, 433 bp, Glycine max
  Clone ID: LIB3051-040-Q1-K1-E3
attcctaccacatgcgtttggaacgctgaattaattttcgcctaaaaggacaatctaagacttcggtgggatctaggttagcaaccagcgatctgggacttttctttctcccccacaccacacccagattcaaaaactcgctctgctctgctctgcaattccccttccgtttcgtttcgatctcaaaacatgttcttcttcgattggttctatggcattctagcttccctcggtctctggcagaaagaagccaaaattctcttccttggtctcgataatgcagggaagaccacacttcttcacatgctcaaagacgagagattagttcagcaccagccgacccaacaccccacttcggaggaattgagcattgggaagatcaagtttaaggcttttgatttggggggtcatcaagttgcccgcagagtctgga

SEQ ID NO: 27371 - DNA, 433 bp, Glycine max
  Clone ID: LIB3051-040-Q1-K1-E9
aaacaagcttggacctcaaattggtcttatccacactcccttcaagcaacaactaccaaagtgtgtgcacccttgacaaggtcaagtcagcacttgagagggcagagaaagagcctattgttaggaaaagaacctcattcttgaagtcacctctctcggcttcatcgccgtcgtattcctcctcgtcgtcatcgattagggaaacaattcaagaagaagaatgtgaagagagacttaatgtttcatcatcccctttggctgcagggtgccctggttgcttatcatatgtaatgatcatgaagaacaaccccaagtgtcctaggtgtaactctcttgttcctattccttccatgaagaaacctagaattgacctcaatatatcaatttaagtgaggtaattgatgaaaattgtctccattttcaatataatttg

SEQ ID NO: 27372 - DNA, 377 bp, Glycine max
  Clone ID: LIB3051-040-Q1-K1-F2
cccacgcgtacgtccacgcgttcgctctgaggttgcacccgatgatgcataccagaattttgacaaaacagatgggaagcgtagtgcaaatggggtagatgaaagcaaatattggcgtggtggctatggcgactatggtggttggcgtggtggtggttggcgtggtggctatagaggctggcgtggtggctatagtggtggtcgtggtggctatggtggctgtcgtggtggctatggtggtggccgtggtggctactgaggttgaggtggtagatatggccctaaggtacataacgaggatgggacagatgcttgacatgatagctatgaacgaaacgtgctagtgctcatattggatctatgctatcgtagcgtat

SEQ ID NO: 27373 - DNA, 423 bp, Glycine max
  Clone ID: LIB3051-040-Q1-K1-F5
gaacaatggcgggtagggtttcgacgtgcttcttcttcgtgtttgctctttctctccttcttccttttcagatctccgctgaggaatcatcggagaaagagttcgtactcacattggatcactctaactttcatgacactgtcagcaagcacgatttcatcgtcgtcgagttctacgctccatggtgtggccactgtaagaagcttgctcccgagtatgagaaagctgcttctatcttgagtagtcatgatcctccggttgttttggctaaaattgatgccaatgaggagaagaacaaagaccttgcatctcaatatgatgttaggggatacccaacaattaagattctgagaaatgggggaaagaatgttcaggaatacaaaggtccccgtgaagcagatggcatcgttgactatttgaaga

SEQ ID NO: 27374 - DNA, 396 bp, Glycine max
  Clone ID: LIB3051-040-Q1-K1-G1
gccgcaccaagtgatcgacgcgaacagagagaaattcatcgtcgcagtaatcatgggtaaggtccatggatcacttgcacgtgctggtaaggttagagggcaaaccccgaatgtggccaagcaggataagaagaagaagccacgtggccacgcccacaagaggatgcagtacaatcgccgattcgtcaccgtcgaggtgggattcggcaagaagaggggacccaactcgtatgagaagctaaggcctacgcttgacgaatatgttggtactctatttgatttatctatgctgtcatacattcatgtttaatttgcatgttttgatagtgatgtgtgaacggtgattgttagctatatatcaaacttgaaatgttgcgtacaatatctaactatcta

SEQ ID NO: 27375 - DNA, 434 bp, Glycine max
  Clone ID: LIB3051-040-Q1-K1-G3
cacaactactacaagtacttccttacaatcaaaaccaacaacaactatggcaagttatcaaaagcactacgatgatcagggtcgcaaggttgacgagtatggcaacgttgagaagcaaaccgacgaatacggcaaccctgttcatgctgctagtgtcacctatgtagccaccagaactgctgctggtggttacagtgatgacattaataagcaacatgataccaccaatgcctacggcgtagacactggtagacagcattctagtggtggctacgatggtgacactaataaacatcatggaactactggtggctataatgatgacaccaatagacatcatggaactaccggtgtctatggtatagacaccgataggcaacaacatgggactactggtggctatgccggtgacactggtaggcaacatgggaaca

SEQ ID NO: 27376 - DNA, 409 bp, Glycine max
  Clone ID: LIB3051-040-Q1-K1-G8
ccattctctctgtgtatttccctacctctcccttcaagatgcagatcttcgtcaagaccctcaccggcaagaccatcacccttgaggtggaaagctctgacaccatcgacaacgtcaaggccaagatccaggacaaggaaggaatccccccggaccagcaacgtctcattttcgccggaaagcaacttgaggacggccgtacccttgctgactacaacattcagaaggagagtactcttcacctcgtcctccgtctccgtggtggcatgcagatcttcgttaagacactcaccggcaagaccataaccctagaggttgaaagctccgacaccatcgataacgtcaaggccaagatccaggacaaggagggtatccccccggaccagcaacgtctcatcttcgccggaaa

SEQ ID NO: 27377 - DNA, 424 bp, Glycine max
  unsure (1)..(424): unsure at all n locations
  Clone ID: LIB3051-040-Q1-K1-G9
cccacgcgtccgcaagctgcaaaggagaagacccaggaaatggcccaagctgcaaaggagaagacccaacaaacagcccaagctgccaaggacaagacttgcgacacttcccaagcggcaaaggagaagacccaacagaatacaggagctgctcaacaaaagacctcagagatgggccagtccacgaaggaatcggcccagtcagggaaggacaacacccaagggttcctgcagcagacaggggagaaggtgaagggcgcagcccaaggtgctacagaggctgtgaagcaaacccttggcttgggcgagcatgatcaagacaaccgcagaaattactaatactataatttgaagtgctttcttgtagtagtggtttacgcagcatggctttttaaataagctgctattccctacactnctacct

SEQ ID NO: 27378 - DNA, 414 bp, Glycine max
  Clone ID: LIB3051-040-Q1-K1-G11
gtgagaaacatggcttccttaagctccttagtgctgctccttgcagctctaattctatcccctcaagttcttgcatactatgacaatgccccagtgtacaagcctaccactgagaaaccaccagtttataagcccccagttgagaagcctcctgtttacaaacctccagttgaaaaccccccaatttataagcctccagtagagaagccaccagtgtacaagcccccagttgagaaacccccagtttataagcccccatttgagaaaccaccagtgtacaagcccccagttgaaaaaccaccagtgtacatgcccccagttgaaaaacccacagtgtacatgcccccagttgagaaaccaccagtgtacaagcccacagttgagaagcccccagtttacaagcccccagttgag

SEQ ID NO: 27379 - DNA, 389 bp, Glycine max
  Clone ID: LIB3051-040-Q1-K1-H10
gccgcgcgcgcgcactctctgtctcttgcgcatggggtggtagcgcagctccttctagatgtaaggaagatgggtacggacaaggttcacatcagtattgtggtcattggccatgtcgactctgggaaatccactaccactggtcacctgatttacaagcttggaggcattgacaagcgtgttattgagaggtttgagaaggaagctgctgacatgaacaagaggactctcaagtatgcctgggtgctggacaaacttaacgctgagcgtgaaagatgaatcaccattgatattgctttgtggaagtctgaaacaccaccagattattgcacagtcattgatgcgcctggacataaggatttcattaagaatctgattactgggacatc

SEQ ID NO: 27380 - DNA, 410 bp, Glycine max
  Clone ID: LIB3051-041-Q1-K1-B8
ctttttgattcctaaattctctaaaattcgaaattctaatttcgttaggggaaagagattgtttgtgtgtgagtgagtatggctggaaaaggcgagggtcctgctatcggaatcgatttgggaacgacgtactcttgcgtcggcgtgtggcaacacgatcgtgttgaaatcatagccaacgatcagggtaacagaactaccccatcctacgtggctttcaccgacacagaacggttgatcggcgatgcggcgaagaaccaggtcgctatgaacccaaccaacaccgtttttgatgctaagcgtttgattggaaggcgtttttccgatgcatcagtacaaggtgacatgaaattgtggccgttcaaggtgattcctggccctgctgagaaacctatgattgtggtgaacta

SEQ ID NO: 27381 - DNA, 425 bp, Glycine max
  unsure (1)..(425): unsure at all n locations
  Clone ID: LIB3051-041-Q1-K1-B9
gctccatgcttgcgcatgcaacgtgtgacatgcatccttttcattgtcaccttagccttcgtggcttaggtgctgacgattggttcctgtgttgcctacctaccaaacggtattcgtgtggctagtcagacccattccatccaggcctctttgttggggacgctggaggatttcaaagtcccacacgtgaaccacgttagtcgtccatcataacggcttcctgtggcacacgtgtggtgattgttctctcggatgcggtgcatgcagtgaacgtgggtggtctagtgcccccacattgttccttaaaatcggttgtctcggatgacgctttgccctgcgcttggcttgntaaacgcgatgctactacttctagttagctagcgctggcaatgctcgtggcaagtgctttgtcattaacggatgct

SEQ ID NO: 27382 - DNA, 416 bp, Glycine max
  Clone ID: LIB3051-041-Q1-K1-D12
tcgcccacgcgttcgaagaaaaattgcacctaccaccggtggagtcaagaagcctcatcgctatcgtcctggaactgttgctcttcgtgagatccgaaaataccaaaagagcacagagcttctgatccgcaagctcccctttcagcgtcttgttcgtgaaatcgcgcaagacttcaagcaaatcactgacattttttggtgatatcggtgccaatgtgaccgatatgattccagactgatttgagggtccagaatcacgccgttcttgcgcttcaagaaactgcggaggcttacttgggggggttggttgaagacaccaaactttgtgcgatccacgcccagagagtgaccatcatgcccaaagacatttcactcgcacgccgcattcgtggagaacgtgcttaggcttataataa

SEQ ID NO: 27383 - DNA, 434 bp, Glycine max
  Clone ID: LIB3051-041-Q1-K1-E3
caatttaccagctatacttgttcctttttaaggttagaagtgctacaatacaaacaatggcagctactcaggaagatgtgaagcttttgggtattgtgggaagcccatttgtgtgcagggtccagattgcccttaagttgaagggagttgaatacaaatttttggaagaaaatttgggcaacaagagtgatttgcttctcaaatacaaccctgttcacaagaaggttccagtgtttgttcacaatgagaagcccatagcagagtctcttgtgattgttgaatacattgatgagacatggaagaacaaccccatcttaccttctgatccttaccaaagagccttggctcgtttctggtccaaattcattgatgataagattgtgggtgctgtatggaaatctgttttcacggttgatgagaaagagcgtgagaag

SEQ ID NO: 27384 - DNA, 332 bp, Glycine max
  Clone ID: LIB3051-041-Q1-K1-E4
caatttaccagctatacttgttcctttttataggttataagtgctacaatacaaacaatggcagctactcaggaagatgtgaagcttttgggtattgtgggaagcccatttgtgtgcagggtccagattgcccttaagttgaagggagttgaatacaaatgtttggaagaaaatttgtgcaacaagagtgatttgcttctcaaatacaaccctgttcacaagaaggttccagtgtttgttcacaatgagaagcccatagcagagtctcttgtgattgttgattacattgatgagacatggaataacaacctcttgttaccttttgatcctta

SEQ ID NO: 27385 - DNA, 392 bp, Glycine max
  Clone ID: LIB3051-041-Q1-K1-F1
aaaaaaaaaaccactttgatcaagtattttatgagtttgaacaagaaagacattaaatggggaccccgagagcacttaaaaggatgaagactgcatgtgagaaggccaaagagaacactttgatcgactgctcagaccaccatagaaattgattctatatacgacggaattgatttctactccaatggtactcgggccagatttgaagagctcaacatggatctcttcacgaaatgtatggagccggtggaaaaatgattgagggatgcttagatggacagaagaagtgttgatgatcttgtccttgtgggtggatctaccagaattcccaaggttcaacaactgcttctagacttctttaacggaaaagagctatgcaagagcattaattc

SEQ ID NO: 27386 - DNA, 437 bp, Glycine max
  unsure (1)..(437): unsure at all n locations
  Clone ID: LIB3051-041-Q1-K1-F9
cttggtttgtgagagagacagaggcacatagagaaaatggtttcggggtcaggaatctgcgcgaagagggtagttgtggacgcgcggcaccacatgctggggaggctggcatcgatcgtggcgaaggaacttctgaatgggcagaaggtggtggtggtgcgctgcgaggagatttgcatctccggtgggctcgtcaggcagaagatgaagtacttgcgtttcctccgcaagcgcatgaacaccaagccctctcacggccccatccatttccgtgcacccggcaagatcttctggcgcaccgttcgtgggatgataccacacaagacaaagcgcggggaaactgctcttgcacgactgaaagtgtacgagggcattcctnctncttatgacaagaccaagaggatggttgtccctgatgctctcaaaggtgtgaggct

SEQ ID NO: 27387 - DNA, 436 bp, Glycine max
  Clone ID: LIB3051-041-Q1-K1-G2
cccacgcgtccggccaacattttccccttcaacactccaaccaccaaagaagcataccactatagaatgatatttgagaggttcttccctcagaactcagcaaggctcactgttcctggaggaccaagtgttgcatgtagcacagcaaaagctgttgagtgggatgctgcttggtctaacaaccttgatccatcaggtagagcagcacttggagtgcatgcatcagcttatggaaaccaggtcaaagctgtagaaccagagaagatcatacccaagatggaagtttctccactaggagttgccatatagagcttgtatgagccatagcaaggactagtagttgccctagaaccagcatataatattattatactagtcatcataaaatgaaaattttgcttgctttgtagtttatccagggaatggtatataaata

SEQ ID NO: 27388 - DNA, 425 bp, Glycine max
  unsure (1)..(425): unsure at all n locations
  Clone ID: LIB3051-041-Q1-K1-G6
cccacgcgtccgtcaatcatcaacacatagctgagtgtgttgctctgtgaatccaccttcttcttccattggaggaccatttcctcctggaatagaaatactaccacacttttcttttttcacttctctaagttgctaagttaattgctccttcattttttcactcttcgttctcgcgtacccgtgtcacggtaactcgtggtgaagtgttcgaaaatgactgtcacacctaagatctcagttaacgatgggaaacttgttgtccatggtaagaccattctgactggagtgccagacaacgttgtgctgactccaggttctggaaggggtcttgtgactggtgcttttgttggtgccacagcttcacacagcanaagtctccatgtgtttccaatgggtgttttagaggggctccggttcatgtg

SEQ ID NO: 27389 - DNA, 252 bp, Glycine max
  Clone ID: LIB3051-041-Q1-K1-G8
cccacgcgtccgttccattctctctgtgtatttccctacctctcccttcaagatgcagatcttcgtcaagaccctcaccggcaagaccatcacccttgaggtggaaagctctgacaccatcgacaacgtcaaggccaagatccaggacaaggaaggaatccccccggaccagcaacgtctcattttcgccggaaagcaacttgaggacggccgtacccttgctgactacaacattcagaaagagagtactct

SEQ ID NO: 27390 - DNA, 351 bp, Glycine max
  Clone ID: LIB3051-041-Q1-K1-G10
cccacgcgttcgcgcatactcgccgagatgctcattcccttccctcgtctgcacttcttggtggtgggatttgccccacgtgacttcccgcggttcccaacagtacagggctctcactgtccctgaattgacccaacaaatgtgggatgctaagaacatgatgtgtgcagctgatcctcgccacggtcggtacttgacagcttctgcgatgttccttggaaagatgagcacatatgatgttgatgaacagatgatcaatgttcagaacaggaactcatcgacttttgttgaatggatccccaccaatgtgaaatccactggtctgggaccttccttccaactggttttaaa

SEQ ID NO: 27391 - DNA, 403 bp, Glycine max
  Clone ID: LIB3051-041-Q1-K1-H6
gtaaccagctatagttattttttgagtgaaggttagaagtgctacaaacaatggcaactaatcaggaagaggtgtctcttttgggagttgttggaagcccatttgtgtgcagggtgcagattgccctcaagttgaagggaattcaatacaagttttttgaagaaaatttggtcaacaagagtgaactgcttctcaaatacaaccctgttcacaagaaggttccggtgtttgttcacaatgagaagcccatagcagagtctcttgtgattgttgaatacattgatgagacatggaagaacaaccccatcttgccttctgatccttaccaaagagccttggctcgtttctggtccaaattcattgatgacaagaatgggggtgctgtatggaaatctgttttcac

SEQ ID NO: 27392 - DNA, 388 bp, Glycine max
  Clone ID: LIB3051-042-Q1-K1-A2
attcaacactcatatccttatcctgtttctttcaatggaagtcatttctgcttctagcttgaatccgaacgctccgatgttcgtgccactcgcctatcggacggtggaggatttctccgaccagtggtgggacctcgttcactcctccccctggttccgcgactactggctccgcgagtgcttccaagatccccagttccaaaacgacgacgctttcgacttcgactttgacctagatctccaagatgaagatgaaagggaacgaaaggaagggaaggaggtggtgtcgttggggctgctgaaatggcgaagctgtggaggaagatgggcccaggcgccgaagtatgtggaaaaagcccccaagtttgtgaaacccaaagtgagccca

SEQ ID NO: 27393 - DNA, 444 bp, Glycine max
  Clone ID: LIB3051-042-Q1-K1-C5
ctcgtgcctctagggttatcatatctccatttccatttcctctctctcagtttccaggaatcttaagctatgggaaagtcttacccaaccgtgagcgctgattaccagaaggccgttgagaaggcgaagaagaagctcagaggcttcatcgctgagaagagatgcgctcctctaatgctccgtttggcatggcactctgctggaacttacgacgtgagctcgaagaccggtggtcccttcggaaccataaagcaccccttcgaactcgctcacggcgctaacaacggtcttgacatcgctgttaggcttttggagccactcaaagcggagtttcctattttgagctacgccgatttctaccagttggctggcgttgttgccgttgaggtcaccggtggacctgaagtttcctttcattctggaaaagagggcaaacctgagccc

SEQ ID NO: 27394 - DNA, 393 bp, Glycine max
  Clone ID: LIB3051-042-Q1-K1-D1
acccctcttagtcccaattttctagggttttattcattttccgatggcttctgcagatgttgagtagcgttgctttgtcggtgggctcgcttgggccactgacgaccatgccctcgagagagccttctctcagtacggcgaaatcgttgaaacgaaggtctgtttgttgcaggcatcacatctgatctcacacgattcggattcggaattttctcgatcccgttctgatctgtgatctctgatctgtttgcgttacttgatcttatgatacttgtgttactatatgattcttttattactcacgccaataggtacgttcatcttctttctttcaccaaaggcgaagatcgatcggcttctatttggttctgggttttgtttttcgtgctgttt

SEQ ID NO: 27395 - DNA, 268 bp, Glycine max
  Clone ID: LIB3051-042-Q1-K1-F6
gagcaagtgcagtgcttcgggcggaagaagacggcggtggcagtgagctactgcaagcgcggccgaggcctcattaagatcaacggctgcccgatcgagctggtggagccggagatcctccgcttcaaggccttcgagccaatcctccttctcggtcgccaccgcttcgccggcgtggacatgcgcatccgcgtgaagggcggcggtcacacctcccagatatactccatcaggcatagcatagccaaggctcttgtcgcttactacc

SEQ ID NO: 27396 - DNA, 366 bp, Glycine max
  Clone ID: LIB3051-042-Q1-K1-G3
ggaggagcggcattaaaaatgcagatcttcgtgaaaaccctaacggggaagaccatagccctcgaggtcgaaagcagcgacaccattgacaatgtcaaggctaagattcaagacaaggaaggcatccctccggatcagcagcgtttgattttcgccggaaagcaacttgaagatggaaggaccttggccgattacaacatccagaaggaatcaacccttcaccttgtcctcaggcttcgtggtggcatcatcgagccttccctcatggctttggctcgcaaatacaaccaggacaagatgatttgccgcaaatgctatgctcgtctgcaccctaaggctgtgaactgccgtaagaagaaatgcggt

SEQ ID NO: 27397 - DNA, 327 bp, Glycine max
  Clone ID: LIB3051-042-Q1-K1-G7
atgtctctgccgaagacaaaactaccggccaaaagaacaagatcaccattaccaatggcaagggtaggttgtcaaaggaagagattgagaagatggttcaagaggctgagaagtacaaatcagaagatgaagagcacaagaagaaggtagaggccaagaatgcattggagaactactcatacaacatgaggaataccattaaagacgagaagattggaggaaaacttgacccagctgacaagaaaaagattgaggatgccattgagcaggccatccaatggctagacagcaaccagcttggagaggcttatgaatttgatgtcaaaa

SEQ ID NO: 27398 - DNA, 418 bp, Glycine max
  Clone ID: LIB3051-042-Q1-K1-G8
attattattcttccatttccattaaaaagaaaatatcataaatgggtattttcacattcgaggacgaaatcacctcccctgtggctcctgctactctttacaaagctctagttacagatgccgacaacatcatcccaaaggctcttgattccttcaagagtgttgaaaacgttgagggaaatggtggccctggaacaatcaagaagataactttcgttgaggatggagaaaccaagtttgtactgcacaagatagaagcagttgatgaggcaaacttgggatatagctacagcgtagtgggtggtgctgcgttgccagacacagcggagaagatcacattccactccaaattggctgctggtcccaatggaggctctgctggcaagctcactgtcgaataccaaaccaaaggagatgc

SEQ ID NO: 27399 - DNA, 374 bp, Glycine max
  Clone ID: LIB3051-042-Q1-K1-H6
cccacgcgtccggcaaatattggcgtggtggctatggcgactatggtggttggcgtggtggtggttggcgtggtggctatggaggctggcgtggtggctatggtggtgggcgtggtggctatggtggctggcgtggtggctatggtggtgggcgtggtggctacggaggttggggtggtggctttggccctaacgaacataatgaggctgggattgatgctagccctcacaactaagaaggaaacttgctaaagcttatataggatttaagttatcgtaataaataaaacttcattggaagggtagttataatagatgtggagatctttcttcgctctggtcatataaaggaataatacttttctattaatttc

SEQ ID NO: 27400 - DNA, 400 bp, Glycine max
  Clone ID: LIB3051-043-Q1-K1-B7
cccacgcgtccgcccacgcgtccgtacaattcgctctgtgcagtttcctcgctctcttttctgcaattttcttttttgttccttctctgcggttatctttttgagcttcaatggcggacgctgaaaccttcgctttccaggctgagatcaaccagcttctcagcctcatcatcaacaccttctacagcaacaaggagattttcttgcgtgaactcatcagcaacgcttctgatgctttggataagattcgatttgagagtttaaccgacaagagcaagctcgatgctcagccagagctcttcattcgtcttgtgcccgacaaggccaacaagactctttccgttattgacagcggcattggaatgaccaaagcagatttggtgaacaacttgggtaccat

SEQ ID NO: 27401 - DNA, 418 bp, Glycine max
  unsure (1)..(418): unsure at all n locations
  Clone ID: LIB3051-043-Q1-K1-C2
cccacgcgtccggcccttcaagcatttattgatcatggtaccgtatccaggacaatagactcaaatgcatctgaagctgaaggaatatacaatgctctccagaaattgggtattgactggagctttgttggttcccagcttgaacttgaaggagtggactcgtttaagaagagctttgacagcctcctggattctctgcaagagaaggcaaactctcttaagttggtcagccactgaagtttgaacgtcatggttagtaatgcagtgctgtgtatgatggcatctatggattaataaaaggcagcggctgtgcattttgtgctgctgcanatgtgcttcatggagtcatttatttagacgatagtgatacaatgtaaatgggaaaaattgtccgcttcaagtcaagcgttttgttttt

SEQ ID NO: 27402 - DNA, 407 bp, Glycine max
  unsure (1)..(407): unsure at all n locations
  Clone ID: LIB3051-043-Q1-K1-C4
cccacgcgtccgcccacgcgtccgcccacgcgtccgcccacgcgtccgcataaccttagtcatcttcttctttcatctttctccctaacggtatcgagggaaaaatatggcggaagaacacagatgccaggcaccgcgcttctgcgccaacaattgcggtttctttggcagccctgccacgcagaatatgtgctccaagtgctaccgcgatttccagctcaaggagcagcaatcttccaacgccaagatggttctcaatcagtcgctggttccttcaccgccaccggcggtgatttctcagccgtcgtcttcttcttcggccgcggtagatccgtcatcggcggtggttgatgacgcgccacgcgaggcggangaggttaaggcgccgcagcagaaccggtgtatga

SEQ ID NO: 27403 - DNA, 346 bp, Glycine max
  Clone ID: LIB3051-043-Q1-K1-C11
aaattctcaaatccaaatccaattccaattccaattcccaatcttctcaaaccctaattcctgatcttgaaaatgagagaaatcttgcacatccagggagggcaatgcgggaaccagatcggagcgaagttctgggaggtgatatgcgacgagcacggcatcgaccacaccggaaagtacagtggcgactctgaactccaattggaacgcatcaatgtttattacaacgaagcgagtggcggaaggtacgttccacgcgccgtcctcatggatctagagcccggcaccatggactccgtcagatccggcccctacggccagatcttccgccccgacaacttcgtct

SEQ ID NO: 27404 - DNA, 424 bp, Glycine max
  Clone ID: LIB3051-043-Q1-K1-D5
ctctggttgattcggatctagagtcttcagtttctcctcgttgttcttcgctttgctgttttcaatttcgattctttcgttaatttaataagatgtttgggagggcaccgaagaagagcgataatacgaggtactacgaaatcctcggcgtctccaagaacgcttcgcaggatgatctgaagaaggcttacaagaaagccgccattaagaatcaccccgacaagggcggtgatcccgagaagtttaaagagctggcgcaagcttatgaggttctgagtgaccctgagaagcgtgagatatatgatcagtatggtgaagatgcgcttaaagaaagaatgggtggttgcggtggccatgatccatttgatatcttttcatctttcttttggcggtgggagtcccttgggatcaggtggaaagtagt

SEQ ID NO: 27405 - DNA, 368 bp, Glycine max
  Clone ID: LIB3051-043-Q1-K1-D6
ctcttgtttcaatttcaacaacggttactcctttttcgttttgagtttcaatcaagccatcatcatgtctaccgcatcgcaacccaaggccaagaaaacggcgtcgtccaagaagcccctctcccaccctcccttcgccgtgatgatagcagaggcgattgcgagtctgaaagagagaaccggttcgagccaatacgcgataaccaaatacatcgaagggaagcacaaggagttgcctgcaacctacaagaagcttgtcctcgttcatctcaagaaatctggtgctgctggcaagcttgttaaagtgaaaaactcctttaagctcgcaccgactaagcctgctccggttaaggccgctgctcccaaaa

SEQ ID NO: 27406 - DNA, 341 bp, Glycine max
  Clone ID: LIB3051-043-Q1-K1-E1
gagatctcagattgcaattgcctcttctcttctcccagaatcggtgtaggttacaggtttaagggttttgttttcatttaggtcactaatccgatatcatgaagctcgatacgactagtctcgaatcgtttcccacactgattgcacctcaaaacgacgtcgccggagaactctccgccgctccgttctttgaccttccgaattccaatgacttcgatgggttcttgaaagacgctattcagatggtgaagcccgcgaagggtactacaactcttgcttttatatttaaagaaggtgttatggtaactgctgattctcgagctagcatgggaagatatata

SEQ ID NO: 27407 - DNA, 209 bp, Glycine max
  Clone ID: LIB3051-043-Q1-K1-E3
gctttttctgttccacaggctactgccagatcttctgaaaatgcggaatcctctgcatgatctggaatttgtgttttctttcgcttgttcgtttgtttaattcaataaaggaaattaggcatgaccctcttgttgagtatgctctgcctatttgaaaatttccacacctcttttaattgtcgtaatgatgtgtgaagtgttgttatttt

SEQ ID NO: 27408 - DNA, 388 bp, Glycine max
  Clone ID: LIB3051-043-Q1-K1-E5
agcgttgccattctcatcctcttctttctctctctaccattgccatggatccctacaagcaccggccatccagcgccttcaattctcccttctggactacaaattctggtgctcctatttggaacaacaactcctctttaaccgttggagctagaggtccaattctgctggaggattatcatcttgtggagaagcttgcaaattttgatagggaacgtatcccagaacgtgttgtccatgccaggggcgctagtgcaaagggtttctttgaggtcacccatgacatttctcacctgacatgtgcagatttccttcgagcccctggagttcagacgcctgtaattgttcgtttctcaactgtcattcatgagcgtggtagccctgaaac

SEQ ID NO: 27409 - DNA, 381 bp, Glycine max
  Clone ID: LIB3051-043-Q1-K1-E8
ctagggtttcatctttgccatcagtaaacgacaatgatttacgacgttaactctgctcttttccgatccttcctcagccagaagggaggctcctctgataagaagaaatcggacgaacagaagccaaaagagcagaaacccaaagccagggagaacaaacctataatgactggatggtaacaactgagctgcattcagttgtagaatgaaaataggtggtaggtattggatttggtgctaaactaagaactttttggctggggtctgaagtatatgccggcgatgttggtctttgttattggaatggtttgattttggatatgggtataacgaaaacttataatggacacaagttgaacttggagcacgcatgacacatgc

SEQ ID NO: 27410 - DNA, 341 bp, Glycine max
  Clone ID: LIB3051-043-Q1-K1-F2
accacgcgtccgctttgttcaagagttcaagagaaagaacaagaaggacattagtggaaaccccagagcacttagaaggttgaggactgcttgtgagagggccaagagaacactttcatcgactgctcagaccaccattgaaattgattctctatacgagggaattgatttctactccactgttactcgtgccagatttgaggagctcaacatggatctcttcaggaaatgtatggagccggtggagaaatgtttgagggatgctaagatggacaaaagaagtgttgatgatgttgtccttgatggtggctctaccagaattcccaaggttcaacaactgc

SEQ ID NO: 27411 - DNA, 417 bp, Glycine max
  unsure (1)..(417): unsure at all n locations
  Clone ID: LIB3051-043-Q1-K1-G3
ccagattgatagttcattgcatgcaaccatagttttattaggttttttcttctttgttttcaattaggtttttgctgctctccttcaaactccgtctttccgaatcctctctttgtgattgtgttctgttctgcttcctaccgcgatagtttctcttctgaagcatggccatggcggtttctgcaattggttttgaaggtttcgagaagaggctggaaatatcctttttccagccgggactttttgctgaccctgagggaatgggtttaagagctcttgcaaagtcccagttggatgagatacttacaccggctgcttgcaccattgnttcatctctcagaaatgatcatgtcgactcctatgttctgtctgagtccagtctctttgtttatgcctacaagatcatcatcaaaacct

SEQ ID NO: 27412 - DNA, 423 bp, Glycine max
  Clone ID: LIB3051-043-Q1-K1-G8
gccattctcatcctcctctgtctctctctctccaccattgccatggatccttacaagctccggccatccagcgccttcaattctcccttctggactacaaattctggtgctcctgtttggaacaacaactcctctttaaccgttggagctagaggtccaattctgcttgaggattatcatcttgtggagaagcttgcaaactttgacagggaacgtatcccagaacgtgttgtccatgccaggggagctagtgcaaagggtttctttgaggtcacacatgacatttctcacctgacatgtgcagatttccttcgagcccctggagttcagacgcctgtaattgttcgtttctcaactgtcattcatgagcgtggtagccctgaaaccttgagggaccctcgaggttttgccgtgaagttttac

SEQ ID NO: 27413 - DNA, 347 bp, Glycine max
  unsure (1)..(347): unsure at all n locations
  Clone ID: LIB3051-043-Q1-K1-G12
gtgagagagagagagagagagaggcacttggaatccaaaaatgagagaaatcatcagcattcacataggtcaggccgggatccaggttggcaactcctgctgggaactctactgcctggaacatggcatccagcccgatggcatgatgccaagtgactcctccttcggtgtagcccacgacgccttcaacaccttcttcagcgaaaccggatccggcaagcacgtccctcgcgccgtcttcgtcgatctcgagcccaccgtcatcgacgaagtccgttgtggcacttaccgtcaactcttncaccccgaacaactcatcttcggcaaggaagatgccggcaacaact

SEQ ID NO: 27414 - DNA, 395 bp, Glycine max
  Clone ID: LIB3051-043-Q1-K1-H11
caaaaagtttacgttacaaatcgcataataaccgtcctaagtttattgagagaattttgcaagtgtgagaaacatggcatctcgtcaaaacaacaagcaagagcttgatgaaagagcaaggcaaggagagactgttgtcccgggtggaactggtggcaagagcctggaggctcagcaacaccttgctgaaggaaggagcaagggagggcaaacaaggaaggaacagctgggtacagaagggtaccaggaaatgggacgcaaaggagggttgagcactgtggacaaatcaggagaagaacgtgctcaagaggaaagcattggcatcgatgagtccaagttcaggactggtaataacaagaaccagaatcagaacgaagcccaggataagtgataat

SEQ ID NO: 27415 - DNA, 366 bp, Glycine max
  Clone ID: LIB3051-043-Q1-K1-H12
acgcggacgcgtgggtgcatacgagaattttgacaaaatagatgggaagcctagtgcagatggggtagatgaaagcaagtattggcgtggcggctatggtggcggctatggtggtggttatggaggtgggcgtggaggctatggaggtgggcgtggaggctatggatggggacgtggcggctatggcctcaaacaaggtgcctatgatggcagacgtggaaggtacagctgggtacagtaagggtaccacgaaatggctagcgtactgaaggacatcactagggacaaattgatgctagaacttgcatctaaggaaggcattggcttaagttaatccaaggtcatgacttgtcataacaagtacca

SEQ ID NO: 27416 - DNA, 329 bp, Glycine max
  Clone ID: LIB3051-044-Q1-K1-B6
tacacttgtactgttctattagttcatactaagttctgaaaatgagttccaaggtgttgcttgttctacttatgttcttggccactatacttctgatctcctctgaggttgcacccgatgatgcatacgagaattttgacaaaatagatgggaagcctagtgcagatggggtagatgaaagcaagtattggcgtggcggctatggtggcggctatggtggtggttatggaggtgggcgtggaggctatggaggtgggcgtggaagctatggagggggacgtggtggatatggcggcggacgaagtggctatggtggcgggcgttgtggc

SEQ ID NO: 27417 - DNA, 345 bp, Glycine max
  Clone ID: LIB3051-044-Q1-K1-C1
cccacgcgtccggtctttatcctgtaagtcaattacctccagaagctgtcgttggtaatgttacatgtggtagtggacgtggtggtttatccaccactgcttggattagttctgcagttaacaatcgctcctcagatatcaacaaatagattcgcacagcacttgggaaaggtaagaaaattgtttttcttactagaggatccttttccagtaactctattggctgttctttttggcgttaagaatgaaattctgagttctaacgccactaaccctatgctgacgcgacttcttgagaactgtgagagtctcaaatatctggtcgatgagtgtccttttgcattt

SEQ ID NO: 27418 - DNA, 354 bp, Glycine max
  Clone ID: LIB3051-044-Q1-K1-C5
agagaatggctcccaagggtttaatctttttggctgtgttatgcttctcagcactgtcactgagtcgttgtcttgcggaggataatggacttgttatgaacttctacaaggaatcatgccctcaggctgaagacatcatcaaagaacaagtcaagcttctctacaagcgccacaagaacactgctttctcctggctcagaaacatcttccatgactgtgctgttcagagttgtgatgcttcactgttgctggactccacaagaaggagcttgtctgataaggaaacagatagaagctctgggttgagaaatttcaggtacattgagaccatcatagaagctatggaaagggaat

SEQ ID NO: 27419 - DNA, 392 bp, Glycine max
  Clone ID: LIB3051-044-Q1-K1-C9
gaaaccctagctagccacaatgcagatattcgtgaaaaccctaacggggaagacgatgaccctagaggtagagtcatcggacacaatcgacaatgtgaaggcgaagatccaggacaaggagggcatcccgccggaccagcagcgcctgatcttcgccggtaagcagctggaggacggccgcaccctcgccgactacaacatccagaaggagtccacgcttcacctcgtcctccgcctccgcggcggcgccaagaagcgcaagaagaagacctacaccaagcccaagaagatcaagcacaagcacaagaaagtcaagctcggcctcctccagttctacaaggtcgacgactccggcaaggtccagaggctccgcaaggaatgccccaacgccc

SEQ ID NO: 27420 - DNA, 352 bp, Glycine max
  Clone ID: LIB3051-044-Q1-K1-D2
caaactttgtaacttcaaaacatactcctctgttctctctgtttctcttcaatcgtcctgaaaaaaacaaaaacacgaaaaatcatccaccctctcacattctctctctctctcctttcaactaatatggcaattgaaaaccaagacaacactgtcagagaaatcaagccaaagaacaggagaatcatgggtgctggaggccctgatgatgacgacaataggtggccaccgtggttgaagccactgctgaaagagagcttctttgttcaatgcaagttgcatgctgactctcacaagagcgaatgcaacatgtattgcttggactgtatgaatggccctctctgctctctct

SEQ ID NO: 27421 - DNA, 258 bp, Glycine max
  Clone ID: LIB3051-044-Q1-K1-D11
ttttgggaatttctcaagattttgaaattgctggcaatactcttatgccagctttttctgttccacaggctactgccagatcttctgaaaatgcggaatcctctgcatgatctggaatttgtgttttctttcgtttgtttgtttgttcaattcaataaaggaaattaggcatgaccctcttgttgagtatgctctgcctatttgaaaatttccacacctcttaattgtcgtaatgatgtgtgaagtgtgtgttatttt

SEQ ID NO: 27422 - DNA, 333 bp, Glycine max
  unsure (1)..(333): unsure at all n locations
  Clone ID: LIB3051-044-Q1-K1-E5
tctctcaatcgttttctacataatacaaacctctctaatttttgaagcttattatgcccaatctcgatatgcagatcttcgtgaaaaccctaactggcaagacgatcaccttggaggtggagtcctctgacaccatcgacaacgtgaaggccaaaatccaagacaaggagggcattcctccggatcaacagcgtttaatcttcgccggaaaacagctcgaagacggcagaaccctcgccgactacaacatccaaaaggagtccacgctncacctcgtcctccgncttcgcggcggcatgcaaatcttcgtcaaaacccttactggcaaaacaa

SEQ ID NO: 27423 - DNA, 429 bp, Glycine max
  Clone ID: LIB3051-044-Q1-K1-H9
cacaactacaagaaagaacttccttataaccaaaaccaacaacaactatggcaagttatcagaagcactacgatgatcagggtcgcaaggtcgacgagtatggcaatgttgagaggcaaactgacgaatatggcaacccggttcatgccactagtgtcacttatgtagccaccaaaagtgttggtggctacaatgatgacgctaataagcaacatgatattactggtgtctatcccgagaaagacaccggtagacatcattttggtcgtggttacgacggtgacactaacaagcaacatgatgctactggtgtttatcccggaatagacattggtagagatcatgggaactaccggtgtttatggcctaaacaccgacagacatcatggaacttctggggtgaatcccgggatagacacccataaccaa

SEQ ID NO: 27424 - DNA, 354 bp, Glycine max
  Clone ID: LIB3051-045-Q1-K1-A9
agagaacccgcgacctggagtcattattaacagtccacatggaaatgatgtttacaagggagtccctaaggattacattggtgaagatgtaactgttggcaacttttttgctgctatacttggaaataagtcagctcttactggtggcagtgggaaggttgtggatagtggtcccaatgatcatatatttatatattactctgatcatggcggtcctggagtgctagggatgcctactaatccatacatgtatgcatctgatctgattgaagtcttgaagaagaagcatgcttctggaagttataaaagcctagtattttatctagaggcatgtgaatctgggagtatctttga

SEQ ID NO: 27425 - DNA, 432 bp, Glycine max
  Clone ID: LIB3051-045-Q1-K1-B4
aggctctggctcggaaccttcgacacggcggaggaagctgctttggcttacgacaaaggcgcgtgtaggctccgaggcgacttcgcgaggctgaacttcccgagcctgaaaggctcgtgccccggggaggagtacaagcctgtgcattccgcggtggacgctaagctcgacgcgatttgcgccaacttggcggaaatgcagaagcaagggaagacggagaaaggtgccaggtcagcgaagaaatcgaagcaaggtccgaaccaggaggccaagcccgaacctcaagcttccgctgaaagtgagggttctgcggattcttctccgctgtctgatcttacctttgatgtaaccgagccgcaatgggaacattttaatctgcagaagtttccttcttatgagatcgattgggattctctctgaacttcggctttg

SEQ ID NO: 27426 - DNA, 414 bp, Glycine max
  Clone ID: LIB3051-045-Q1-K1-C2
attcagaaggagtctaccttacacttggttcttcgtttaagaggtggcatgcagattggcgtcaggactttgacgggaaagaccatcaccttggaggtggagagttcagataccatagacaatgtgaaagccaagattcaagataaggagggtatccccccagaccagcagaggcttatctttgctggtaaacagcttgaagatggacgaacccttgcagattataacatccagaatgaatctaccctgcacttggttttgaggcttcgtggtggcatgcaaatctttgctaagactttgaccggaaaaacaataactttagaagttgaaagttctgataccatcgataacgtgaaggcaaagatacaggacaaagaggggattccaccagaccagcagaggcttatctttgct

SEQ ID NO: 27427 - DNA, 418 bp, Glycine max
  Clone ID: LIB3051-045-Q1-K1-D8
cttttgttcccgattttctcaaattgctttcggttttcgttctgattctgcgaaatcggggagatggagcgcatcgttgaattccctcacacctacatggatcgacccccaagaaagagagcgcgtttgggctgggacatcgctgaggcccccaagataagatccatagtaaaatgggcgaaggaacttttgggcaggtcttggagtgctgggacagagaaaggaaggaaatggttgccataaaaattgtccgtgggataaagaagtatcgagaggcagccatgatagaaattgaggtattgcaacagcttgggaaacacgataaaggtagcaatcgttgtgtgcaaatacggaactggtttgactatcgtaatcatatctgtattgtgtttgagaaacttggaccaagcttatacga

SEQ ID NO: 27428 - DNA, 361 bp, Glycine max
  Clone ID: LIB3051-045-Q1-K1-E2
ggtagccggtcccaatggagggtctgctcgtaagttcactgccaaataccaaacatagggagacgctgagctcaaccaagacgaactcataactggaaaagccaaggctgatgctctattcaaggccattgaagcttaccttttgacccatcccgattacaactaatcctcttcaactcacttgtcatcactttcttgcttaggagacttatccaatcactctgttctcaacttaacttgccttacaatgtatacagtctttccttacttatatgcttatacgatataattgtgagacttatgatatatctgtatctcacttcatcaatactaagttataataaagatgagcaatccttac

SEQ ID NO: 27429 - DNA, 406 bp, Glycine max
  unsure (1)..(406): unsure at all n locations
  Clone ID: LIB3051-045-Q1-K1-H4
cccacgcgtccgcccacgcgttcgcccacgcgttcgtccacgcgtccgaagaaaacctaagcttagaattagaaacaaagaaaagaagaaaggaaagaattgatcgttgaaaatgcagggaggaaagaaagcgggagagtccattaaggaaacagctacaaacattggtgcttctgccaaggctggcatggagaagaccaaggccactgtccaagagaaggcagaaagaatgacagcacgtgatccggtgcaaaaggagttggcaacccaaaagaaagaggcaaagatgaaccaggcggagctggacaagcaggcggcgcgtcagcataacacggcggccaaacagtccgncaccacggctgggcacatgggacatggccaccacaccaccggaaccgggactgga

SEQ ID NO: 27430 - DNA, 368 bp, Glycine max
  Clone ID: LIB3051-045-Q1-K1-H8
gaaagaaaagaccatcaaagtttcacttcagccttatccggtttagggtttcggtttgggacccaacctttgacgtatcgaaaccttaagtttcggatcaggtctgagcaatctggttggtagaacctttggtcttagagagtcaagttttatgtctgaattagacgatcaaattcctactgccttcgatccttttgctgatgcaaatgctgatgactcgggtgctgggtcaaaggagtatgtgcatattcgcgtacagcagcgaaatggaaggaaaagcctgacaaccgttcagggattgaaaaaagaattcagctataacaagatacttaaagatgttaagaaagagttctgttgcaatggaacag

SEQ ID NO: 27431 - DNA, 359 bp, Glycine max
  Clone ID: LIB3051-045-Q1-K1-H10
ctctaaaaaaaacctaccaatggctcccgcaaggcagagaagaagcccgcggagaagaagccggcagagaaggccccagcggagaagaagccgaaggcggagaagaagatatcgaaggaaggaggaagcgagaagaagaagaagagaacaaagaagagcgttgagacctacaagatctacatcttcaaggtgttgaagcaagtgcaccccgacatcgggatctccagcaaggctatggggatcatgaacagtttcataaacgacatcttcgagaagctcgcccaggagtcatcgcgtctcgctaggtacaacaagaagcccaccattacttccagggagatccaaacggcggtgcgttt

SEQ ID NO: 27432 - DNA, 366 bp, Glycine max
  Clone ID: LIB3051-046-Q1-K1-A2
gcagtttcctcgctctcttttctgcaattgtcttttttgctccttctctgcggttatcgttttgagcttcaatggcggacgctgaaaccttcgctttccaggctgagatcaaccagcttctcagcctcatcatcaacaccttctacagcaacaaggagattttcttgcgtgaactcatcagcaacgcttctgatgctttggataagattcgatttgagagtttaaccgacaagagcaagctcgatgctcagccagagctcttcattcgtcttgtgcccgacaaggccaacaagactctttccgttattgacagcggcattggaatgaccaaagcagatttggtgaacaacttgggtaccattgcga

SEQ ID NO: 27433 - DNA, 383 bp, Glycine max
  Clone ID: LIB3051-046-Q1-K1-A3
tgcgactgtagcccaacggaaagaagataggagagctagactgcaggctcagtttgctcaaatgcgacctgttggaatgccaccatctgtcggtcctcgtgtgccaatgtatcccccaggtggtccaggtattggtcaacaaatattttatgcccaaggccctgctgctatcattccttcccagcctggatttgggtatcaacaacaacttgctcctggtatgaggccaggtgcagctcccgtgccaaatttctttgtgccaatggttcagcagggacaacagggacagcgtcctggtggaaggcgtacaggtgcagtccagcagtcccagcagcccgttccaatgatgccacagcaaatgctacctagggggcgtgtttatc

SEQ ID NO: 27434 - DNA, 341 bp, Glycine max
  Clone ID: LIB3051-046-Q1-K1-A9
ctcttgctcttcgcaacaatggttgccgccaagaaaaccaagaagacccatgagagcatgaacaacaggcttgctcttgtcatgaagagcggcaaatacacccttggttataagaccgttctcaaatctcttaggagctccaaagggaaattgattatcattgctaacaactgcccccctttgagaaagtcagagattgaatactatgccatgttggcaaaggttggagttcatcattacaatgggaacaatgtggatttgggcactgcctgcggcaaatattacagagtgtgctgccttagcattattgatcctggtgattcggatatcattaagacact

SEQ ID NO: 27435 - DNA, 274 bp, Glycine max
  Clone ID: LIB3051-046-Q1-K1-D4
attccaatatattccattctctctgtgtatttccctacctctcccttcaagatgcagagcttcgtgaagaccctcaccggcaagaccatcacccttgaggtggaaagctctgacaccatcgacaacgtcaaggccaagatccaggacaaggaaggaatccccccggaccagcaacgtctcattttcgccggaaagcaacttgaggacggccgtacccttgctgactacaacattcagaaggagagtactcttcacctcgtcctccgtctccgtg

SEQ ID NO: 27436 - DNA, 314 bp, Glycine max
  Clone ID: LIB3051-046-Q1-K1-D5
accacgcgtccgcccacgcgtgcgtctacacatccctagctctgtcgttccgtcgttggcgatggcgtttcgggtgcgaagccctgacctacgctctctctatcttctctctctcttgtccatcgcttccgccaatgtcttcttcgaagagcgtctcgatgacgggtgggaaaatcgatgggttaaatcagattggaaaaaagatgagaacgtggctggggagtggaaccacacctctggtcaatggaatggaaacgctaatgacaaaggtattcaaaccagtgaggattacagattctatgctatttcagctg

SEQ ID NO: 27437 - DNA, 340 bp, Glycine max
  Clone ID: LIB3051-046-Q1-K1-E2
cttgccatagagttgagtttgccacatcctcagggagatcaatctggtgcttttagtcgagttttgctgcctgcagatgaaggtgttgaaagttctatttggctgctagcaaaggcttatgtagttgtgaatgactcgtgctatcatcaacttgtcagccattggttaaacactcatgcagttgttgagccattcatcatagcaacaaacaggcatctcagtgttgttcaccctatttataaactccttcaccctcactatcgtgacaccatgaacataaatggccttgctcggttatcactggtcaacgacggtggcgttatagaacaaacatttttgt

SEQ ID NO: 27438 - DNA, 399 bp, Glycine max
  Clone ID: LIB3051-046-Q1-K1-F3
ggaacaatggcgggtagggtttcgacgtgcttcttcttcgtgtttgctctttctctccttcttccttttcagatctccgctgaggaatcatcggagaaagagttcgtactcacattggatcactctaactttcacgacactgtcagcaagcacgatttcatcgtcgtcgagttctacgctccatggtgtggccactgtaagaagcttgctcccgagtatgagaaagctgcttctatcttgagtagtcatgatcctccggttgttttggctaaaattgatgccaatgaggagaagaacaaagaccttgcatctcaatatgatgttaggggatacccaacaattaagattctgagaaatgggggaaagaatgttcaggaatacaaaggtccccgtgaagca

SEQ ID NO: 27439 - DNA, 326 bp, Glycine max
  Clone ID: LIB3051-046-Q1-K1-F4
cccacgcgtccgcccacgcgtccgcccacgcgtccgcgaaagccgaaccttaaacacagacgccggatctagcaactattgagttttgttttctttgaaacatcgtgtgcacagtaccccagaagatcgaacaaggatctccacgaagacaaacctctgttctcaactgtgtttctttacctctcacctactttcagaccataccagattgactaggctgagaagatgcagcagacaccggctatgattcctatgatgccttcgttcccacctacgaacataaccaccgagcagattcaaaaataccttgatgagaacaagaagct

SEQ ID NO: 27440 - DNA, 369 bp, Glycine max
  Clone ID: LIB3051-046-Q1-K1-F6
aacgactctatctctgttcgatccggtcttccttgcgctcctcctagttggttcgttgtccctcgcgtagatcggcaatggcagataccgagacgtttgctttccaggctgagatcaaccagctcctcagtctcatcatcaacaccttctactccaacaaggaaatcttacttcgtgaactcatcagcaacgcctctgatgctttggacaagattagatttgagagtttgacggacaagagcaagctcgatgctcagccagagttgttcattcatattattcccgacaagactaacaattcggtgaccattgttgacagtggcattggcatgaccaaagcttatttggtaaaccacttgggtacaattg

SEQ ID NO: 27441 - DNA, 352 bp, Glycine max
  Clone ID: LIB3051-046-Q1-K1-G2
cgcagttgagatttgagaattgactctgagaatcgagaaaatggccggtttaccagcgaggctccgtctccaacccaccgacgtcaaagccgccgccttgtggggcgttaccgccgccactggcgctctctacctcattcagccatggggatggttgaagaagacattcttggagaagccagaacctgagcaaaaatgagttggcttctgagaagagtggtttgaatttttggatcatgccaaggatgggtaacagtcgaatattgttaatttctgctgaggtcttctcgcacctgtgctttatgttatgaatttggatactaaattttaatgctctgcgcttgatggtttt

SEQ ID NO: 27442 - DNA, 410 bp, Glycine max
  Clone ID: LIB3051-046-Q1-K1-G3
cgcacgcgtccggaatatcttgtcgtttggagcgatccgagaaaaactctgtgcacatgttggagtaccaggacctccttacaggtgatgagctactctctgactcctttcgttacaaggaaattgagaatggaatgctgtgggaagttgaggggaagtgggttgttaaaggagcagttgatgtagacattggtgcaaacccttctgctgaaggtggaggagaagatgagggagttgatgatgcagctgttaaggttgttgacattgttgacacattcagacttcaagagcaacccgcattcgataagatgcagtttgataccttcatgaagaggtttatcaagaattggactcccaagctcgatgcatagcaacaggagttggttaagaagcacatcgggggagcaact

SEQ ID NO: 27443 - DNA, 369 bp, Glycine max
  Clone ID: LIB3051-046-Q1-K1-H11
gaacacaaaatatttttacttccattttttgactgaaagaataaaaaaatggtatgattcaacctcaaactcatttgaatgtagctgataatagcggagcacgcgaactgatgtgtattcgaatcctaggagctagtaatcgacgatatgcttatattggtgacattgttgttgctgtaatcaaacaagcagtaccaaatacgaacttagaaagatcagaagtgatcagagctgtaattgtacgtacttgtaaagaactcaaacgtagcaacggtataataattcagtatgatgataatgctgcagttgtcattgatcaagaaggaaatccaaaagggaactcgaatctttttgtgcaatcgccccggg

SEQ ID NO: 27444 - DNA, 434 bp, Glycine max
  Clone ID: LIB3051-047-Q1-K1-B11
cccacgcgtccgtgcgtattcaaacattccaatgacctcatatgagcttcctgatggccagacagtggaaattggagctgacagatttaagataccagatgttcttttcaatccatccctggttcagtcaattcctggcatggagagctttgcagaaattgctccttcagttcgtggcctgccccaaatggtgattgaaagcattaataagtgtgatgtagacattcgaagagagttgtttaatagtatactgcttgctggtggtacagcttcaatgcaacaactaaaggaacgccttgagaaagacttgttagaggaatcccctcaagctgccagagtaaaagtattggccagtgggaatgctactgaaagaaggtttagtgtttggatcgggggtagtatattggcatctcttggctccttccagcaaatgt

SEQ ID NO: 27445 - DNA, 446 bp, Glycine max
  Clone ID: LIB3051-047-Q1-K1-C7
cccacgcgtccgaatagattatcctaagtctttgggaatagtgctgcaatggcttcaagtcaggaggaggtgacccttttgggagctactggaagcccatttgtgtgcagggttcatattgccctcaagttgaagggagttcaatacaaatatgtcgaagaaaatttgaggaacaagagtgaactgcttctcaaatccaacccagttcacatgaaggttccagtgtttattcacagtgagaagcccatagcagagtctcttgtgattgttgaatacattgatgagacatggaacaacaaccacatcttgccttctgatccttaccaaagagccttgactcgtttctggtccaaattcattgatgataaggtttatggtgctgcatggaaatccgttttcacagctgatgagatagagcgtgagaagaatgctgaggaagcaattga

SEQ ID NO: 27446 - DNA, 402 bp, Glycine max
  Clone ID: LIB3051-047-Q1-K1-D1
ctaataaaactagtagtataattcttccattccgttctacatataatcattcataatgggtgttttcacattcgaggatgaaatcaactcccctgtggctcctgctactctttacaaggccctagttacagatgccgacatcgtcatcccaaaggctcttgattccttcaagagtgttgaaaacgtcgagggaaatggtggcccaagaaccatcaagaagatcactttccttgaggatggagaaaccaagtttgtgctgcacaaaattgatagcattgatgaggcgaacttgggatacagctacagcgtggttgggggtgctgcattgccagacacggcagataagatcacattcgactccaaattggttgctggtcccaatggaaggtctgctgtgaagct

SEQ ID NO: 27447 - DNA, 373 bp, Glycine max
  Clone ID: LIB3051-047-Q1-K1-D2
gaaaaaaataagaggaaatgtatgtggcttttggtaagaactaactttgaatttggccatgctattgtgtgcgttgaatgctatcctggaagaaaagaggaagacacatactaaaaataaattgaatagcattaaatgtgcatctatgctgtgaacattgaacttaaatatgcaagttgactctgtatctatgctgatattaccaatgtatgttgaaacatcactatcttttgtacacgttgaatcaattaagaggatatcagagtatgtgactcagcttagaatgattggaaaggctcacggtgtttggcactttgatcaaagactttctgaataagaagatgctgcttaatcttgaatagccctaatatta

SEQ ID NO: 27448 - DNA, 393 bp, Glycine max
  Clone ID: LIB3051-047-Q1-K1-D4
gattgttgtgactcgttcttcttcgtcgttatcttcttcttttgttgtttgtgtgtccgttctttctctcacctgaaaatgtcttgctgcggtggtaactgtggttgcggaagcgcctgcaagtgcggcaacggctgcggaggctgcaagatgtacccagacttgagctacaccgagtcaaccaccaccgagaccttggtcatgggagtggcaccagctaaagctcaattcgagagtgctgaaatgggtgttcccgctgagaacgatggctgcaaatgtggagctaactgcacctgcaacccctgcacttgcaagtgacgtgttcgagagctaaagcttcaagcagaaatggcccttagaaatcatgataaagactatatgtagtttcaaaac

SEQ ID NO: 27449 - DNA, 446 bp, Glycine max
  Clone ID: LIB3051-047-Q1-K1-E3
ccgagttttctgatcgctcatagagagttcgacgcggcggttgcagaagaagattgcaagatgaagttcaacatcgcgagtcccaccactggatgccagaagaagctcgagatcgacgacgatcagaaactacgagcattttgggacaagaggatctcacaggaggtcagcggagatgcacttggtgaggaatttaagggctatgtcttcaaaattactggaggttgtgacaaacaaggattcccgatgaaacagggagtgcttactcctggtcgtgttcgacttttgcttcacaggggaactccttgcttccgtggatatggaaggcgtaatggagaacgtaggagaaagtctgttcgtgggtgcattgtcagcccagacctctctgttttgaacttggtaattgtgaagaagggtgagaatgatttaccaggattgactgatgc

SEQ ID NO: 27450 - DNA, 443 bp, Glycine max
  Clone ID: LIB3051-047-Q1-K1-E10
cccacgcgtccgcaacactggaggagcagtggagcaggttgagattcataaccgagcagcaacgaagacaatagctcttagtgtaaggggaagaggcagatttggagtttactcctcccagagaccactgaagtgtgtggtaggtggcgctgaaaccgacttcaactatgactcagagaccgggttgacaaccttctccattccagtttctccagaggagatgtacagatggtcaatagagatccaagtttgagtcctttttaagacttggtgtttgatgcattgttgtatcaggagaagggttttgttgtaattaagcattgagggaattgttggagtcaggcagagagagaggggggaggtttgttgtaagacacctagtattagtatcatgtagtggagaaaaagggttgttgatcctaatagctagacaaggcatgttg

SEQ ID NO: 27451 - DNA, 448 bp, Glycine max
  Clone ID: LIB3051-047-Q1-K1-F9
aaaacttccacttgagagaaaagtagtgtattaagactacaaattttcaatttttcaatggcgtcgaggcaacaaaaagaggatcgagctgaggcagctgcgaaagttgctgcgaaagaactcgaacaactcaaccgagaaaaagaccgtgatttcagtgttggtgttgcagaccaacaccaacaagaagaacatcagttagatcaacaaaagcgtggtgtaatcggatccatgttcaaggcggtgcaagacacctacgagaacgccaaggaagctgtcgttggcaagaaagaaccttcgacgacgactaactcgtacagtaccagagaggttattcacgacgttgacattcaacccgatgacgcggctgcagcgagggaagtgagagacaaatcagcctcatagtcaccaggtatctacaattctgccactgctgacaacaaaaccg

SEQ ID NO: 27452 - DNA, 387 bp, Glycine max
  Clone ID: LIB3051-047-Q1-K1-G6
caaaattagggtttttgtcgtagcaggaagaagcagcaatggcgccgaagataacacgcaaggtcagcagaaaccccgaattgataaggggaatcggaaagtactcgaggtcgcagatgtaccacaagaggggcatttgggctatcaaggccaaaaacggtggcgttttacctcgccacgaccccaaacccaaacctgaaactgccactgaaaaaccacccaaattttaccccgctgatgatgtcaagaaaccccttgtcaacaagcacaaacccaaaccagctaagctcagggctagcattaccctcggaacagtgtcgattcttcttgctggtagatttaagggaaagagggtagtgtatttgaagcagctaccttctgggttgc

SEQ ID NO: 27453 - DNA, 424 bp, Glycine max
  Clone ID: LIB3051-047-Q1-K1-H5
attagggtttgccgattgagttagaatgagaaatgggagaacgaaaaggaatgccaagggctttggggctcttggcgatgatcctcttcttcattgcttcctcttcctctcacctcgttcgcgcttccgatgacgccgacgacgcgatcttctacgagtcgttcgacgaggattttgatggacggtggattgtatccgacaaggaggattacaatggtgtctggaagcatgccaagagtgatgggcatgatgattatggacttcttgttagtgaacaagccaggaaatatgctatagtcaaagaacttgccgagtctgtcagtcttaaggatggaacagttgttcttcagtttgagactcgccttcagaatggccttgaatgtggtggtgcatatattaaattatcttcgaccccaggagagcg

SEQ ID NO: 27454 - DNA, 443 bp, Glycine max
  Clone ID: LIB3051-047-Q1-K1-H10
cccacgcgtccgtgaacagatgcagatcttcgtgaaaactttgaccggtaagaccatcacccttgaggtggagtcctccgacaccatcgataacgtgaaagctaagattcaagacaaggaagggatcccacctgaccagcagagacttatctttgcgggtaaacagcttgaggatggtcgaacccttgccgactacaacatccaaaaggaatccactctccacctcgtgcttcgcctcaggggtggcatgcaaatctttgtcaagactttgactggcaagaccatcaccctcgaggtcgaatcctcggacaccattgataatgtcaaggccaagatccaggacaaggagggtatccctccagatcagcagaggttgatatttgctggtaaacaacttgaggatggaagaacccttgctgattacaatattcagaaagagtcta

SEQ ID NO: 27455 - DNA, 433 bp, Glycine max
  Clone ID: LIB3051-048-Q1-K1-A7
cccacgcgtccgcccacgcgtccgatccaatcatatgtttttgatgtcatcagggccagggtaccaaagttggagttggattctgtctttgagcagaagaatgatatagcaaaggctgtggaggaggagcttgagaaggccatgtcaacctatggatttgagatagtccagactctcattgttgatatagagcctgatgttaatgtcaagagagcaatgaacgagattaacgcagctgctagattgaggttggctgcaaatgagaaggctgaagcagaaaaaatactgcagatcaaaaaagctgagggagaagcagaatccaaatatctgtcaggactcggtatcgctcgccaacgtcaagccattgtggatggactgagggacagtgtgcttgctttctctgagaacgtgcctgggacaacagctaaagatg

SEQ ID NO: 27456 - DNA, 432 bp, Glycine max
  Clone ID: LIB3051-048-Q1-K1-B12
cccacgcgtccgtgaaaatgtcttgctgcggtggtaactgtggttgcggaagcgcctggaagtgcggcaacggctgcggaggctgcaagatgtacccagacttgagctacaccgagtcaaccaccaccgagaccttggtcatgggagtggcaccagttaaggctcaattcgagagtgctgaaatgggtgttcccgctgagaacgatggctgcaaatgtggagctaactgcacctgcaacccctgcacttgcaagtgaggtgttggagagctaaagcttcaagcagagatggcccttagaaataatgataaaaactatatgtagtttcaaaacttcaaaattatgtagtatgtattatgttgcactctggtgttttgtgtctaaacaaacacccttagaataaagcggtcatttcttgcccttgagcaagttc

SEQ ID NO: 27457 - DNA, 138 bp, Glycine max
  Clone ID: LIB3051-048-Q1-K1-C3
gaaaagtcaaagacaatgtccaggatcattcacaagattgaggagacccttcatgtgggaggccacaagaaagacgaggagcacaagggtgagcagcaccatggtggagaatacaaaagggagcatcatggtgaacac

SEQ ID NO: 27458 - DNA, 362 bp, Glycine max
  unsure (1)..(362): unsure at all n locations
  Clone ID: LIB3051-048-Q1-K1-C7
gggtattttcacatttgacgatgaaaccacctnccctgtggctcctgctaccctttacgaagctctagttacagatgccgacaacgtcatcccaaaggctgtcgaagccttcaggagtgttgaaaaccttgaggggaacggtggccctggaaccatcaagaagatcactttcgttgaggatggagaaagcaagtttgtgttgcacaaaatagaatcagttgatgaggcaaacttgggatacagctatagcgtagttggtggagttgggttgccagacacagtggagaagatcacattcgaatgcaaattggctgctggcgccaacggaaggtctgctgggaagctaactggcaaatacccaa

SEQ ID NO: 27459 - DNA, 438 bp, Glycine max
  Clone ID: LIB3051-048-Q1-K1-C11
gtgagtcagcagattcacactatggtatggggcatacataggagcagagtgacaccagaggtagtgcttggctgcttgattataaatagagggcactcctctgctaaagaagcacacagcagcaagcatctccttctcaaactagtagtattattcttccattcataatgggtgttttcacattcgaggatgaaatcaactcccctgtggctcctgctactctttacaaggccctagttacagatgccgacaacgtcatcccaaaggctcttgattccttcaagagtgttgaaaacgttgagggaaatggtggcccaggaaccatcaagaagatcactttccttgaggatggagaaaccaagtttgtgctgcacaaaatagaaagcattgatgaggcgaacttgggatacagctacagcgtggttgggggtgctgcat

SEQ ID NO: 27460 - DNA, 358 bp, Glycine max
  Clone ID: LIB3051-048-Q1-K1-D6
ctgctcttctcttctcttctacctgtcaagtttctgaagtataaagatggcagagacaggcctattcacctaggagtcagtgaacgagggacaccctgataagctctgcgaccaaatctccgatgctgtcctcgacgcttgcctagaacaggacccagacagcaaggttgcctgcgaaacatgcaccaagaccaacttggtcatggtcttcggagagatcaccaccaaggccaacgttgactacgagaagatcgtgcgtgacacctgcaggagcatcggcttcatctcaaacgatgtgggactcgatgctgacaactgcacggtccttgtgaacattgagcagcagagccctgatatt

SEQ ID NO: 27461 - DNA, 442 bp, Glycine max
  Clone ID: LIB3051-048-Q1-K1-D11
ctctcgtacgcagggtaccaagattgcttctgaaggacttaaacatagagtgtttgagggctccttggctgatcttcaaggggatgaggatcatgcattcaagaagattaggttgagagctgaagatgtgcaagggaagaatgtcctgacaaatttctggggaatggatttcacaactgacaagctgaggtcattggtgcgaaaatggcaaactctaattgaagcccatgtggatgtgaagacaactgataactacacattgaggatgttttgcattggatttaccaagagaagagctaaccaagtgaagagaacctgctatgcacaatcaagccagattagacagattcgtaggaagatgagggagatcatgaccaaccaggcaacatcctgtgatttgaaggagttggtccgcaagtttattcctgagattattggaaaa

SEQ ID NO: 27462 - DNA, 430 bp, Glycine max
  Clone ID: LIB3051-048-Q1-K1-E6
gaacagtatgtctgggagtcccatgccggtggctcatttactgtgacaagagatacatgtggtgagaaccttggtaggggaacaaagataactttgtttcttaaggaagatcaacttgagtatcttgaggaacgccgtctgaaggatttgataaagaagcattctgaattcattagctatccaatttctctctggattgagaagactactgaaaaggagatttctgatgatgaggatgaggaagagaagaaggatgaggagggtaaagttgaagatgtggatgaagataaggagaaggaggagaagaaaaagaagaccattaaggaggtatctcacgagtggtcattggtgaacaagcagaagcctatttggatgaggaaacctgaagagattacgaaagaagaatatgctgctttctacaagagtctta

SEQ ID NO: 27463 - DNA, 440 bp, Glycine max
  Clone ID: LIB3051-048-Q1-K1-E11
cccacgcgtccgcagagggtgatgttagcagggcgagttgagttcttcgaacacttaagtcggagggactgctgaagacgcaacccaaccaaccatggctgcttctgatcccaacaagttgatggccaaagctgataaacaaacaagactcagtctcacgaggtggagtgcggattggaaaagtgctactgttctatatgagcaggcagctaatgggtttagagttgccaaggactatgagaatgccaaaatagcatatgagaaagcttcgaaaggacaagagatgctttcttcaccttgggatgcagctaagcacatggaatctgctgctgctctagcgaaggatctaagacactggcaagaagttgtggacttctatcgaagggcatctgaattgtatatggagtgtgggagaccccaacctgcatcagacgctcttg

SEQ ID NO: 27464 - DNA, 406 bp, Glycine max
  Clone ID: LIB3051-048-Q1-K1-F12
acagaatacaaacaaacaaatagaaaacccaaaataaccgagaaaagaaaattagatagagagaagaagaaagcgtatctggaattttcgtttcgttggtgtgtcgtgtgcgtgtggaggttcttttctttgagactttccttcaaattctagattgcttccctttcttttctttcccttataaccaccaacctctccctttcccccttttcatttcttcctcgattttccatttccataaccttagtcatcttcttctttcatctttctccctaacggtatcgagggaaaaatatggcggaagaacacagatgccaggcaccgcgcttctgcgccaacaattgcggtttctttggcagccctgccacgcagaatatgtgctccaagtgctaccgcgatttccagc

SEQ ID NO: 27465 - DNA, 417 bp, Glycine max
  Clone ID: LIB3051-048-Q1-K1-H8
acggacacgcgtacggaagcccatagcagagtctcttgtgattgttgaatacattgatgagacatggaagaacaaccccatcttgccttctgatccttaccaaagagccttggctcgtttctggtccaaattcattgatgacaaggttgtgggtgctgcatggaaatatatttatactgttgatgagaaagagcgtgagaagaatgttgaagagtcatatgaggctctgcagtttcttgagaatgagctgaaggacaagaagttttttggaggagaggaaattgggttggtagatattgctgctgtcttcatagcattttggatccctataattcaagaagtattgggtttgaagttattcacaagtgagaaatttcctaagctctacaaatggagccaagagttcatcaaccaccc

SEQ ID NO: 27466 - DNA, 327 bp, Glycine max
  Clone ID: LIB3051-048-Q1-K1-H10
acccacgcgtgcgcccacgcgtccgtgcacagatgcagatcttcgtgaattctttgaccggtaagaccatcaggctttaagtggagtcctacgacaccatcgataacgtgaaagctaagattcaagacaaggaagggatcccacctgaccaacagagacttatctttgcggttaaacagcttgaggatggtcaaacccttgccgactacaacatccaaaatgaatccactctccacctcgtgcttcccctcatgggtggcatgcaaatctttgtcaagactttgactggcaagaccatcaccctcaaggtcgaatcctcggacacca

SEQ ID NO: 27467 - DNA, 336 bp, Glycine max
  unsure (1)..(336): unsure at all n locations
  Clone ID: LIB3051-049-Q1-K1-A4
tttggtggaattctcaactcccgaggaggcatctggagcgctcctggagatgaatggcanaatggtggtaagcatacctctgatgtgacttagccaaagaaagaagataggagagctagactgcangctcagtttgctcaaatgcgacctgttggaatgccaccatctgttggtcctcgtgtgccaatgtatccnccaggtggtccaggtattggtcaacaattattttatagccaaggccctnctgctatcattccttcccagcctggatttggctatcaacaacaacttatgcctggtatgaggccaggtgcagcttctgtgccgaattttttc

SEQ ID NO: 27468 - DNA, 386 bp, Glycine max
  Clone ID: LIB3051-049-Q1-K1-E5
tcgcccacgcgtccggaaacatggcttccttaagctccttagtgctgctccttgcaggtcggattctatcccctcaagttcttgcaaactatgagaatcccccagtgtacaagcctcccactgagaaaccaccagtttataagcccccagttgagaagcctcctgtttacaaacctccagttgaaaacccctcaatttataagcctccagtagagaagccaccagtgtacaagcccccagttgagaaacccacagtgtacaagcccccaattgaaaaacctccagtgtacaagcccccagttgagaaaccaccagtgtacaagcccccagttgaaaaacccccagtttacaagcccccacgtgaaaaacccctattgtacaagccc

SEQ ID NO: 27469 - DNA, 447 bp, Glycine max
  Clone ID: LIB3051-049-Q1-K1-E11
gtcccaattttctagggttatattcattttccgatggcttctgcagatgttgagtaccggtgctttgtcggtgggctcgcttgggccactgacgaccatgccctcgagagagccttctctcagtacggcgaaatcgttgaaacgaaggtctgtttgttgcaggcatcacatctgatctcacacgattcggattcggaattttctcgatcccgttctgatctgtgatctctgatctgtttgcgttacttgatcttatgatacttgcgttactatatgattcttttattactcacgccaataggtaccgttcatcttcttcctttcaccaaaggcgaaagatcgatcggcttctaattggttctggctttggttttttgtgctgatttgctatagatctgataattggtttactggcttatgttcagattatcaacgatcgtgagactg

SEQ ID NO: 27470 - DNA, 390 bp, Glycine max
  Clone ID: LIB3051-049-Q1-K1-F6
tgtagaagaccagcaagaaaagggaagggaggagaggggagagaaaatgccaatattagaaggttgtagatggaattagtgaacatacccgctcaaagcgacacccaaattacacgcacaaccacacctttaaattctccgcagaaggaaaaaaaggaaaaaagataaagaagccaaaagtccctcgttccatttccccctttcctccgcccggcgagaaaatgagagaaatcctccacatccagggcggccaatgcggcaaccagatcggagccaagttctgggaagtaatctgcgacgagcacggcatcgaccacaccggaaagtacagcggcgactccgaactccaattggaacgcatcaatgtctactacaacgaggccagcggcg

SEQ ID NO: 27471 - DNA, 379 bp, Glycine max
  Clone ID: LIB3051-049-Q1-K1-G3
tcgagcatgcgcaaatttctactatttttcaatggcttctgcagatgttgagttccgttgcggtgggggtgggcttgcttgggtcaccggcaacgatgccctcgagaaagccttttcaatctacggcgacatcgttgaatcgaaggttatcaacgaccgtgagactggaaggtccagaggattcggatttgtgaccttcgcctcagagcagtcaatgaaagatgcgatcgcaggaatgaacggccaggaccttgacggtcgtaacatcactgtcaacgaagctcagacccgcgccagccgtggtggtggtggaggcggtggtttcggaagtggtggtggatacaaccgcggtagcagtggatatggtggtggtggtggc

SEQ ID NO: 27472 - DNA, 429 bp, Glycine max
  Clone ID: LIB3051-049-Q1-K1-G9
cacaaaagtgttccacttgagtgaaaagtagtgtgttaagaactaaacaatttttcaatggcgtccaagaaacaagaggagcgagctgaggcagctgcgaaagttgctgccaaagaactcgaacaagtcaacagagaaagaagagaccgtgatttcggtgttgatgctgaacaacaacaacaacatcatcaggaagatcaacaaaaacgtggtgtaatcgggtccatgtttaaggcggtgcaagacacctacgagaacgccaaggaagctgtcgttggcaagaaagaagctactaataacgcgtacagtcatacagaggttattcacgatgttaacattcagcccgatgacgtgtcggcaacgggcgaagtcagggacatatcaatcacaaagactcatgatatctacgattctgacacggaccacatc

SEQ ID NO: 27473 - DNA, 407 bp, Glycine max
  unsure (1)..(407): unsure at all n locations
  Clone ID: LIB3051-049-Q1-K1-H3
tcgaccacgcgttcggccttnctagaacgaaacaaataagaagagcatttttccctcaccagggaagagaaagcatacaatggccgatcaacttaccgatgaacagatctcctagttcaaggaagccttcagcttgttcgacaaggacggctatggttgcatcacaaccaaggagcttggaactgatatgcgttcattggggcaaaacccaactgaggcagagcttcaggacatgatcaatgaagtggatgctgatgggaatggtaccattgacttacctgagttcctaaatctcatggccaggaagatgaaggacactgattctgaggaggagctgaaagaggcattccaggttttcgacaatgaccagaatgggttcatctctgctgctgaactccgtcatgtga

SEQ ID NO: 27474 - DNA, 308 bp, Glycine max
  Clone ID: LIB3051-050-Q1-K1-A7
ggaactgagcaagcttttggggtctgttaccattgccaacggaggtgtcttgccgaacattcaccagactctgcttcccaagaaggctggaaaggggaagggcgaaattggatctgcctctcaagagttttagggtttttgttttacccatttggactatagttttgattttattgcgtttgtaacatacatgtttcggttattttctacatgtcttctctgagaaattaggtgcttctcagtctgatgaactggatggtgtattatcacttttgaatcagatgtgaatgtgaagtgctatttggatt

SEQ ID NO: 27475 - DNA, 405 bp, Glycine max
  Clone ID: LIB3051-050-Q1-K1-C8
cccacgcgtccgcccacgcgtccgtgataacttaattagtgttcatgaatatgtcaagccttactttagtggttctaaattgaaaagctttctagctggtcataatatcaccattactgatggtattgacaaaactagtgcaactttgcaatttagaaagttagcagattgtgattttctcaagagaaactttaagcagatgtctaatgttttgtgggtggctcctgaggacaaggcgagtttatggtcacaacttcattatgtttcgtgtaataatctggaaatgcaagaagcttatcttgtcaatctcgtaaatgtgttacgagaattgtatttgcacagtccagaggaagctcgccaattgagaagggaagctctctctcgtattgaatggctgcaaaaagc

SEQ ID NO: 27476 - DNA, 385 bp, Glycine max
  unsure (1)..(385): unsure at all n locations
  Clone ID: LIB3051-050-Q1-K1-C10
gttgacttttagtgatgtatgttttagttgtctatttgtttgtgtatcttgtgctgcggtatgtactgtcatcgtaggtgagttcacttgtttttatttggggttacaacttttctttttgcagaatcgtcatagaaatccagcaatgtctggtggttattctcagcaaggttaccaaacttgggcaaccaatagctgggggtccccttgttgttctattgcacaatcttgttatgggtatgtgcaggcaggaacatactctggtacaccccagtattacatgcctcnagcaacaatatgcaggctattctccccagtcatctggtggatattctgccaccaacctgggatcagtccactgccccacagcagcagtcaacccatg

SEQ ID NO: 27477 - DNA, 365 bp, Glycine max
  Clone ID: LIB3051-050-Q1-K1-F8
cccacgcgtccgggacgaagatgccttcttcgctgattacgctgaggctcaccaaaagctttctgagcttgggtttgctgaagcctaagcaacgttttggggattgttggagaggcacggtgcccataatatttctctcataaattctatggtcatggtttctaatgcgccactgtgggttcctcaaatttttagatagcttttgaatgtattttgctggacgtggtgatgatgattggagttgggttgtttttatttgtggtcgatccttttgttaaataacattgttcagcgattgcgatattattaccctttgtagtatgtgaccatttaccgtaataactagtaatttgtctattattact

SEQ ID NO: 27478 - DNA, 405 bp, Glycine max
  Clone ID: LIB3051-050-Q1-K1-F10
gtttcgaatagattatcctaagtctttgggaatagtgctgcaatggcttcaagtcaggaggaggtgacccttttgggagctactggaagcccatttgtgtgcaaggttcatattgccctcaagttgaagggagttcaatacaaatatgtcgaagaaaatttgaggaacaagagtgaactgcttctcaaatccaacccaagtcacaagaaagttccagtgtttattcacaatgagaagcccattgcagagtctcttgtgattggtgaatacattgatgagacatggaagaacaaccccatcttgccttctgatccttaccaaagagccttggctcgtttctggtccaaattcattgatgataaggtttttggtgctgcatggaaatccgttttcacagctgatgag

SEQ ID NO: 27479 - DNA, 392 bp, Glycine max
  Clone ID: LIB3051-050-Q1-K1-G6
aatcaatcaaattctttgagttgaacacaggggccaagattccttctcttgggttagggacttggcaagctgaacctggtgttgtagctgaagctctcaccacagccattcaggttggatacaggcatattgactgtgctagtgcgtataagaatcaagcagagattggttctgctcttaagaagctttttgatgatggtgtggtgaagcgtgaggacttatggatcacttccaaactctggtgttcagatcatgcaccagaagatgtgccaaaagcattggataaaacattacaggaattgcaacttgactatcttgacctctatctgatccactggccagtccgcatgaaaagtggaacatttggactcaataagaatatcttgagcaac

SEQ ID NO: 27480 - DNA, 407 bp, Glycine max
  Clone ID: LIB3051-051-Q1-K1-A1
ataaattctattctggttgacgcttctctcaccatccccatttcgcgttggtgcaaagcatccttcagttcaatttctctctctcagcgctttctgcaatcgaacctttcatctccaaagggatccacaggccgaaggagaaatggggctgacattcacaaagcttttcagtcggcttttcgcgaaaaaggaaatgcgaattctgatggttggtcttgatgctgctggtaagaccactatcctgtacaagctcaagctcggagagatcgttaccacaattcctaccatcgggttcaatggtgagactgtggaatacaagaacattagcttcactgtttgggatgttggtggccaggacaagattgcgcccttgtggaggcactacttgcagaacacccaaggtctta

SEQ ID NO: 27481 - DNA, 414 bp, Glycine max
  Clone ID: LIB3051-051-Q1-K1-A11
caacactggaggagcagtggagcaggttgagattcataaccgagcagcaacgaaaacaatagctcttagtgtaaggggaagaggcatatttggagtttactcctcccagagaccactgaagtgtgtggtaagtggcgctgaaaccgacttcaactatgacttagagaccgggttgacaaccttctccattccagtttcttcagaggagatgtacagatggtcaatagagatccaagtttgagtcctttttaagacttggtgtttgaagcattgttgtatcaagaagagggttttgttgtaattaagcattggaggaattgttggagtcaggcacagagaaaagggggaggttgttgtaagacacctagtattagtatcatgtagtggagaaaaagggttgttgatcctaatagc

SEQ ID NO: 27482 - DNA, 207 bp, Glycine max
  Clone ID: LIB3051-051-Q1-K1-F3
cccacgcgtccgggaagatccaggggttttggatttgtgaccttcgcctcggagcagtccatgaaagacgccatcgaagggatgaacggccaaaaccttgacgggcgtaacatcactggtaacgaagctcagtcccgtggtggcggtggcggcggaagcggtggaggtggtggatatggtggtggtcgcagtggtggatatggtggt

SEQ ID NO: 27483 - DNA, 379 bp, Glycine max
  Clone ID: LIB3051-051-Q1-K1-F6
actacaagtacttccttacaatcaaaaccaacaacaactatggcaagttatcaaaagcactacgatgatcagggtcgcaaggttgacgagtatggcaacgttgagaagcaaaccgacgaatacggcaaccctgttcatgctgctagtgtcacctatgtagccaccagaactgctgctggtggttacagtgatgacattaataagcaacatgataccaccaatgcctacggcgtagacactggtagacagcattctagtggtggctacgatggtgacactaataaacatcatggaactactggtggctataatgatgacaccaatagacatcatggaacttccggtgtctatggtatagacaccgatgggcaacaacatg

SEQ ID NO: 27484 - DNA, 333 bp, Glycine max
  Clone ID: LIB3051-051-Q1-K1-F11
ctcaaactagtagtattattcttccattccgttctacatataatcattcataatgggtgttttcacattcgaggatgaaatcaactcccctgtggctcctgctactctttacaaggccctagttacagatgccgacaacgtcatcccaaaggctcttgattccttcaagagtgttgaaaaccttgaaggaaatggtggcccaagaaccattaagaaaaacacttttcttggaggttggaaaaaccaagttgggctgcacaaaatagaaagccttgatgaagccaaccttgggatacagcttcagcgtgggttggggtgctgcattgccagaca

SEQ ID NO: 27485 - DNA, 378 bp, Glycine max
  Clone ID: LIB3051-051-Q1-K1-G2
tgtgactcgttcttcttcgtcgttatcttcttcttttgttgtttgtgtgtctgtttggtctgtcacctgaaaatgtcttgctgcggtggtaactgtggttgcggaagcgcctgcaagtgcggcaacggctgcggaggctgcaagatgtacccagacttgagctacaccgagtcaaccaccaccgagaccttggtcatgggagtggcaccagttaaggctcaattcgagagtgctgaaatgggtgttcccgctgagaacgatggctgcaaatgtggagctaactgcacctgcaacctctgcacttgcaagtgaggtgttggagagctaaagcttcaagcagagatggcccttagaaataatgataaaaactatatgtag

SEQ ID NO: 27486 - DNA, 373 bp, Glycine max
  Clone ID: LIB3051-051-Q1-K1-G10
cccacgcgtccggtcgctgctccgtaccagtttcactgcataaatttgagagaaaactctgcaaacatgttggtttatcaggacctccttacaggtgatgagcttctctcggactccttccgttacaatgaaattgagaatggaatgctgtgggaagttgaggggaagtgggttgttaagggagcagttgatgttgacattggtgcaaacccttctgctgagggtggagaagatgagggagtcgatgacgcagctgttaaggttgttgacattgctgatacattcagacttcaggagcaacccgcttttgataagaaacagtttgttaccttcatgaagaggtttatcaagaatttgactcccaagctcgatg

SEQ ID NO: 27487 - DNA, 417 bp, Glycine max
  Clone ID: LIB3051-051-Q1-K1-H2
cgaagcgcaatttgtcagtggaagaacttttaaatatgacataattggtgctggttgacattcttctgaggaactttctgaagaaaagaatcagggaaaagtaaagcaggttgatgctaggttgaggcaaagaatagatccacaatacaatgaagttcaagctcaaatggaaacaaatctattcaaattgtctcttgatgatgttgagactccaaaaggttccatgttagacctcaagatttcccaatctaagattgcactttccaaaaatacagttggagggaccattttgcgcagtgatttgctggcaaatttcttaacagaaggcaattttagagcaagtgttgatttgcaacgtacccaccgtatcaaaggaatgattaaaatggtggctacagttggcatttctggaaacac

SEQ ID NO: 27488 - DNA, 415 bp, Glycine max
  Clone ID: LIB3051-051-Q1-K1-H5
cccacgcgtccgcccacgcgtccgcccacgcgtccgcccacgcgtccgcccacgcgtgcgcccacgcgtccggttgcaagggataacataacagagtttcgttgaatctgcactaagaccctacgcgcacatcttgcaactccaatcgacatagcagcaatgtctacgctcgaaattgaagctcgagatgtcatcaagattgtgcttcagttttgcaaagaaaattcgttgcatcagacttttcagatgctgcagaacgaatgccaggtttctctgaacaccgttgacagcattgagacctttgttgctgatattaatagtggaaggtgggatgcaatattgcctcaagtttctcaactcaagcttcccaggaataagttggaggatttgtacgagcagattgtattagaaatga

SEQ ID NO: 27489 - DNA, 375 bp, Glycine max
  Clone ID: LIB3051-051-Q1-K1-H6
gtgttttgttagttcacacactaagttctgaaaaatgagttccaaagtttttgttatgctacttatgttcatggccactatacttttgatctcctctgaggttgcacccgatgatgcataccagaattttgacaaaacagatgggaagcgtagtgcaaatggggtagatgaaagcaaatattggcgtggtggctatggcgactatggtggttggcgtggtggtggttggcgtggtggctatggaggctggcgtggtggctatggtggtgggcgtggtggctatggtggctggcgtggtggctatggtggtgggcgtggtggctacggaggttgcggtggtgggcttgggcctaacgaacataatgaggctgggat

SEQ ID NO: 27490 - DNA, 170 bp, Glycine max
  Clone ID: LIB3051-052-Q1-K1-G9
cggacgcgtgggcttacgcgtggggttaacttacttaatcaagtagttgtggaatggcagggttaaaggaaaaataacggcggccactctcgatcagaaacatatgaggctcttcagtttcttgagaatgagctgaaggacaagaagttttttggaggagaggaatttgg

SEQ ID NO: 27491 - DNA, 433 bp, Glycine max
  Clone ID: LIB3051-053-Q1-K2-A9
cacttttctctttgattcatcaatggcaaccgcgaggaccgtgaaggatgtttcgcctcacgatttcgtgaaggcgtacgcctcccatctcaagcgttccggcaagatggagcttcctgagtggactgatattgtaaaaacagcaaaatttaaggaattggctccatatgatcctgactggtattatgttagggctgcctcaatggcaagaaagatttatttgagaggcggtcttggtgttggggctttccagaggatctatggtggaagcaagagaaatggaagccgtcccccacatttctgcaagagcagtggggctattgcaagacacattctgcaacaattgcaaaacatgagcattgttgagattgatacaaaaggaggtatgaaaatcacatctagtggtcgaagggatcttgatcaaattgctggg

SEQ ID NO: 27492 - DNA, 408 bp, Glycine max
  Clone ID: LIB3051-053-Q1-K2-B2
gaaagctggaaggagataagaaatgataatacagttacttggttagcctattggagtgaccctatcaatcccaagttattcaaatatgtatttctggctgctagtagttccttgaaggggcaaagcgacaaggaaaagtatgagaaagctaggatgttaaagaattatatagggaatattaggtctgcatacacaaaagattttaccagtaaagatattacaaagcagcaaattgctgttgctacttatcttattgataaattagctctgagggctggcaatgagaaggatgacgatgaagctgatacttgtggttgctgcacgttaaaagtagagaatgtgactagagaaccccccaacaaactgaagtttaacttccttgggtaagattctatcaagtatgaaaat

SEQ ID NO: 27493 - DNA, 428 bp, Glycine max
  Clone ID: LIB3051-053-Q1-K2-B8
attcgtccgggaaattagggttagggttgcagcgtcctccatcagcacccgtatataaatacccttttcccgcccacttgttctaccgtaatccttacgctctctcactcacaaacgcacactgaattcaaaaacatcgaaagagagaggcatggccgagcaaaccttcatcatgatcaagccagatggcgttcaaagaggccttattggcgagattattagcagatttgagaggaagggtttttacttgaaagggttgaaactcgttactgtggaccgtccttttgctgagaagcactatgctgatatgtctgcaaagccctttcttagtggatacgtggattacattgtctctggctcctgtagctgccatgatctggggagggtaagaatgatgttacaactggcccgaaagattatcggagcca

SEQ ID NO: 27494 - DNA, 373 bp, Glycine max
  unsure (1)..(373): unsure at all n locations
  Clone ID: LIB3051-053-Q1-K2-B12
agcatcatcatgtccaccgcagcgcagcccaaggccaagaaaacggcgtcgtccaagaagcccgtctcccatcctaccttcgccgcgatgatagcggaggcgatagcgagtctgaaggagagaaccggttcgagccaatacgcgataaccaaattcatcgaaggcaagcacaaggagttgcctccaacctacaagaagcttgttctcgttcatctcaagaagtctgttgctgctggcaagctcgttaaggtcaaaaaactctttcaagctcgcaccgactaagtctgctcctgttaaagccgctgctgctcccaagaagcccaccaaagctgcggctaagcccgccgncaagcccgcttccaagcccaaagct

SEQ ID NO: 27495 - DNA, 409 bp, Glycine max
  Clone ID: LIB3051-053-Q1-K2-C8
ctcgcactctctctacgcacgcctcaacatcccttctctgctccattcattatgtctccgtcgttggatcttccccccaagggtggcttcagtcttgatctatgccgaagaaacgcaatgcttcaaaacaagggcctcaaagccccaacctttctcaaaactggcaccactattgtcggtttagttttccaggatggtgtcattcttggagctgatactagggcaactgaaggacctatagtggctgataaaaactgtgagaaaatccattatatggcacccaacatatattgctgtggagcaggcacagcttgtgatacagaagctgtaacagacatggttagctcacagctgcaactacatcactaccatactggtcgggaatcaagagttgctacggcactgactc

SEQ ID NO: 27496 - DNA, 404 bp, Glycine max
  Clone ID: LIB3051-053-Q1-K2-D9
gaagaaaacctaagcttagaattagaaacaaagaaaagaagaaaggaaagaattgatcgttgaaaatgcagggaggaaagaaagcgggagagtccattaaggaaacagctacaaacattggtgcttctgccaaggctggcatggagaagaccaaggccactgtccaagagaaggcagaaagaatgacagcacgtgatccggtgcaaaaggagttggcaacccaaaagaaagaggcaaagatgaaccaggcggagctggacaagcaggcggcgcgtcagcataacacggcggccaaacagtccgccaccacggctgggcacatgggacatggccaccacaccaccggaaccgggactggaaccgccacgtattccaccaccggggaatatggtcagcccatgggg

SEQ ID NO: 27497 - DNA, 436 bp, Glycine max
  Clone ID: LIB3051-053-Q1-K2-E10
cggacgcgtgggcggacgcgtgggccgacgcgtgggttccattccgatctacatataatcattcataatgggtgttttcacattcgaggatgaaatcaactcccctgtggctcctgctactctttacaaggccctagttacagatgccgacaacgtcatcccaaaggctcttgattccttcaagagtgttgaaaacgttgagggaaatggtggcccaggaaccatcaagaagatcactttccttgaagatggagaaaccaagtttgcgcttgacaaaatcgaaagcattgatgatgcgaacttcggatacagctacagcgtggtttggggtgctgcattgccagacacggcggagaagatcacattcgacttcaaatatggtgcctggtccaaatgaaggttctgttgggaagctaactgtcaaatacgaaacaaa

SEQ ID NO: 27498 - DNA, 382 bp, Glycine max
  Clone ID: LIB3051-053-Q1-K2-F12
cttcttctcgtttttactttgacggtttctagagagagaaagtttgttatagagagagaaagcgcgctgctgcttcttctgctgctgcttcgacagtgagaagagagagagaagcgctcttctccgtaccgtttctagagagagaaactgatggccggagttaatccgaacggcgtcgccgattttccggcgactccaacgcacggcggacagttcattcagtacaacatattcggaaacctcttcgaggttacggcgaagtaccgtcctccgatcatgcctgtcggacgcggggcgtatggaatcgtttgctcgctggtgaataccgagaccaatgaactggtggcggttaagaagatagcgaacgctttcgacaatcaca

SEQ ID NO: 27499 - DNA, 343 bp, Glycine max
  unsure (1)..(343): unsure at all n locations
  Clone ID: LIB3051-053-Q1-K2-H9
gtttggttgtaagcagaaacttctctgttttaaatcattgtttgtgatttagctctatggtttttggttctgtttgtgattgaacagatgcagatcttcgtgaaaactttgaccggtaagaccatcacccttgaggtggagtcctccgacaccatcgataacgtgaaagctaagattcaagacaaggaagggatcccacctgaccagcagagacttatctttgcgggtaaacagcttgaggatggtcgaacccttggccgactacaacatccaaaaggaatccactctccacctcgtgcttcgcctcaggggtgcatgcannatcttgtcaagactttgactg

SEQ ID NO: 27500 - DNA, 367 bp, Glycine max
  Clone ID: LIB3051-054-Q1-K2-A3
cggcttcagaatggccttgagtgtggtggtgcatatctaaaatatctccgaccacaggaggctggatggaaatccaaggaatttgataatgaatctccatattctatcatgtttggtcctgacaagtgtggtgccacaaacaaagtacacttcattttcaagcataagaatcccaagagtggggagtatgttgaacaccatcttaagaatcccccttctgtcccgtctgacaaattatctcatgtgtacactgccattttgaagcctgacaatgagttgcaaattttgattgatggggaacagaagaagaaggtaaatttcttatctgctgatgattttgaaccccctcttatcccttccaagacaa

SEQ ID NO: 27501 - DNA, 426 bp, Glycine max
  Clone ID: LIB3051-054-Q1-K2-A9
cccacgcgtccgctgaaaatgagttccaaggttttgcttgttctacttatgttcttggcgcactatacttctgatctcctctgaggttgcacccgatgatgcatacgagaattttgacaaaatagatgggaagcctagtgcagatggggtagatgaaagcaagtattggcgtggcggctatggtggcggctatggtggtggttatggaggtgggcgtggaggctatggaggtgggcgtggaggctatggagggggacgtggtggatatggcggcggacgaggtggctatggtggcgggcgtggtggctatggcggcggccgtggtggcgggcgtggtggctatggtcctaatgaacataacgaggctggggttgatgctaaccttaacaactaagaaggcaactttctaaagcttatatatgggtt

SEQ ID NO: 27502 - DNA, 405 bp, Glycine max
  Clone ID: LIB3051-054-Q1-K2-C5
gcaattcccaatggcctccattttcaagctctcaacgccatctccagctgcttccttatcagaagcgcttcgccccagagattctcgcttcctctccttcaatccttcttccaacgctattaattacaaaattaacctctccgcttccctccgatccattcactccctccctcttaaaacctccttgcggatcaaatgctcccaaacagatgggaatggaagtcctgcaaagaggacagtgcttcatgatctttatgagaaagaaaggcagagtccatggtatgataatctctgcagacctgttacagaccttcttcctcttatagcaagtggtgtcagaggcgtcactagcaaccctgcgatttttcagaaagctatctcatcatcgaatgcttacaatgatca

SEQ ID NO: 27503 - DNA, 450 bp, Glycine max
  unsure (1)..(450): unsure at all n locations
  Clone ID: LIB3051-054-Q1-K2-C10
cccacgcgtccgcggacgcgtgggctcgcactctctctacgcacgcctcaacatccctgctctgttcacttgctttgcaggctccattcattatgtctccgtcgttggatcttccccccaagggtggcttcagttttgatctatgccgaagaaacgcaatgcttcaaaacaagggcctcaaagccccaacctttctcaaaactggcaccactattgtcggtttagttttccaggatggtgtcattcttggggctgatactagggcaactgaaggacctatagtggctgataaaaactgtgagaaaattcattatatggcacccaacatatattgctgtggagcangcacagctgctgatacagaggctgtaacagacatggttagctcacagctgcaactacatcgctaccatactggtcgggaaatcagagttgntacggcactgactc

SEQ ID NO: 27504 - DNA, 236 bp, Glycine max
  Clone ID: LIB3051-054-Q1-K2-D2
cccacgcgtccgacgaggccaaatatttaatgttgttgccaactccagaatgattgttagagttgcagacgtgcaaagagtacgataaggatgtgattttggattacctgaaagaactaatccttttcttgcaatattatgttgtgtgtacccataactccatgaatgcaactcgttgacctatctcaataaatgccgtttgtatttgttagtatttaaaaaaaaaaataatgatt

SEQ ID NO: 27505 - DNA, 413 bp, Glycine max
  Clone ID: LIB3051-054-Q1-K2-D6
cccacgcgtccgcgattgcaaaaatcgaaacgagtttcatgggcctccgatttagatctttgtcaggttaggctattcttatcagaggaatctccttcacaggttgggttaaattctcaagaccacgtccaagcaaagacatcattgctgttgcatccagatggagcaggttctgacgacattctgcctcctggatttgagggaactcatgctaaaagtcagtccgagattaagctatcccaaataccagttattaaatggattactcctccaaagggtacattggagagtttgagtacgttgatgatcacagagctggaaaaattgttgttgaattgaatggtagactgaacaaatgtggggttattagtccgcgttttgatgttggtgtcaaagagattgaatgttggact

SEQ ID NO: 27506 - DNA, 421 bp, Glycine max
  Clone ID: LIB3051-054-Q1-K2-E6
tgcatttctatttctaactaattattgtgcttattattattgttgagaaagaaaagaatggcaaagttaataaaattctttgagttgaacacaggggccaagattccttctgttgggttaggcacttggcaagctgagcctggtgttgtagccaaagctgtcaccacagccattctggttggatacaggcatattgattgtgctcaagcgtataacaatcaagcagagattggttctgctcttaagaagctttttgatgatggtgtggtgaagcgtgaggacttatggatcacctccaaactctggtgttcagatcatgcttcagaagatgtgcccaaagcattggataaaacattgcaggatttgcaacttgattaccttgacctctatctgatccactggccagtgcgcatgaaaagcg

SEQ ID NO: 27507 - DNA, 445 bp, Glycine max
  Clone ID: LIB3051-054-Q1-K2-F6
ggattcccggccgaccccgcgtccgcacacactaagttctgaaaaatgagttccaaagtttttcttattctacttatgttcatggccactatacttttgatctcctctgaggttgcacccgatgatgcataccagaattttgacaaaacagatgggaagcgtagtgcaaatggggtagatgaaagcaaatattggcgtggtggctatggcgactatggtggttggcgtggtggtggttggcgtggtggctatggaggctggcgtggtggctatggtggtgggcgtggtggctatggtggctggcgtggtggctatggtggtgggcgtggtggctacggaggttggggtggtggctttggccctaacgaacataatgaggctgggattgatgctagcctttacaactatatggaaacttgctaaagcttatataggatttaagtta

SEQ ID NO: 27508 - DNA, 353 bp, Glycine max
  Clone ID: LIB3051-054-Q1-K2-G9
acgctttgacacaaggcataagcctatccatattaacccatatgttcatccagactcggtcgagggacaactgtaacgaattgattcctgaatatttatgctcatccaagggtattgcggattccgaaaatctaccacttcacattttaagacaaatgttgcaacagaacaagaacttgaaagtcatcagaaagaacttcgataaaaaatgccctgagctcttctttgaaattgcagagaacaatgaggattacaacaagttctatgacgcttctttcaagaacttcaaactaggtatccatgaagattcacagaacataggaaagattgctgaattgctcaggtaccacttc

SEQ ID NO: 27509 - DNA, 363 bp, Glycine max
  unsure (1)..(363): unsure at all n locations
  Clone ID: LIB3051-054-Q1-K2-H11
cccacgcgtccggtttgtactgcacaagatagaagcagttgatgaggcaaacttgggatgatagctacagcgtagtgggtggtgctgcgttgccagacacagcggagaagatcacattccactccaaattggctgctggtcccaatggaggctctgctggcaagctcactgtcgaataccaaaccaaaggagatgctcagcccaaccaagaccaactcaaaactggaaaagccaaggctgatgctctcttcaaggccattgaggcttaccttttggccaatcccgattacaactaatccaattcgatcaacttcatgattatcatcactatctctcttgctgtntctgagactgcatatatct

SEQ ID NO: 27510 - DNA, 235 bp, Glycine max
  Clone ID: LIB3051-056-Q1-K1-B1
ccacgcgtccgcgtgttgcttgcgattcttaatcgaataattagcaatcaatcatcatgtcgacggggaaggatatctcactgaagagttcggacagcgatgctttcgaggtggacgaagcggtggctctggaagctcagacgataaagcacatgatcgaggacgactgtgcagatagcggcatacctctgccgaacgtgacgagcaagatcctggcgaaggtgatgagagtact

SEQ ID NO: 27511 - DNA, 405 bp, Glycine max
  unsure (1)..(405): unsure at all n locations
  Clone ID: LIB3051-058-Q1-K1-C5
accgccgagattcattcttcaccaattttnctcaaagaaacactacacatccatggcaactgctggcgtgcaagaagttcgtgttccccctctaacttccacctctgagccaccttctctctttgacggaaccaccaggttgtacatcagttatatttgtccctatgcgcagcgtgtttggatcactcggaactataagggactacaagacaagatcaaactggttcctattgacctacaaaacaggcctgcttggtataaggagaaagtctaccctgaaaacaaggtgccatcattggagcacaatggaaaagtcttgggtgaaagtctcgaattggtcaaatacatagatgacaactttgaaaggccgtctctagttcccagtgatcctgccataaaaagatt

SEQ ID NO: 27512 - DNA, 278 bp, Glycine max
  Clone ID: LIB3051-058-Q1-K2-A9
caggttttcctgtttgctaactcgaaatgtaagaggtatttccacaacaggttgaagccatcaaagctcacctggactgcaatgtacagaaagcaacacaagaaggacattgctcaagaagctgtgaagaaaagaagacgtgctgccaaaaagccttactccaggtccattgtcggtgccactttggaagttatccagaaaaagagagctgagaagccagaagttcgagatgcatatagggaaactgcccttcgtgaaattaaagagaggaacaagaa

SEQ ID NO: 27513 - DNA, 357 bp, Glycine max
  Clone ID: LIB3051-058-Q1-K2-C5
ccgagattcattcttcaccaaaacttcgcaaagaaacactacacatccatggcaactgctggcgtgcaagaagttcgtgttccccctctaacttccacctctgagccaccttctctctttgacggaaccaccaggttgtacatcagttatatttgtccctatgcgcagcgtgtttggatcactcggaactataagggactacaagacaagatcaaactggttcctattgacctacaaaacaggcctgcttggtataaggagaaagtctaccctgaaaacaaggtgccatcattggagcacaatggaaaggtcttgggtgaaagtctcgatttggtcaaatacatagatgacaacttt

SEQ ID NO: 27514 - DNA, 367 bp, Glycine max
  Clone ID: LIB3051-058-Q1-K2-E3
atatacacttgtactgttctattagttcatactaagttctgaaaatgagttccaaggttgtgcttgttctacttatgttcttggccactatacttctgatctcctctgaggttgcacccgatgatgcatacgagaattttgacaaaatagatgggaagcctagtgcagatggggtagatgaaagcaagtattggcgtggcggctatggtggcggctatggtggtggttatggaggtgggcgtggaggctatggaggtgtgcgtggaggctatggacggggacgtggtggatatggcggcagacgaggtggctatggtggcgggcgtggtggctatggctgcggtcgtggtggctggcgttgtggcta

SEQ ID NO: 27515 - DNA, 371 bp, Glycine max
  Clone ID: LIB3051-058-Q1-K2-G5
ctctctaccattgccatggatccctacaagcaccggccatccagcgccttcaattcgcccttctggactacaaattctggtgctcctatttggaacaacaactcctctttaaccgttggagctagaggtccaattctgctggaggattatcatcttgtggagaagcttgcaaattttgatagggaacgtatcccagaacgtgttgtccatgccaggggcgctagtgcaaagggtttctttgaggtcacccatgacatttctcacctgacatgtgcagatttccttcgagcccctggagttcagacgcctgtaattgttcgtttctcaactgtcattcatgagcgtggtagccctgaaaccttgagggaccc

SEQ ID NO: 27516 - DNA, 372 bp, Glycine max
  Clone ID: LIB3051-058-Q1-K2-G6
cggacgcgtacggccacgcgtccgggaggagcttgagaaggccatgtcaaccgatggatttgagatagtccagactctcattgttgatatagagcctgatgttaatgtcaagagagcaatgaacgagattaacgcatctgctagattgaggttggctgcaaatgacaaggctgaagcagaaaaaatactgcagatcaaaaaagctgagggagaagcagaatccaaatatctgtcaggactcggtatcgctcgccaacgtcaagccattgaggatggactgagggacagtgtgcttgctttctctgagaacgtgcctgggacaacagctaaagatgtcatggacatggtgctggtgactcaatactttgacac

SEQ ID NO: 27517 - DNA, 350 bp, Glycine max
  Clone ID: LIB3051-058-Q1-K2-G7
attcgaccactggtggttctgaagctggtatttccaaggatggacagactcgtgagacatgctctgctttcattcaccctaggtgtgaaacagatgatgagctgctggaacaaagtggatgctactacacccaagtattccaaggccagatgtgatgaaattgtgaaggaagtctcttactacttgaagaaagtatgatacaaccctgacaagattccttatgttcctatctgtgattacgagggatacatcatgattgagaggtccacaaaccttgactgatacaagggtccaactctgcttgatgcacttgaccagattagtgagcccaagatgccctctgacaagcc

SEQ ID NO: 27518 - DNA, 240 bp, Glycine max
  unsure (1)..(240): unsure at all n locations
  Clone ID: LIB3051-058-Q1-K2-H3
ctacgggagttgtcctcctcgtactctgctcaataagctgtctcagggcagttatctcaccactcaggagcaatggttcaatcaaaccctcgatcacttctctccctatgatcaccatcaattccgtcaacgttacttcgagtttctagactatttccggattcctgatggaccaattntcttggtaatcggtggtgaaggtccatgntatgggataacaaatgactatattggtgtact

SEQ ID NO: 27519 - DNA, 386 bp, Glycine max
  Clone ID: LIB3051-058-Q1-K2-H5
ctcctctgtctctctctctccaccattgccatggatccttacaagctccggccatccagcgccttcaattctcccttctggactacaaattctggtgctcctgtttggaacaacaactcctctttaaccgttggagctagaggtccaattctgcttgaggattatcatcttgtggagaagcttgcaaactttgacagggaacgtatcccagaacgtgttgtccatgccaggggagctagtgcaaagggtttctttgaggtcacacatgacatttctcacctgacatgtgcagatttccttcgagcccctggagttcagacgcctgtaattgttcgtttctcaactgtcattcatgagcgtggtagccctgaaaccttggaggaccc

SEQ ID NO: 27520 - DNA, 355 bp, Glycine max
  Clone ID: LIB3051-058-Q1-K2-H7
gagaaaacccccaaccccaacctcaaccttaacctctcctcactttcttttcaaccagaactatgattaagctttttaaagtaaaggaaaaacagagagaactggcagaaaatgcgagtggcggaccacccgttaagaagcaaagtgccggcgagttgcgtcttcacaaagatataagcgagctgaatctaccaaaatcatgtaccatgcaattccccaatggcaaagatgacctgatgaactttgaagtttcaattcgacctgatgatggatattacttaggtggcacatttttgttttcctttcaagtgtctcccatctatccacatgaagcaccaaaggttaaatgcaagac

SEQ ID NO: 27521 - DNA, 386 bp, Glycine max
  unsure (1)..(386): unsure at all n locations
  Clone ID: LIB3051-059-Q1-K2-A5
ctttcatatccaaattccaatgcttcttcttccttcttatttcaatttcaatcactactattattactctttcacgcttttgcttctcgatttttaaaccctaaatctatctatctgtctaatagataagatagggcaaaaacataacanaacataataaaaccctagccaaagaaagaccttgttgagcagcagcagcagagagagagaggcttatggaaggagtaccgcacccaatacccagaactgtcgaagaggttttcaccgattntaagggcagacgcgctggtttgattaaggccctcactactgacgttgaaaagttttaccagcagtgcgatcccgagaaggagaatttgtgtctatatgggtttccaaatgaaaca

SEQ ID NO: 27522 - DNA, 375 bp, Glycine max
  Clone ID: LIB3051-059-Q1-K2-A12
aaaaccctaatttctcgaaaggtatggttttgcatagcctactcctcctctcacggtttcttctttctatcttctcacctttcttcttccactggtctaatctaagatgggcaagtcaagcaagaaatcacctctcaaggtcgacgcttttccagctgtggttcccccatccaagtctgccaagaatggaggcaagagacaagctcatgatgaaattgactagcaattgagtgccaaaaaacagaagattaatgaggttgctcagaaacaaaaggaggcaaaggtgcacaagaaggaaagtagctcagatgattcttcttcagaatctgaagatgagaaacctgcacccaaatctgctgatctttcaaaaaagat

SEQ ID NO: 27523 - DNA, 437 bp, Glycine max
  unsure (1)..(437): unsure at all n locations
  Clone ID: LIB3051-059-Q1-K2-F5
cccacgcgtccgctgagggagaggagagcattttcatttttcaacttgagagaagaagagaaggggaaaaggaaaaaaaggcaaaatgggtaaggatctgagcgatgagcaagtgtcttcaatgaaggaagctttctctttattcgacacagacggtgacggtcggatcgcgccgtcggagctggggatcctgatgaggtctctgggagggaacccgactcaggcccaactcaaagccatcgtggccgaagagaacctcacggctcccttcgacttcccccgattcctcgatcttatggccaaacacatgaaacccgaacccttcgatcgccaactccgcgacgccttcaaggtcctcgacaaggactccaccggcttcgtcgccgtctccgagctccgncacatcctcaccaacatcggcgagaagctcgagccct

SEQ ID NO: 27524 - DNA, 413 bp, Glycine max
  Clone ID: LIB3051-059-Q1-K2-F12
cggacgcgtgggttgtactgttctattagttcatactaagttctgaaaatgagttccaaggttttgcttgttctacttatgttcttggccactatacttctgatctcctctgaggttgcacccgatgatgcatacgagaattttgacaaaatagatgggaagcctagtgcagatggggtagatgaaagcaagtattggcgtggcggctatggtggcggctatggtggtggttatggaggtgggcgtggaggctatggaggtgggcgtggaggctatggagggggacgtggtggatatggcggcggacgaggtggctatggtggcgggcgtggtggctatggcggcgggcgtggtggcgggcgtggtggctatggtcctaatgaacataacgaggctggggttgatgctaaccc

SEQ ID NO: 27525 - DNA, 441 bp, Glycine max
  Clone ID: LIB3051-059-Q1-K2-G5
gcctgagccaccaccagagggtcgcttgcccgatgccactaagggttctgaccatttgagagatgtgtttggcaaagctatggggcttactgaccaagatatcgttgctctatctgggggtcacactattggagctgcacacaaggagcgttctggatttgagggtccctggacctctaatcctcttattttcgacaactcatacttcacggagttgttgagtggtgagaaggaaggtctccttcagctaccttctgacaaggctcttttgtctgaccctgtattccgccctctcgttgataaatatgcagcggacgaagatgccttctttgctgattacgctgaagctcaccaaaagctttccgagcttgggttgctgatgcctaagcaacgtttaggggattgttgaaaaggcatggtggccataaatattctttaaaa

SEQ ID NO: 27526 - DNA, 360 bp, Glycine max
  Clone ID: LIB3051-059-Q1-K2-H4
cctcagcttcgggtgattcagaaaagtagcccctgatcggcgggagtcctcgaccgagtttttccgccggggcgggaagcggcttctgtgcgaaattcaccggcggaagatctcctcgccggcttaatctccgacggctccggcgacggtttcggccactgcgccgatgccgttgactgcgataccgatcatatcgccgtctaactccggccaggagcaggtgacgtcgtcgaactcatcgccggtcgagcttctagacgagaacgagcgactgaggaaagagaacgttcagctaatgatagagctcccggagatgagatcgctctgcagcaatatttactctctcatgtcaaattacgc

SEQ ID NO: 27527 - DNA, 325 bp, Glycine max
  Clone ID: LIB3051-059-Q1-K2-H5
aattgatgtaacgagtgtttcctttcttatttcctttttccacagaattgtgagagccagttgatgtctttgtatgtcacttcatcaataaatcaatatgttataataataaaagaaagcatcatttataaaaaaaaaaaaaaaaaaaaaaaaaaaaaaaaaaaaaaaaaaaaaaaaaaaaaaaaaaaaataaaaaaaaaaaaaaaaaaaaacaaaaacatgcaataaaaataaaaaaacaaatataactaaaaagaataaaaaagaaataccaaagataaatggcatcccatttaaaaatcctcgacatcacctaacgacttat

SEQ ID NO: 27528 - DNA, 424 bp, Glycine max
  Clone ID: LIB3051-059-Q1-K2-H9
gccagctagcgcttcttctctcgcattccgtggagatctagtgctgccaaacctggctgaaaattagggtttcgtttcggaggtagacgaagatgttcggaagggcaccgaagaaaagcgacagcaccaggtactacgaaatcctcggcgtttcgaagaacgcttcgccggatgatttaaagaaggcttacaagaaagccgccattaagaaccaccctgacaaaggcggtgatcctgagaagttcaaagagcttgctcaagcctatgaggttctgagtgaccctgagaagcgtgaaatttatgacacatatggagaagatgctcttaaggaaggaatgggtggtggtggcggtggccatgatccatttgatatcttcagttctttctttggtggaagtccgtttgggtcaagtggtagcagtag

SEQ ID NO: 27529 - DNA, 332 bp, Glycine max
  Clone ID: LIB3051-060-Q1-K1-A10
attcccggtcgagcgcgcgtacgaaaacaaaaagtttacgttacaaatcgcataataaccgtcctaagtttattgagagaattttggaagtgtgagaaacatggcatctcgtcaaaacaacaagcaagagcttgatgaaagagcaaggcaaggagagactgttgtcccgggtggaactggtggcaagagcctggaggctcagcaacaccttgctgaaggaaggagcaagggagggcaaacaaggaaggaacagcttggtacagaagggtaccaggaaatgggacgcaaaggatggttgagcactgtggacaaatcaggagaagaacgtgctc

SEQ ID NO: 27530 - DNA, 453 bp, Glycine max
  Clone ID: LIB3051-060-Q1-K1-B2
cccacgcgtgcgcaaattagttcattctctttgcgcagttccctacctctcctttcaagaggcagatcttcgtcaagaccctcaccggaaagaccatcacccttgaggtggaaagctctgacaccatcgacaacgtcaaggccaagatccaggacaaggaaggaattcccccggatcagcaacgtctcatcttcgccggaaagcagctcgaggacggccgtaccctcgccgactacaacatccagaaggagtcaacccttcaccttgtccttcgtctccgtggtggcatgcagatcttcgtcaagactctcactggcaaaaccataaccctagaggtcgaaagctctgacaccattgacaacgtcaaggccaagatccaggacaaggagggaatccccccagaccagcaacgtctcatcttcgccggaaagcaacttgaggacgggcgcaccc

SEQ ID NO: 27531 - DNA, 425 bp, Glycine max
  Clone ID: LIB3051-060-Q1-K1-B8
cccacgcgtccggtgatatattatatcatatcacaatgtgtggcatacttgctgtgcttgggtgctctgattcatctcaagccaaaagggttcgcgtccttgagctttctcgcagattgaagcaccgtggtcctgactggagtgggctccaccaatatggtgataactatttggctcatcaaaggttagccatagttgatccagcttctggtgatcaacccctcttcaatgaagacaaaactgtcgtggttacggtgaatggagagatctacaatcatgaagaactcaggaaacagttgcctaatcacaccttccgtacaggaagtgactgtgatgttattgctcacctgtatgaagagcacggagaaaactttgtggacatgcttgatggtatattttcgtttgttctgctagatactcgtgac

SEQ ID NO: 27532 - DNA, 454 bp, Glycine max
  Clone ID: LIB3051-060-Q1-K1-C9
cccacgcgtccgggaaccctagctagggtttggaagaagctgatccgagaagatggtgcagcgtctcgcctaccgcaaacgccacagctatgctaccaaatccaaccagcacagagtcgtcaagactcccggtggcaagcttgtttatcagaccacgaagaagagggccagcggacccaagtgccctgtcactggaaagaggattcaagggattccacatttaaggccagcagagtataatagatcaaggttacacagaaaccgaaggactgtgaaccgtgcatatggtggtgtgttgtctggcagtgctgttagagaaagaatcattcgagctttcttggttgaagagcaaaagattgtgaaaaaggtcttgaagatccaaaagacaaaggaaaaacaagctttgaagggctgagttttgagaaagagtgataaagatctttttggagggatt

SEQ ID NO: 27533 - DNA, 357 bp, Glycine max
  Clone ID: LIB3051-060-Q1-K1-D4
gccacgcgtccgacttgaccagctatacttgatgcttaagtaggttagaagagcttcgcggcgaacaatggcagctgctcatgaagatgtgaagctcttgggcatcgtgggaagcccatttgtgagcagggatcagatcgcccttaagtagacgggagttgaatacatatttactggagaaaatctgtgcagcaagagtgatctgcttctcaaatacaaccctgatcacaagatggttacagtgcatgatcacaatgagcaagccatagcagagtctcttgagattgatgaatacattgctgagacatggaagaacaaccccatcttgacctatgatccttaccaaatagccttggc

SEQ ID NO: 27534 - DNA, 354 bp, Glycine max
  Clone ID: LIB3051-060-Q1-K1-D5
gccacacatccttcttgaccagctatacttgatgcttaagaaggttataagagattcgcgtcaaacaatggcagctactcaggaagatgtgaagctcttgggtattgtgggaagcccatttatgagcagggatcagatcgcccttaaggagcagggagttgaatacataatttactggaacaaaatctgtgcagcatgagtgatctgcttcttaaatacaaccttgatcacaagaaggttacagtgcatgatcacaatgagcaagccatagcagcagtctcttgagattcgaagagtacattgcatgagacatggaagaacaaccccatatggacctaagatccttaccaaata

SEQ ID NO: 27535 - DNA, 448 bp, Glycine max
  Clone ID: LIB3051-060-Q1-K1-E1
gtttgttgttgtaactcgttcttcttcttttgttgttctgtgtttgtgtttgttttttcgctcacctgaaaatgggttgctgcggtggtaactgtggttgcggaagctcctgcaagtgcggcaacggctgcggaggctgcaagatgtacccagacttgagctacactgagtcaaccaccaccgagaccttggtcatgggagtggcacctgttaaggctcaatttgagggtgctgaaatgggtgtgcccgctgagaacgatggctgcaaatgtggaccaaactgctcctgcaacccctgcacttgcaagtgaggtgttgggagagcaagcttcaagcagagatagcccttaattaggaataatgataaactattaatgtgtagctaaaaacttatgtattatgtctgtgatggttttcgtgcactctggtgttttgtgttaaacaaaca

SEQ ID NO: 27536 - DNA, 425 bp, Glycine max
  unsure (1)..(425): unsure at all n locations
  Clone ID: LIB3051-060-Q1-K1-G10
gctttatctgacccacgggtcacccatgagatccgcagtgtctggatatcatactggtctcaggctgaccgttctctaggccaaaagatagcttctcatctcagcacgaggccaaatatttaatgttgttgccaactccagaatgattgttagagttgcagacgtgcaaagagtacgataaggatgtgattttggattacctgaaagaactaatccttttcttgcaatattatgttgtgtgtacccataactccatgaatgcaactcgttgacctatctcaataaatgccgtttgtatttgttagtatttaaaaaaaaaaataantaannaaataattataaaaaaaaaaaaaaaaaaataaaaaaaaaaaaataaaaaataataaaataaaattaaaaataaaaaaaagggcggcccctttaaa

SEQ ID NO: 27537 - DNA, 451 bp, Glycine max
  Clone ID: LIB3051-060-Q1-K1-H8
acgcactcgttcgctgacgcatatttcagatactagtgatcaatcatcaacacggagctgactgtgttgcgctgtgaatccaccttcggcttccattggaggaccatttcctcctggaatagaaatactaccacacttttcttttttcacttctctaagttgctaagttaattgctccttcattttttcactcttcgttctcgcgtacccgtgtcacggtaactcgtggtgaagtgttcgaaaatgactgtcacacctaagatctcagttaacgatgggaaacttgttgtccatggtaagaccattctgactggagtgccagacaacgttgtgctgactccaggttctggaaggggtcttgtgactggtgcttttgttggtgccacagcttcacacagcaaaagtctccatgtgtttccaatgggtgttttagaggggctccggttcatgt

SEQ ID NO: 27538 - DNA, 326 bp, Glycine max
  Clone ID: LIB3051-060-Q1-K1-H9
atcgcgagcggccccctttttttttttttggttactcatccaacaaaactgtagaacgatgaagaattctgtccaacctatcatgacaatatattaagtgcaatcagaaattcactgaattttaagaaccactactcaaaagacacggtacgattttcccatggtactcttcagatataggcagcgaacgttctgccaattcttttttcagcaagagacaaggaagttaacactcaagtgtacatttttggagaattggcttttcctccaagctaacattccccaaaagttacttccattgcagagaaccttcttaagctggaact

SEQ ID NO: 27539 - DNA, 300 bp, Glycine max
  unsure (1)..(300): unsure at all n locations
  Clone ID: LIB3051-061-Q1-K1-A6
cccccagttgaaaaacccccagtgtacaagcccccagttgaaaaaccaccagtgtacaagcccccagttgagaagcccccacgttacaagcctccaattgagaaacccccaagttacaagcccccagttgagaagccaccagtatacaagcccccagttgagaagcctccaggggtcaagccaccaatagagaagcctaccgtttacaagccaccagtagagaaacctccagtttacaagcccncagtggagaaacctactatttacaagccacctgttgagaagccttcggtctacaag

SEQ ID NO: 27540 - DNA, 356 bp, Glycine max
  Clone ID: LIB3051-061-Q1-K1-C7
agcgagtgttctttcttcgtttcaacaccttaatttgcacacgctgcttcttcagcgtgagaaatggcacaagaaacctttctattcacatctgaatctgtaaacgagggtcaccccgacaagctgtgcgaccagatctctgatgcagtgctcgatgcgtgccttgaacaggaccctgacagcaaggttgcctgtgagacatgcaccaagaccaacatggtcatggtctttggagagatcacaaccaaggccaacgtagactatgagaagattgtccgtgacacatgccgcgaaattggattcatctttgatgatgttggtcttgatgctgacaaatgcaaggtgttggtcaacat

SEQ ID NO: 27541 - DNA, 247 bp, Glycine max
  Clone ID: LIB3051-061-Q1-K1-F7
tcctcttctttcatatttctgcctaacggtatcgagggaaaaaatttgcctgagaacacagatgccaagcaccgcactattgcgccaacaattgcggtttctttggcagcccttccacgcaaaatatgtgctccaagtgctaccgcgatttccaactcaaggagcagcaatctttcaacgccaagatggttctcaatcagtcgctggttccttcaccgccaccggcggtgatttttcagccgtcgtc

SEQ ID NO: 27542 - DNA, 437 bp, Glycine max
  unsure (1)..(437): unsure at all n locations
  Clone ID: LIB3051-061-Q1-K1-G5
ttcccgggnggaggcacgcgtgcggtccttattctctctggctttctctcttggactcgctcttcttctcatcaagcacagagttacagacgcaccgatcttccgattgtctttcgtcttggattatgagctcgaaagagagacccactcttggtggcacgcggattaagacccgcaaacgaaatattgctgcgccgctggaccctgcagcattctcggatgcagtggtccaaatttatttggataatgctggtgatctggaacttattgctaagagtattgaatcttcagaccttaactttttaagatacggtgacaccttttatgaggatgctttcactgggggtcgttcacaacctggaactaccaagcctgatgagggggaccgccacccatactctataatagagtgtgagcctaagcgtgaagtcatttta

SEQ ID NO: 27543 - DNA, 419 bp, Glycine max
  Clone ID: LIB3051-062-Q1-K1-A5
cctaagtctttgggaatagtgctgcaatggcttcaagtcaggaggaggtgacccttgggggagctactggaagcccatttgtgtgcagggttcatattgccctcaagttgaagggagttcaatacaaatatgtcgaagaaaatttgaggaacaagagtgaactgcttctcaaatccaacccagttcacaagaagattccagtgtttattcacaatgagaagtccatagcagagtctcttgtgattgttgaatacattgatgagacatggaagaacaatcccatcttgccttctgatccttaccaaagagccttggctcgtttctggtccaaattcattgatgacaaggtttttggtgcttcatggaaagctgttttcacagctgatgagaaagagcgtgagaagaatgttgaggaagca

SEQ ID NO: 27544 - DNA, 433 bp, Glycine max
  Clone ID: LIB3051-062-Q1-K1-B2
aacaaaagattaggttttgtgatgtcgggcatggagaggcttcagaggatgttcgcgggtgcaggtggagcgctgggccatcccccaccggattcccccaccctcgattcctccgagcaggtctacatctcctccctcgcccttctcaaaatgctcaaacacggaagagctggggtacccatggaagtgatgggtctgatgttgggggagttcgtggatgagtacaccgttcgcgttgtggatgtgtttgcgatgcctcagagtgggaccggtgttagcgttgaagctgttgatcatgtttttcagactaatatgcttgatatgttgaagcaaactggaaggccggagatggttgtggggtggtatcactcgcatcctggatttgggtgttggctttctggagtggacattaatacgcaacagagttttgagg

SEQ ID NO: 27545 - DNA, 356 bp, Glycine max
  Clone ID: LIB3051-062-Q1-K1-B11
catttctctacttgcgaagtgtacggaaagacgattggagcctttctccctaaagatagtcctgttcgtaaggatccggcatactatgttcttaaagaagacgagtctccttgcatttttggttctattgaaaaacagaggtggtcttatgcctgtgcgaaacagttgattgagaggctgatttatgctgagggtgctgaaaatggcttggagttcacaattgtgaggccttttaactggattggacctcgaatggatttcattcctggcattgatggtccaagtgagggtgttcctcgggttcttgcatgctttagcaataatcttctcagaggagagcccctcaagcttgtgga

SEQ ID NO: 27546 - DNA, 428 bp, Glycine max
  Clone ID: LIB3051-062-Q1-K1-C2
acatcttcacaaactagtaaatagtaatattattcttcgaatccattttattattcataatgggtgttttcacatttgaggatgaaaccacctcccctgtggctcctgctaccctttacaaagctctagttacagatgccgacaacgtcatcccaaaggctgttgatgccttcaggagtgttgaaaaccttgaggggaacggtggccctggaaccatcaagaagatcactttcgttgaggatggagaaagcaagtttgtgttgcacaaaatagaatcagttgatgaggcaaacttgggatacagctatagcgtagttggtggagttgggttgccagacacagtggagaagatcacattcgaatgcaaattggctgctggtgccaacggagggtctgctgggaagctaactgtcaaataccaaaccaaa

SEQ ID NO: 27547 - DNA, 370 bp, Glycine max
  Clone ID: LIB3051-062-Q1-K1-D9
ctcttttcactccctctgcatatatgatatattcttccataattctcatgtttaagacgttatagtttccttgaattctcgtctgggttcaacctgtttgatgtttagactgaatcagtttgaattagtggagaatatctgataccgaaaaaaagattcagctctttttcttgtttctttgtcacaatacttggatttttgagaatctggagacatgggttgttgtgtaagtaaagattcagagccacaacacaatggttacagacatggtggaactggtggagtgcacaaccagaagactcatgaacctttagtcaaccaatcaagagcacctgcaaatcaaccttatcatttacctgaaaagcatgct

SEQ ID NO: 27548 - DNA, 371 bp, Glycine max
  Clone ID: LIB3051-062-Q1-K1-D12
ctcagattgcaattgcctcttctcttctcccagaatcggtcactaatccgatatcatgaagctcgatacgactagtctcgaatcgtttcccacactgattgcacctcaaaacgacgtcgccggagaactctccgccgctccgttctttgaccttccgaattccaatgacttcgatgggttcttgaaagacgctattcagatggtgaagcccgcgaagggtactacaactcttgcttttatatttaaagagggtgttatggtagctgctgattctcgagctagcatgggaggatatatatcgtcgcagtctgtgaagaaaattatcgaaatcaatccgtatatgcttgggacaatggctggtggtgctgctg

SEQ ID NO: 27549 - DNA, 402 bp, Glycine max
  Clone ID: LIB3051-062-Q1-K1-E1
tttggtggtccggggttggggttggttttttctgtaacgtgaaaaatgtcttgctgcggtggtaactgtggttgcggaagctcctgcaagtgcggcaacggctgcggaggctgcaagatgtacccagacttgagctacactgagtcaaccaccaccgagaccttggtcatgggagtggcacctgttaaggctcaatttgagggtgctgaaatgggtgtgcccgctgagaacgatggctgcaaatgtggaccaaactgctcctgcaacccctgcacttgcaagtgaggtgttgggagagcaagcttcaagcagagatagcccttaattaggaataatgataaactattaatgtgtagctaaaaacttatgtattatgtctgtgatggttttcgtgcactctgg

SEQ ID NO: 27550 - DNA, 425 bp, Glycine max
  Clone ID: LIB3051-062-Q1-K1-E3
cccacgcgtccgcacacactaagttctgaaaaatgagttccaaagtttttcttattctggttaggttcatggccactatacttttgatctcctctgaggttgcacccgatgatgcataccagaattttgacaaaacagatgggaagcgtagtgcaaatggggtagatgaaagcaaatattggcgtggtggctatggcgactatggtggttggcgtggtggtggttggcgtggtggctatggaggctggcgtggtggctatggtggtgggcgtggtggctatggtggctggcgtggtggctatggtggtgggcgtggtggctacggaggttggggtggtggctttggccctaacgaacataatgaggctgggattgatgctagccctcacaactaagaaggaaacttgctaaagcttatataggat

SEQ ID NO: 27551 - DNA, 419 bp, Glycine max
  Clone ID: LIB3051-062-Q1-K1-H3
cccacgcgtccgaccagcgtccgcttcgttccttccccaacccaatcttcgccttcggccacagcaactcctccttcaggatcgctgccaacgttactttccatttttacccttcatcctctagaaaaaaacggctaacgcagcatctggtatggccgtccatgatgagtgcaagctaaagtttctggagctcaaagcgaaaaggacgtaccggtatatcgttgttaagattgaggataaatcgaagcaagttattgtggagaagctgggtgaccctgcaaatggctatcatgaattcactgccagtcttcctgctgatgagtgtcgatatgctggttatgattacgattttgtcactgacgagaattgcctaaagagcagaatcttcttcattgcttggttccctgatacatctacgg

SEQ ID NO: 27552 - DNA, 424 bp, Glycine max
  Clone ID: LIB3051-062-Q1-K1-H7
cttcgaatccattttattattcataatgggtattttcacatttgaggatgaaaccacgtcccctgtggctcctgctaccctttacaaagctctagttacagatgccgacaacgtcatcccaaaggctgtcgaagccttcaggagtgttgaaaaccttgaggggaacggtggccctggaaccatcaagaagatcactttcgttgaggatggagaaagcaagtttgtgttgcacaaaatagaatcagttgatgaggcaaacttgggatacagctatagcgtagttggtggagttgggttgccagacacagtggagaagatcacattcgaatgcaaattggctgctggcgccaacggagggtctgctgggaagctaactgtcaaataccaaaccaaaggagatgctcagcccaacccagacgacctc

SEQ ID NO: 27553 - DNA, 397 bp, Glycine max
  Clone ID: LIB3051-062-Q1-K1-H11
cccacgcgtccgcacaactactacaagtacttccttacaatcaaaaccaacaacaactatggcaagttatcaaaagcactacgatgatcagggtcgcaaggttgacgagtatggcaacgttgagaagcaaaccgacgaatacggcaaccctgttcatgctgctagtgtcacctatgtagccaccagaactgctgctggtggttacagtgatgacattaataagcaacatgataccaccaatgcctacggcgtagacactggtagacagcattctagtggtggctacgatggtgacactaataaacatcatggaactactggtggctataatgatgacaccaatagacatcatggaactaccggtgtctatggtatagacaccgataggcaacaacat

SEQ ID NO: 27554 - DNA, 428 bp, Glycine max
  unsure (1)..(428): unsure at all n locations
  Clone ID: LIB3051-063-Q1-K1-B2
gagcgtccgcntatattccattctctctgtgtatttccctacctctcccttcaagatgcagatcttcgtgaagaccctcaccggcaagaccatcacccttgaggtggaaagctctgacaccatcgacaacgtcaaggccaagatccaggacaaggaaggaatccccccggaccagcaacgtctcattttcgccggaaagcaacttgaggacggccgtacccttgctgactacaacattcagaaggagagtactcttcacctcgtcctccgtctccgtggtggcatgcagatcttcgttaagacactcaccggcaagaccataaccctagaggttgaaagctccgacaccatcgataacgtcaaggccaagatccaggacaaggagggtatccccccggaccagcaacgtctcatcttcgccggaaagc

SEQ ID NO: 27555 - DNA, 407 bp, Glycine max
  Clone ID: LIB3051-063-Q1-K1-B11
cccacgcgtccgtttctctcttctctctccacccaaaccctaactcccgacgctgttgccctctcgtatccgtcatgaaaggaggaaagtccaagaccgaatctaagagagccgatcccaaacttgctgtgaataagaagggagccgccaccaaggctaggaaacccgccggcaaggggaaggcagcgaaagaccctaacaagccaaagaggcctccaagtgctttcttcgttttcatggaggagttcaggaaggtattcaacaaagaacatcctgaaaacaaagcagtgtctgctgtgggcaaagctgctggagcaaaatggaagaccatgtctgatgctgaaaaagcaccttatgtggcaaagtctgagaaaaggaaagtggagtacgagaagaacatgagagcc

SEQ ID NO: 27556 - DNA, 396 bp, Glycine max
  Clone ID: LIB3051-063-Q1-K1-C12
cccactcgtacggtctttgctgttgtcttgtcttcttgctccaaaacatgggaacaagcaacactctaacattgaccacaacacacacaaagacaacatccttgctggtctgcaatcaaaacctatcaagctggcgttcgagaaccaagacacctgtgttcgagaaatgaagcccaagaaccggacaatcatgggcgctggaggccctgatgactaggacaataggtggacaccatggctgaaacctgttatgaaagagagcttctttgttcaatgcaagcttgacgctgattagcacaagagcgagtgcaacatgtattgcttagattgtatgaacggtgctctctgatctctctgcctcgattaccacatagatcaccgagctattcagattag

SEQ ID NO: 27557 - DNA, 437 bp, Glycine max
  Clone ID: LIB3051-063-Q1-K1-D5
tcggtgtgctgcctaagagcactaatgagtccagaatcaagggaaactttgatgtggttgacgggtctattccagaagaagtgatggataagttctctgaaattaagcaggatagactaattaagggcactttttttgttgacgagacctatggtgcctttaagaccgttgaagagctttgggatggtgaactctgagcaatatgcttcatagagatgttgacaaatgcactgctcctcaatcagattgattccgccttttacctgttaagatcttaaagctaccagctgtagtgattcaagtatgcttgagattttgagaagagctattgttcataataacacaaagtaaccgagacttatttttcatttataattgatgaatctttaattcaatctaaagaaaccagtgcagtgaattttaaaaaataatgttcc

SEQ ID NO: 27558 - DNA, 444 bp, Glycine max
  Clone ID: LIB3051-063-Q1-K1-E1
gtctctttcttcatagcatttggaaatttggctgatgacaccattaattttgaggcttttgcccacaagctggtacagtttggagagattcaggaaaaagttgtattgaaattttcacaagaggaatttcttacagcttggtcaactcaggtgcgtcctgcaacaactctgttggctgatgggtgtccatatttgtatgctatggtgcatgatagttcagtgtctacaataccaggtgattttgtcattggtgttaagttgacaaccataaacaatatgtgtgcatatgggcttaatcctggtatttcaggttctcgtcttttgggtaccattcctcagtctatttcacagcaaactgtttggaatcaaatggcaacagtgagaacaccattgaattttgattctagcaagcagagcttttgtcaattttctattgaccttctc

SEQ ID NO: 27559 - DNA, 428 bp, Glycine max
  Clone ID: LIB3051-063-Q1-K1-E2
agaagcttcagttagcagctagggttattgttgcaattgagaaccctcaggatatcattggtcaatgcgcaaggccttatggtcaaagagcggttctgaagtttgctcagtacactggtgctcatgctattgctggaaggcacactcccggtaccttcaccaatcagcttcagacttcgttcagtgagcctcgtctccttatcctcactgatccaagaacagatcaccagcctattaaggaagctgctcttgggaatattcccaccattgctttctgtgacactgattcgcctatgaggtatgtggacattggaattcctgccaacaacaagggaaaacacagcattggttgtctcttttggctccttgcaaggatggtattgcagatgaagggtacaattcgccctggcctcaaatgggatgtcatg

SEQ ID NO: 27560 - DNA, 412 bp, Glycine max
  Clone ID: LIB3051-063-Q1-K1-E3
attcaattttgcgtttctctgcctaaaaggattgaaagatgggtcaagcattcggttgctaccaagtcgatcagtcaaatgtggctatcaaggagcattttggaaaatttgatgatgtcctagagcctggatgtcactgcctgccttggtgtcttgggtaccagattgctggtagtctgtcgctgcgagtgcagcaacttgatgttcgatgtgagacgaaaaccaaggacaatgtctttgtcaatgtggttgcatctgtgcaataccgagctgtgtctgagaaagcatctgatgcattctataggcttaccaacacaagggagcagatccaatcatatgtttttgatgtcatcagggccagtgtaccaaagttggagttggattctgtctttgagcagaaaaatgatatagc

SEQ ID NO: 27561 - DNA, 440 bp, Glycine max
  Clone ID: LIB3051-063-Q1-K1-F7
ggacgtagtcaacgcgagctgatgactcgcgcttactaggaattcctcgttgaagaccaacaattgcaatgatctatccccatcacgatgaaatttcaaagattacccggacctgtcggccaaggctatagactcgagttggaaaaaaaaaaaaagttgttcgagatggcacgtacgaagcaaactgctcgtaagtccacaggaggaaaggcacctaggaagcagctcgcaaccaaggctgcacgtaagtctgcaccaactactggtggtgtgaagaagccacatcgttatcgtcctggtaccgttgctcttcgtgagattaggaaataccagaagagtaccgagcttttgatcaggaagctccccttccagaggctggttcgtgaaattgctcaggacttcaagactgatctgcgtttccagagccatgctgtgcttgc

SEQ ID NO: 27562 - DNA, 467 bp, Glycine max
  Clone ID: LIB3051-063-Q1-K1-G4
accgcccggaattccggtcgacgacgcgttcgccacaactactacaagtacttccttacaatcaaaaccaacaacaactatggcaagttatgaaaagcgctacgatgatcagggtcgcaaggttgacgagtatggcaacgttgagaagcaaaccgacgaatacggcaaccctgttcatgctgctagtgtcacctatgtagccaccagaactgctgctggtggttacagtgatgacattaataagcaacatgataccaccaatgcctacggcgtagacactggtagacagcattctagtggtggctacgatggtgacactaataaacatcatggaactactggtggctataatgatgacaccaatagacatcatggaactaccggtgtctatggtatagacaccgataggcaacaacatgggactactggtggctatgccggtgacactggtaggcaacatgggaaca

SEQ ID NO: 27563 - DNA, 392 bp, Glycine max
  Clone ID: LIB3051-063-Q1-K1-G12
cccacgcgtccgcccacgcgtccgcccacgcgtccggttaaacactcttcgtcatcgtcgtcgcaatgggacgtgtgatccgtgcgcagcgtaagggagcaggctcggtcttcaagtcccacacgcaccaccgcaagggccctgcccgcttccggagcctggatttcggagagcgcaacggctacctgaagggtgtcgtcactgacgtcatccacgatcctggccgtggcgcgcctctcgctaaggtcgccttccgccacccgttccgctacaagaagcagaacgagctcttcatcgccgccgagggtctctacaccggccagttcatctactgcggcaagaaagccaccctcgttgtcggcaatgtgttgcctcttcgatccattcctgaa

SEQ ID NO: 27564 - DNA, 369 bp, Glycine max
  Clone ID: LIB3051-064-Q1-K1-A3
cccacgcgtccgcccacgcgtccggcgatgcggatgaggcgccactcgatgtttccatgggcctgcgtgcctttggtattgtggggtgtggttcgtttagtggtgtcaagtcttgcgaacgtgagggtgcatgagtggtaatcgggatgtttttgttgcacggctccatgcttgcgcatgcaacgtgtgacatgcatccttttcattgtcaccttagccttcgtggcttaggtgctgacgattggttcctgtgttgcctacctaccaaacggtattcgtgtggctagtcagacccattccatccaggcctctttgttggggacgctggaggatttcaaagtcccacacgtgaaccacgttagtcggcca

SEQ ID NO: 27565 - DNA, 421 bp, Glycine max
  Clone ID: LIB3051-064-Q1-K1-A6
gcaaagcatccttcgtttcaatttctgtctctcagcgctatctgcaatcgagcctttcatctgcaaagggatccacaggccgaaggagaaatggggctgacattcacaaagcttttcagtcggcttttcgcgaagaaggaaatgcgaattctgatggttggtcttgatgctgctggtaagaccactatcctgtacaagctcaagctcggagagatcgctaccacaattcctaccatcgggttcaatgttgagactgtggaatacaagaacattagcttcactggttgggatgttggtggccaggacaagattcagaccttggggaggcactacttgcagaacacccagggtcttatttttgttgtagacagcaatgatagggacagagttgtttgagccagagatgagttgcataggatgt

SEQ ID NO: 27566 - DNA, 408 bp, Glycine max
  Clone ID: LIB3051-064-Q1-K1-B7
ctttcgtgcaaggtagctacagattcatctgggcaatcaaagggctatggctttgttcaatttgataatgaggaatctgcccaaaaggccattgagaagctgaatggaatgctgctgaatgataaacaagtgtatgtgggacccttccttcgcaagcaagagagagaaagtactgctgacaaggcaaagttcaacaatgtttttgtgaagaatctgtcagaatcaaccactgatgatgaattgaagaatgctactggtgaatttggaactattactagtgctgtcgtaatgacggatggagatgggaaatcaaagtgctccggatttgagaattctgagaatgctgatgatgctgctagggctgttgatgctctcaatggcaaatagtatgatgactactaatggtat

SEQ ID NO: 27567 - DNA, 431 bp, Glycine max
  Clone ID: LIB3051-064-Q1-K1-D6
atcgttttctacataatacaaacctctctaatttttgaagcttattatacgcaatctcgatatgcagatcttcgtgaaaaccctaactggcaagacgatcaccttggaggtggagtcctctgacaccatcgacaacgtgaaggccaaaatccaagacaaggagggcattcctccggatcaacagcgtttaatcttcgccggaaaacagctcgaagacggcagaaccctcgccgactacaacatccaaaaggagtccacgctccacctcgtcctccgcctccgcggcggcatgcaaatcttcgtcaaaacccttactggcaaaacaatcacgctagaggtggagtccttcgacacaatcgataacgtgaaagccaagattcaagataaggaagggattcctccggatcaacaacgtttgatcttcgccggaa

SEQ ID NO: 27568 - DNA, 429 bp, Glycine max
  Clone ID: LIB3051-064-Q1-K1-E4
gagaaacatatggcagcactggatggctttaccgacttgaccggagcacagagcagcggggatatcggaaatctcgctcgctttgctggtgatgaacacaacaaataagagaatgcagttctggagactgtgagggtgattagtgcaaagaaacaagtggtatatggcaccttgtactatatcactttggaggcaaatgataggtgtgactaaaaaggtttatgaaactaaggtgttgtagaaaccatggctgaacatcaaggaggttcacgaattcaagcgcatcactgttgctgttgatcctctatcggtgacggtctaacacataactaggttatggaagtgactagcttggcctcaagagtcataatatgtatgaactgaataaatgtacctattaactctacatacggtcgcgggttgtgcatg

SEQ ID NO: 27569 - DNA, 422 bp, Glycine max
  Clone ID: LIB3051-064-Q1-K1-F8
acgcgtacgcacacgcgtgcgcacacgcgcgcaactcactcatccgtctactcatcagcccacgcttccgggtacacggggatcatcagcatcaatttatgagatatcaattgctaccgacgctcgtattattgagggtgatccttagaatgttgatcattctgctcttactggagaatcactccctgtaacaaagaattcctatgatgaacagtattccggatcaacggtcaagaaggattatatagaagcaattgagattgcttctggggatcacacctactatggcaaagcagatcatttggtggacagtaccaaccaaattggacacttccagaaagtgcttacagcaattggtaacttctgcatttagctaattgccgatggaatcgtcatccagctcatagtcatgtacccgattc

SEQ ID NO: 27570 - DNA, 436 bp, Glycine max
  Clone ID: LIB3051-064-Q1-K1-F9
agcattctttcgcaccttcgaaaatcaattttctgtctgctctgcgtcttcttcctctatgaatcgtttgccatggctcgtaccaagcataccgctcgcaaatccaccggtggaaaggctcctaggaagcaactcgccaccaaggctgcaaggaaatctgcaccgacaaccggtggagtcaagaagcctcatcgctatcgccctggaactggtgctcttcgtgagatccgaatataccaaaagagcacagagcttctgatccgcaagctccccttccagcgtcttgttcgtgaaattgcgcaagacttcaagaccgatttgaggttccagagtcacgctgttcttgcgcttcaggaagctgcggaggcttacttggtgggtttgttcgaggacaccaacttgtgtgcgaatcacgccaagagggtgaccatcatgc

SEQ ID NO: 27571 - DNA, 436 bp, Glycine max
  Clone ID: LIB3051-064-Q1-K1-G2
cccacgcgtccgcccacgcgtccgcccacgcgtccgcccacgcgtccgcccacgcgtccgcggacgcgtgggtaatcagcatcaagttaggagatatcattccggccgacgctcgtcttcttgagggtgatcctttgagtgttgatcagtctgctctgactggagaatcactccctgtaacaaagagtccctcggatgaagtgttttcgggatcaacggtcaagaagggtgagatagaagcagttgtgattgctactggggtgcacaccttttttggcaaagcagctcatctggtggacagcaccaaccaagttggacacttccagaaagtgcttacagcaattggtaacttctgcatttgctcaattgcggttggaatcgtcatcgagctcatagtcatgtacccgattcagcaccgcaggtacagggatggaat

SEQ ID NO: 27572 - DNA, 438 bp, Glycine max
  Clone ID: LIB3051-064-Q1-K1-G9
gggcaaactcctgaaacacctaccgttgatgtgagctcaaaagaattttatggtgagggatatgatgatggggacaagagaatccctgacatgaccataataaacaggcagcttggatggaatcccaagacttcactttgggacctgcttgagtccactctgacatatcagcacaggacatatgctgaagccgttaagaaagtcattgcaaaacccgttgcaagttaagctttttacagtgatggtgatgtgctacctttgagaagggtgttcttgtcttgcccaagtgttctgccatattatactggttgattttatataaaatcgtaaatgttcctcctattggtttcgttagcctgtaggcaatatagcccccacatggagaagtaggaatttatacaagggcaatctgtgctctatgtcattttaatgtagaga

SEQ ID NO: 27573 - DNA, 383 bp, Glycine max
  Clone ID: LIB3051-064-Q1-K1-H5
ctagtgttttgttagttcacacactaagttctgaaaaatgagttccaaaggttttcttaggctacttatgttcatggccactatacttttgatctcctctgaggttgcacccgatgatgcataccagaattttgacaaaacagatgggaagcgtagtgcaaatggggtagatgaaagcaaatattggcgtggtggctatggcgactatggtggttggcgtggtggtggttggcgtggtggctatggacgctggcgtggtggctatggtggtgggcgtggtggctatggaggctggcgtggtggctatggtggtgggcgtggtggctacggaggttggggtggtggctttggccctaacgaacataatgaggctgggaatgatg

SEQ ID NO: 27574 - DNA, 412 bp, Glycine max
  Clone ID: LIB3051-065-Q1-K1-B2
attcgctcgcattgcttcgcctcacaacagcagctgcagcagcaatggctcccaaacgaggtggaaaggctccggctcttgccgctaagaagaagcctgagaaggtcacgaatccgttgttcgagaagcgtccgaagcagttcggaatcggaggggcgttgcctccgaagagagacttgactaggttcgtgaagtggccaaagaatgttcaaattcagaggaagaagaggattctgaagcagaggttgaaggttcccccagctttgaaccagtttaccaaaactcttgacaaaaacctagcaacaagtctgttcaagttgcttctgaagtacaggcccgaggacaaagctgaaaagaaggagaggctcttgaaaagggctcaggcagaggctgaaggcaaaactgttgaagc

SEQ ID NO: 27575 - DNA, 428 bp, Glycine max
  Clone ID: LIB3051-065-Q1-K1-B5
cccacgcgtccgaagaggtcgagtttcacagcagcaatggtgtacgtcagggctcagaaatgaggagcctacttcaagagatatcaagtcaagttcaagagaagaagagagggaaaaaccgattaccgtgccaggattcggttgattaatcaggacaagaacaaatataacactccgaaataccgatttgttgttcgctttagcaacaaggacattgttgcacaaataatatctgctagcattgctggcgatattgttcttgctgcagcatatgcacatgagctgccacaatatggtcttgaagtagggcttacaaattatgctgcagcttattgcactggtctcctgttggcccgaagagtcctcaatacacttgaaatggatgaggagtatgaaggaaatgttgaggctactggagaggattattc

SEQ ID NO: 27576 - DNA, 437 bp, Glycine max
  Clone ID: LIB3051-065-Q1-K1-B9
tttctccaatttaatcaccattgtacaacctaattcccttcgtcgttttggattaacagggcaatggcacgtaccaagcagaccgctcgcaagtccaccggaggaaaggctccgaggaagcaattggcaaccaaagccggtcgcaagtcatccccggcgaccggcggagtgaagaagccccaccgcttcatgccaggaacggtggctctgagggagattcgaaagtaccagatgagcaccgaacttctgatccgaaaactgccattccagaggctcgtcagagaaatcgctcacgatttcaaaaccgatctccgctttcagagcaacgccgtttcggctcttcaggaagccgctgaggcttatctcgctggactctatgaggacactaacctctgcgctattcacgctaagcgagttaccattatgcccaatgacat

SEQ ID NO: 27577 - DNA, 324 bp, Glycine max
  Clone ID: LIB3051-065-Q1-K1-C5
ggaattttctcgatccctttctgatctgtgatctctgatctgtttgcgtgacttgatcttatgatacttgtgttactatatgattcttttattactctcacgccaatagattatcaacgatcgtgagactggaagatccaggggttttggatttgtgaccttcgcctcggagcagtccatgaaagacgccatcgaagggatgaacggccaaaaccttgacggccgtaacatcactgttaacgaagctcagtcccgtggtggcggtggcggcggacgcggtggaggtggtcgatatggtggtggtcgcagtggtggatatggtgg

SEQ ID NO: 27578 - DNA, 412 bp, Glycine max
  Clone ID: LIB3051-065-Q1-K1-C11
aaaaaaaaaatgcagccccaccagaaccctcccgcactggattccgacccgcagctcccggagatcaaaatccaccaccctgcctccccacgccaccatcacccttcctccgccggcgccgcgacccccacccccaccgccggcgcgcgtcgcaaaatcggcgtggccgtcgacctctccgacgagagcgcctacgcggtccgctgggccgtgcagcactacatccgccccggcgacgccgtgatcctgctccacgtcagcgctaccaacgtcctcttcggcgccgactggggctccatcgacctctccatcaacaccgaccccaactccgacgaggatgccgtcagcgccgtcaacaacagcaacgaccacaacagcaagcgcaagctggaggacgacttcgacgccttta

SEQ ID NO: 27579 - DNA, 423 bp, Glycine max
  Clone ID: LIB3051-065-Q1-K1-D9
gcataccagaattttgacaaaacagatgggaagcgtagtgcaaatggggtagatgaaaggaaatattggcgtggtggctatggcgactatggtggttggcgtggtggtggttggcgtggtggctatggaggctggcgtggtggctatggtggtgggcgtggtggctatggtggctggcgtggtggctatggtggtgggcgtggtggctacggaagttggggtggtggctttggccctaacgaacataatgaggctgggattgatgctagccctcacaactaagaaggaaacttgctaaagcttatataggatttaagttatcgtaataaatcaaacttcattggaagggtagttataatagatgtggagatctttcttcgctctggtcatataaaggaataatacttctctattaatttcctt

SEQ ID NO: 27580 - DNA, 426 bp, Glycine max
  Clone ID: LIB3051-065-Q1-K1-E12
attggaactgtgccagtgggacgtgttgagaccggtgtcttgaagcctggaatggtggggacttttgcaccaactggactgacaactgaagtcaagtctgtggagatgcaccatgaatctcttacagaggcacatcctggtgacaatgtgggattcaatgttaagaatgttgctgttaaggatttgaagcgtggttatgttgcctcaaactcaaaggatgaccctgcaaaggaggctgctaacttcacagcccaagtcatcatcatgaaccaccctggtcagattggaaatggctatgcccctgtcctcgactgccacacttctcacattgctgtcaagtttgctgaactcatgaccaagattgacaggcgatccggcaaagagcttgagaaggagcccaagtttttgaagaacggtgatgctggt

SEQ ID NO: 27581 - DNA, 438 bp, Glycine max
  Clone ID: LIB3051-065-Q1-K1-F6
cccacgcgtccgctgaaaagctcatgaaatatcagaacactcgcgggggaagagttgtactgcaccccatcaagaatgtcccctcagaatttgagcatgtggaaaagggggatgcattgtatgcaatggaattagctttgtctttggagaagttagtgaatgagaaacttctgaatgtgcacagtgtggcagatcgcaacaatgaccctcaaatggccgacttcattgaaagcgagtttttgtctgaacaggttgaatcaattaagaaaatttcagagtatgtggctcagttgagaagggttggaaagggtcacggtgtttggcactttgatcaaagacttcttgattaggaagatgctgcttaatcttgaatagccttattattagtcttcatttacatttggtcttttctgaaattctgggttgttttctaattta

SEQ ID NO: 27582 - DNA, 436 bp, Glycine max
  Clone ID: LIB3051-065-Q1-K1-F8
acgattctttcgcaccttcgaaaatcaattggctgtcttctctgcgtcttcgtcctctatcaagggttttccatggctcgtaccaagcaaaccgctcgcaaatccaccggtggaaaggctcctaggaagcaactcgccaccaaggctgcaaggaaatctgcaccgacaaccggtggagtcaagaagcctcatcgctatcgccctggaactgttgctcttcgtgagatccgaaaataccaaaagagcacagagcttctgatccgcaagctccccttccagcgtcttgttcgtgaaattgcgcaagacttcaagaccgatttgaggttccagagtcacgctgttcttgcgcttcatgaagctgcggaggcttacttggtgggtttgtttgaggacaccaacttgtgtgcgattcacgccaaaagggtgaccatcatgc

SEQ ID NO: 27583 - DNA, 325 bp, Glycine max
  Clone ID: LIB3051-066-Q1-K1-E9
cccacgcgtccgattcctcatcatagatgatggttggcaacagattgaaaataaagcaaaggatgctactgaatgtttggtacaagaaggagcacagtttgctactaggttgactggtattaaagagaatactaaatttcaaaagaaattacagaacaatgagcagatgtcaggtctgaagcatctagtacatggagcaaagcagcatcacaatgtgaaaaatgtatatgtatggcatgcactagctggttattggggtggagtgaagccagcagcaaccggcatggaacattatgacactgccttggcatatccagtgcagtca

SEQ ID NO: 27584 - DNA, 256 bp, Glycine max
  Clone ID: LIB3051-066-Q1-K1-F6
caaaagtgttccacttgagtgaaaagtagtgtgttaagaactaaacaatttttcaatggcgtgcaagaaacaagaggagcgagctgaggcagctgcgaaagttgctgccaaagaactcgaacaagtcaacagagaaagaagagaccgtgatttcggtgttgttgctgaacaacaacaacaacatcatcaggaagatcaacaaaaacgtggtgtaatcgggtccatgtttaaggcggtgcaagacacctacgagaac

SEQ ID NO: 27585 - DNA, 305 bp, Glycine max
  unsure (1)..(305): unsure at all n locations
  Clone ID: LIB3051-066-Q1-K1-H5
ctcatacattccttcttcttcttcttcttcttcttcttctttcacaatcacaatggcgcgaggggatctggatggtaaccccatcaagccacttacgatctgcatgatcggcgcttgcgggttcatcgggtcgcacctctgcgagaagcctatgtcccaaaccccttaaaccgtccttcgcctcgacctttacaaccaccagatccaacaccttctggattccggcgatttccaccttccttgggctggncgcattaactttcaacggcttaaccttaaacaacaattttggcttgaaaggctta

SEQ ID NO: 27586 - DNA, 461 bp, Glycine max
  unsure (1)..(461): unsure at all n locations
  Clone ID: LIB3051-067-Q1-K1-A9
gggagagtatcaaagctgtaatgaagcttcctaggcttcagaaccttgtaatgcagcatgtagggcattcagctggcgatctcatacatctcttgcaggggttacttagatatgacccctctgaaagacttacagccaaggaagctcttagacattccttctttatgagagatcaatttagaagataattcactttctaagctgctgcatcatcgttgaccttcctaagggattaactttagaagatgtgggcaaatgaactcacctgggtgatggctggtttttcctgcagctgtcttcactcctgctgaaaaatcctcatttaggaatttttgaattgatccgaattcaaagtacagaagaaaaaaatgctaatgttgtggtgaaaattgtagctttgtgctcacaaatttaattctccatttgagggtatgaaatnttaataatttattatagaaaaa

SEQ ID NO: 27587 - DNA, 460 bp, Glycine max
  Clone ID: LIB3051-067-Q1-K1-B9
atttcctctcagaaccctcgatcactcccacgcgctcctatatcctctccttcaccgtcgctcggtccggcgatcacaacaacatcgtcatcccatggcaaacgccgcatctggtatggcagtccatgatgactgcaagttaaggtttttggagctgaagacaaagaggacacaccgtttcatagtttttaagattgaggagcagcagaagcaggtcattgtggagaagcttggtgagccagcccaaggctatgaagatttcactgccagccttcctgctgatgagtgccgttatgctgtttatgattttgagtatctgactgaagggaatgtccctaaaagcagaatttttttcattgcatggtcccctgacacatcaagggtgaggagcaagatgatctatgcaagctccaaagacagattcaagagggagctggatggaattcaagtagagctgcaa

SEQ ID NO: 27588 - DNA, 410 bp, Glycine max
  Clone ID: LIB3051-067-Q1-K1-C6
cgaaattttctggagaggagtttgacaacttttctgccttagcagagaagttgcgttgtgaggatgactttggtcacacgctgaatgccaaactccttccaagaggagagtcatcagtttctgggcccgtagttaggctgttcaagccattcgatgaactttttgttgacttccaggatttcaatgtggaagctctagagaagtttgttgaggaatctagtacccctgttgttactgtctttaacaatgaaccgagcaatcaccctttcgttgtcaaattcttcaacagtcccaacgcaaaggcaatgttgttcatcaacttcacttgccgaaggtgcttaagctatcaaatcaaaataccctgaaactggttagccattttaaccacagggtggcaactttttggtggg

SEQ ID NO: 27589 - DNA, 368 bp, Glycine max
  Clone ID: LIB3051-067-Q1-K1-C8
attatgattcttccatttccattaaaaagaatatatcataaatgggtattttcacattcgaagacgaaatcacctaccctgtggctcctgctactctttacaaagctctagttacagatgccgacaacatcatcccaaaggctcttgattccttcaagagtgttgaaaacgttgagggaaatggtggccctggaacaatcaagaagataactttcgttgaggatggagaaaccaagtttgtactgcacaagatagaagcagttgatgaggcaaacttgggatatagctacagcgtagtgtgtggtgctgcgttgccagacacagcgtagaagatcacattccactccaaattggcttgctgtcccaat

SEQ ID NO: 27590 - DNA, 407 bp, Glycine max
  Clone ID: LIB3051-067-Q1-K1-D2
attatgattcttccatttccattaaaaagaatatatcataaatgggtattttcacatgcgaagacgaaatcacctcccctgtggctcctgctactctttacaaagctctagttacagatgccgacaacatcatcccaaaggctcttgattccttcaagagtgttgaaaacgttgagggaaatggtggccctggaacaatcaagaagataactttcgttgaggatggagaaaccaagtttgtactgcacaagatagaagcagttgatgaggcaaacttgggatatagctacagcgtagtgggtggtgctgcgttgccagacacagcggagaagatcacattccactccaaattggctgctggtcccaatggaggctctgttggcaagctaactgtcgaataccaaacc

SEQ ID NO: 27591 - DNA, 448 bp, Glycine max
  Clone ID: LIB3051-067-Q1-K1-D9
tatcgattctgatgaggctccactcgatgtttccatttgcctgcatgcctttggtattgtggggtgtggttcgtttagtggtgtgaagtcttgcgaacgtgagggtgcatgagtggtaatcgggatgtttttgttgcacggctccatgcttgctcatgcaacgtgtgacatgcatccttttcattgtcaccttatccttcgtggcttatgtgctgactattggttcctgtgttgcctacctaccaaacggtattcgtgtggctagtcagacccattccatccaggcctctttgttggggactctggaggatttcaaagtcccacacgtgaaccacgttagtcgtccatcataactgcttcctgtggcacacgtgtggtgattgttctctcggatgcggtgcatgcagtgaacgtgggtggtctagtgcccccacattgttccttaaaa

SEQ ID NO: 27592 - DNA, 459 bp, Glycine max
  Clone ID: LIB3051-067-Q1-K1-D11
tcgcccacgcgttcgcccacgcgttcggcatattcacatgagctgccacgatatggtcttgaagtaggacgtacaaattatgcagcagcttattgcactggtctcctgttggcccgaagagtcctcaaaacacttgaaatggatgaggagtatgaaggaaatgttgaggctactggagaggattattcagtggaacctgccgagagcaggaggccattccgtgcactccttgatgttggtcttgttaggactacaacaggaaatcgcgtctttggtgcccttaagggagctctggatgggggtttggatattcctcacagcgacaagaggtttgctgggtttgataaggagaagaaagagcttgatgctgaggttcatcgcaaatatgtttttggtggacatgttgctgcctatatgaagatcttggcagaagatgaaccagagaaataccagtcacac

SEQ ID NO: 27593 - DNA, 411 bp, Glycine max
  Clone ID: LIB3051-067-Q1-K1-E1
gaagaagagggaagaggaggaatcaaaggatgacccagttgactctgatgctgatgaggaagagggggatgctgatgaagctgggaatgactccgatgctgaatcaaagacggaagctggagaagacaccaaggaagagggtgtacatgatgaactctaggaagtttgcaaaacggataaagagtgagcggaagttatattccggaaagttatatctttttcagttgtagtgtttttttgtttttatttttccctagataagcagaccgtggaaaactgcaagtgaaagctggagcttttgcttcaatcacatttgactatttcactgattagaacaggcaaagatgtctcttttgggttgatctttttatgtttcgatcaattgaattttccattaaaaaaaaaataaaa

SEQ ID NO: 27594 - DNA, 405 bp, Glycine max
  Clone ID: LIB3051-067-Q1-K1-H1
ccggcttcaacatgcacagttacctgaagaagcaagagaacttgacaaggaggtgaggcagatgattgaggagaaagaagaagctgttcgcaaccaagactttgaaaaggctggagagctacgtgatagagagatggatcttaaggcacagatctcaacacttgtagagaaaggcaaggagatgagcaaggcagagactgaggcaggggatgaaggtcctattgtgactgaagctgacatacagcatattgtctcatcctggactggtattcctgttgagaaagtctcaacagatgaatctgatcgcctcctgaagatggaagagactttacataagcgagtcattggtcaggatgaagcagttaaagccattagtcgggctatccgtcgagctcgggttggact

SEQ ID NO: 27595 - DNA, 415 bp, Glycine max
  unsure (1)..(415): unsure at all n locations
  Clone ID: LIB3051-067-Q1-K1-H5
cccacgcgtccgggcatgcactagctggttattggggtggagtgaagccagcagcaaccggcggggaacattatgacactgccttggcatatccagtgcagtcaccaggcgtgctaggaaaccaaccagacattgtcatggacagcttggctgtacatggccttggcctagtgcacccaaagaaggttttcaatttctacaacgagctccatgcttacttagcttcttgtggagtagatggagtgaaggttgatgtgcagaacattattgagacccttggtgcgggacatggtggccgagtgtcacttactcgcagctatcatcacgcgcttgaggcttncattgctagcaattttactgataacggatgcattgcgtgtatgtgtcacaacactgatggactttatagtgctaa

SEQ ID NO: 27596 - DNA, 451 bp, Glycine max
  unsure (1)..(451): unsure at all n locations
  Clone ID: LIB3051-067-Q1-K1-H9
aattcaataccatttaccaaactcactcatcaattctcatctttcttctcactaactattaatggatcgtgtcgagcacagctggccaagtcatcaaatgcaaagctgcggtttcatgggaggcagggaagccacttgtgattgaagaagtagaggttgcgccaccacaagctggtgaagtgcgtttgaagatcctctacacctctctttgccacactgatgtttacttctgggaagctaagggccaaactccattgtttcctcgtatatttggtcatgaagctggagggattgtggagagcgtangtgagggtgtgactcatctgaaaccaggggaccatgcccttcctgtgtttaccggggagtgtggggactgccctcattgcaagtcagaggagagcaacatgggtgatcttctcaggatcaacactgataggggtgtcatgatcca

SEQ ID NO: 27597 - DNA, 465 bp, Glycine max
  unsure (1)..(465): unsure at all n locations
  Clone ID: LIB3051-068-Q1-K1-D3
ctccccaaacgcccctctctctcctccaatggccgaccagctcaccgacgaccagatcgcggagttcaaggaggccttcagcctcttcgacaaggacggcgatggttgcattactaccaaggaacttgggactgttatgaggtcacttggtcaaaacccaactgaggcagaactgcaggatatgataaacgaggttgatgctgatggcaacggaaccatcgatttcccagagttcctcaacctgatggctcgcaagatgaaagacaccgactcagaggaggagcttaaggaggctttccgtgtgtttgacaaggatcagaatggtttcatctctgcagctgagctccgccatgtcatgacaaatcttggggagaagctgacggacgaggaggtggatgagatgatccgtgaggcccttgttgactgtgatggacagatcaactattangagtttgtcaaagtcat

SEQ ID NO: 27598 - DNA, 382 bp, Glycine max
  Clone ID: LIB3051-068-Q1-K1-D12
cggacgcgtgggcggacgcgtgggcggactcgtgggaaaatggccaaatcaatcaaatgggttgagttgaacacaggggccaagattccttctcttgggttagggacttggcaagctgaacctggtgttgtagctgaagctctcaccacagccattcaggttggatacaggcatattgactgtgctagtgcgtataagaatcaagcagagattggttctgctcttaagaagctttttgatgatggtgtggtgaagcgtgaggacttatggatcacttccaaactctggtgttcagatcatgcaccagaagatgtgccaaaagcattggataaaacattacaggaattgcaacttgactatcttgacctctatctgatccact

SEQ ID NO: 27599 - DNA, 477 bp, Glycine max
  unsure (1)..(477): unsure at all n locations
  Clone ID: LIB3051-068-Q1-K1-E1
cttttctctttcctctctctctctctacgctttctcgtttgagatccctcaagggatccagtaactgaaggagcaatggggttgacatttaccaagctttttagccggcttttcgccaagaaggaaatgcgaattctaatggttggtcttgatgccgctggtaagaccaccatcctgtacaagctcaaacttggagagatcgttaccacaattcccaccattgggttcaacgtggagactgtggaatacaagaacattagtttcactgtctgggatgttggtggccaggacaagattcgtcccttgtggaggcactacttccaaaatacacagggtctcatttttgttgttgacagcaatgacagggacagagttgttgaggccagagatgagttgcacaggatgttgaatgaggatgaactgagagatgcagtattgcttgtatttgctaacanacaagatcttnccaatgcaatg

SEQ ID NO: 27600 - DNA, 394 bp, Glycine max
  Clone ID: LIB3051-068-Q1-K1-E9
cccacgcgtccggtacttcttttcaccacgggaccggaaatacccgaacggttccagggggaaccgggcggcgggaaccggttactggaaggcaaccggggcggataagcccattggccaccccaaaccggttgggataaaaaaagctttggtgttttacgcagggaaagctccgaaaggggacaagagcaattggatcatgcacgagtatcgtctcgccgatgtagatcgctccgttcgcaaaaagaacagcctaaggttagatgattgggtgctttgccgtatttacaacaagaagggcacgatcgagaagttccaaccaagcagcgatgttgttgttagccgaaaaatggaatcatcggagatcgaagacaggaagccggagattctgaaa

SEQ ID NO: 27601 - DNA, 439 bp, Glycine max
  Clone ID: LIB3051-068-Q1-K1-F1
gcgcaatgttctagggttttattcattttccgatggcttctgcagatgttgagtaccgttgctgtgtcggtgggctcgcttgggccactgacgaccatgccctcgagagagccttctctcagtacggcgaaatcgttgaaacgaaggtctgtttgttgcaggcatcacatctgatctcacacgattcggattcggaattttctcgatcccgttctgatctgtgatctctgatctgtttgcgttacttgatcttatgatacttgtgttactatatgattcttttattactcacgccaatagattatcaacgatcgtgagactggcagatccaggggttttggatttgtgaccttcgcctcggagcagtccatgaaagatgcgatcggagcgatgaatggacagaacttggacgggcgtaatatcactgtcaatgaagctc

SEQ ID NO: 27602 - DNA, 473 bp, Glycine max
  unsure (1)..(473): unsure at all n locations
  Clone ID: LIB3051-068-Q1-K1-F2
cccacgcgtccggtgactttatcaagaacatgattactggtacctcccaggccgactgtggtgtccttattattgactccaccactggtggttttgaagctggtatttctaaggatggacagacccgtgagcatgctcttcttgctttcaccctaggtgtgaagcagatgatctgttgctgtaacaagatggatgccactacccccaagtactctaaggctaggtatgatgaaatcgtgaaggaagtctcttcttacttgaagaaggttggttacaacccagacaagattccctttgttcccatctctggttttgagggtgacaacatgattgagaggtccaccaaccttgactggtacaagggaccaactctccttgaggctcttgaccaaatcaatgagcccaagaggcccttcgacaagcctctaaggcttccattgcangatgtctacaagattggtggtattggtact

SEQ ID NO: 27603 - DNA, 330 bp, Glycine max
  Clone ID: LIB3051-068-Q1-K1-F3
gcgcccacgcgtacggtgactttatcaagaacatgattactggtgcctcccaggccgactgctgtgaccttgggattgactgcaccgctggcggatatgaagatggtgattctaaggatggacacacccgtgagcatgctcttcttgctttcaccctacgtgtgaaacaggtgatctgatgctgtaacaagatggatgccactacccccaagtactctaagtatacgtatgaagaaatcgtgaacgaagtctctagttactggaagaacgatggctacaacccatacaagattccctgggatgccatctctggcgttaaagttgacaaca

SEQ ID NO: 27604 - DNA, 464 bp, Glycine max
  Clone ID: LIB3051-068-Q1-K1-G5
cccacgcgtccgcgcgttggtgcaaagcatccttcgcttcaatctctctctgtctctttgcgctttctgcaaaccgaacatttcatctccaaagggatcaacaggtcgaaggagaaatggggctgacattcacgaagcttttcagccggcttttcgcgaagaaggaaatgcgaattctgatggttggtcttgatgctgctggtaagaccactatcctctacaagctcaagctcggagagatcgttactacaattcctaccattgggttcaatgttgagactgtggaatacaagaacattagcttcactgtttgggatgttggtggccaggacaagattcgtcccttgtggaggcactacttccagaacactcagggtcttatttttgttgtagacagcaatgatagggacagagttgttgaggccagagatgagttacataggatgttgaatgaggatgaactg

SEQ ID NO: 27605 - DNA, 354 bp, Glycine max
  Clone ID: LIB3051-068-Q1-K1-G11
cgccgagcagaaagcaaggatgggcgcagcggctagggaggcagctatggtggtggttatggaggggggctgtcaagctatggaggtggccgtgctagcttaacgctacctgaccaaaaaacactaaccggccgaactgcaccttgaggttccattcgagatggcagagtctaagaatcacacagcgcacaatcagtcctacaaggcccacaaaaacggcatcaagaaacccaagaggcatcgccacacttccaccaaagggatggatcccaagtgtctgaggaatcagaggtacgcgaggaagcacaacaagaagagcggcgaaattgccactgaggaagagtgaagtggcac

SEQ ID NO: 27606 - DNA, 475 bp, Glycine max
  Clone ID: LIB3051-068-Q1-K1-H3
cccacgcgtccgcacaactactacaagtacttccttacaatcaaaaccaacaacaactatggcaagttatcaaaagcactacgatgatcagggtcgcaaggttgacgagtatggcaacgttgagaagcaaaccgacgaatacggcaaccctgttcatgctgctagtgtcacctatgtagccaccagaactgctgctggtggttacagtgatgacattaataagcaacatgataccaccaatgcctacggcgtagacactggtagacagcattctagtggtggctacgatggtgacactaataaacatcatggaactactggtggctataatgatgacaccaatagacatcatggaactaccggtgtctatggtatagacaccgataggcaacaacatgggactactggtggctatgccggtgacactggtaggcaacatgggaacatcggtggcccttactatggaaccaacacc

SEQ ID NO: 27607 - DNA, 446 bp, Glycine max
  Clone ID: LIB3051-068-Q1-K1-H7
cccacgcgtccgcccacgcgtccgctcctcctaaagatgcagatcttcgtgagaactttgaccggtaagaccatcacccttgaggtggagtcctgcgacaccatcgataacgtgaaagctaagattcaagacaaggaagggttcctacctgaccagcagagacttatctttgcgggtaaacagcttgaggatggtcgaacccttgccgactacaacatccaaaaggaatccactctccacctagtgcttcgcctcacgggtggcatgcaaatctttgtcaagactttgactggcaagaccatcaccctcgaggtcgaatcctgggacaccattgataatgtcaaggccaagatccatgacaaggagggtatccctccagatcagcagaggttgatatttgctggtaaacaacttgaggatggaagaaccctggctgattacaatat

SEQ ID NO: 27608 - DNA, 439 bp, Glycine max
  unsure (1)..(439): unsure at all n locations
  Clone ID: LIB3051-068-Q1-K1-H10
cantcctctctcaagccctaatttccccttatttccatggccacagaatagcccactggggcggtggaacccgctcccgaacctgcctccgccgatcctcccccggaggagaaggaggagaccaaacctgaagccaaagctaagaaaaccaaggagcccaaacctaaaaaggtttccagacctcgcaaccctcccactcatccttcctacgaagagatggttaaagatgcaattacctcgctgaaggagaaaaccggttcgagccaatacgcgattgcgaagttcatcgaggagaagcacaagcagcttccaccgaacttcaagaagcttcttctctaccatttgaagaagctcgtcgccgccggaaaactcgtcaaagtcaaaggctcgttcaagcttccacctaccatacctgctgcatcttctttctcttcttttt

SEQ ID NO: 27609 - DNA, 260 bp, Glycine max
  Clone ID: LIB3051-069-Q1-K1-B10
atttgggctttgtcaagggtattgttgattctgaagatctcccactcaacatttcaagagaaatgttgcaacagaacaagatcttgaaggtcatccgtaagaacttggtcaagaagtgccttgagctcttctttgaaattgcagagaacaaggaggattacaacaagttctatgaggctttctctaagaacttaaagcttggtatccatgatgattcccagaacaagggaaagattgctgaattgctcaggtaccactcc

SEQ ID NO: 27610 - DNA, 424 bp, Glycine max
  Clone ID: LIB3051-069-Q1-K1-C1
cccacgcgtccgaccagctatacttgttccttttgaaggttagaagtgctacaatacaaagaatgggagctactcaggaagatgtgaagcttttgggtattgtgggaagcccatttgtgtgcagggtccagattgcccttaagttgaagggagttgaatacaaatttttggaagaaaatttgggcaacaagagtgatttgcttctcaaatacaaccctgttcacaagaaggttccagtgtttgttcacaatgagcagcccatagcagagtctcttgtgattgttgaatacattgatgagacatggaagaacaaccccatcttaccttctgatccttaccaaagagccttggctcggttcttgtccaaattcattgatgataagattgtgggtgctgtatcgaaatctgttttcacggttgatga

SEQ ID NO: 27611 - DNA, 420 bp, Glycine max
  unsure (1)..(420): unsure at all n locations
  Clone ID: LIB3051-069-Q1-K1-C5
tttacagagaagcgaagaggcgcagccgtagcagtaactcgtggaattgctagcagtggcgaggatcaaggtttacgagctgaggcagaagacgaaggctgatctgttgaatcagctgaaggacctcaaggccgagcttgccttgcttcgtgttgctaaggtcaccggcggtgcacctaacaagctctctaagatcaaggtggtgaggttgaacattgcccaggttttgacggtgatttctcagaagcagaaggccgcgttgagggatgcctacaagaacaagaagtacttgcctctcgatctccgncctaagaagaccagngccattcgcaggaagctaactaagcaccaggcatcattgaagacagagagggaagaagaagaaagagttatatttnccaactgaggaaatatgctatc

SEQ ID NO: 27612 - DNA, 451 bp, Glycine max
  Clone ID: LIB3051-069-Q1-K1-C12
tccgttctttgcttttctcgggctacgaaaaacgacgtcgttttcccaattttccccggcgagcgggaaatggtggagccggtggagcttcgcggcgaggagcagctctcgttgctgtcagattccagcaatggtgaccggtcgtggcggttgaacttcgacgggtttcagctatcttcggagcacacggagaagcaagtgaaaccccctcgcggactccatgactgttatggggttcttggtcaagaagataatattgcggagtactatcagcagcaggtagaagtgcttgagggctttactgaaatggatgctttagcaaagcgtggttttattcctggaatgtcaaaggaagagcaagacaagttagcaagaagtgagacttttgccattagagtgtcaaacgcaacaaacatggttctttttggtgccaaagtttatgcatcagtca

SEQ ID NO: 27613 - DNA, 313 bp, Glycine max
  Clone ID: LIB3051-069-Q1-K1-D4
gtactgttctattagttcatactaagttctgaaaatgagttccaaggttttgcttgttctagttagtgttcttggccactatggttctgatctcctctgaggttgcacccgatgatgcatacgagaattttgacaaaatagatgggaagcctagtgcagatggggtagatgaaagcaagtattggcgtggcggctatggtggcggctatggtggtggttatggaggtgggcgtggaggctatggaagtgggcgtagaagctatggacggggacgtggtggatatggctgcggacgacgtggctatggtggctg

SEQ ID NO: 27614 - DNA, 425 bp, Glycine max
  Clone ID: LIB3051-070-Q1-K1-B5
gcttattctctcgcattccgtggagatctagtgcttctgctgcaagacctggctgaaaggtagggtttcgattcggaggtagacgaagatgttcggaagggctccgaagaaaagcgacagcaccaggtactacgaaatcctcggcgtttccaagaacgcttcgccggatgacttaaagaaggcttacaagaaagccgccattaagaaccatcctgacaaaggcggggatcccgagaagtttaaagagcttgctcaagcctatgaggttctgagtgaccctgagaagcgcgagatttatgatacatatggagaagatgctcttaaggaaagaatgggtggtggtggcggtggccatgatccatttgatatcttcagttcattctttggtggaagtccgtttgggtcaagtggtagcagtagaggac

SEQ ID NO: 27615 - DNA, 410 bp, Glycine max
  Clone ID: LIB3051-070-Q1-K1-B6
cattctctctgtgtatttccctacctctcccttcaagatgcagatcttcgtcaggacccgcaccggcaagaccatcacccttgaggtggaaagctctgacaccatcgacaacgtcaaggccaagatccaggacaaggaaggaatccccccggaccagcaacgtctcattttcgccggaaagcaacttgaggacggccgtacccttgctgactacaacattcagaaggagagtactcttcacctcgtcctccgtctccgtggtggcatgcagatcttcgttaagacactcaccggcaagaccataaccctagaggttgaaagctccgacaccatcgataacgtcaaggccaagatccaggacaaggagggtatccccccggaccagcaacgtctcatcttcggcggaaagc

SEQ ID NO: 27616 - DNA, 406 bp, Glycine max
  Clone ID: LIB3051-070-Q1-K1-B11
cccacgcgtacgtgttgttgtaactcgttcttcttcttctgttgctctgtgtctgagtttggggtctctctcacctgaaaatgtcttgctgcggtggtaactgtggttgctgaagctcctgcaagtgcggcaacggctgctgaggctgcaagatgtacccagacttgagctacactgagtcaaccaccaccgagacctcggacatggtagtggcacctgttaaggctcaatttgagggtactgaaatggatttgccagttaaaaccgatgcctgcaaatgtggaccaaactgctcctgcaacccttgcacttgcaagtgaggtagttggaagagcaagcttcaagcagagatagcccttaattaggaataatgataaactattaatgtgtaccttatatcttatgt

SEQ ID NO: 27617 - DNA, 341 bp, Glycine max
  Clone ID: LIB3051-070-Q1-K1-C4
gtctgtcgctgcgagtgcagcaacttgatgttcgatgtgagacgaaaaccaaggacaatgtctttggcaatgtggttgcatctgtgcaataccgagctgtgtctgagaaagcatctgatgcattctataggcttaccaacactagggagcagatccaatcatatgtttttgatgtcatcagggccagtgtaccaaagttggagttggattctgtctttgagcagaaaaatgatatagcaaaggctgtggaggaggagcttgagaaggccatgtcaacctatggatttgagatagttcatactctcattgatgatatagagcctgatggtaatgtcaagaga

SEQ ID NO: 27618 - DNA, 425 bp, Glycine max
  Clone ID: LIB3051-070-Q1-K1-D4
gcgagcagtttcagacacagagagaggggtttgggattggagggattgacgctgcgtcggttcctgttctctttcgatccatccctcattcctaatcctccaatccaaccacctcagcctcacactcacatatacacatatctgaacgcgtatcgtccctcctatggcttcaaagcgcatcctcaaggagctcaaggacttgcagaaagacccaccaacttcttgcagcgctggtccagtagctgaggacatgttccattggcaagcaacaataatgggtcctgctgatagtccttatgctggaggtgtattcctagtcactattcacttccctccggattatcctttcaagcctcctaaggttgcctttaggactaaggtgtttcacccgaacatcaatagcaatggtagcatttgtcttgata

SEQ ID NO: 27619 - DNA, 467 bp, Glycine max
  Clone ID: LIB3051-070-Q1-K1-D6
cgggggaagagatccagcagcaatggtgtacgtcaaggctcagaaatcaaaaggctactggaagagatatcaagtcaagttcaagagaagaagagagggaaaaaccgattaccgtgccaggattcggttgattaatcaggacaagaacaaatataacactccgaaataccgatttgtggttcgctttagcaacaaggacattgttgcacaaataatatctgctagcattgccggcgatttagttcttgctacagcatattcacatgagctgccacgatatggtcttgaagtatgacttacaaattatgcagcagcttattgcactggtctcctgttggcccgaaaagtcctcaaaacacttgaaatggattaagagtatgaaggaaatgttgaggctactggagaggattattcagtggaaccctgccagagcaggaggccatttcgtgcacttcttgatgttggtc

SEQ ID NO: 27620 - DNA, 474 bp, Glycine max
  Clone ID: LIB3051-070-Q1-K1-E10
agcgtagttctgacgagcagataaatgtggaatacaatgcttcctacgtgtaccacgccttggttgcatactttgacagggacaacgtggctctcaagggatttgccaagttcttcaaggaatctagtgaggaagaaagagagcacgctgaaaagctcatgaaatatcagaacactcgcgggggaagagttgtacttcaccccatcaagaatgtcccctcagaatttgagcatgtggaaaagggggatgcattgtatgcaatggaattagctttgtctttggagaagttagtgaatgagaaacttctgaatgtgcacagtgtggcagatcgcaacaatgacccttaaatggccgacttcattgaaagcgagtttttgtctgaacaggttgaatcaatgaagaaaatttcagagtatgtggctcaattgagaaaggttggaaagggtcactgtgtttggcactttgatcaaagac

SEQ ID NO: 27621 - DNA, 380 bp, Glycine max
  Clone ID: LIB3051-070-Q1-K1-E11
caactctgatctgaggaaattggccgtgaatctcattcccttccctcgtctgcactgcttcagggttggatttgcgcctctcacctctcgcggctctcagcaataccgcgcattgacagtgccagagctgacacagcaaatgtgggatgccaagaacatgatgtgtgctgcagatccaaggcacgggcgttacctcacggcatcagccatgttccgtggcaagatgagcaccaaggaggtggacgagcagatgataaacgtgcagaacaagaactcttcatattttgtcgagtggattcccaacaatgtcaagtcgagcgtgtgtgacattgctcctagagggctctccatggcgtccacattcattggaaactcgacct

SEQ ID NO: 27622 - DNA, 403 bp, Glycine max
  Clone ID: LIB3051-071-Q1-K1-A3
tccacgcgtccggctggagaaaacctaaccttataattacaaacatagaagagaggagtggaaagaattgatcgttgaaaatgcaaggaggaaagaaagcgggagagtccattaaggaaacagctacaaacattggtgcttctgccaaagctggcatggagaagaccaaggccactgtccaagagaaggcagaaagaatgacagcacgtgatccggtgcaaaaagagttggcaacccaaaagaaagatgcaaagattaaccacgcggagcttgacaagcatgctgcacgtcagcataacacggcggacaaacagtacgccaccaccgctgggcacattggacatggtcaccacaccacctgtaccgggactggaaccgtcacctattccaccaccgtggaata

SEQ ID NO: 27623 - DNA, 413 bp, Glycine max
  Clone ID: LIB3051-071-Q1-K1-A8
gcgaaactaaagtcagcattcgaaaaagatgagtagcatcggtacaggttacgatctatcgggcaccactttctcccgtgatggccgcgttttccagatcgagtatgccgctcaagccgtcgacaacagcgggactgttattgggatcaagtgcaaagatggggctgtgttgggcgttgagaagcttattccgtcgaaaatgatgcttccgggttccaatagaagaatacactccgttcatcgtcactctgggatggctagagcaggattagcagctgatggcagacaaattgttgccagagctaagtctgaagctactaactatgacagcgcatatggcgaaccaattcctgttaatgaactagctgaccgtgtggctagttatgtgcacctctgtacgctatataggtggc

SEQ ID NO: 27624 - DNA, 428 bp, Glycine max
  Clone ID: LIB3051-071-Q1-K1-A11
gtcacaacttcattatgtttcatgtaataatctggaaatgcaagaagcttatcttgtcaatggcgtagatgtgttacgagaatggtatttgcacagtccagaggaagctcgccaattgagaaggaaagctctctctcgtattgaatggctgcaaaaagctgatgtgcctaccatatcacagatcgaagagttccattcgatgcatacgatgatgaatgctcctgattcaaatgataatatccatctactgttgagcattgatttgttgggcttacaatgaacaggtaaagcttttccaaacaagattgtttttgatgataaactttgtgttggctaactcacaagaattctttgatgggaatttttcactggaatcttgggttccaatttttgtgaattgtcttttttctgtaaataattacctttaa

SEQ ID NO: 27625 - DNA, 428 bp, Glycine max
  Clone ID: LIB3051-071-Q1-K1-B11
ggcttctgcggatgttgaataccgatgcttttttggtgggctcgcttgggccactgacaagtacgatctggagaaagccttctctcagtacggtgacgtcgttgaatcgaaggtccgcatcgcatatgatctgacacaattcggatccggaatttctccatcccgttctgatctgtgatctctgatctatttgcgttacttgttctatgatatgatacttgtgttactatatgattcttttattactcacgccaataggtacgttcatcttcatctttttgccaaagaagaagatcgatcggtttctattcggttctggattttgttttcgagctgttttgcttttcatttcaatttgatgaatccgttgtggttttatgtgtagattatcaacgatcgtgagactggaagatccaggggatttggat

SEQ ID NO: 27626 - DNA, 445 bp, Glycine max
  Clone ID: LIB3051-071-Q1-K1-C1
caagattggtgagaaacttgacccggctgacaagaataagattgaggatgcaattgagcaaggaatgcagtggttagacagcaaccagcttgcagaagcagatgagtttgaggacaaaatgaaggaattggaaagcatctgcaatccaatcattgccaagatgtaccaaggtggtgctggtccagacgtgggtggtgctggtgcagcagaggatgagtatgctgctcctccttctggtggaagtggtgctggccccaagattgaggaagtggactaaatgtagttgctttcctccagatacctgttttaaaaacttattttactttatgcttttttaattggattttaatcgcatgatttttgttggatgggattcaaactatttttcccttctgatatgaacgttgctttaagcattatggtatttggcgtattttcattatta

SEQ ID NO: 27627 - DNA, 414 bp, Glycine max
  Clone ID: LIB3051-071-Q1-K1-C3
ccaaaatcaatctgcggagtcagaaagccatggatccctacaagaatcggccatcaagcgccgtcaattctcccttctggactacaaattccggtgctcccatctggaacaataactcatcgctgactgttggatctagaggtccaattctgctggaggattaccatctggtggagaagcttgcaaactttgacagggaacggatccccgaacgtgttgtccacgctcgtggagctagcgcaaagggtttctttgaagtcacgcatgacatttctcacctcacatgtgccgatttccttcgagcccctggagttcagacccccctcatcgtccgtttctccactgttatccacgagcgtggcagccccgaaaccctcagggatcccagaggttttgctgtcaaattctacacca

SEQ ID NO: 27628 - DNA, 433 bp, Glycine max
  Clone ID: LIB3051-071-Q1-K1-E1
aactccctaccctattccgctttctctcatccatcatgaaaggaggaaagtccaagaccgaagctaagagagccgatgccaaacttgctgtgaataagaagggcgccgccaccaagactaggaaacccgccggaaaggggaaggcagcgaaagatcctaacaagccaaagaggcctccaagtgctttcttcgttttcatggaggaattcaggaaggtgttcaacaaggaacatcccgacaacaaagcagtgtctgctgtgggcaaagctgctggagcaaaatggaagacgatgtctgatgctgaaaaagcaccttatgtggcaaagtctgagaaaaggaaagtggagtacgagaagaacatgagagcttataacatgaaacaagcggaaagtcctactggtggggattaagaaaaatctgagaaagtctgatc

SEQ ID NO: 27629 - DNA, 341 bp, Glycine max
  Clone ID: LIB3051-072-Q1-K1-B6
cccacgcgtccgataataccaaaaaacaccatgatgcttggggagacccaccgcccgaatcgagaccgtacacgtgccaccgtgggcgccggagatcttctcaccatacaccggcaatgccgattactctccgtactccatgcaagaagcacttagtgcacttcagcactacaaatccaccgatgctgagtcagactcggaggttccgtctcggaaccgtaagtcccggtggacgcttactcctgcgaccatttccgcatgttcgagttcaaggttcggagatgcgcacgttgcaagtcgcatgactggaccgactgtccgtacgcccaccccggcgagaa

SEQ ID NO: 27630 - DNA, 440 bp, Glycine max
  Clone ID: LIB3051-072-Q1-K1-F7
cccacgcgtccgcccacgcgtccggctgagtttcccattttcgacaaggtggatgtgaatggtgacaatgctgctccactgtacaagtttctgaaatcaagcaaaggtggactctttggggatagtatcaaatggaacttctccaaattccttgttgataaggatgggaatgtcgttgaccgttatgcacccacaacttctcctctcagcattgagaaagacataaagaagctgctagatgcatgaataatgattagaataacatcatgaatgaataatgtactgcagatcagatattaattagtggaatttcctccgtatttgtactgaaacagttgctctgctcatgtacctctgaattactatttgcttggtcatctatataaaaatgtgtatcaatttatataaaatataatattattttttattttttattatat

SEQ ID NO: 27631 - DNA, 399 bp, Glycine max
  unsure (1)..(399): unsure at all n locations
  Clone ID: LIB3051-072-Q1-K1-G9
gagcgagcagtttcagacacagagagaggggtttgggattggagggattgacgctgcgtcggttcctcttctctttcgatccatccctaattcctaatcctccaatccaaccacctcagcctcacactcacatatacacatatctgaacgcgtatcgtccctcctatggcttcaaagcgcatcctcaaggagctcaaggacttgcagaaagacccaccaacttcttgcagcgctggtccagtagctgaggacatgttccattggcaagcaacaataatgggtcctgctgatagtccttatgctggaggtgtattcctagtcactattcacttccctccggattatcctttcaagcctnctaaggttgcctttaggactaaggtgtttcaccccgacatc

SEQ ID NO: 27632 - DNA, 450 bp, Glycine max
  Clone ID: LIB3051-072-Q1-K1-H8
cccacgcgtccgcccacgcgtccgccgcggtagcggtggatatggtggtggtggtggcggcggcggatacggtggtcgtcgtgaaggtggatacaaccgtaatggtgggggtggaggtggaggatacggcggtggtagagaccgtggttacggtggtgatggtggttctcgctactctcgcggtggggaaggcggtggatccgatggaaactggagaaattaggcatatgaccctgtaaattagggtttatgattaagttcaattattttaaggtgttgtctgtgtgtggtttaagtttcggtatctgtgttggtttcgtttcgtgttcctgtggttttcgtttttgacctacaattctagttgtgtttatagtcgatcgaatgaaatgataataagaaattatcgcattaaatttctatggattttgctatctggttggtggactttgg

SEQ ID NO: 27633 - DNA, 372 bp, Glycine max
  Clone ID: LIB3051-073-Q1-K1-G9
cttttcggcccacgcgtactgagcgagcagtttcatacacatagagaggtgtttgttattggagggattgactctgcatctggtccgcttctctttcgagccatccctcattcctaatcctccaatccaaccacctcatcctcacactcacatatacacatatctgaacgcgtatcgtccctcctatggcttcaaagcgcatcctcaatgagctcaatgacttgcagaaagacccaccaacttcttgcagcgctggtccagtagcttatgacatgttccattggcaagcaacaataatgggtcctgctgatagtccttatgcttgatgtgtattcctaatcactattcacttccctccggattatcctttca

SEQ ID NO: 27634 - DNA, 267 bp, Glycine max
  Clone ID: LIB3051-074-Q1-K1-A7
cttgatggctactttggcaaacttggtgcaggaagcaatgcttatattttgggtggccaagacgaagcacagaactggcatgtctactctgcttctgcagattctgtaactcaatgtgacaatgtttacactcttgagatgtgcatgactggcctggatagagagaaagcacaggttttctacaaagaacaatctgcttcagctgccatgatgactgttaattccggcattagaaaaattcttccagattccgagatttgggacttt

SEQ ID NO: 27635 - DNA, 390 bp, Glycine max
  Clone ID: LIB3051-074-Q1-K1-A12
cccacgcgtccgcccacgcgtccgctcatcctcctctgtctctctctctccaccatggccatggatccttacaagctccggccatccagcgccttcaattctcccttctggactacaaattctggtgctcctgtttggaacaacaactcctctttaaccgttggagctagaggtccaattctgcttgaggattatcatcttgtggagaagcttgcaaactttgacagggaacgtatcccagaacgtgttgtccatgccaggggagctagtgcaaagggtttctttgaggtcacacatgacatttctcacctgacatgtgcagatttccttcgagcccctggagttcagacgcctgtaattgttcgttctcaactgtcattcatgagcgtg

SEQ ID NO: 27636 - DNA, 460 bp, Glycine max
  unsure (1)..(460): unsure at all n locations
  Clone ID: LIB3051-074-Q1-K1-B5
ctgctcgtgcctctagggttatcatatctccatttccatttcctctctctcagtttcgaagaaggttaagctatgggaaagtcttacccaaccgtgagcgctgattaccagaaggccgttgagaaggcgaagaagaagctcagaggcttcatcgctgagaagagatgcgctcctctaatgctccgtttggcatggcactctgctggaacttacgacgtgagctcgaagaccggtggtcccttcggaaccataaagcacccctccgaactcgctcacggtgctaacaacggtcttgacatcgctgttaggcttttggagccactcaaagcggagtttgctattttgagctacgccgatttctaccagttggctggcgttgntgccgttgaggtcaccggtggacctgaagttaccttccatcctgtaagagaggacatacctgagccaccaccagagggtc

SEQ ID NO: 27637 - DNA, 431 bp, Glycine max
  Clone ID: LIB3051-074-Q1-K1-B10
agcagttgtggcttcgcaagactatcctgaaattacaaagtatgctggtttaggtggtgcccagagctcataggcaggaactcatccaggatcttttcaaacaatggcaagatccagtcagaggaacagtgactggtggaatgatcaaggaacttcttatatcttttaggagagctacaggacaaatgccacaacgcatcatattttatagggatggtgttagtgagggtcaattttatcaggttctactgtttgagcttgatgctattcgaaaggcatgtgcatccctggaacccaactatcagcctcctgtgacttttgtggtggttcaaaagcgtcaccacacaaggctctttgccagcaaccatcacgataagagttcttttgacaggagtggcaacatattgcctggtactgttgttgactccaaa

SEQ ID NO: 27638 - DNA, 425 bp, Glycine max
  Clone ID: LIB3051-074-Q1-K1-C7
gccacgcgttcgcacgccaaggcgtttaaggatgggagaaaaacacagcaacaacaacgtgatgagcagcaacaacaacaacagcaacatcaaccttcggtggacgagaaatacacgcagtggaagtcccttgttcctgtcctctacgactggctcgccaaccacaacctcgtctggccctctctctcttgccggtggggccctcagcttgaacaagccacttacaagaatcgtcaaagactctacctttctgagcagactgatggtagcgtgccgaatactctggtgattgcaaattgcgaggttgtgaagcctacggttgcagctgcagaacacatttcgcagtttaatgaagaggcacggtccccatttgagaagaagtacaagaccatcatacatcctggcgaggtgaacagaattaggga

SEQ ID NO: 27639 - DNA, 326 bp, Glycine max
  Clone ID: LIB3051-074-Q1-K1-E7
catttctccatttccattttctctctcacttttcaagaatcgtaagctatgggaaaggcttacgcaactgtgagtgctgattaccagaaggccgttgagaaggcgaagaagaagctcagaggcttcatcgctgagaagagatgcgctcctctaatgctccgtttggcatggcactctgctggaacctttgacaagggcacgaagaccggtggacccttcggaaccatcaagcaccctgccgaactggctcacagcgctaacaacggtcttgacatcgctgttaggcttttggagccactcaaggcggagttccctattttgagcta

SEQ ID NO: 27640 - DNA, 280 bp, Glycine max
  Clone ID: LIB3051-074-Q1-K1-F5
gatagttcgttgcatgcaaccatagttttattaggattttttcttctttgttttcaatgaggttgttttgttgctctccttcaaactccatctttccaaatcctctctttgcgattgtgttttgatctgcttcctactgcgatagtttctctactgttacatggccatggcggtttccgcaattggttttgaaagtttcgagaaaaggttggaaatatcctttttccagccgggactttttgctgacccttgaagaaagggtctaaaggctcttacaaaa

SEQ ID NO: 27641 - DNA, 422 bp, Glycine max
  Clone ID: LIB3051-074-Q1-K1-F9
ctccttctcaaactagtagtattattcttccattcataatgggtgttttcacattcgaggatgaaatcaactcccctgtggctcctgctactctttacaaggccctagttacagatgccgacaacgtcatcccaaaggctcttgattccttcaagagtgttgaaaacgttgagggaaatggtggcccaggaaccatcaagaagatcactttccttgaggatggagaaaccaagtttgtgctgcacaaaatagaaagcattgatgaggcgaacttgggatacagctacagcgtggttgggggtgctgcattgccagacacggcggagaagatcacattcgactccaaattggttgctggtcccaatggagggtctgctgggaagctcactgtcaaatacgaaacaaaaggagatgcttagccc

SEQ ID NO: 27642 - DNA, 432 bp, Glycine max
  unsure (1)..(432): unsure at all n locations
  Clone ID: LIB3051-074-Q1-K1-G2
cttcaatcagttgactcttcgttcctccctctattctttcggatggagcccatggacatcgtggggaaggccaaggaagacgcttctcttcctaaagcgacaatgacgaaaattattaaagagatgttgcccccggacgtgcgtgtcgccagagatgcacaggatttattgatcgagtgttgtgtcgagtntataaaccttgtctcgtcagagtccaatgaagtctgtaacanagaaganaggaagacgattgcaccggagcacgtgttaaagggcttaggggttcttggatttggcgagtacattgaggaagtttatgcagcatatgaacaacacaagttggaaacaatgcaaagatctttaaaaggtgcaaagtggagcaacagagctgagatgactgaggaagaagcattggctgaacagccaaagatg

SEQ ID NO: 27643 - DNA, 402 bp, Glycine max
  Clone ID: LIB3051-075-Q1-K1-C11
tgaaaagccacacatttataagcccgcagtacatcagccatccgtgtacagacctgcagtgggggaacccgcgatttacaagccacacatttgaaaaaccaccagttgagaaacccccatttgagaagcctgcagtatacaagctctcaattgaaaaaccaccagtgtacaagccaccagttgagaaccctccaatttacaaaccctcagttgaaaaaccaccagtatacatgcccccaattgataaacctgcagtttataagccaccagtagagaagccaccggttgagaagcctgcagtctacaagccaccatatggaaagtcaccatactcaaagtaccctccaattgatgacacccatttctgaaggatgtcaatgagtgtattaagtatatgctaaa
